United States Patent Application Publication US 2015/0315605 A1 - sequence listing, part 28

SEQ ID NO: 42363 - DNA, 625 bp, Zea Mays
cctagggctaagggtgcggacgtgtcatcgaaaaccatcatcgcaagccccaggcctagcaataaggtcgtgccacacggtagggactactacgaggaggaagatgacgatagcggcttcaggtcccaactgctgttggaaaacaaccatacaatgttctcgccaccgacgctactctacaactatcattcgcacaacaaggctacttctgaatcggaggctgggttcgcagcggagcatgacaatttctggtccaaatgaagctgaacaagacaacactggtacaagagactataagcatgaatacgaagatggctacgtacggcaatggtggtgaaggctacgacgaaaggattgcggcgatattacggttgatgaatggcatgatgtataattttcttgatggacaaaaggatatatacacctccgatctgttttgtccattgagcagcaatctatgtaatcttatgcctaatgaacaggctaaggatgttttagacacaactactctagttggcacaatgttggattcggaagggaaacattgtaaaacgttggttgcttccttgtgtacatgttgcgcgcagcattatattatatgtctattgtttgtcatggtggcata

SEQ ID NO: 42364 - DNA, 364 bp, Zea Mays
aaacacatcgaacgaatcatcactgtacattcccccatcacatctaatcctctgcatatgaatcctctgcatatgccaggccgggcatgcatggacagctactcctcatcatcccgctacagcttgccatctagctagcatcgcaccagcggcggtgcagtgcagccgcgcgcgcggcagtgcacattcattgtcacgccggcggccctgctgcacgcagctcgtcgcagcggcctcaccacgacgacgggcgcgcgagaattccattccctccgttctcgaatatggaaagtcgttccccagcgccctctcgccctctgctttgctgaaaaagagcccggtagttttacaccttttcttgcat

SEQ ID NO: 42365 - DNA, 3729 bp, Zea Mays
ccggaagaagccgcaccaggagcaaattcctcctctctcgagggcggttgcgtgctcgcgtgaagaaggccggggccctatctctccgatcgcggtagggcgttcgcagcgccgattcgagccgacgattggccgtccgcgaagccattaaattattcaaggtaccttttgatgcttcaatctgttttgaaaatatctaaattccattggacaaagaacacataagttctacactcggtttttctttagaagcagaagtactgaatctgttaaatggtacaacactgttgtcctttgctttgatggtaatgcatgaaattcgaacaccgacatgtcttctgcatcttcaggtttagtgagatctggcctctgcaatagtcacttccttgaaagcagatataaggattattatagttggagttcaatctttggggacatgaattgattctgttatttgtttgactccagtttggggcaatcacgggctttaggttgggtgaggtattgttgtttcaatgaattcaggtactcaggttagtgatagtttcagaatattgtagttacattgtggcggtgagtaagctcttaagtcttaactcatgatgagaaccttaattcattgggtactacatttactccttttttagaaaaaatatacatttatgtttttctttcttcccttagagtccatagcctgatatgcgtatttccttctctgtagctcttccattgtccaactgaactttggaagttcttctagagaattatctagctctcagtttttttcagatatttgcatttattacttcaaaaatttgaattgttctattaatgacattgcaggtactatttgaacactgaactaaaaattggagtttcttttcttatttgacatcttgatgtgccaaaatcaagctctcgttaaaggtcaaacaaatgggcaaaatttgggctctttgattagttttttcagtgttaagtggtgaatctactgtggtaaatgggagagctgatccagttgatctatatgccttgtgaggactattttgtcctcaataagaatatatgttcaacatcactgttggacttgtgttgcccttagattgagatggtggcttctcttacaagattgtagcagccttttaactctcgaagagggggccccttcaattgtgagttttgagaagagccaattgctgctaccttcatatcattttgaggactggaaaaggtggaccagtgtcactcttagcatctaccacctagaactttagcccaatggtggtttatatgttgaaattcatcaagtataaaggcgagaagggtagtttcgttgcccacagttaacttgtagggagagaaatattgagatctgtggaaatattggctggagcagcagaatcactcaataattttgattttggatggtagaataggttggcgtaaatttggcaaaaagaacttaaacagttctttcacatcaaattagttgttctgaagattctttccaagtaaaaatcagcttatcatgtatgcttgggccatgaagtaacaattcttttgatcgctgaggatgtcatttgcagatagatattcaatgttgttggaaagagaaagatgctagttgaaaataggtgaattgatgatgttggaaacaagatgcatttattcataagacgaacaaagggacaacaatttcgaggaggaaccctttagctaggttgtgtgtgcatcattacatggacatgttaaacaaaatcaaatccccctgttcatgtgttatggcagggcatcatcataataacacacatgcctccaggatggatcatgtgaacaggttccagagtgaagcacagccttttggcccaaagttatttatgcattctagaactgatgcagcaaatggagctctaccatcaggttatgtgggcgcaccaataagaccaaatggcattccattctcaagtcacaccgggcaatctcatattcagcacagtgatgctcctggaaccatgcttgcatcctattctggctatcctcttgctggaagctccagtagcacctatgcaccacataatactcatcatctgcctgctttgagctatccacataggtctgatgataacttcattctgagttcccatatggatgacagaagggttgcactgaagcggagaaatccaattatttatccagtggatggagtcaataatgggagctgttatgctggcagttcatctaatcctcagttcccatgctacatgcctccaaatcctattcctgctcctgaaccctgccctcctcgaataacatcaaatatgggttcaagctactggactgatcagccctttggtagcaatggaggatctcagaggaatgtgagaggtcgccatgatcacaatcctatccatttgggacacaatccaggtgtagcttgcgcaacaagcagcactcatgggccaccacaccatgctaatgtaattggtcctcaaagtacagcagtgccacaaaatagagcatatttttctatacctccaagagtgactgccccaggcagcgatggaaactgtagcatggttttcagggaagggacatactactctgctccgcagaggaccaacataaatgccccccctgtcctagcacctcctggttcttctgatagtctacattttgtgcatggtgggtatgccccaagagcagcccctcctaacagcatcagcacatatcctgccccggcttttgcgactcctaacaactcagtgacagttacccatgagcctgatatcccttgctatcgacctgccgtccctggctatccgcctgctacctcagcagcagcagcagcagcaagtgttcatgctgaaggtgctgctgcatcttcgagacatctaggtcatgtggctctaggttccagtggtagtgcaaggagtagaaggctgagggattcataccatgcttttcgtccactggttattgaagaaaataacttgagaggaccagcaaccgagcgttttatgatgctaaatcagttatttatccatgaatcgagagaagattctgaccctcactgggacatgaggctggacattgatgatatgagttatgaggagctgctggctttgggagaacgaataggcaatgtcaacacgggcctagctgatgaaaaactttcaagctgtgtgacggagataccctgctgcagctctgcccgtactcatgatgataatgagagcgcaagatgtgtaatttgcctggaggattacaaattcgaggactctgtcgggaagctaaaatgcaatcacaagtatcacgcagactgcatcaagaaatggctgcaggtgaagaacgcttgcccagtctgcaaagcttctgcggcagatgacggcggaggcaccgaatgaagcgccctgccgcccccattcaccctatctcaggcgaagctgtactggctgatctggtttgctgtgtgtaaataatggtcctgaaacggattatttgtgagctgaattaaactcgacatgtaaatttaatcctcaagctagttgcaaattgatggcagcggttagccctacgtgtcagccgtctgacgtaactgcagagagaaaacgtttgcatgcatatgtacagctcgatccaatagaggttattaaatgttaacaatttattagttagttaagccgtctttacgacgtccatcgtcacctaattaaattgcaactaattttc

SEQ ID NO: 42366 - DNA, 643 bp, Zea Mays
tgatagttcattagcctcctgccactttgtgccccccacgccatgatagtgcagggccacttaatcttgatgtcaatgacaagatgattacaggtgatcaacatgctattgggaaggaaacaacacgtcgtttgggaatgagtactaaatgtacccttcctcttctttactctgaacaaaataaggatgagtcacttgcttccttgccaattgatgaattgaccgagaaggctgatggcttatctagagtctttccagaacacagtgtaattaatagagttgtgttgacgggtcgagcaattttccaaaagatgaaggattacacacttggttttatgcttcttgcactgatatggaagtttgacttcccaccatttatggtacagatcattgccatcctcaatgatgcttcccgtaaagacgatgatgcatctcgcatatatgcccgcgcacgcagttttgttcgaggaaaggagggcaagagcgggagacacaccatcgtcgttggaggagccagccgaggcgttggagtgtgagatgatacaaactccaagagaagtccttcccgtaaagacgatgatgcatcccgcatatatgcccgcgcacgcagttttgttcgaggaaaggagggcaagagcgggag

SEQ ID NO: 42367 - DNA, 2740 bp, Zea Mays
cgggccggaccggcccaatcgaagttttacgagccaaaacgtgaaagtgtcgtccagccagccacgtggctccggcagggcagagcgtttatccaactcggctctcagcgactgcccaccaccaccactgaggattcctcttccggcggcggcggcggcggcagcgatgctcctcctgcgcgccaacgcgctcgccgccgtaccggtgtccttctccataacgccggcggcctcctatagctgcttcccctggccgtcttcatccaccactgccgcgagctgctccgtcggctcctctgccaggctcgacgccgccgtgcagtacgacccgctccgccccggctccgatgcgtgggcccatcccgacggcatggtcaccgcggagggtgacgaggagaaacagcgctatgacacggagggggagtccaacgactgggaaggggaagggccccaaggatcatcagaccccgagggcatcaacgtgccgcgccagcgctacatcgccgtccccaaggaggccctcctcgatgctgtcctctcgcagttcgcgtccgacgacgacgacgccgcggacttcaagcgctgcgccagatgcttggacgccatccttcacgccgagcacaagaggatgctcgaggagatgcgcacctcctacatgctcacgcaacgccaccgggacgaggaagaggagcaggatgacactgacaccgcctcgggctcggactacgtcaacggcaaagccggctccggatttttcggcatcacccaactggatggcacgttgttccttactagaagcgtggacttgagaactctgctcggattgaccccagaccccgattcccagaccagagttgcttttgcaactcaatttcagcgctcattcatgaccctactacgcaatgctcagtttgaagaactctccgcacaagatctgctcttgacatatgccctaaataacgattacctgctcacgctgcccatttatgtcgactggaagaaggctgctcaatctaatgcaataatattcaggcgtggatacgcgactgagaggcagaaaggcctcctgttggttgagaaacttgattacttgcaatcaaaactcttgcagaatgtctttttcagcctctccaaacccttgaaaaagccagggaaatggcttaatgaggctttgaaaagatcaacagataaccagggatttcagatctggatagacaaactgagactatggcttaaagagcaaacttatgcagataattcactgctgttgatagaaagctcttcatgggacaagcttagttctgatcagttacctgatgcagatgttcctatttggatcgctgcacaaagggcagtctctcgttatgaaggaattttgtcacctgttggtcctcgtggaagactgttaagaagattgcttaaatggactggactaataccttctctgccagaagcaacgataaaatccaacaatgaaactaaacatcttgaaggacatgtgaggccaaactttctaccaagaattacccttgctaatatatgggaacctgcaagcagagaatcttgcaataacaatatctgggagatggtgaaagcttcttttcgtattctgtttgggaggtctactcttcaggaaccagcattccaggagttaatactactttacactgatgaagttgttccaagtgaaacgaaggacgagatggttccgctgcaactgaaaatttatgagaggattccgatcccagatttgccagtagttttcccccacaagaaattgtccttccgcatcctagatacagtaaggctagatattgctactgtaataggtcagctttttcttcttgatatagttgctggtactgcactcgtcatacttgttttccgtgtagcactgggctacaaacagacccgggataggtaccagcttctggtgaataaaaccctctatgagaagacattggcaagtgggttcggctcggtttacttccttctcgatgcttctgagcaacagcagtacaaagaagcacttttggcatatgccatgttgctctgcagaaagaagtatgaggtctcatctcgtgcaagcataagagatgcatgcgagcagtttatgcacgagaaattcgaggcaaaggtgaaagatgacggatacattattgtttccgttctcatgattgagatgccgatcgacaaggcaatggagacactgctgcggttggggctggtgattgagcttcccactgatggtgggtcgagcgtgattggtctcccatgctcggaggcatacaggatcctgaaaagccgttgggacggcttgctggaacaagatacagaacaaggctgattagaacgagacatgtacgttggtggcttggagtggagtgggatgggatgccgtgctggtacatactcgacgcgtcggcaaagctcactcttgtttgtatgtatacgtaccagttgttgcagcaagtgtatatgtgctagctacgtgcatgtataatcgtgatctagtttgttgtacacaaacgattgcagtgtatgtatatgggagcacatgtttttttcggaagactagccatgtgtctgtaagtttttctatttgtaagttggtttccatttataaatatagagcataaacactgttctgttagctaggtgagtatcctcataattatagcataattttagttttttatcatttaaatatatgaaattttagttttttatcatttaaata

SEQ ID NO: 42368 - DNA, 817 bp, Zea Mays
ggatcatgtggattgaaggattagaggctggattagatgtggggttaggttttgatctcgaatttaatttctgcagaatggcagattcgatagtttttgttcataccagttttccgcggtcttagtagcctcaaaaaataaaaagtttatatatgagtcatagataatttgtagatctttccgtggccatgaagaacacctcaatcggatatcagatcagaaagttattgcagtttgattatagcagtttttcagactcataactctgtgcagaatctgttctcttaagagttaggcaattttatcaacagaattaaactatgggttggtaaaataagttgtagataatttcataaactttctagattgataaagagtgcatccatatgatttgtaaaactccagttatgtttgttttactgtggctgtttctgtttgtctgacaaaaatgagcgggtctgttcactggtaggtttcatcaggtaaatggccgaattggctcttccaactatggagacttctgtagacagataaaatttcttactgccagtagaattccatgatttttggttgagcagtttgtgagatatcgaattttgaagtaaactacgctgctgtctgaaacagattcagttagttatcttgtcagaggttttagaacttgtacatggcagaatttaattatccattgaataccgaagttgtagagtattttgtgtaaacactctagattatttgtttgatatcaccactgttataatttcaaagatacaaaattaacaaacagcgctgctgttgtttggcatgtggttcaggg

SEQ ID NO: 42369 - DNA, 4381 bp, Zea Mays
agtagtagtttcttctctctagtttctctttctcccggcgggttgttgatatcgaagcgtggtgtgctttcatcgagcactcgctgtcgcctcgtagcgtcgggagcatggcactggcaaattcggcacggccactttctctgcttgcaggcttgcagctgtgctttgcctggatggctggatcccaggtacacctacctctcatctgattgtcgtgcggggtgcgtattgaatgaaattcggcgtactataatttatccgggggtggttggagaaagtccgtggatttgttaggattctgccatttcaacatttctagcatagcacaaaaaaataatattcctctctaccgatttcagtcaagcggtagataaactagcagaggacgccaaagttgaggcggtgtgcaactcgcacacagcattgcggcaatggatttattattattatttttgcaccgtgtctgaaaacatggggagtgaaattctacccctatggaattgaataataccactaattagaaaggcaacaagtaaggtagcttctgcaatacaacatcgtcaataggatctttaagcaagcgccacgctttatttctttggattttaattaagagaacatggtgcatgagaggcgacgtgaggccaaacgatcgtataaagtagtgttctgcactttatattgcacaatttacaaggtacaatttaaaatgatcgtataaagtactgttgcataatttagattttatttaagaaaagatagtgcatatcaacggacgtataaaatactgttatgcattttagattacaatgttttaaaagtgaaatttaaaatagttagtgagatagaaattagagatagcataatgttcccctccccgactccgccttccccgcctcgtccttctcggaccgccggctccgcgtccccagttctacgtcgccagcacctcatccataccgttagcccgcacagcagtttttactgctctgtagtagtaggctgtagactctgtactctctagtctctactcccccctctccgccttctctctctccgcaggcggtatcctcccttcctcggttcctctcctctcccccaccaccccaccccagcgccccaaatgccgctccaaccctagcctcccgccacgcctttcgatctcggccggccatgggcaactgctgccgctcgccggccgccgtcgcgcgggaggacgtcagctcctcgcacttccccgcatccaacgcgaagaagaagccgcaccaagcgcgcaacggcggcggcgccgggcagaagcggctctcggttctgggcgacgaggggtgcgaggtcgtcgggatcgacgacaagtacgtcctggacagggagctcggccgcggggagttcggggtgacgtacctgtgtatggatcggggcaccaaggagctgctcgcctgcaagtccatctccaagcgcaagctgcggacggccgtcgacgtggaggacgtgcgccgggaggtggccatcatgcgccacctgcccaagagccccagcgtcgtgtccctgcgggaggcgtgcgaggacgacggcgccgtccacctcgtcatggagctctgcgagggcggcgagctcttcgaccgcatcgtcgcgcggggccactacaccgagcgcgccgccgccagtgtcacccgcaccatcctcgaggtcgtccagctctgccaccgccacggcgtcatccaccgcgacctcaagccggagaacttcctcttcgccaataagaaggagaactcgccgctcaaggccatcgacttcggtctctccatcttcttcaagcctgagactgaacaaggggtggcgcaggctattcttcgtggaaatatcgattttaagcgggaaccctggcctaatgtttcggaaaatgcaaaagatttagttcgacacatgttggagcctgatccaaagctcaggctaactgcaaagcaggttcttgaacatcattggcttcaaaatgcaaagaaggctcctaatgtccctcttggagatattgtaaagtcaaggctcaaacaattttctaggatgaatagattcaaaagaagggctctaagggtcattgctgatcatttgtctgctgaggaagttgaggatataaaggatatgttcaagactatggatactgacaatgatggaattgtatcttatgaagaactgaagactggaatagcaaaacttggttctcatcttgcggaatcagaagtacagatgctcattgaagctgtaagtattcacagaattatcctagaaacagataaagtagacttctgtatttactatttactttgaacttagaagtcttaggtggttaacaaataccatttaatagaaatggtacaaggaagatgtgatgcattgaaggacaaaatggtaattttcatgagaagatacattgaaccaacttcataatcttcacactgtgttcagtgcatccatttttatgcctcaatggtattttccactttatattcacatcaaccaaatgttccaatcacctggggcatttaatgtggcgtagattttttcaagatgactattgttcatctttgatatgtgccccagttttattccattagtgtcaaatagccatctgacctgaccataccctagtgaggtataaagctgtctccagcatcattacctatcacacatcttttttttctctcgaacgtgcaggagtactgcacatcattatattaagaagatgaaggtaatacagcaatacaaggcgagctcacggcagccagaaacgaaaatacacaaaagcatccattagggacacaaggacaaaaacaacccctcataggctgcctcggttgagaatttcacgttagaacccaatctaaaaatatgagaatcatccacatctggttgtagctccaccaaattgagaatatcccatagggtatgaaaatccatgaggacccgaacagtgatggcaccctgaatatccaatacctaggaagtattagtaagggtatcctccaccgtcctattagctctttgtataggagctgaacctcaactagctgactgcttactggcagatgtaaggcaagttggggtgatttcatcaatgaaatacatgcccttggtattatgtgtagtgtagcagcaatgtaagggcctgtttggcagacctccgagaacagcttctaggctgaatcaaggaggagttctgccaagcagggttttttttacagagacctgattcaatgctgattccatgaagtgatcatctgaaatgaactaggaggctgggagctgaaaattgtagcttctcttgattcgctccacaagcagaatccttttgcatagaatttcaccaacataatcgcttctcttagagaatcacttctcagtcctcacagatccaggagtgcaggaggagctctagcgctctaccaaacaggcctaacaagagaacggaagttatgggagtagtgttgcctacttgtcttgctctctttatttaatttctccaacacttcttgatcactgtgtggcaggaggtagcaagagcaggctagattattgaactgcgactgatctggactgtaactcgctccacattttctaccgagctctgtgctctgcagctcgcacgcctttgatcagtgctgatcggcgtgcaggtggacacaaacgggaggggggcactagactacggggaatttctggccgtctcgctccacctgcagaggatggcgaacgacgagcatctccggcgggccttcctgttcttcgacaaggacggcaacggtttcatcgagcccgaggagcttcgagaggctctggtggacgacggggcggccgacagcatggaggaagtggtgaacgacatactgcaagaagtcgacaccgacaaggacggcaagatcagctacgaggagtttgtggcgatgatgaagaccggcacggactggagaaaggcgtcccggcactactcgagagggaggttcaacagcctcagcatgaagcttataaaggacgggtcggtaaagctgggtgtcgagtgaaaaccgcaccgacgctcgttgatgtgtgtgtgggtgtgtgcgcgcatgtagttttaggcccttgggccactaagcagaagaactctaggccttcttcttctttttttgtcccctcgtgactgtcttgcgtggaaattttagataggtggaagtggcggaaccctccgatttgtcttactacctgtgtaattagctatcccggtctcgctgacaggcactgggccaaacggtgtacctaatgctctcacccgttctcttgatggcagcccgagtgctgtacgatacagtgtgttttgcggtctggaaatgctcaacaatgtgttgggaga

SEQ ID NO: 42370 - DNA, 2308 bp, Zea Mays
taaaaatcatttaaaaacacaaggaaaggggttgcatgcaccggggcttgcctggaataaacactacgttagtgtttgttagacgacgatcacttgacgaccatcctttgtcttggtactcattcaaattatccatcttcaggttcatcatccgtatcaccttgagattaatctagctcttgtccttcacatcacgtgatcaactagcgtacctcatgagatgaacgatgcacatgtatgagtgcaagtataaatatcacaatatagataaagctactcgaagaatattaaacacttatagcaagacattgcaactctaatataaaaacactaggtgtggatatcacattaagaactatagctatggtactctaacttaaccgggtccaattctaacagcaagccatagcgaaccatttataagcaccctatctctcttgactagagcataacatctaaactcagacataccattatagaacatccaagatttaaaataacgaatagtagtatttcatttagcttcagaattactatactaaattatcctgtaaaggatatcaactcaataaagcactacactattcgatctatctgataaagtattatttaaaaaatagcgttttcagagacgacattctcaacagattaaatacctatttacgacatttcatcgtacgacaaatataactacaacacgtaagcttacaacgagataatcaccgcgaccatcacatttatccaattctatcgatttaattgatcaatattcgactatggcacttagccaattaacgacataaatatgatactattaaagcaaatcaccacttcaccactaccattcaaatcaaaattgtcggctagctgattaaaatcacaaacctatccttcgtactaagaactgagaaatactagacgatacgattaattcaacacgtatcactcttgttaaaaatacgagaatcatcgcaactaatatatttaatcgttctacttatccaccaaaaaaataggagtagtgacgtaactcaccagcatccaagcgattagaaatttcacgcaaacggcgatgacttcctgcttcaagctttttaccgaacacccgacaagcattgtgcgtgtctgctttcttctctatcaacctccttagatttttctctccaagcagcgatgtgagagcagcaagcacgaaggtcgaccacgtggctccaaagcacagtggacgacgaacacagcaatgccgcgaggcaaattctcatgacagtgacttggcgtgcacagggaaaggatcgagacgctatggggcgagttggaggagaggcagatgagctcggcaaggtgcaagggccgagccatggtagagtgagcacgcgcaagggcgaacagctcacgaccaagcgacggcgagcacgagaccgaggcgtgctgcacgtcagtgattgacgagaactgaagaccagcgacgaggagccgaggagcgagcgccgaggccacaggcgtggtaaatcgacagcgagcatgacgcggatcagggagcctgcttaggagtcgaggaggggaggacggggttcgacggcgaacgacgcgacgacgagggcataggacgtgggccacacgacacggacaaaggacgagtgccggggctgtcagctcgtcgcgcgatcggttgacgacgacgaatagccgagcgcggtaagaagctggacaacaacgacgggcctagctgctgtggggaagagctcgacgcggccatggagatgagcttgagggagaggaacgccgacctggacgagctccatggaaccaacggacggacgagcagggccccccccgagctcgacggcgtccatggccagagcgagcatggccgagggagaccgagctgagcagcggcaaataaataaaaataatctgcagaagacgagctgcacctggcaccagaggagagctcgcgccggagctctcagcggtcgacggcggacgcggccaacgtgatggtcgagtgttgctgagacagcatggtgtttggagacaaggagaacagagatggctggaccagacggcaccagcgagctccaaaactgcggcaaggaggctgaagtctggacgttgagcacggtggagcaataatgaatggctgacggctggagagatagagcagcaccatgcatgacagcggctgggtgtttgcacggatggagcaaaaagcacactgcttggatgaagcttgaagacttgacgcggggtggagtttagctagttgccacggatggagctcagcaggtacacttgacgagcagaggag

SEQ ID NO: 42371 - DNA, 484 bp, Zea Mays
aatctaaaaattgggttcagataggtatggccccaatgaaatgcagtcgaattgagagcaccaaatctgaaaatatgtacagaattgaaccatgaatcttatagtaaacttaaagactattgtttggtgaacaagttttattaatgaagatcaccctgttcttaacaagaattaggagatagagaggatggaaggtggtcagttcagtaaaacgctgaagaccaaaactctgcaaatatctgaagaacgcggataaaagatctaaggcactgttgaatcagatgtgtgcgagtgatctggtgaaggggatttgatcgcggagggataacttcagacatggcaccatcccacgaactcagtcgtgtgtggccggagatatcccaccggcggtcgccatggtgcggtcacttccgccgcggtgtcacccatgcctcgttttccccttactgcgcctcttctctacgtggtagccatgcgtgaacaa

SEQ ID NO: 42372 - DNA, 368 bp, Zea Mays
atgagggagaagtatcatgggaatgatcagatccacaccgcctctggttcaggatacgaggagaacgattcttagggggccatgtcatcgtggattgtatcccctttctaccgattcttcactcaagcaggcaaatgctgttgacaaaccaaccgtgtctaaatggcacaatcgcctaggccatccctcgctccccatggtcaccaaggtcatagacaataataatctctcgtgttcctccgtgtccaataaaaaatcagtttgtgatgcttgccagcaagcaaagagtcatcagctaccttacagtagatctgttagctcaactagttttcctttggaacttgttcattcagatgtttggggtcctg

SEQ ID NO: 42373 - DNA, 1006 bp, Zea Mays
aatctctcgtcaacaccgacgccctctctctctctatcaggcgcacactgtcaagcggcacaggcacagaaaacctagaaggcaccttttccaagagcaccccagccccattcttgtcaccccggcctagcttgttcatgtccactgcaagtgcaaggcacgaagcatccagcgtcaaaaccatcaagttactagaaccctccactcctacccttattacgattctcatgctgttttcagcgaacggcctgaccatgatgagctagggaagaagatcaagagggagtagtcaccggcggagcgcatggcggcggcggcacggaggagctgcagctcgccggcgggggctggtgctgttgcaggggccgcgatgaacataatcacgccgtgcgccgcgtgtaagctgctccggcgacggtgcgcgcaggagtgccccttctcgccctacttctcgccgctggagccgcacaagttcgccgccgtccacagggtcttcggcgccagcaacgtctccaagatgctcctggaggtgcacgagagccagcgcgccgacacggcgaacagcctggtgtacgaggcgaacctgcggctccgggaccccgtctacggctgcatgggcgccatcctcaccctgcagcagcaggtgcaagcgctggaggccgagctcgccaccgtcagggccgagatcgtcaggcacagctgccgtccggcggccgcggcggtggccacggtgctcccctcgtcgcacgcctcccatctcctcgcggcctcggccgccgccagccgcgggctgcacgctggcagcagcaagtcggtaggggcaagagcggcaactttggcggcggccgctgccgtggggcctgcggcctcctcgtcgtcgtcatcggcggtgtacgccgccgccgcgtcgagctcaacggactatagctccgtcaccaatgagaacgttccttattttggttgaggtagcagcacgtttctgcttgaatgtattttttgccccccc

SEQ ID NO: 42374 - DNA, 3908 bp, Zea Mays
caaggtttggtcaaaggattgggtaaaattgctatatcacctgaccattttatttccaatgtttttcttgtagattcattagattacaatttgctttccatttctcaattatgtaaaatgggcgacaattgtctttttacggatataggtgttactgtctttagaagaagtgatgatttagttgcatttaagggagtgttagagggtcagctatacttagtagattttgatagagctgaattcaacacttgcttaattgctaagactaacatgggttggctatggcaccaccaactagcacatgttgggatgaagaatcttcataagcttctaaagggagagcacattttgggactaaccaatgttcattttgagaaagacaggatttgtagtgcatgtcaagcaggaaagcaagttggtgttcatcatccacacaagaacatcatgacggccgacaggccgcttgagctactccacatggacctattcggcctgatagcttacataagcattagcgggagtaagtattgtcttgtaattgtggatgattattctcgcttcacttgggtgttctttttgtaggaaaaatctcaaacccaagagaccttaaagggattcttgagacgagctcaaaatgagttcggcttaaggataaaaacgattagaagcgacaacaggacagagttcaagaactcacaaatagaagtcttccttgaggaggagggcatcaagcatgagttctcttctccctacatgccagaacaaaatggtgtagtagagaggaagaatagaactctattggacatggcaaggaccatgcttgatgagtacaagacttcggatcagttttgggcggaagcggtcaacaccgcttgctacgccatcaaccggttatatctacaccgaatcctcaagaagacatcgtatgaactcctaaccggtaaaaagcccaatgtttcatattttagagtctttggtagcaaatgttttattcttgttaaaagaggtagaaaatctaaatttgctcctaaggctgtacaaggctttttactaggatatgattcaaacacaagggcttatagagtctttaacaagtcctctggactagttgaagtttcttgtgacattgtgtttgatgagactaatggctctcaagtagagcaagttgatcttgatgagctagatgatgaagaggctccgtgcgtcgtgctaaggaacatgtccattggggatgtgtgtcctaaggaatccgaagagcctccacaagcacaagatcaaccatcttcctcaatgcaagcatctccaccaactcaaaacgaggatcaagctcgagatgatgatgaagatcaagaggagccacctcaagaggaggaaaatgatcaagggggagatgctaatgatcaagacaaggaagatgatgaggatccaagactgccacacccaagaatccaccaagcaatcctacgagatcaccccgtgaacaccatcctcggcgatattcaaaagggggtaaccactcgatctcgtgttgctcatttttgtgaacattactcttttgtttcctctattgagccacacaggatagaggaagcacttcaagattcagattgggtgctggcgatgcaagaggagctcaacaacttcacaaggaatgagatatggcatttagttccacgtcctaaccaaaatgttttaggaaccaagtgggtcttccgcaacaaacaagatgagcatggtgtggtgagaaggaacaaagcccgacttctggccaagggatattcacaagtcgaaggtttggatttcggtgaaacctatgcacccgtagctagacttgagtcaattcgcattttacttgcctatgctacttaccaaggctttaagctttaccaaatggatgtgaaaagtgccttcctcaatggaccaatcaaggaggaggtctatgttgagcaacctcccggatttgaagatagtgagtaccctaaccatgtttataaactctctaaggcgctttatgggctcaagcaagccccaagagcatggtatgaatgcctaagagattttcttatcgctaatggcttgaaagtcggaaaagccaatcctactctctttactaaaacacttgcagatgatttgtttgtatgccaaatttatgttgatgatatcatatttaggtctactaatgaatctacatgtaaagagtttagtaggatcatgactcaaaaattcgagatgtctatgatgggggagttgaagtatttcttaggatttcaagtcaagcaactccaagagggcaccttcactagccaaacgaagtacattgaagacatactcacaaagtttgggatgaaaggatgccaagcccatcaagacacccatgggaaccaatgggcatctcgacctcgacacgggaggtaaatccgtacatcaaaaggtataccggtcaatgataggttctttactctatttatgtgcttcacgaccagatattatgctttccgtatgcatgtgtgcaagattccaagccgatcctaaggaagttcaccttagggccgtgaaacgaatcttaagatatttagtttatactcctaagtttggcctttggtaccccaggggatctacatttgatttaattggttattccgatgctgattgggcagggtgtaaaattaatcgaaagagcacatcagggactttccaattcttgggaagatctctggtgtcttgggcttcaaagaagcaaaactctgtggctctttctaccgtcgaagccgagtatattgccgtagggcattgttgcgcgcaattgctttggatgaggcaaaccctcagggactatggttacaaattaaccaaagttcctcttctatgtgataatgagagtgcaatccgcatggcggataatcctgttgagcataaccgcactaaacacatagccattcggtatcactttttaagggatcaccaacaaaaggggatatcgagattgcatacgttaacaccaaagaacaattagtcgatatctttaccaagccattagatgagcaaacatttaccaaacttaggcatgagctaaatattcttgattctaggaattttgattgatgttttgcacatatagctcaaatatatacctttgatcatatctctttctttgctatgactaatgtgaatttcaagtgtatttcatgctaagtcatagattgaaaggggaaatggagtcttcggcgaagacaaggcttccactccactccatcgattattcatccttcgtcgtcgctctgcaccgctctccaatttggtataatcttcactcatacattatttaccatagggggagaaagtagttaaaagggctctaatgactccatttttggcgattcatgccaaagggggagagagtattagcccaaagcaaaaggaccgcaccaccaccaatttcaaaaattttagtctttcaatttgttttttaaagtagtgttttcaaattggtatcttattactgatataatttcaaaatggaataccctcttcaaaattaatatccaaaaccctcttgaacaccaagaggaggatttcattaagggggagttttgtttagtcaaaggaaaagcatttgaaacagggggagaaaatttcaaatcttgaaaatgcttctcaaaatcctattcatttacctttgactactttgcaaaagactttgaaaagaatttccaaaacatttgcaaaacaaaacatgtggtgcaagcgtggtccaaaattttaaattagaagaaagccatccatgcatatctagtagaaatgattattggtttcattccaagcaacctttgcacttacattatgcaaactagttcaattctgcacttctatatttgctttggtttgtgttggcatcaatcaccaaaaag

SEQ ID NO: 42375 - DNA, 1423 bp, Zea Mays
tccgttatagaagctatggcttatatgtagccaatgaaacaggaagtttaaggagaagaacaaagtggacaaggtagtcgtgctgtggactgcaaacactgaaaggtacaacaatgtatgcgcttgtctcaacgacacaatggagaatctactggcatctgtggacaagaacgaggcggagatctcgccatcaacactatatgccattgcctgtgtcacagagggggtgtcgttcatcaatgggagcccccagaacacttttgtgcctgggctgattgatcttgctatcaagaacaactgcctgatcggtgttgacgacttcaagagtggcagaccaagatgaaatcagtcctggttgatttccttgttggtgctagaataaagcccacctcgattgtgagctacaaccacttgggaaacaacaacggcatgaacctgtctgcccctcaaacattcaggtccaaggagatctccaagagcaacgtggtggatgacattgtctcaagcaatgccattctctatgggcccggcgagcatcccgatcatgttgttgtcatcaagtatgtgccgtacgtgggagatagtaagagggctatggacgagtacacatcagagatctttatgggcagcaagaacaccatcatgctgcacaacacctgcgaggactcgctcctcaccgcaccgatcatccttgatctggtgcttctggctgagcttagcaccaggatctagctaaaacctgagggaacggtaagagcccaccaagtgaataacccgaagcatgctaggtgattcagcgcttcagcacttcagcaccatcatctaatgtctctcattatgcaagacaagttccactccttccactcggtggccaccatccttagctacctcaccaaggcaccactgttccgcccggcacaccggtggtgaacgctctggcaaagcagagggcgatgctggagaacatcatgagggcctgcgttggcttggccccagagaacaacatgatcctggagtacaagtgagcgaagtggcgtggctgcagctggatatacaggaggctgcatgaagggaactagagaggcgagattagctgtgggattgtgttggcttctcgtgttttcttttgcgttctttcctgttcatcgctgtcgagttgttgtattttatttgttggactctcgtgccaacaatgtcatcaagcgtgtatggtggtgcgtgcctgagactgacgatgtacgagggaacttctaccggcagtgtgacacgtactctgcaatgatgagacaatgcaaattgtggtatatatcgaagtctgcataataatgatggttgaaatgtagtagtgaaacgctaaattaaaataacaaaaattatgtatggccaggatcacaaatgtattatgaaacattttcttataaca

SEQ ID NO: 42376 - DNA, 229 bp, Zea Mays
cttgtgccacattcagttcttctatagccactatacttggggttggtgaggcgggtggaaggtttcagttcttctatactatatatacttagagttgtttagttaatttattattgatggagatggaactgacctataggaggctgcactgctagagcagtagagccagaaaacaatagttggtggggacatttatgttatgctatctaattattaatctgtggaaaag

SEQ ID NO: 42377 - DNA, 4088 bp, Zea Mays
gttcgatagtgatttcatcttcctctaccaggcggctccgtggtccgtgctgatcaactgcatcaaggatcgtcgccggcggcgcgctggcagcagttcgcacggcgagatcggattgatcgagatcttctaggcctggacctgcgctagacctcgaagcctcgatcgcaccgcatcttctctctctgctgctggtccgctccgtcgccgccgaccccgccgccagcttccccttccacctaaaaggacgacctctggccgcccttgtcccgccccgacgcctcggtttccactgcataggcgtggtgcggcgatccgtccgggcctagggttgcgagagacactatagggtacgaccctaggagcatccgcctccacgtgggtgaggcggaagagggaggatgacatcgctcagccgtgagctggtcttcctcatcctgcagttcctcgatgaggaaaaattcaaagagacagtccacaagctcgagcaggagtccggattctatttcaacataaagtactttgaggacgaagtcctcaatgggaattgggatgaggtggagcgctaccttggtggattcaccaaggttgacgataaccgctactccatgaagatattctttgagatccggaagcagaagtatctggaggctcttgataagcatgatcggtcaaaggctgttgaaatcttggtcaaggaccttaaggtctttgcatccttcaatgaggagttgttcaaggagatcacacagcttctaaccttggagaattttagggaaaatgagcagctctcgaagtatggtgatacaaaatctgcaagacaaataatgcttgctgagctgaagaagctgattgaagctaatcccttgttccgtgacaaactacaatttcccagcctgaagacttctaggttgcggacacttattaaccagagcttaaactggcagcaccagctttgcaagaaccctagacctaatcctgacatcaagaccctttttgttgatcattcatgtggacaaccgaatggtgcacgtgctccatcaccagcaaacagtccgttacttggatctatgcccaaacctggaggtttccctccattgggtgctcatggaccttttcaacctgcaccaacacctgtcccacctctggctgggtggatgtcaaaccctccagcaataacacatcctgctgtgtctggtggtgccattggatttggcactccaacaaatcctgccgttttgttgaagcatcctagaacacccacaactggtaatcctggtatggattatccatcaggagattctgaccacatttccaagagaactagaccggttggcatgtctgaggagagccataattaccaacaagatgatttccacaaagctgttgcacggaccttgagccaaggatcagcacctatgagcatggatttccatccacttcaacaaactcttcttcttgttggtaccaatgttggcgacattggattgtgggatgttggtaccaaagagagactcgttgtaagaaacttcaaagtctgggaccttggtaaatgtacaatgaccctacaggcagcactggttaaggacccagctgtgtcagttaatcgcataatatggagtcctgatggaaccttgtttggtgttgcttattcaaggcatattgtacagatttattcctataacggtggcgatgatattagacaacacttggagattgatgcacatgttggtggtgtaaatgacatagcatttgctcatccaaataagcagctatgtataattacatgtggagatgataagacaattaaggtatgggaggccactagtggagctaagcaatttacctttgaaggacatgaagctcctgtttattctgtgtgtccacattacaaggaaaatattcagttcatcttctcaactgctttagatgggaagatcaaggcatggctatatgataatttgggatctagagttgactatgatgcaccaggtcattggtgcactacaatggcatatagtgcagatggttcaaggttattttcatgtgggactagcaaggatggtgaatcacatctagtagaatggaatgaaagtgaaggagcagtgaagagaacatatcagggattccgtaagcgatctatgggtgttgtgcaattcgataccacccggaacaggtttttggccgcgggggacgaattcatgattaagatatgggacatggacagcacgggtcttctgactaccattgatgctgatggtggcttaactgcaagtccacggatacgcttcaacaaggagggaactctattggctgtctccactgctgacaatggtatcaagatcttagcaaatgctgatggacttcggttgctgcgcacactggaaaatcgttcttttgatgcttctcgtaatgcatctgaggctgtaacaaagcctctaataaatcccttgactgctgcggcaaatgcagctgcagcaagcagttcaggagctggtgctccgtcagctataactgcaatgaatggtgatagcagaagtttggttgatgtaaaacctagaatagctgatgagtcacttgacaagtcaaaggtatggaagcttatggagataactgagtcaagtcagtgcagatcaatcaaactggcggataacatgagaacaagcaagatttcgagattgatttacacaaactctggtcttgctatcttggctttaacttcaagcgctgttcatctactctggaaatggccacgcagtgatcggaattctggaaaggcaaccgcaagtgtatctcccactctatggcaaccaccaagtggcatcttgatgactaatgacacgactgacaataatcctgaagaagctgttcactgctttgctttgtcgaagaatgattcatatgtcatgtctgcttctggaggaaaaatctctctgttcaacatgatgactttcaagacaatgacaacgtttatgcctgcaccgccggcagcaacttttcttgcatttcatccccaagataacaacataattgcaattggaatggatgactcaaccatccaaatctataatgtccgaattgatgaggtcaaaagcaagctcagaggtcactctaagagaatcacaggtcttgccttttcaaatgtgctaaatgttttagtctcgtcaggagctgatgcccagttatgtgtttggaacacggatggatgggagaagcaaaagaacagatttttgcagataccatcaggtcgccaatccaatatcttggacactcgtgttcagttccaccaagatcaaatgcactttcttgttgtgcatgaaacccagattgccatctatgaaactacaaaactagaaccagtgaagcagtggcctgttcgagagaattcacctccaatcacacatgccacattctcgtgtgatagtcaactgatctatgcaagctttatggatgccactgttggcatatttaatgggtcgagtttgagacttcaatgtcggattcttccagcttcgtatcttcctccaaatatcagtccgagcgttcatcctgttgtggttgcggcacacccttcggaagcaagccagtttgctctagggctgactgatggtggtgtttttgtgttggaacctttggaatcggagagaaaatggggaaatcctccaccagtagagaatgggtctgctagcaacttgtccacaccgcctcctaatggagcttcaagttctgaccaaccagaaagatgattaagaagttggaactggtagatttttcgtggcacgagtctaaccaagaagggcttcaaagggtggtgcgactaaccttggcagataggttccaagggagccggacaatgcgctcaataaaaataagttcaacagaagtttgtccgttgcttgtataaatatttgtattgactatcgagtgaggagtcctagtatttcatttttgctttgtttgcggtgctgtgaaaaggatcagtagataagctgtagtacaacaactatcagactggctgtacttacctatatttatgactattagttaatgtatgttgtttcatttgcctttttggctccgttcaaaca

SEQ ID NO: 42378 - DNA, 2402 bp, Zea Mays
aaaccctggttctaccacgcgactaactgagccgccgacgccaggcctccacgccgcatccgcgtgaccgcgcctccgagctccatagccccgggccgccggcgccgggccatcgtgatctcgtccgcctcccagcatcgaccggacctgcccgcagcccgcgcccaggccatcgcgccgccgacccgagcttcgccaggcgcctaggccgctcgcccgcccggccggcaggacgactgggcgagctcctccccgcggaggcggggacggcggacccgcccccaggccgagtcgccgagctccgtcccgcgcgggcgcccccctgcccagtcccagccgccccgctcctgtcccggccaggctcagctccgccctgttccggcctctgtacagcatccaggcacgacgacgcgagacgagatggcaggcctcgaacggcctcgccgccgccctccgccagaccccgtcgccgtgctccggggccaccgcgccgcagtcaacgacgcctgcttccacccctccctccccctcctcttctccggcgcggccgacggggagctcagggcctgggacaccgcgagccaccgcaccgcttcctctgtgtgggctcatgctgggtcggtgggagtgtattctgtcgctgctggtgctggacttggcaataagataatcagccagggcagggatgggacttgtaaatgttgggcgattgaagaagctgggctttcaaggaagccactacttacaatcaaaacaagtacataccatttctgcaagatgtcactggtgaagtcttcttttacacatgccactgaatctggctctagcagctcagctagtgacgtggaaccacaaatagtgccaactgaaaatgcagaatgccatggtgtaaaccctacaataggcccccaagaacatgatcaatgcactacctctaatgggcataatatgctggcaattgctggtcaagaatcctctcaggttgagctttgggacattacaagtgctagaaagatcgtaaccttgccccaaacatgtagtgccaatgcgacagatcatcctactaagaaaaagggactatgcatggctgtgcaagctttcatcccccatgaatccgcaggctacgtaaatattttgtcaagttatgaagatggaagcactctttggtgggatgtacgaaagcctggattacctttatcttcagtgaagtatcattcagaatcagctttatccattgctattgatggattttgcaatggtggaatctcaggaggtgctgatgataaagtagtcatgttcacgctcgaccatccaaagggcacatttattcttaggaaagaaatagaactcgagcgaccgggtattgctggcacagcaattcgtccagacaacaagatcgctgcaaccgctggctgggatcacagttgttgttgttgttgcatctgtgaccttttcggtggttttaaccttgcaggattcgagtgtacaactacaacaaaggaaatgctctagccgtgttgaagtatcacagtgcttcgtgcaatgcagtgaccttctcatctgactgcaagctcatggcttcctgctcggcggataccacggttgcgctgtgggacctctatcccccaaaaccccaaagcaaagcggacatcacagaaacagacgaggcctcctgctagctcatgtagtttgggccttcctgataccttctggcagaattttggagcttccgtgcaatgaaaatctgaacttgtcgcaacagtgcaagcgatttattctttttcgtcaaagaaaagagtaagttatgatgtgccttccacagggaaacgcaaacgtatgcatgcaactgttgttaggaacggttctcttgatttctttatttttcattgaaattctactcggtttcgtggaacagttgtagtgtctcaagagcatgaaattgatttaaaggcaaggcagttgaagaactgactctttgaatactcagatgattgatttgaacaaatttctgcaaatttccagtacactgtacacctacatttgctactgttcgatccaatggcagtactgaaccgggatgcagttcttgctgttgtgcatgtccaggaaagagggtatcgtatcccaatgttccatgtagttggggggttctattgctagaaaagaacattagtccttgctgactcggtgactccaatgcgatgcgagcccatgaacgacggtcctaaccttcacgcgcaacagccgcaatcgccgctcgttctagttctttggcgtcggccagccacggccgcctcaacgccgccgtatcttcaacgtcacttgcggcatccgacgacggagccgaggtgccatcgaaggtgccgtcgaacggcgcctcgcagaaggccatcgcggccacg

SEQ ID NO: 42379 - DNA, 413 bp, Zea Mays
tttacatttaatgttttctatacgaaaccgttgaatctttgtaccagataagtaattgcacatgacatatcctctaaaaatagtgttttttttcaaaaatatgcttaaaactcaaaacgggcttgatgcgatgttcgactcaatcatactactttaatgcagcataatgcacctcatcactttatccttttttataggataaaaagtacgcacgaaaactacccataaaaagacacaattaatctatatcactatataatccaccaatttaaaatttgcaaaacatatccaaccaaatcacaccatatctataacctccgctaaatccgtaaacaaaatttactaaaatttaacacatcatcaaaaccaaaatttagcacatcatcaaaatcaactattcagattggataatc

SEQ ID NO: 42380 - DNA, 2022 bp, Zea Mays
ccggcactggctccttccttccctttccctgatccctcgtccagtcgtcctcctctgcccggtacagctgcgaagccggcactggctctgctctgctcgccagcagcaccgacctccactctacgtctccaccagaccaccagcaaggcgagctcctttttcactcccccaaatctctgaataaaaaatcgcgcaagcaacctcgctccaccggcctccgcaagttcgttcagtcaggtcaggtcccagcccacgcagcatttgacagcgcgaggcggttgcccagtcagctggggtggacggctttgatttgcttcgaagggagtgagattggttgaagccttcgaccaaggttgtcgatggattctgggatttgggcatctgtttggagcttcatcaagttcctgcctttcttctttgcgcttctcctcctgggcatcatcaaaggtgctttgtttggcccatgggcatggcttgtcatgacaattggaatttctgcacttattctaggcttatggcctatgcatgtgatttggacatattactgcatcatcaggatggaacatggagcactatcacaggaagctgtacagttgtcagggacatgaaagacatgttggtacactcatatttttcaatcatggatgaagttcgtcttcatgcaccacccgacggcaagccatatgagataagttccccgttatgctattcaaaggatggaagcggttgattgaagatcttattggcagagaaggaccttttcttgagacagcttgcatgccatttgctggtcttgcaattcttctctggccatttgcagttataggagcttttatagcctctgttatttgcagtgttccttttggtgtatatgctgctgtggtggtttatcaggaatcctcacttttcttgggactgtcttatgcaatatcatcagtatccatctttgatgaatatacaaatgacgtacttgacatggcaccaggatcttgctttcctaggtttaaatataggacaaatgaagcttcctcacatggtggctctctctcgagacccgcttcattcaaggacaagcatgatggaaagaaagcccctcagcgtgtaacatcatttaaaagtagctttgatgagttcaatccattcaagttgctagatcaccttttcatagagtgtaagcaccatggcaaggatctggtcgctgaaggagtgataaccccaaaagatatagaaggaacaaaggcaggcaaagccagcactggggtacttaatgttgggttaccagcatatgttatccttaaggcactcctccgatctgctaaagccaattctgatggtctcgttctaagtaatggatctgagataacatccgacaataggcctacgagtaaaatctttgagtggttttttgaccctctgatggtaatcaaagatcaaatcaaagctgaaaacttcacagaagaagaggaagcataccttgagaagcaagtgctcttgattagtgatccaaagcgcatcaaggagaatctcattcggcttccaccattgagtgagagaaaacaagcagaaatagaagcatttgctcgaaggttgcaagggatcacaaagtcgatatcaaggtaccccacatccaagcgtcgcttcgacgcccttgtgaaggctctttcagaagagcttgcaaggacaatgggtggtaatcaatctgccaatgggtctcaggtccggaagataagaagtggtatcgtccgaatgcttagtcagagatcactagggaaaacaacaggcatcccgggcgatgatcatgaggctcagctaacaagcgatggtttcacttcatgatgttctggaggtgttcaactgtaacctcagtttgaaaaggagatactacttttctgtgttattttgctaactggatacaaagaactgacacttctgtatgaagagtttaacctcaaccatctcgaggatgagttgtttgttttcaggactgtatctggacaacactgtagtaatacttcgtaacag

SEQ ID NO: 42381 - DNA, 2928 bp, Zea Mays
atgtctcgtgtgaatggagtcactgacgccttgagcatcggtccctccgcagggtacattctattcttagtaattgtgcatattttactattttttactgcttatgatcgttcatatacactcttagccatccaaaaggttactcttttatgctccgcttgcaaggcgccaaggacggacggaggcgacgactcgcaaggtagctctgctcgggcgaggcagcagcagcacgcagcagtactccgttcagaatcaggagagaagacgttgttctccgggcactcgagtcgaagtcctgacgagatggacggcaatgcgaggtcggcggcaacgaatcagaagaagcccgtcgtcgcggacgacgacctcgtggagctgctgtggcacaacgggagcgtcgtcgcgcagccccaggcgcaccagaggccggcgcccacctacgaccccgaccgcccgggcaccagcggcctcaccggcgaagagaccgccgcgtggttcccggacaccctcgacgacgcgctggagaaggacctgtacacgcagctctggtacagcaccatcgccgacgccgccccgcagcacgagggcacgctcccgggccctacctcgcagccttcgccttcgccgcccgttgggagcagcggcgtcgagtcgagctgggctggcgacatctgctcgaccttctgcggaagcaaccaggtgctcaggacgccggcaaggatcagggggaaggacgcggcattgcagtcggagttgccgagcaataccggcgcgcacgacggcacatcgtcatccggcgggtctggaagcaactatgggggattcgggctgcccagtgacagcgtccatgtacagaagaggaaggggaggtgtagagacgactcagatagtccgagatgccgagtgtgaggaggcaagtgaggaaacgaaaccatcaaggcgatatgggacgaaacgccggactcgtgcagctgaagttcacaatctttcagagaggagaagaagggaccggatcaatgaaaagatgcgcgcattgcaagagctcatcccgcattgcaacaagactgacaaagcgtcgatattagacgagacgattgagtatctgaagtccctccaaatgcaagttcagatcatgtggatgacttctgggatggcgccaatgatgtttcctggtgttcaccaattcattccacagatggctctaggaatgaatccaggttgcatccctgcagcacagggcctaagtcagatgccaagattaccatacatgaaccacaccctgccaaaccatatccatctgaactcgtctccagctatgaatctaatgaatccactgaacgccgcgaaccaggtgcaaatcggtcacctcagggatgcaagtagccacttgcttcacctagatggcgggcgagcagcagtggtacctcaggtaccaggaccaggaccccatgttcatggacatcaaatagcacaagccgaagaacacaataagatactggaagtggcagctagtactgttataccaacttctaaggcagggcaaccaccaactttacatagagtttagagtgaccaaaatcatgccttgagctgtatatctgtacagaagtgtcagaagcatattctttgacatgtaagcttagttctagagttattatcaggagtcttgtataggttacaagataacagcctgtctaccgccgtattctatctacggaagaactcagctgcatactgctgtgcagactgcagtacagcgttcaagagagaattgaatgggatcaagaaagggtctttctttttctgggaaccgctgaaaatactgacgtgatgaggagcggatggcatctctgtagctgcgctgcgctgcagtgtatctacatcaatatggcaatgcttgtctggacacgaatgctacatctacatgtaaatgcagagttgcaggtagatagcaacccctctcccctgagatgccaactccgactcctgtcctactgtatgtactgatctgtacagcaagcaatattcaatcagcagtcaattcctaggatgtcgtaaggtttggtcttgcaggagatgagctcgccagacagtccatcacactgccggcttgattgcatcttcacaggacgtggacttgtgggcacatgctccacgggcaacggttcggcatcctcctggcgttcttgtggctggcagcagccgcgagaatctgtgtggagccctgggctgggctcgttgcaagatatgccagcctctcatcttcagactggaggaggaggggggggttccctctccaggctttttccatgatgttacaggcttacagcattcagagtgcatgttacactcacggccctatcagcacatgctgtgggcagccggtgatgataggatcagatgctcatatctcctgcggttttctgtctaccgcatttggattggatttggaccccccctgtactgtacttcctccttgctcccctgctgcttggcgctttgtccatgtgcctggttggaattgctactatacatttttggagggtaattgtttcaccggaacatgtagcgtggacgtgtggtaataacaattgaattgatgcctttactgtctgagtaataacaaagggaagcgatgagcagcacatggtaagcttccggtgccggttggaggcttcgatgtcgatgtctgcattgagtttatttgatgctgtgtgttctatagctagactaggctagagtttggatagagttcatgggacaatgttgtctgcatcttcatctcccctttagtttaggacttatctgagaggtacggttctttgcatgacagaacaaaactagcagcagcaaaaaaaaaaaaaaaaggaaacaacgacaaaatataaaaaattggcttcgcccgggttcgaaccggagaccttcagt

SEQ ID NO: 42382 - DNA, 565 bp, Zea Mays
ttctttttttagtttcttcttcagataaaaaagagtgttcctggatggtttttcggtatgcttgtggagacatttaaaagtgacaaaatcaaatgagttgctgctgctttcctaacacactgatccctactttatggcaaattctctttccaacacaccaaatacatatgaacaagacatctcgattattgggcgaacactatcgaaattcgatgaagataatctgattccatgtttcggatttggagatgcatcaacacatgatcaagacgtctttgtttctctcctgacgagaaaccttgcaatggatttgaagaagcttttggacaatgatcaacaccctttgcaccgatgtgaagcaaagtggtggacaataccacgtcctgttgataattgcagatgggaagttgcaggacgccatggcagccttgccctgctcccccaacagcgcccacctgcccctttccttgcgcgacgcgagatggatcggcgaatccatggcagcttggcagggtggtctatctcaaagattttcgaaagttgtttcttattatggtctcacgac

SEQ ID NO: 42383 - DNA, 2233 bp, Zea Mays
cggaaccgtgtggcgcctgttccatccatcatccatgcttgatggcttgatgcttccgatccatcacgcggcttcacgagctatatacactcggcttcagagacgccaacaggacagatagcagccctccgcactttcggctcgtagctacactacactacaagcgcgcgcgagcaacgtcgtcgtcgtcgtcagccacattgagccatacatgcatggcgattgcagagcacacgccgtcgtcgtcgtcgcctttccggcagcatcgacccaccggatgggtcacgttcacggcggcaacgccactgctcgcgctgcagctggccctgctggccgccttggttatggcgacggacccttcaccttctccggagctcgtcgagctgacgctcctcaccggcgcgcgggagaagggcgcagtgtgcttggatggaagcccgccgggctaccacttgcagagaggcttcggctccggatcccacagctggatcgtctatcttcagggaggagcttggtgcagcagtaacaccacagacacagaaacttgttccgagcgtaagatgaccgcctatggctcgtccaagcttatgggagcagtaacctttgatgggatattcagaaaccagcagcctcagaatcctgatttctacaactggaacaaagtctacgtaaggtattgcgacggggcgtcattttctggggacgcggagggtgaagcacaggacggaactaagctgttcttcagaggatcgcgcatctgggacgcagtcgtcgatgaactcatgggaaaaggaatggacgccgctgaacaggccttgctcgcaggctgctctgctggcggtctagctacgctactgcactgcgacgatttccgcgcgaggtttccgcaggaggtcccggtcaaatgccttcctgatggcggattcttcctggacataaaggatttatcaggagaaaggcacatgcggtcggtgttcagtggagttgttcagcttcagaatgttagcggagttctgcccaagcgctgcctggcgaagaaggacccagcagagtgtttcttccccgctgaacttatcaagagcatcagcacccccacgttcatcgtgaactcggaatacgattcttggcagatcgcgaacgttgtcgcgcccgacggatcctacactggagacgcgtggacgagctgcagagacaacattcggaactgcagctccgagcagatggacgtgctgcatgggttcagggcggaactcatcagggagctgaaggttgccgaaggtgagcgggaatgggggctgttcgtcgactcgtgcttcacgcactgtcagacccagtcgagcgactggtggcattcgcccacctccccgaggctcggtaatcagactgttgcagaggctgttggggactggtactttggtagaaggcgggtagtgaagcaggtcgactgcgagtacccttgcaaccccacgtgtagcattcagtagctgtgagctggcttcttcttcgtgaccgccattgcaccgagctgagattcatgggagtccttgtttcctccactctcgtatttgatttgtcgttgttagaaaaccagttacattttaatctagagaacgatacataaatgttaccgacaatacgtacaagtgtgtgtaaacttagcatgttgaacaaagcatagggaaacataattgtttgtgttggcgccgatctgtcaccaaacactaggggtataaccgtctggcggtgtcctgtatggcggcgcgcatggtccgtgggtctgggccggatagtgcgcgaccttgctgcaggagcgtcttcttccctgcgacgacgggttcggacggtccgtgctctaggccgaacggtccgtgatagcgcaggatcgtcttcttcctcgcaggaacctaaatctcgtcccttggagagatatcttaggatgatctgtatccgacaggccatccggagcttctctaaatgatgtagagtagcctaggaattaagaaatcaagtcgacaaagagtatcttgtggatcttgcccccgagaggggtagacactagggtcgtcttgggtctacaggccacccaaaacgagtcgaataggggtggaggtggatatacggaaaactataactagaactacgctacaactacttttaggaaagttatgataaagaaaataatagattggttcgattggaatattaatacctctggttgctcgtaatattttat

SEQ ID NO: 42384 - DNA, 794 bp, Zea Mays
gaaggttaggagtctattgtctagtaggggagcggatggatctagatgccgaggtaggggagtagatgtaactgggtgccaagaggtgcaagacggagggaggcgaggggaacctaaaccaaaatcccacactagagcaggccgacatcgatagctccggcgagaacgacgggcaaaaccagaagccatcaggcaaggggaagaatataatacgggtagagtcccccaaggactacgccatgtctaggacaggagagggcagactactaacagcacatatcacttctatgggaaggtgattccacaccaacaagaagaagccaacattctataatttttgtagacaagggaacaccaaaccaacaactaatgatcgaccaaaggatgaagattcttcaagacccgatgccaggatgtcgccaggatgtcggtggtctggtttatgaatgaggaagcaggaaaatcaagaagcggtagaagttgatctatcccttgactagccacaaggcttacagaatccttctgctgagatgttgccagttcaggtgatcaacaaggcactaatgctctacgtgcaatcactgtaacaacagtttgaggcaagtagtatagtccgttcgaagctaatcatgtgccgtgggattcatccacctttcgaaagtcctacgaatttcactattttttggcatcgactcctctttatcgagcttgtgactgtgagcccgctcgactttagcgacataactaccctcatgcaagaagttgtaagttgagcatgtcctataatggatcag

SEQ ID NO: 42385 - DNA, 440 bp, Zea Mays
ctcacacaaacatgtatattacagtaatcacattcgatacacacacacttcggagatagagcagaagactttacaaaacattctttattccaaaactcaagttttacatgctagaaagatttataattattacaagtcctgatatactcaaagtgcataacttacatacaaaagtaggaaggtagatcccttccaaagctcatacataaacctaactaatcctccttcaagactagaagcatcttccagccacagggacatctagaatactcctgattacctacaacaacatgggttcgaaaatcctaagtacagagtgtactttcacaagtcttacccgactaaggaaaaaaactctcaaggatatgctggatttgggaatcaaggaaaggcttttagcaagaatcaactttaatagtttgcagaaaagcttactaaaa

SEQ ID NO: 42386 - DNA, 1537 bp, Zea Mays
agtgatacgatcgtttccctatataaagaggcggctgccgggaagaggtgatcgtagaagcaggcaggcagaggcaagaggcccctcaccctcaggtgatcaggtcgctagctcccggcttaactagtaggcagccatgaatttcggtgggaatggcaacgcgacgatccggtgcaagtactgcagggcgagcctgagcgtgatccccggcgagcgcgccatccagtgcgcgcaatgcaactgcgtgacccgcatccggcgggccgaccgcatcccgctggcgcggccggcgcacgtgccgccggcgttccagcgcgcccggggcaagaagcgcgccgtcctggtcggcatcacgtacgccggcgcgcgccggggctgcggcgacctgaggggccccgtcaacgacgtcaagtgcatgaggaacctcctctgccagcgcttcggcttccccgacgaccagagggacccgttcaggctgcccacgaaggagaacatccggatggcgatgcactggctggtgcagggctgcagctacggcgactccctggtgttccacttctcgggcatcggcgcgcaggtggcggacgacgacggcgacgaggcggacgggtacgacgaggccatctgcccgctggacgcgttccagagcgggcccatcctggacgacgagatcaacgaggtcatcgtgcgcccgctggtgcacggcgccaggctgcacgccgtggtggacgcctgctacagcgccacggtcctggacctcccctaccagtgccgcatgtccaggaacgggttctggcagtgggaggacgagagcccgccgtcgggcgcctggaagggcaccagcggaggccacgccgtgctcatcagcggatacagcgagggcaaaggcaacttcgccatgatgcccgacgcccacgcgtcggtcgtcggggccatgacgcacagcttcgtccggacgctggagtgccagccgcgcggggtcacctacggccacctgctcagctccatgagggccatcatgaagaaccgcggcgggggctgcgatctgcagggggccatcggcgcacccatccgcaccgtcgccaacttcagcggcgtgcaggagcctaacctgtcctcttcggagacgtttgacatttaccgcaagcagttcgtcctgtagacaccaccacaccagggtttgcccctgccggccggccgcttgtaatgaattgccgtcgtatcagaataagaaattatctatcgaccatgatatgatatgatatatcaggaaagaaggaactattacccctcaatgtaataactaagcatgttcaatgtcctctttttattagagagagagacagagagaaaacgcggaatttgagacgtgtgcatgcagtttacgtgatcaataaagttacatagaaattattttatccacgtgcgatgcaagtggagcttctactacctaaccccaaatcttcataggatggcttcactctcttacctttaaaaccggttgtttaacctctcagctttataaaaatagtcaaat

SEQ ID NO: 42387 - DNA, 1636 bp, Zea Mays
atggggctgggggctgcgatggcactgggcgacccaccggcggactacgcatccatcgcggcggtggggctgtttgtggcactcatgtgtgtcggcatcatcgtcgggcacctgctcgaggagaaccgctggatgaacgagtccatcaccacgctcttcatcgtgttaagccaagatgagacaccattcttgtacagcctcgtgtttggtgaaggtgttgtcaatgacacaacttctgttgtgttgttcaatgcaatccagaactttgatcctggaaatatcagcggtgccaaattactgaacttcattagcagtttcctttatttgttcggctccagcaccattcttggagtagcttctggacttcttagtgcttataccattaagaagttgtactttggcagcccggtaaagtctatcgctttgagcaacaccattttagccttggtgctggtttcaagagctgcttttgttttcccactatcctttctatcaaatttgaccaaaaaaactccaaatggaaagatatcttttaggcagcaggttattgtttggtgggcgggtctcatgagaggtgttgtgtctattgcgttggcttacaataaggttctgtggaagtgcgaggcattttgggaggtgtgcgaggcattttgggagggacatcatcatgcccaacttgaagtcgtccgtgaccacaacagcgagcgcggtggagtacatggatgaagtattgaaggcgttgccgctagggatttttgaagcactaactgcattccccttctccccttctcccttcctgctgtgcgaagccgtgccccaaaccctctaccatcttatttcagttcccactctctaccatcttccaggaaaaaacactagcaatcttacatgagttccaagttttgcaggtcgttgctgtttgtgaatgtggtttggattatgacagacttcagttctgtccgacagatatgcaaaaaaagtactttgagaaacaatttgagttggctgaagcagtaaagctgcccattttcttcacatgtgtgctgctggtgaagacttctatgaaatcatgacacaaaatttgcacagattccctggtggggttacacattccttcactgactcaacagaagatcaggataggctactttcttttgagaagatgtttatcggcaagttcttgaggtagtggcgggaagcaaagaaatttctgacatagaaggcctgagtagaactctgtaccacaacacatgcaggctcttctttcctcaggatcttgacgcgtctactaatgcgcagcttgagagtggtactgccgtccaggattgctgatgtcagagtgattttttttaaaaaatgtttccttttggttggcgtttggtttcgtacaacttccaatatgcctatgaaatgtttttggtcttataattttccctcgctgccaattttgccatgtttcatgagcctgatgacatgtcaggcaagtcctgactatgtacaagtaccctactgagactatgccctaaaatcatttagggctgagcatgtacaagtacagtttgatggctatgttgttcactacaatcaaacaacaactaagctctatatctatattttatacaaatttttaaattcc

SEQ ID NO: 42388 - DNA, 6702 bp, Zea Mays
acgacttcccatacacctctaccgaggaggcaaggcagggtaacactacgaggcctttacaaagttccactagcttcagaaaacccgctacaatttataggaagctccaatgcagggttcttgcctgactgccatcgtagcaaaatcaaccaaggacctccctacactgaccactcccctactgcccttgcccctttcgggtaaggtagtcctccactagctttcctaattaatcagccaagggcgtccataaacccttgtggtggcacgtgtttctcaagttaagatctatgttccaattaacattaatgatcttgacatgaacataaatagaataacaaaataactggaacatagatatgataaataattatcccaaatccatgtaaagcaatagcaaactacccaagtgattcaggggtaaacaaggtaatgagataaacaatctagggtaacctattgggtcccatcaaaattaacctatgcatgaataaatgatattaaagaacattattgggtaaaaagtggtcaagggcacaacttgcctgggacttgagattccaggtactaggattatcttcaggtgacatgtaatctcgctgctagtcgaagcaatacagacaaacatggataggcaaaattaacatcacaccaaacataagattaaactgcgtattaataatctacgcgtcataacgagatcgtagaaacaagaaccactaaattcggagctacagatattgagttatgaatttatgaaatcaattagcacctagaatagattaattcaattgagcaattttaattcaagtttcatggttaaacaaaggtactaggtgataaacaatattaatacaaaattaatgccactgaaatgaattaatttggagttaaaatgaattaaatatgaattaaacaagttttaagatttatttttatactaaaaatcaatttctattattaattatctagtttctctgtgatctggactgcgcgtcatttactaagaagcttgaggtttaattcgcaaaatctaccagactcagccctgacccgaggtggacggcgggttgatactgaggaaatggaggggctcttttgtaaagatgacggtcgaaggggtatcggggcatgtgagctgctggattaaattcggacggccacgattagatctacagctatccgaacagttaggtatctgcagccgttcgatcagaaacagacgcgcctgattagatccaggcaagttacccatccgcgttcacccccgaccgtccgatcagatcctacgatcaggatccaaccacccgaaccggtgcgcgagatcaaatccgaagcgttcaagcgaagagcaacggccgagagccagctgagcaaaaggggcaccctattccaatccacgctgttccttcattatccaacggccgaacccacttctacccccaacaccactccacacagcggcggcgtcgccgcgagcggcggcgaagttcaccagagaccctgattcaggtgccccgagccccaaactatggtccacacaaccataccggaagcccggtatcatccgaagtcaacactctcccacgcaacaccggatttctgcgcccgcgcacgtcttctccgatccgcaacaggccacgacggcgcgactctgcccgcgacgcaccctcaccggcgaggtacccaacccgcggacaagagcacaaaacccccaacctgaaagccccaacgcgataaagagaggacgacgaacttcatggacggtttcttacatggaatccctgcggcaccgacgctctcctcggcccgcgacggacacggcaacagcgaggcgaggcaacaatgatggcagcggcaatcaaggtcaatcccccagcccagagagcactgccagcacgacggagcccccatgagcacccaaccgggacggcgaattcccccaatggctcccaaagcaccgaacgtggcaccatgccctcggcggcgatcctcgcccgaggtagccccagcccccaacagccacgagcctgattccaaccaccggtcgccagaacagcacaaataatataggagggggctcaccggttaatcgtgttgcgtcgaccccccgtgacttagctcgcggcgactgcttccggtagaagtccggtgatagggtctcccttcctcacggtgattctgtggcttcgatggtgtccagggccacgggcgctcggattttatagccaagaggaagggagaagtccgcgtgagaggaggccgagatctccggcgaggttcacgcgattctctagcgcgcgtgggtttgttgggatacggcggggttcgttcagaggacagagatgttactgacgtggtgaccccacaagtcagtggtacgaaagaaaagaaaaggggaggtgttggggacttgttctcaaatgctatgaattaagaacaaggcaacataaaatgttaaatattaatgtccttcgtccactgaaacattatttccccaaggatttaatgaactacggacgaaggttataatgacacaattacgaaggttatatcttcgtaattgaactctcaaagataatgtaaaataacacgagtcataaagcattaaagacaagtaaattagaagtaaacaacatcatttacatattatataaacccaagatattcaaatataatgtttaggtacatttatacctctgccttggcaaggaataatttccgagtgatgtgattgcaattacaagaatgcgtgaacagtaaaggaatactgttcactatttataggcacaggacgcagcctgtgagcaattacaatcatacccctcataaaagtttacaacaacgactcaaactcttatggactaaaaggtcattctatctttaagtcggtttataattccgaagcttcatgaacggcaccctttggcatcacgtacagacagcttcagccgaagctgtttcttcccgcaggaccttcggcgacgaagcatggacccaacagtagccccttcgcggtgctagatcgtttttcgtaacgagcttgatccatgaacaaagtctcttaggcttcaggaagccgaaggtccgaaaaacaccttccctgagctcgttgtcgagaaacgatacagtttccgagcgcgtagcggtcccaccatgcaggttcactattttggtctttgcggcccaccgcgcagcgggtgcgagcagttgtttgccttgtgtaaaaatcctgacgattcaccttcttacctgcaacactatataaacagacaggtaggtgtgaagttaccacagcattcattgctattgcactgttttgctgccaaaaattttaaccatagccgaagcttgactctcgcattcagacgaagctccagtttggtgcctacttcatcagaagaaaagcttcgggagaaaaggttatttaattcccaagagatctttcaagaaattcaaaattaaatggccagagtgcgctctactgctagagttgagcgtgagggagacgaagccgaaggtgcggagactgttcctatctccgaagcaatgcagcgatccggattagtgacctcggaaagaatccccactgccgaaacagaacaagctgctgccgaagcggaacaaggagatattgaggaagctgattctgacggtgattaccatatcgcagtaccgagcaagcctagccatttggactttggaaagtcgactatctccaaggctgatttttccaaaatggtgaagtcgggctatttcaatgaagatgagaagaagctgattcgcttcgggggagaagaaactatcccgaagccagaaaaggatgaaatagttattttcaagagttttctaaaagctgggttgagattccctttaaatagaatgatttctgatgtgctgcaaaagtttgggatttattttcaccaactgactcctaacgccattgtcagacttagcgtttatatcagggctctctgaagccaggcggtggagccgcttgccgacagcttctgtcgagtacatgagctgcattaccagactaaggccagaaaggatgggttgcatgaaaattttggttgttataattttgcctatcggaaaaccacaaaatttcttgtgattagataccgaagcaaatggccggcaggctggaagtcagaatggttttatgtcaaagttgacgatgacaaagagaagctggtacagagccctcttgaactgatcttcggagaaaccagaccccgatgcaatatggcagcagaaggtccaacttggaccgcactggctgaattcaaaattattgcagaacacattggcactagagatttagtgcaggaatttctggccttcagagtatttccaactatgaaggagtggactatgccgaagcttaaaggagaaaagaaagagggggagcttgtccgactaccctattattataagtttaagaaatattttaaagcaccctgccaagaatggctcgatacaatcgaagtgatgagtaatgaaattcttggaaattactccaaaaaagaagaccagctgatgacagcagccttcggcactcggccgaagcgaaggctgaacagggtgcttgatgctataggatttgaatatgctgattatggtcgactgagcggagatgctggaggcccgaagcgaaaaagaattgccagcgctgctgacgaagaggtcgccaaggtagccaaaaagaaaaggggagattctgaaaaacttagccctgaagagttgaaccctgagccgaaggtggccactgcaagaaagaggaaaactgcatctccagaaccaaaaacgttggttcaagaagaagatactcctgcaacgccttttgctgttgaagtagaagagattatgaaggtaatgactgaacccttgcctgtcaagctaagtccgctggcgctggaactgacgaagttttttctgaaggacaaggcagcttcggcagaagaaggtcctgcactaccgaaaaaacgaaggattattcaaatagcagatgtaattcatgggacaccgtcaccgacaccggcatcaagaattgctattgaccagactgccgaaaccgccgaagctaaaggcgccacaaccgaagccaccagagcggaaaccttcgaagctgaaactggcgcagccgaagctgccggggttgaaaccggggccacagaagatccgaacctggaagagacacttgaagttattgataacatactcctaaaaatgactgaggaagaatctgttgtggccacggcgagcacagctactaaaaaggggaaaaaacaaactgaagacattttgggggaagaagattttgaatttcaagatttacttgggcaagaactgacagacgctgaaaaagcagagcttaaaaaatgtgccatagcctgcggatataagccaggggctacactgttcggtggggttaacgaaggaaagctgaggtgccttcgaaaccgcagcgaagctaaaattgttagaactctctgcaaaaacattggcctgccgaagctagaaacggacctctgccgttaccaacgacaccatatcgccggaagcttgctttatgctaacttcaaggtaacaaatatttttgttattttattattattattattatcttttaggtcgttttctaacgaagatcgtttcgacagagcatattattaagtaaggtactaaaaatgcaacaagatctcgaagaagagaagaataaagctgtcatccaagatctggctgaaaaagttgaaaattacgaagctaatctgaaaaagaaagacttcatcatccaagaccttgaaatcatggttaaagagcacgatggtgcattagaaaagaaagattttgttattcagactatggagggttctttggctgaagtccaaactgagaataacagtttaaacaatgaattgctccaacagtcagaaaaatttgagcaagaaaagaaatatcttgaagcaagcctgaaaactgaggtggataaaaattcaaatttgcagaaatcctttaaagaacttcaagagaaatgcctaagcttcggcagccgatgcgtgcagcggctgaaggatgtgtttcattctgtcggagccagctctgcaaaatttacaccttcagctgaaaatctgcccagcacattagaatatattgaaggcgaggtgatgcccttgacgaagttattggtgggcatgcggacttctgcgccctggtagcttctcggggcacagccaccgcttttctgaaggctaactgtacgcatggaaatattgtgaatagaccaaactttagcttatcagcatcagatctgatagatatcccaagcctagcccgaagcattggaaatagattcatgacccagatctgggtaattggcgggcgaaaaatggcgggtgacgaagctcgaagtcatcttaagccggtaagaaacttatacttgttacttttaccttctccttgaaatttgcacctttcttattctgctatttgatacacgcaggatgacgaagctgaagaatgacgaagctgaagcttgacgaagcctagcctgaagcttgatagttgtttacaatatactttcctgcaaaaattttggagaaacttttgtaatatagttatggaacaacttatgtaaatttgtacataccttgtaatatattttgtttctgctatctgtgtacaatctgctttgct

SEQ ID NO: 42389 - DNA, 553 bp, Zea Mays
gaccaagttcatcagtgtcccagctatatggtgtgctggtgcagatctgggtgcatgagagccacgttgattaactcaagcagtgctggcacactgaaaacactccttcactgcatgtttgccaagttcagggaacacctacctcatttcagctgtttataagggcaggatccagtggagctttcctccctgccgtgagctctgctcacagacacctgcaaagagtgtggagtcccatgttagaactggtgtaaccctctcctatgccacacagttgagctgctccagagcttagtgtcatttttcctatgccgtggtgaccatacccacccagttgccacttcaccatggccagactggagccgtggacagctccaccgtcgcccgaccaacttgaatcgtccccggccaatctcacgtgcacactgtgaccaaggaaggtgatgaggagtactctaggggttcctatggctggagggcatttccagttctggaagaggattaattaagcttgtgtataagctttggagggttcctacctttctgctattgt

SEQ ID NO: 42390 - DNA, 1328 bp, Zea Mays
cttcgcatgtgaactgcccactgccgcactgcgacaccgctccacccaccccaacctaggcagtaggcagtaggcatcaagcgtcctgcgtggctgcgtccaagtccaagcgccgtccggccaccagcgcaggtaccgagccaccgaggtaggagccagccaccgggcagatcccaggctgccagccaccggcgtccagcactccggctgccagctaccggccacccgcagcgcaggccacaccaatgggtagcaaccgcatggcgccatggctgccgacgaacaccagcagcgagacggccagaccccagagtccaacccaaggatggtttaggctactgaagggcaatgcactgattcttagactattgaagaatttacaggatgatgtgcaggagcagagcgtgggcagtaaatgcaaagaaaaaacacagttgcagaaattgctagcaatagactatacaagatagagccaaattgagcaaaaaaaaagaccattcccatttggatcaccattccctaaccacagcaaaatgaaggtggaaaattgagtagttgagtgccgtgtatgcacatgagcagggctaatactttataagaaatgtgctggttcttgatactcctccaaccagttgtagaagaattctggtttggctgaagtagttttacatccgaaagatggactttgtacagatatattctctgtcaacaatatgtatatccaggcggagatgaacttggagggaagcagatttacagtttgcaatttctgcaagtcgacccatcgtgttgaactaaaccatctctaatttcctacagcttcaactccaacaacagcctattttctaactgattctgtaggatggccccacacacttaatgaaaacatctctaatttctagcaaattcgactccgaggacaataaaggtaccacaatggacttcttaagaagaataggaatcgtgtacataagcttttttgctctaataaaataagagtggttgttgcaacaatggcattcagaatgggtcttgataagagtgacgttgaaccgatatgaccatttgactagcatacaaagttcaaatgtgacagcctatagctttaagcaatgttacactgcttatcacctggactgattcaagcatttgttcttttaaagtgaagttcacgaatatgctatgagaaaattctttgccagatattttcttgtgaaaattcagttggatgcatttgctccttggttaaagagtcgacttcagacaagttcgatataaaagaggaggacactcgatcgccacgaagacggcggttggatgcttcggag

SEQ ID NO: 42391 - DNA, 927 bp, Zea Mays
ccaagacccacaaatcaagccaagacccgaaaagatcccaacaaggcagaacgcacccttctctcagtctcagcgccgtctttcttcgttacctgcccccgctccccgaaggctcgaaccctttacagccggcgaagaagatgcacctgtggccatcgctccggatccgcgactcgttcaagcacggctacctccagaagctggagctcaacctcggcaacatgaagcgcgcgcagcggcagcgccagggccggcagggagagagccaggaggaccaggacggccagcccggcggcaacgggaaggcgccgctgctcgaggaccgctcgccatcggggtccgtgcttgccggcgcgctcgagctcgcctgggacgccgtcttgctcctcacctgctgctgctgttgcttctgctgcggagagaagcacagtattttaaccagcaggatctagttcaacattgtatcagattttaggctggcagaaagcttgtagcgacgaagaggatcacccaactgcccgctaaggagcaacttcaggtgcctgataattcatcagatcacgaaaaccagataacttgtgggcataatgaattgcagtcaaatagttcaaatagtttcggtcagctttgtacatatggttttctattcatccttatgccgcccatagatgtcattgataaacggaaaaaggatccttattttttttgttggaaacccgttgtgtaggtattttgggcgtgtaatcagttcgtatctgtattcaggataatctgtgcggttgctgtttctcaccgacacaaaggcgtttggtccaggtgatgcttgcagcgcatgaatgccgagtctcttgctccctcggtttacaaaaacttgttttagacaggattttgagttaacttttaaaacttcgataacaaataactttt

SEQ ID NO: 42392 - DNA, 276 bp, Zea Mays
agctcggtctacgttcgtaggcggtcggttgaagtccggtgaccttgatccggcgtctccggcgaggcagagctcgattcctcgctctgggagcttcaccgaggcacgtagagtctctttcgagggttggacggggctgggaatggctttgctggccggtctatggtggcgggggatcgggcggccgctggcatgccgtgtgtagggcaaactccggtgatctcgtgctctggtgaggtcgagagtgcgcgggggcgtacggccgaagccttggct

SEQ ID NO: 42393 - DNA, 1652 bp, Zea Mays
gccccagcttatacaccagcagtgtgaaaaaataacattgaaagataaatccttgggggattgcaagctttcgctgtgcggttgcggtcgctccccttcccgactccggccagaagcagcgacggtgccggcagccggttactccactcggcggcggcccatcctttcatgttttctcctccagtcctacaaatacaggacacaacacgcttgctcttgtgatactctattaagaatgttttgcttgaggaactactggtcgcctgcatttgcttcagtaaaggaggggcctgttcgacatcatataaagtttaattgtgtagtggtttgtggtgccaggggtccaagaccgagatatccccgtgtatggaaaactcgtaagaaaattgggactatttccaagtcacagaagcttgttgaatgtattaaaggtctgtctaatgtaaaggaggaagtttatggagcgcttgactcttttgttgcatgggaactggagtttcccttgatagtagtaaagaaggcactgaagaaacttgaagacgaaaaggaatggaaacgaataattcaggtcattaaatggatgttcaacaaaggtcaggggaagacaatggggagctattacaccttgttgaatgctttgatcgaggacggacggattgaggaagcagaagagttatttagaatggtattctcacgatatatggagggtttgcctcgtacatttttcatgagaattatttctttctattacagtgctggagagcatgataagatgttcgagatttttgctgatatggaggaactaggcgtaagaccagatggttctattatcaggatgctaggtgatgtatttcaaaagatagagatgatggacaaatacgaaaagttaaaaaagaaatacccaccaccgaaatgggaatatcgatacatcaaaggcaagcgcattagaattagagtttaccctgatagtaaaactgaagagacggcaaaaggagaccatgacaatgatgaactcggagaggtagaaagtatacagcttgataatgaattggaagaagaagcaagctcaggcctcgacaggagtgtattggacgatgcaacttgtggagaccttgaatatatataattcagagcttccatttggttttttttaatgcctgcttaatcaaagcggcctggagcaaattgaaccgattgagatttttggtgtagccaatttgctactgctgccatgttaggaaatataaaagatcagccctcgtgttcaatggatttacggcagtttatcctcgcgtattctgtcaaatggtctggtaatcctattccattggtacacctacatctgactgcattcctgaacatgtggttgattgttggaggcaatatcctggacatgagagcagcaaccattatatcattcgtatggccctggcatggaaagacaccgtttctgacagagacttgtgttatctgctctagccatatccagtgtgggggcgaaaaccttcgcaggacatttgcgtggtcgattaccaaattaattagggcaggggagtggctggctgtactattctggggctataggagtaattaagaaaaactggggaagcgatcactccataaggacatgtacaaggccaattaatgactcg

SEQ ID NO: 42394 - DNA, 1130 bp, Zea Mays
gcacaaaaaatcatggccaatgccgcggtggctggctgcctgactggctgcctgacggcgaccgcggccgaggggcggggtggcgtcgtcgacgagcggcgggatggggcagaagtgacggcggctgcgcttgtggtttggtgcgtgaaatagggtttcatttgtttagtaggcctttaaatgggctttggtgagtaaataagaaacacaaaaatcacgtacccctatagcgacccaccatcagtcacacacttacttctatagcgaccaaccatatgtcgttaaatttctagacttttagcgacccacagaccgtcgctataaacgcatttagcgaccaaccgtcggtccataacttttagcgaccaaccgtcagtccctaataagggtcgctaaagatcaaccgtcgtgtagtgattgcagaaacttttcgcatcaggctccagaccttggcttctcacggcccatacgaagatattcagccttataattgcttcgggggtaagttgatgaagatagacttcaaacattttcagcacctctacgacgaagctgctcaggggaaatcgtagtccagctttcaaaaagcttcggtacactacaacttcattctcttcagggtgtggacaagtcttttccccttcgtcggccctcacaacggacaaatcccggaaataccttcctctcatgttgacaagatgattttctttgatagttgatttgccgaaaaccgcatggcttggtcgccaagggcgatcttcggagtcttcaccaccactgtccacatcataactgtcgctgtcaccagtatctccagacaaaccttccagaatctccttggtgattttttctgtattagtcttcgacattgctataagaaaccccagattcttctcttcatcgagactcaacttcatctcggtagcagccttcttatcttcagacatcttcggggatactaaaaaactgttttcaatgccgaagcttaaaaacttaaaagctcagcaaatcttggtgcgcaagagctaaaaattgagtgagcgggagcagatggcaagagagcgtgccaaatgagtttgcggtatgatcttatttatacgcccagtgcgttgaaaattgaaagaccccgc

SEQ ID NO: 42395 - DNA, 278 bp, Zea Mays
aacacctggggtgttacagccctccccccttaaaagaatctcgtcccgagattcaaaacgaaagacttctaagagtagagaagcatgtaacccatgtccatatcagcgataatcatgagacaattccaaacaaagtcgagtgtctcaaaatgtcgttcctctagtggacataacatgtgtcgccttaggctaatttagaaatgtccaccaatagagacgatgtctgccagaagtacacataaggttccatgtgtgcagtttactttttctgatgacac

SEQ ID NO: 42396 - DNA, 5064 bp, Zea Mays
cgtaaccaacggacattgtaatagtaaatactacagcctaaggttggcaagttttaaccttttcgggccctacattttgaacctagttttatgattgaatatccgttaaaaacactgactattgcaaatgcgtgcaaagttggtgtagatgttttaaagttttcttaaaatttattactgacacataagtcgatgcataatgcaaaaatgaatctcaaggggttatctgtcttcctcatctccagaacctttcttttccctctgtcctgcctctcaataaactccgtggagctccagcgggtaaggggacttgctcctgcagccccgagtcggatctgcccctgctgatccgaagggccaccttctctacccttttcctgatgttgagagatttgataatgaagcatttgatagagctgcagtcgttggaagagataatgacaaagcaaagataaaggacatgatcttgcaaagtaatgcacaaaagttctcaatcattcccattcttggcctcgtggggttggggaaaacaactcttgctagattaattttccttgaccagggagaaggttgggattttgatcttcgtatctggatatccttaaataggaaactaaacataaaaatgattgctagtgatataatctcgcaatgtaatcatagagaagaaaagcttttagatgttcgtacggacatggagatccaggaaaactttcagttgctaaagaggtgtttgcaagaggcactccatgaaaaacattgtctgattgtcttggatgacctttctagcacagataaaaaccagttggatgaattgaaggaaatgctgaagggtacaaatgagtctatcaaggttttagtgacgacctccagcgaaataactgcagaactactgcacaccattccaccgtacaagttgtgtcctttatctgaagacgacagttggaaaatattttctcaaaaggcttttgggaattgtgatggtgataacactgaccttaagaaaatcggaaaggaaatagtaaaaaggtgtgagggaataccattattgactcattctcttggtttagttgtacaaaatgaagtcacaaatgtgtggttagctgcaagggatgaagagatatggaaactagaaagaagagttgccactaaaatagaattgttttcaccattatatcaaatatacaatgacttctcctcaactattaaattgtgctttctatatttatccatatttcctaaagggtctacaatagataaggaaaaactgatccaacagtggattgcactcgagattattggatcaaaacatgactccttgcctccttatgtgaatggagagatgtgcatccaggactttttgtcaatatattttctccaagttcgagatacacactcagtttatggaatggataacagagtagttcctacaacattctacattcataactttgtccatgaatttgcaagacatgttgcttgtgatgatattataattttcgatggtaccaaaatgcaaaagggctgtgcaaaaagacaaaccttccaatatgcactcttgacatgttaccgggtgcagtcaacattttcccactcaacgctgacaaggacaagggcattgcatatcatgaactctgaggcgataacatttcctcgtgaagcatttgaattactgaagcacttgcgtgttttgaatcttagtggatgttgcattgaagaattaccagcctctataggttgtctaaagcgtctaaaatatcttgatgtttctggtgtgcagatacaaacattgccattcccggtgagtaggttgacaaaccttgaggtactggatctatcaaaaacatgtatgaaggaattaccctctttcattggtaatttacagaacctaaaatatttaaacatgcaaggttgtgataaacttcaaaacctacctttatcccttggtcatctacaacgacttgagcaacttcgactgtcatgctgcagatgcattgctatgctaccagactctttgtgcaaccttatcaatcttcgaattttggatttatcaagatgcactatgctgcgacacttacctgctttatttggtaacttagtgaacttggaggatctaagcctatctagttgtttcaaccttaagcagttaccagaatcttttggtaacctttattttcttaggttcctgaacctatcaagctgctatgaacttcagcagtttcctgaatctgttacaaacctcgagaaactggaagttcttatactccggagatgttgtagacttcgaattctccccccctcctttgcaatgattaagtaccttcgaattcttgatctggctggctgtgaagcacttcatgtaagtactgagatgctaacaaccaatttggagtatctgaacctacaacggtgcctaaatcttcagactcagccatactatttcgaaaacttcaataagttgaagtttttgaatctttcccattgcctccctaccgttgattgcctggaatctattagttacttgttcaacttagaatatctagatctgtcagaaacttcccttgacatacctatgtcttttgcaaggcttcagaagttgcacacactgaacctcactggttgtgctccaatgcatccatcctctaatgtacaccaaacatggccaggtatattagcaaaaattacaagtctcaagtctgtgctgacgatggacccagtattagcggcctctcttcaaggacacaccgagtgctctgctgactatgattatcactcactcacaacaaccgatgagcttgttattaaagagatcacaggcggttcccgaggccttcgtattgctgagcagttgaatctgcagaatcgactggaggtttgtttccttaagctggaatgggttcctaggtcccaatcagctcaagatcaactattggaatatacagatgaggaagtgctggagaagttccaaccaaatgagactctggagcattttatgctagttaaatatacaggcaatgtgtttcctacatggatgatgaacaaactgacttcactcccataccttgtcaatctttgtttgttccacctgcataactgcagtgctctccctccaattggccatctacaaaatctgcgttacttgcatattaaagatatgcccaacctcacaaatctagagatgggtctttctggggggcctgtgtccttggggaaattgactcacctcaaactggaagcactgaatttagaagagctgtctatactcttgtcagccaacaatgagagtccctgtttcatgtttcccaatcttgaggagttatctgttctatcatgctctaagcttgtcttcaaaccatctgtgcctaagtgtgcgaaatatgtaataaaagagagtaacatggttctgtcatgttggcagcctctggggccattctcatctccaccaatagaaaaagtagagataagtgggtgtgtgatgccttctggttggttgcaatggcttagatccatacagactcttgagaaagtagtgatagatggtgaagctctttcatcttttgagctccagaagatatatgcatttcaagaagcatctggtagtaagatttcaaaggaaactgtaagttcatctaggacaaatatgtcacgtgagttgaccactgaggatggtgcccttaaagctattggtatcgacaactcaacaatcaaacatattccaaggtttaacaccacttctgaactctcagtggatactatttcatcctctaaagtaagcacaccatccaaggagatcccatcaactttacgccgtccggacaagtcaaaaatgcctgcactaatacctggagatggatctttaaacttaagccttaagcaggttcagaaggttactcataatttctcacctttatttgagttaggtgaagggggaacctgggcagtttacagggctgtattatcagataaccaggttgttatcatccggagagctaaaaagggccacgttcaagaggcaaaacatcttatggaagtgaagctccttacaaaaattaatcactggagtttggtgagattcttaggttttattgatgaaaaagatgagtgtattcggatcacagagtatgttccaaatggcactcttagggaacacctacatggggacgctttaatctgttacaacttgaggacgtcaaacatcctactgacagagagctaccgagccaaagtgtgctgttctgaactgtcaaaaagtggtaatatcgtgctattaaagggaacagggggctacattgatccagagtacttggagacctcagagctcactgccaaatctgatgtctactcttttggaataatactcttagaaatcatatcttctcatgggccacaagactgggatgtattgatgaaccaccggcaaagcagtgttgtacaatgggctcttgagaaattctatgacgacctcatgaatgagatattggattaccgtatggaggatcgcgtggatggagatgtggtcagggacttgctcagcttagcgttgagttgtgtggtttcgcgtggcgctgatcgcccaagcatcgtagttgtcggggagcgactgtggaaaatatggcaagatcatcgaagaaacgtaggggaacagcacgagtaccaaggaagctgggcagaatttatcgaacaagagggaatcctgaggcatcacaagtgtgtgctcaagagaagttgggagccttcaacaacgcagcaggattggtctgtgtatgttaggcagattgaattagttcaagaagcttacgataccccatggggagaggaaattttttcggggtctgtttcattggacgatatcacagtatattctcggtagaaagcttcaatacgattatattactcctgttttctccgcggtattacatgtgtagattggaggacaataacctatttgttctatttctgtttcattggacgataaatcatagtgtctcctcggtatgaactcttgaaagtttcaactcgttgttttcctcactctatttattcagtgatattgctgttagaaaa

SEQ ID NO: 42397 - DNA, 866 bp, Zea Mays
gtcgtatcttccttctccttgtctatatactacttgcaacagcccaatctctggtctcaaccatcgcacggagccattgggctgcacgacggaagttgtgctcggcacccaccatgcatgcgttctctgctccttcactggtcgtcgtgttcctgctcctctccatgccgcgcggctgcagaccgaggagcagtccgtgccaggtgcgtgctccaggccagcggcgcgggtctggccgtggtggtcagcacgttggctgtccggccatgtggagacgtgcggtggtgagcagggcgtccttccattgatttcctgctcggctccctccttgctcctctctctccctcggatttgtctgcgcccagccgcgtcctcgagctcggcttcgagctccatctccctgcgccgctactctgctggccagctgccgctccctggtcggcgcgctgcttcgagtttgccgagctccctcgccatagtcggagatccctcctcctctagctcgtcggttgtatccctctgctcggccgccgtcgatcctccctggacggtctcaagcgccctcgccttccggtggtttcagcttgccgtcaattatccttgccgcgtgtgctttagtccgagctcgcccatgtcgagctccctcggcgttgctcccatgcccgtggtcgcgcgcagtcgcccagctcggtctctgctatgtctctgctgctgcgtgtagaaagtaatccttggatgccatgtttagcagtttatcttgattagcttaaattaggtgtatgattggaataaggctgattgagagccgttatttagtttccttattacagtagttcctttccatgtaatagtctatataaaccaag

SEQ ID NO: 42398 - DNA, 5158 bp, Zea Mays
ataaagcacagttagagcagataaaagaatgtgctcagatagctatcgagtgcagtaaccctaaagcagagaatagaccactggatacaaagcatataatcgataggcttcaaaaagtggaaggtgcacagggaactcaactgcagtctgctggcaagttattacttcaagtccacccgaccttcctcgtgtttgagttgcaacccgccgggaagttgaccccatgcctactgcacctcacaaacgacacggatgaagacatggagtttaagcttaggatagaagagggtgtggaccagcgatggtcggagcaatttggtgaagagcgtttttcaggatgcggtgttgtggctgcgcgatccacttacactctcattctgacggtgtcgtgggagcgggacgatattcctgaaaacagattttgtgaaatgattctcgacagctggcctaagcaaaactggtactctgaagctaataagaattcgaaggaggtgaaactgacagcttatttgtcgactcagcacagacagtcgacagcaatacccacggcaaccagcggccagttgggcgtcacgatctcatggatggagaaaccccgcacacgtatgtactccgttgacgcgcacccgaccaagccatggatcataactggtcatgaacaaggacgcattaccattaggaaccatgacacacagaagctactgtattcgtttaaagtctcgcggggaccagtttgttctgtcaaattcattgcgcggaagcaatggttcatttgcgccacagaaaccgaaggtttcgcacatgtatacagttatgaaaccgaagaaatgcaaaaggttaacagtttcagagctcaagaaatgcaaaaggttaacagtttcagagctgacgacgaccatatccgccccatatcgctggccgttcatccatcccagccctatgtgatgtcgtggtactacggcaacgagacaatgaagctatggaactgggacaaaggatgggagtgcacacgcacattccaaattagcggcaaaacctttaaaaaaatcgcttttgacccaaaggagaccaaccgctttgctgctaccgctgttggcactagcttctttgatactgatgtcgacgtcatgatttggagccttgactgtcccgaacctgaatattatctgctttggacggatattagggttatcatgttcctagaattcttcacatgttacgatcgacagtatttgattattgttgatgaagataacaaagcacacgtgtgggacttgcagcagcgggaatttgcttttaagaagcgaaaatccttgtctcttgaaccttctgtcttctcacatcccaatctaccgttactactagcagcaccaattgaacgcacatgttgtttctggagcgctaaggatttcagtttttatggagtccttgacaattctggtggagaaaatgtggtgggtatcgcttgcttgatggggtcaaaaagaaggtttgtgattggacagagttatgccttaacagtcttggatattgaaaaagctatatatcaagaggacctaagggaatccattgagacaaagttatgcaatgatacaagacagtcctacacaagttctgagttgattacccaagagtcaagtgagattcatcacatccacccgctgaaggcccacttatcctttcaagacgacaacttaatcccttgcttactgcacctaacaaacaaaactgataaacacattgcttttatgcttagcagtacgacagaagagcagccctttgaagcgacaccactaaaccacgacattgtgatgtcgagatccatatatactcttgatattaaaatgccgacagataaacaaaagtccaatctgatcttgcagagcagtatatatggggataaatacatctataggttcacagaccaatcagaatgcgatcaattttttaaggatgctaaagagaccaggaatgtggtgcatgaggtggtgctagaacctgttttgtctcagcaaggcgagacaacgtcagagaaccgatcgactggacaagacgtaacccaaacgttaacacagataaggggtttgtggcaccctacgacagataatgatgtaatatctttactagatgttaacccagcagattcatggaaacgttatatttgatgagcaccaaagatgatgtttattctgtcaaaatcattacaaggaagcattgggttttggttgggacacatgatggtttcatcttggtgtacgagtatgaaacaggaatgaaactgataacaagattcaaagcggtatcaaacatattccatggttactctgatggagtgttggtcgttcatccaaccctaccatatgtgctttcggcttatggccgcgaaatgaaactttgggattgggacaaagggtgggagtgcatacaaacatttgagctgggacgctatggttccatacgtcaagtggcatttagcccgaatggcactgataattttgctacagcttcaagtgatcgcaaaataaagctttggagccattcttcccccacagcggagtatactctgtgtcaccataagagagatgtgagctgcctggatttcttcagaggtgacgacagtaatcaatatttgattagtggctctggtgactatacggccaagatctgggacttgcagaaaaagacttgtcttcatacattggatgttatgtctccggttacttctatcatttcccttccaaattctccatatttgattataggttcggaagacggaactgttcatttgtggaggtctcctagttttaggattgagagaatacttcagattggctgcacaagacctgttcggagcctatgtttggtggggtcaaaaagggtactcattgaaaagatgggtgaagtatcaatcatggatattgatacatccattaaggaacccccagagttattacttcatgtccacccgaccacactcgtgtttgaattgcaacccgggaagttgagccaatgctcaatgcagctaacaaatgacacagatcaacacatggcatttaagctcagttcaacagatagtgtggactggttagagcagtttcttccatggtacggcattgttgcggcacgctccacatacactctcattctgaatgtgttcttggagcgagatactgcagaaaagagattctgtgatatgatcctagagagctgtacatgtgaatacaacgacaataacatgtattcggccacaacttattgggagaaattcgttgatcaagagaccaagaaagtggtgaacgaggtgaaactgacagccttgttgtcatcgtctcagcacagacagtcaatagtagctcccgacaaggtctcatgggtggagaaaccctggattcgtctgctctccgtggacgcacaccccaccgaaccatggatcataactggtcacgaatgtggacaccttgccattaggaaccatgacacacagatgctactgtgttcgtttaaagtttcacgtggcggagtcttttgtgttaaatttatagcgcagaagcaatggttcatttgcagctcaggagaaggtttcatacatgtgttcagttatgaaacccaagaaatacaaaatgtgaacaatttcagagcttatgacgacaatagtcgctggctccccatatcactggccgttcatccatcccggccctatgtgttgtcgtggtgtcgctacgatagtgagataataatgaagctttgggactgggacaaaggatgggagtgcgcacgcacattccgaagtggaggcattaatgtagatcatatcgctttcgatccaaaggagaccaaccgctttgttgctaccgattgcttggatggcaaagtgatgatttggagcctcgactctcccgaacctgaatatcatctgcctaagacggattttaagggtatcatgttcctggaattcttcacacgttatggtcggcagtgtttgattattgctcatgaagatcataaagcacacgtatgggactttcggttgcgcaaatttgtttctgagaagcgaaaattattatctcgtgaagcttctgtcttcttacgtcctaatgtatcgttactacttacaccttcatctaaaggcacttgccgtttctgggacgctaagaaattcagtttttatggagtcattgacaattctgctggaggagatgtgctgggtatcgcttgtttgatggggtctaaaacaaggtttgtgattggacaatattatgcattaacaatattgcatcttgataatgcaatatatcaaaaggacccaaggcaatctattgagccacaattatgtgctcatacaaggcaaggagacacaagttctgaggagaaatatggggaggagatggtttggcatcatggcccaaacttcgattggcagcatgaaccatttgatgccgcaatcatgcgagctagtggtggcgagaacgcacatgaacagtacacgcttttcgacataatgattgactcaacagaggtgagagctcaaaggatgagttcttcattctgtagcatgagcctttcatctcatcagcccaaggagcaggagttggaggtggctaggctgcgcggggagctgagacagcgtgacgagcatcataaagtgcaacaagactacatgttctctttcatacagcagcaacacgagattattcaagaattatcccagcaacatggcttggatgtagtcctcccagagtttcgaccgccactgccaccgatgctgccacaattgagtccttttctatctacaatatctcaagctacgactgatgcaagtgggacggaacctactggaatggcttttgtggagtccttcgcctaccctcctcctgcaacagatagcaaccacaactctaataatccatgtagcgattttggtgcctgagtaacattgcatgtttctttgcatttaaacttgtgctttttccaattatgtatgatggtcaatatgaattgaattgaatctctatagtttgttgaacgaaagacttgaatatgtgagatgtgattgtggctttgaaaggatatgtgagctatgacgagcattgatgaatttaaagtattatgtatatgatgtatgtgaattgtgatatataatgtatgcgaattgtgatat

SEQ ID NO: 42399 - DNA, 1822 bp, Zea Mays
aaaaaatcgtgcctcgagtcttccccgcgccgcgcgggcaacggataacaaacgctcggcttgtcgccgtccgtcccctgccgccacccatcacctgctatcccgccgggatcgtacgccaattcgccaaaacgatggcggcggcggcggcggcgggcgcggcatcttccatcctctcgtccacgcccccgcgccgcctcaccttccctcccgcccacatccgcaaacccctcgccgcggccgcccccaaggccctcaacctgtcatcgcagaaactccccccgctctcttcatctgccacggcctcgccaccacctccgcccgacggggacgataagccggaccccatcaagctcgctttcgcccgcgctgccgcatacaagaaggggagggacagtcacagcccgagcccgagcccggcgccggccccgcctcccacgccgccgccacagtcttcaccaccgtcgcagccgcaggcttcggtcagtgagcccggcagtaaggaggcttttaagcgggcgttggagtaccgaaacggcaacggggccggagcgggcgcggctggtggtgactccccgctgctgggaggctcgccggattttggtcagaatgccctaattagtgaagaagtctcgtttggcaagagaggagggtacgagtttgatgaggctgattttttgggtctcgacttctttgagaaaaaacgttctaaaggtctaccacctgggctggctccagcttttgagcctttacgagatgacgattttcctgaggtggacataatagttggagaccccagcaaatttgacaagtctcctcgccgaactgaaatccaaccggtagacaacggggagtcaggggaagcatctcaatcgactactaaaccaaatgaagctgacaaggctgggatagcacccccttcaactgttattgagactgaagaagatgaagatgtttatagacccacagttagatcatggggaatgtttccgaggccacaaaatatttcaaaggcgtatggcggtggaagaaatatacgccttggtggagagactcaaagtgcagaagaaaaggcagccaaagataagcgcaccaaagagctaatagctgcatataggaatcgacagaacatggtaatcgatgcaaagacaaaagcagagtgcatcaaggccttgagggaaggtgatgagatgatgaatactggaaggcttaaacaagcattaccttattatgaaaaagtgatggacgctgtggactttaagactgaatttcatggaagggctgctctgcaatggtccatctgtcttgattcactttgcaggtccaaggaagcaatgagcatgtatagcaaacttaaaaaccacccgaatagtgagatcagcaagaaagcaaacatgcaatggatttcatgaaggtgagcagcattccagtgcccaaaagcacaggctacgagacgtacttcaccaaatttggcagcaagaagaattactacgcgagcttagaagagccggaggtgggaatcgagcagatcgtcccgtacatcatctttcttgtttcgccgatatttttagttgcttttgttgcactgagaaaatccttccaactatgaacagaaatcatggacgagttgctgaggttttaataccgtataggagcacatagcttggcaatagaagattattattatgatttttttgttttcatcaaaagagcaaattattttgtgtagctgagctagggactaatttttaatcccttttctttaggccctgttccaatcctataagataaattttagcagcttctttttagctacttttag

SEQ ID NO: 42400 - DNA, 447 bp, Zea Mays
aggaaatcgggcaccggactgtccggtgcgccagtcgacagaaggcaagatcagccttcctagaatgctctcaacggctcctagctgccttggggctataaaagggacccctaggcgcatggaggagtatctcaagcatcccctaagcactcctaagcactaagacatcgatttcgcgcctttgattctttgcgatagcaattagagctctagttgagtggtgaactcattgagttgtgttgtgagctctcgttgcaacttgtgtgcgtggtgttgctgtgatttcttgtcttgagtgcgttgctaatccctcccttgttctgtgcttctttgtgaacttcaagtgtaagggcgagaggctccaagttgtggagattcctcgcaaacgggattgagaaaagcaagcaaaacaccatggtattcaagtgagtctttggaccgcttgag

SEQ ID NO: 42401 - DNA, 2292 bp, Zea Mays
cacgctagtacgctacgctaccggctgcggtggctctcccgagtcgaagtggcagctcccagcctcccacgcgtgaccgtgagagggaagggggtatttaacagacggcgggccgaggatgcgagctctcgcggcagcagcaactgcagtggcggcgcctacccccacgcgcctccgcctcccgctcctctcccgcaccctgcgctctggtcactgtagaagctcttattcctccaggctcctacggttctcgtgcagtgccaccaccatgggagatgagacctcaacctcggttgctccccaggaacaggaatccactgtggctgggagtgtcaagcaacagctctccgggctggtccttatgtccctccgggctactgtgcctgaggtggaggtagaaccgatggttgaagtttcagcaaagtttgctgactaccaatgcaacaatgctatgggattatggtcaaaggttaaaggatctggaaccagtttcaaaaaccctaatgccattggacaggccattgccaagaacttgccttcttctgatattattgaatccacatctgttgctggacctggttttgtgaatattgtcttatcaaaccgctgggttgcacagagaatacaagacatgctcgttaacggtatcaagacttgggcaccaattcttccagtaaagagggcagtgattgatttttcatcacctaatattgcaaaggaaatgcatgtgggacatctaaggtctacaattattggagatacattagcacgcatgtttgagttctcgaatgttgatgttctgcgaagaaaccatgtaggagattggggtacacagttcgggatgctaatagaatatctttttgagaaatttccaaattggcaagagattggtagccaggccattggagaccttcagattttctataaagcatccaagcatagatttgacaatgatccagaatttaaagcaagggctcaacaaggagttgttcggctacagggaggagaagagagatatcgagaagcatggaaaaagatttgtgacattagcaggagtgaatttgacttggtctacaaacgcctaaatgtggtgcttgaagaaaagggggagagtttctataatccttatattcctcaagtgttggaggaattgagtagcaaaggcttgatcaaggagagtgagggtgccagagttatatttattcaaggtcatcagatccccttgatagtggttaagagtgatggtggcttcaactatgcctcgactgacttggctgccctttggtatcggctcaatgttgagcaggcagagtggatcatatacgtgacagatgttggtcagcagcagcactttgacatgtttttcagtgctgcaaagatggctggttggctgccaggtccaaacgaaaagaagtttccgaaaacaagccatgttggatttggtctagttcttggttcagatggcaagcggttccgaacgcgcagtactgaggttgttcgattggtagagctacttgatgaggctaaatctcggagcaaatcagaactactacaacggctcactgaaaatggcaaaattgttgactggacggatgaggaattagagcaaacttcagaggcagttggatatggtgctgtgaagtatgctgatctcaagaataatcgtctgactaattacacatttagttttgaacaaatgctgagcgataagggaaatactgctgtgtaccttcagtatgcacatgctcgtatttgttccattattcggaaatccaacaaggatgtggaagatctgaagatgactggagccatttctcttgaccatccagatgagcgtgtgttggggctgtatcttatccgatttgctgaggtggttgaagaggcatgcacgaatctgcttccaaatgttgtgtgtgaatacttgtacaatctatctgaaatgttcacaaaattctataccaactgtcaggtggtcgggtcaccggaggagacgagccgactgttgctttgccaagcgactgctgttgtcatgcgacagtgcttcaatctgctagggatcaccccagtctacaagctgtgatcggctgcatgtttgaagtttgatttatacattcaacatcgctttacgtagaaacccattcatcatggttgcagttttggccttgtaacctagttgaggcagttaacagactataatccatctccctgtttgaaaatagaagcaactcaaaagtttgtaacaaaatatgctctgcagagtttctattgatccattacattacgtaaaaaata

SEQ ID NO: 42402 - DNA, 612 bp, Zea Mays
ggacttgttgctcttgaattcctactttccaagtggttctttcagcagcactggcctcactatttcttctaaattaccaagattctcggacatgtacactctcacaatagcaagtgcggatccacagtctatctctgcaaacaagccagttcatttcactaagagcgtaacaaagtggtttacaaaggaaggagttcttgtggagggcctgttctggaaggatgtcgagaagctgattgatgactacaacagtgagcgcaagagtaaatgaattggtagctcgtgtctctggccatctggggagacatcgctgtctagagaaatccgtcaaagtttagcttaatctgaacaggcatttttgctatactgtaccggttgaccagtgaatgaatgatgttctagacattaactttggttccaagctttctgtcgtgtccatggataactatccgtccgaatcctagaaacgtggtccgtgcttgtaacctgtttgttctggtgcttccatacgccggagcagattttgaagagaaatgaaacaaatcgttaaatcacattatttcgttactgcggccacttatgcagggtttaagcgtacttccgaatagctta

SEQ ID NO: 42403 - DNA, 7007 bp, Zea Mays
atggagacggctgccgcgaccgcgaggcccggcgcagcgaggaagcggcggtggaaccaatcgcagccttgccaaggggagggtccgagcgatctcaagttcgctagacttcgcttcgacggcgacggcggcgccaagggcgcgtgggaacacctcgacctcgtcctctccctccagagcaaggagctgtcgctcgaaagaaagattgagctagcggtcgaatttctaaccacactgccaaataactcaagctgcagcattcagctattgcggctggtgtcatttattggaaactggttgcagtctatcttaaattttcctgagaatagtaaaaagattctacatatttttgatccagcattggatagtagatgctgggcaattttgagagtgtgtgttgaaaagaaaccatccatttcaatatctctgaacttacttaaatcccttagtcgagttgcaagtcatggtttgggcagagttgatagcaacacatcatgtcctgacaatgaatctattgagctctttgaacaagtgtttgactgcatgtcattgcttttctcttccaatacaagagctttcttcaacgctggtgtggatttatgggcctcttgtgccattgaggttgtcaatcttgctcagaaggtgtcagctaaaaaggacaatttttgccctgttcttcagaagcttgcaaattgcctcctcgggcaattcgcatgcttcctgagattttatgcaaatccgaagaatattttccatgcttttgttgataaggttcttgggccattgttggaattgttagttttacttaattcacaagcacattccagtgaacacaagcagacaggaacaatgttgaaaattgttgaagatgttttttcaaatggactgtttcatccccaacatcttagtggatatttcggtctcaggagtttgaataaatcttctgctgctaaggatatcaaaggaagctaccatagacatctatttcagcgattcaaaggaataaaaacagaaaacaaggctgtattgctggctgggtttggctacttgtttcaattgtttgttaggagggctagaaatcaaagaacaactgtagcaccaagtagaacgactttgggtacgctgcacaaaagcaatgatggttctgaagaaccacaacatagggaatcactttttgaagtgtttattatgttcatggaacccatcgtattagagtgtaaatcgtattcccaaaaggacttctctaagttaggggtgacaaggctagtagaggtccattgcatgctgaaatccattaatgtgatgctgataacccttattgaagagaagatctatgttcctacagaggacacattggaaggatctcacttcaattttttgcaagatatttactctgtcttgatcttaatatctgaaaagatgtacaaattctggatgtctgctgtgcatctagaagatgtaaacattaagaagatagtacctttaatgtttgcagagattatttctgcagttggcaattttctagaaatcgagtacaaagttctaggagacgaccttgtgaaattgtggttaatgatttttgctttgtctgctattaatacatcttccaaggacatcgaaccctgttttctgcttgcttcaaagatttcaagcctctcagcccaagtgatttgcacattcagtgaacttcgtcaggtttcccgctcaattttcagtctgtgtgatgctgtgagggcattcagagttgagggccctgatggagtacatggctcattttctgtggcctctttatcgtcccaggagtgtttgggatcattgacaacactgttgagttccgaaacattgatgggtgctattcgcacttcaattaagtcgatgcctcaaggccagtctagccgatgtatagaggagcttacatcggatctcacagaaacattgaattggatggcagattgcagttttgaagatgatgtaagcaaactcagagagccatccattgccaggaagtctattttttgtcagaaagccgaacttcttggcagacacttatctgaagtatatgctagcattcttgattcaataactgtcactgtttcaaatagtacactggtaggaaaatctgttgaaaggttggtcaatgcagtccggcgaaatttcagtcacttggtcagaaacaaatcaaaaaatataaatggatttatttcttcaattatgggaaaaaatgtatctaaaaaactacatgccaaccggcagaagatcccaagtttttcctggattttttgcctattctgtcgcctatatatatcatgtagaagcttgtatcagcaatctattggcctcatgcctccagatgtagccatagatgcaacaaagttagtggggaatccattcattgtatgttcaggaaaggaatggaccaatccgacgaatattcttgggaagggttattttgcattgatcgatgaaaattcaaactcccttttggatgttattgagagtttatcagagtctctctcaacaaactgtgcttcttttgctccacttgtttacatcttccatgtcatggttctgcagagactcaatgaccttaacaggcagattaaggcatttcaatttttgcttgaagatgatgcttggcaaatagataataaggatataggaaacactcgactgttaaaggaatcttgcagtctggaggctgctaaattgatgagttttgtgatgaattatgtgaagctattatcttcaggagaaactggtccttttgggtcttatgatgttagtagttcctgggatttgagtctatgttccttagatgaaggctcttttcctatagccacgtggcagcttctgtgtgaaaacattgacgtttggagctctcatgtttctaagaaggatttaaagaactttttctctaatttgataaggttttcttttactcaaaagagatcttccctggacaaggagaataatggcactcaatcttcgggcagagaaatgactttgcatagtgtctctattggagtcctttgtgatacaattatttatgaaaaaaaggtaattttgaagaatctggcatcaagtttttgtcatgctttgaagaaatcgttttcttttgttaccaactctgatggagataatgtctttttggacacttcacctgatttgatggagacaataagtaacctggaaaatgagaagttgattggtacaggttctggtgctacgcatgcgcactgcttagacaaacactggatctgtgaggatttccttaatttttttagtgctgttcctggatttcatgcaaattccaaggcattcatacggcttataaactatattctccatcttgaaagactgctgctgcttaaattgctaggtcttcgttgtgaatcctgcaatcccatgaagttactgcgtttgtttatatgttgtcgtagggctctgataaatctcatcttgaaattcgggaaagagtgcccagaggcaaggcaatacttgtccttttcaaataaaaatggtaactcatattccctggtttggtttttgagatctgttcaggaaattgttggttcatcacataaaatatttgacgagtgtactgatgaggtgaataggttgatgttctccttgttagataagacatcagaattattttctacactagctagtttgaattcatcagtttacttgtttgatttaaagaaacaaattgaatcttcccttgatggtagtcctattaaaaaggagacttcagaacataatgaccaggcatttgatatagtagaagtatcagccttagagtgtgtcagaagtatggctgaattgttgcagaagactgcaactgggatacctgttaccataaaggacagcaagtgtgttatcaaaatagaagactgccgtaacactgtatgttggaaaagattgtcatgcagcatgtcttgcataggaggatttttgcagggacttaattcagcattagaaagcacattcaatgatcacccaatagcaagcccagaggacaggaagatgttgcttcagtattgctcaagatttagcagttatgtcgctaagtttgggacctttgtagatatttgtgttcatgtcttgtttatggataacaaagattctgcctctatagatttagtctctgttcatcttccacaagagctagattgtgcgaatggttttctgaatattgaagcaatcatggatgaattgacaaagtgtggaagtcatggagttgatctgtctaagatacagtacatggaaaatgttcttctggaaaacctgttgaaaggtgaatgcccactcatatcattcactttgagagagatatacagtatatctgctgctatcattaaatttcatggttacctatccttttcaagtgatgtttctaggcagacttgcagccctgtcgaacagctttcattgggtaccatgcttgggatagctttcatcactctacagaaagttgcagacatgtctagctggccacacatgttttgtcttgtatggattgatggggtattaagatatcttgaagtcttaggaagtgcatttacattgtctgagctcaatatttcaatagaactgtatactcagattataaatgctttattgagggctgttggtaaatgcatcttacttcaacagaagaatgctactctccctactcatgagattggctcaagcacgaaaacactgcaattacagaatgcatctggttatgcttttcctaaagatttcattgatacacagaatagattaaattcattgaaatcgaggcttcgactagtacttggaaaatttgtcagtattgcatcaaacacacatctaaatgcagctctacaagtaattgaaagggcattggttggagtgaatcattgcagtcattcaatataccaaatttacactggaaatcctgatggtgggacagtttcttctgatgttgctgctgggatcgactgcctctatatgattcttgattttgtgccaggaaacaagcgcgtttttaagaggactgtccctggcctagttggtgctttattcaacattatactacaccttcagagtccacatattttctatagtcagaacctgccacctcaaggtagtgtgttccatccagatgctggagccactgttctaatgtgtgttgaggttatcacttcatttgtgggaagacattcttttcaaattgatgcatcccatgtttcccagtgtctgcttgttcctgtgacactcttcaaagagtttaaacatcttctagcaaagtactgcaaccaaagtgtacaacaccatggagatcatgctgaatatattcttgacagacaattttcagttgatatctatgctgcatgttgcaaattgttatgcactactcttcggcaccaacaacgtgagattgggtggtgtgtggccctcctggaggattcagtaagcatactgctcggttgtttggagtccacagattcgaagatgattaacgtagctggatattttgcttggaatatggaagaggcactaaaatgtgcttcctttttcagaaggatctatgaagagatgcgccagcagagagaaaccctaggaaaacatgccatgcactttcttgctggttatatttccatgttttctggacagggtccttttcagacagggataacacgagaaattgatgaggtcctgagacctggtgtgtattccctgattgatatatgcgaggaaagtgattttcaacagctccacacatacctgggtgagggtccatgccgaaccactcttgctgatctggtgcgtgattataaattacacttccagtatcagggcaagatctaagccagcctgttctttatttttgaacaactggcgtttatcctgtcacgtctggttagaaaatctatgaagtaccatcttctggatgatcttgtgttttgggtggactaattttggcctaatggctgcttaccgacttatcaaggagacatggtggctaataaagatttaaggcttgtgaaatcaacttcataggatctacagctgcctcgtgctgttctgcaagttgacctggacacctggtaatatcaagtagatatcgacatttaattccaggttgggtggaattgatgtggccggtgtcaattcatggtctcaagagccaagagaatatctgaagtgataggaagcagggataagggaaccacggaaggtgtgatgtactagtaacacatggtgggggcctgcggaggaattaggtggatgcggcaacaagatagccgcgagagagcgaccaaaagctggcgcacacacagtagccagtagccactatcattggataaaaaaaaaaaggcttgctaggccaccgggatgaatcagattcccaccatgactggacacttggacctgatccacatgcatgggtgtagtgtagtatgcgccccactgttctctgcatctgttatggttttctctcttttgctaaggttatctgattgcacagacccgtgcattttatcctcgtattgttctgccatcaactgtggtcctgcccgttcatgatttgctgcggggtgcatgcactttggttcgcgtttcaaaggttccgattgctttctctttggtggtcgcatttgaaacctcttttttttacctgggttcaagagtcattctgtatgtacttgaaatctgtggcctgtaatatcagtttcatgtttgctgcggtgtgggcgtagggttaaaaaaaaaacggggcgcttcaagtttcttatttattatatatactgaacagcaatggttccaggcaagtcgcatcagcctgtgtgtaacatgatttcccactaaaaaaaagagcaggtctgtaggtcaaacattttcttcccccaatcgtgcgcccaggctcattcttccttggcgctatcaagatctgctgcgtgatttgttggttccaggcttcgtcttgcagctatcatgaggttcagctccaatcaccatctcctcacactcac

SEQ ID NO: 42404 - DNA, 397 bp, Zea Mays
cccatggatgtatatgggtatacagacctgggaatactgagaagtgtaatgtacttgtaacgacgcacctacgctcaggtaagaaggtgagttaccataatgagttgccctatggttaaagtgtggcaacggcgcctatgcgtggctcggcgcttaatgatgagctggcctccatatagcaatatatggagtataaactgtgataaactgtcatgtgtggatattgcatcattgggaaattgggctgtgatggatttttctgcaggtacactaacctcgaaaacgtatgtgtagttgacgactagcaaaatatcgtgagaatcgtaagtatgccaccgatatagaacgttattgccacattgtgttggcaaaatcagtgaggatgtataggacgagc

SEQ ID NO: 42405 - DNA, 1898 bp, Zea Mays
atgccccaccaggcaccaggttgctgggtttgggcctcacggtccagcagatgccagccagttgccacgcgtttcatcagcccgacccaaccaaagccagaagacacggtgccgtcagctgtgctcccggcgctcccgcaccacaagcaagcgcgtgcgcgccgtcaagtcgcctctacagcaacttccaccgcgtactccctccctccctcgtctcgtcttcgtctccaggtttcgcgggggccaaggtttctgccggagcagtcgcggtctgcgctgcggcacggcgacgaggtggggatggagtaccgcgacaagctcgtgctggcgcccatggtccgcgtgggcaccttgccatttaggctactggctgctgaatatggtgctgatattacttatggagaagaaattattgatcacaaattcttgaagtgtgagcgtgttacaaatgaatctcttgggactactgattttgtggagaaagggactgacagtgtagttttccgtacatgcccacaagaaaggggcagggttgtattccaaatgggcacatcaaatgctgtgagggcacttaaagctgctcagatcgtgtgccgtgatgtttctgctatagatatcaacatgggttgtccaaagtctttttcacttagtggagggatgggtgctgcattactctccaaacctgagcttatacacgatattctgacaacactgcggaggaacttggacacaactgtgacatgtaaaatccgtcttctgaacacacctaaagacactgtggagttggcacgccggattgagaaaactggtgttcctgctcttgctgtccatggaagaaagattaaagatagaccgagagatcttgccaagtgggatgagatagctgatgttgtgtcagcgctgtcaattccagttatagctaatggagatgtctttgagtatgaggattttaagagaattaaagatgcaacaggtgccgcgtctgttatggttgctagaggtgctatgtggaatgcctccatcttttgtgccaaaggaaaaacaccttgggaggatgtcaaaagagagtatgtaagaaagagcatattgtgggacaacgatgtgaagagcacgaaacataccttgaaagaaatgataatgcactattcttgccttgaacttcctgaggggaaaggcgttataaagtgtgatacatctgaagatttagcgagactatacggggaagaggactactataattttgttgttgcaaataggaaatgaatacaatttgatgttgtgagctctcatgtgtaccagaattcagagtattgttgcagtaaggcttgaatagccagacgaagagtgtggtgcctgcagagacaagctgttgagatgcagaatgaaactagaaatgcctttgttgagaagcttgttcattatccttttcagttgttcagtgtacgcatcctgagatgtacaatcctttaatgagaggagagtatcatcttctaaggagtcaagggtgttgttcaaggcatgttcctgaatagagaatgcagtgcctgttatgattgccccagatcttctgcttggattcctatctcaccctttattgatgggattaggaggaattcctgccaccaaggacaacgggatttgccattttggcgctgtctggacttaacactgaagctgctgatctttctcttgtactggtaatagttaggtttatacctgaaattaatcaaacaccatttttttgtaacaaatactaatttatttgctttctatactatggaaattttgtcatgtattgttggtggaaatactattgcgcttttgaaggaattgaaagactttgatatgttgactactattatggccctatggtctaagaaatattaaatgttttcatg

SEQ ID NO: 42406 - DNA, 520 bp, Zea Mays
ctttatttgtctcatgtgaagagtagggaacactcccacatataatttggttttctcctacctagatgagcaatatgagactaaagctcatgtcatctctacacaccacattaacttccttattgatttgggccacacactggtgggcctaattccaacacatgatcaaatatgtagcaaatgagacatcgaaccaaacatgccctacatacctcgtttgaggctatccttttggtattgagtgtttaatgattaccttggcccacttaactaggtccattgtacaatcattttggtattgtgtgtgtgcatggatcgataggatgatttcgtagcaacatttagaccatgtttggatggtaaatagtttgtcggctaattttggcactttagttttcaaacagtctaactaataaattgactaattgttaaacggagggctagcaaagtgtttgcccattagccatttgatcttgctaataaagtgctaataaattgtgtagagaaaaaatacatctac

SEQ ID NO: 42407 - DNA, 927 bp, Zea Mays
accccagaggcaccggggtccggggcatagaggcatcataagacgggacaataatcttgcagagttatggcctcaaggtttcatggatagtgttggaatcaaagatgccatttatagatgaaaggagcgaagaagattatactacagccagcaaaagcgaagagagaatgaaaaggaagaggctggctgcagcagcaaagctggaagatggcttcccagttgtaatgcgagctggtgttgccccacaagtttcacaaccacccataacaaacaacatcacataccagattatggacagaaccaggggtttaaattttttgacagggctcgtgaaacgagctccagtggaattcctgatgacggcaacagaaatattggcgagatcaagaagaaaagaaaacctgaatacgatgttgtagatacacaagctaacctaccaaaggctcccttaccgcatgggagagaagcaaaagccttctaagcctgctgacgaggccagtgctggtagcctgccctccacgtcgacaactcaaactgtgcttggcctaccctaccatcggtgcttggtcataaccaacaacctaactgatcatttcggcatattgttggacatttggttatccttataggctcttttcagctgctgtacaaaattatggcatttccatgtgttcagcatccatggtcaaggccatcacctttccgagtcgagaggatatttgaccatttgcaattttctagcattgcttggttcctttggccaggttatctgtgccacgctgataaatatggtcagatgcagatttgcacccctacaaatatcggttgtaattatgaatcgtttctgagacatgcgttcatattgtgcgatttaaaatctcattcagcgaggtgcagatttaatatcattgacaaccgcacaaaaca

SEQ ID NO: 42408 - DNA, 962 bp, Zea Mays
ttgttccattacagtctacaacaacaacaaccaagtcattctcgtgaccaaaaattgcttcacctgctcccgtatgcatgatactcgggagattttccgggcagaagaggaaatcctgacaagtagtgcgttccttgctcacaggccctcgttgtgtcatgtaactgcaaatggctcgccaaactagcgttacagaagctgacctggagttcatgctaattgatgaaaatgcaaagccgaagcccctgccttattcacttctcgaaaagatcacaaatggtttctccggggcacatattattgggtatggtggatctgcagatgtttatgagggattcatcgggaatcacaaaatcgctgtgaagaggttgcgcataccatatcagcacgagaaggaattcagtcaagagattgaatgcctgatgaaggtgaagcacataaatgtcgttaggtttataggatattgttccgacacgcaagggcaggcggaaaagtatgaagataatcatgtcatggcagacagccaagaacggttaatttgttttgaatttctaccagcatgtcttgataaatacatcaaagatccatcatgttcacttgaatggagacagcgctatcaaataatcaacggagtttgtcagggcttacatcaacttcatgagcatgaaattcttcacttggatctgaatccgagaaatatacttctagacgatgacatggtcccaaagatttctgattttggcatctccaagtgcttgaaaaaaaaccaaggccacttttatactgaaactataagtggaacaccgatatatatgtcaccggaacggggcaaacatggtccaatcacaacgaagtctgatttgtttagtcttggtgtcacagttatcgagataatgacagggaacaaggagaacattgatcaagccactgttgaagatgtttatgcttgggacttaggtacc

SEQ ID NO: 42409 - DNA, 376 bp, Zea Mays
gtggcagaacctccaagttattgggcccacatgcacccgtccttgtcccaaagacctcagacggccatgcatgtgcaccagataactcaacaggatctgtccgattgccccaaggacatcggataaaccactttcaaccagaaccgcgtgattaagtaacacaaatcacacacaccaatatttttgcagcggaaataatattaccaaattttacaagttacaaaaaatttatattattttatcggagtggttacaaaagtataagtttgaaatatatgctagcttaaatgactatcctcaataagaagtatagaaggagtacttagacttataagaaggccgagcccaccagcacttaacaccatcacaacagcac

SEQ ID NO: 42410 - DNA, 2429 bp, Zea Mays
ctttgaaaagttgtagaatgtcacatttcaactaaataacctaattcattaagtagattccaattcctccaaaataaaaggatccaaacggctccttagaggaaactgtgattattcttcaaataaacagtacaaattaagttctgccacctgttaataagttgtatatatatatgttatgttgtgtgatctcaggtgagcaatggagcccgtggggttcctcagcagcagaataggttgctctcagtgcttgtggcacccaagattgcaggaatgagcaatgttgtggccctcaagctgatggatggtgcccttattggtagacgctatgaatcgagtgcagcagcagttgattctacggaccagctagctgagaagcacgagtaccaggctgaggtcaacaggctcatggatttgattgtgcacagcttgtatagtaacaaggaagttttccttcgagaactggtcagcaatgctagtgatgcacttgataagttgcgttatctgagtgtcacggaccctgagcttctgaaggatggtccccaacttgacattcgcattcaatcagacaaggataatggagtaataacaattactgattctgggattggtatgacgaaacaagagcttattgattctcttgggactattgcaagcagtggaactgccaagttccttaaagcattgaaggagagtcaagaagcgggcatggacaacaacttgattggccaatttggtgttggtttctattccacatttcttgtttcagagaaggttgttgtgtcaacaaagagcccaaaatctgacaaacaatatgtttgggaaggacaagcagattctggttcttataccattagagaggaaaaagacccagagaagctaattcctaggggaactcgccttactctctatcttaagcatgatgataagggctttgctcaccctgagaggattcaaaaacttttaaagaattattctcagtttgtttcctttcccatttacacatggcaagagaaaggcttcacaaaagaggtcgaggttgatgaggatccagcggaagccaaaaaaggggatgatgatatcaaaactgagcctaagaaaaagaccaaaaccgttgttgagaagtattgggattgggagctttcaaatgagacacaacctatttggcttcgaaaccctaaagaggtttcaactgaggagtacaatgaattttacaagaaaaccttcaatgagtacttgaatcctttggcctcctcacacttcactacagagggtgaggtagaatttaggtcaattctttatgttcctgctacaaggaaggatgatataactgataataggaagaccaagaatatcagactgtatgttaaacgtgtattcatatcggatgactttgatggagaattgttcccaagatatttgagctttgtgaagggtgttgttgactcaaatgaccttccgttgaatgtttctcgtgagattcttcaagaaagtcgaattgttcgtataatgagaaagaggctagtgcggaaagccttcgatatggtacttggcatttcttgcagtgaaaacagagatgattacgaaaggttctgggagaactatggaaaaattttaaagctgggtgccatggaagacaaagaaaatcacaagagaattgctcctttgttgcgcttcttctcttctcaaagcaacgatgaattaatcagcttggacgaatatgtggaaaacatgaaacctgagcagaaggatatttacttcattgctgcagacagcctgagcagtgccaaaaatacccctttcttagagagactaacagaaaaagagtatgaggtgatagcaatgaggaaagagaggagataaagcagcagttcagccaaacctgtgattggataaagaatcgcttgggtgacaaggttgcacgtgttgacatatctaatcgtctgaggtcatcgccatgtgttcttgttgcagcgaagtttggttggtcagccaatatggaaaggctaatgagagcacagactatgggtgatacaaccactttggatttcatgcggtcaaggaaggtttttgaaataaatccagaacatgagataatcaaggccttgaatgcggcatgcaggaataaccccgatgatcctgaagccctaaaggctctggatgttctctttgaaactgctatgatttcaagtggcttgtcgcctgacaaccccgccgagctcagcgggaagatctacgagatgataaccactgccatcgcaggcaagtggtcctcacagtcgcaggcgcaacctgacaacacaactctgcagcacgcggcacctgggaggtcggatgagccgcttgaaggtgaagtggtggagccagagcccgttgaggctgatcagcataaggatgacatatcggcacgaattgtcctcataacttaa

SEQ ID NO: 42411 - DNA, 1768 bp, Zea Mays
ccgcgcccaaccaaaacacatttctttcctataccttctcgcccgcttccgtgtatctatccgcccattccccgccattgcatccctgcttccccaacaatgccgtcctggaggcagcgcgcgcgcggcctccggcggtgctagctagatccgcggccaagcggggtacagggcaggggacctcgagcggcgaacagaaaggcgtggccgccgggacaggcgggggcgtccaatgcacgaccacacccgtgccagggcgtgggaggcgacggcgcgcaaggtgcagcccgtgggcaggcgccgggtgtccccgatgtctgccgcggacgactccgagacggcgtcgtcgtcgtcctcctcctcctcgcccgccggcgacgacgccgaccacgtggaccgcggcctccccaacggcgacttctacacgggccagtggcgcggcggcgcgccgcacgggaacggaaagtacctgtggaccgacgggtgcatgtacgagggggagtggcggcacggcaaggccacggggcggggcaagttctcctggccgtcgggcgccacctacgagggcgagttcaaggacggcttcatggacggctccggcacctacaccggcgccgctggggacacctaccggggctcctggtccgctaacctcaagcacggcgacggcaacaagagctacgccaacggcgaccagtacgacggcgagtggcgcgcggggctgcaggacggcgccggccgctacacctggcgcaacggcaccgagtacacggggcagtggcgcgcggggctcatccacggccgcggcgcgctcgcctggtccaacggcaaccgctacgacggcggctgggaggacggctccccgcgcggccaggggaccttccgctgggccgacggcagcgtctacgtcggctactggacgcgcgacgcccacaccggcattgtccagcagaagggagtctactacccgtccccggcggcgtcctccccgacggcgcgcgatccccgcgacgtgttcgccagggaccttccgggtttcctgggcgccggccccgacaccgcgtcgccgcgcaagtcacgcgcgtcgtctgggaccagggcgcccaacgggcggccgagctcagtgtccgggctgagcaacagctccggcggcgacaggaagtacgacaagatttgcatttgggagtccgacggtgacatcacgtgcgacattgtggacgggcctgccttgggggacgaggcggtgaccgcgcagaggagcgtgaggacggacgacggcggcggtgacgaccggggcctgccgccaccatcgccggcgccgcacgtcacacagtggttgcctcagcgggagtccaagcgacaaggggagaccatcgccaagggacacaagcactacgagcttatgctaaacttgcagctcgggatcaggcatgcagtggggaagcaaggcccaattgtgctcgatctgaaatcgtctgctttcgacccaaaggaaaaagtatggacgaagtttcctcctgaaggctcaaaatgcacccctccccacaattcttgtgacttcagatggaaggattactgccccaaggtcttccggacgctgcgcaagctgttcaaggtggatgccgctgactatatgttatcactatgtggaaatgaggctctcagggagctttcatctcctggtaagagtggaagctttttctacctaactaacgatgatcggtacatgataaagacgatgaagaaatccgaagtgaagcatattagg

SEQ ID NO: 42412 - DNA, 1814 bp, Zea Mays
actagaataatatacacgtacgcatatccacatgcatcttgctggccactcgagttatagaaagttgcatttgtgtgcatcccacgccagccaaacactgccgacgagcaaagaaagcaaatataataaagtcatggcggacgagacagagacagcggcgccgctgctccgctcagctcccctcgtcgccgacgcgccacgccggaacagatctcgcgctgatgagcggcgcgcagctgttcatccggcaggacctgggcctctccgacgtgcaggtcgaggtgctcacggggtccatgaacctgttcatgctcgtgtccatcctcggcgccggatgggcggccgaccttctgggccgccgtggcacgctcgtgctcgccaatgcattcctcatggccggagcgctcgccatgtcggctggcggcagctacgccgcgctcgtggccgcgcgcttcgtcaccagcgtcggggtcgggttcgcccgcgtcgtcgcgccggtgtacaacgccgagatctcgccggcgtccacgcgcggcgtcctgtcgtctttgctagatatgtttatcaacgtcggcatcttgcttagctacgtgtcgaactacgcgttcgccggcctgccagtgcacaccggctggcgcgtcatgttcgccgtcggcgcgctgccaccggtgttcctggccgcgggggtacttgccatgccagagtcgccgcggtggctggtgatgcgcgggcgctacggggaagcgcgcgccgtgctcttgcgcaccaccccagctgaggccgacctccgactccaggagatcaaggaagccgtcgaggcgccgcgggcacctgctgacagcggcggcggcggcggcgttggcgtgtggaaggagatgctgtggcggccgacgaaaacggtgcgccggatcctcgtctgcgcgatcggcgtgctgttcttccagcaagcctccggcatcgacgccatcgtgctgtacagcccgctggtgttccagaagtccggcatgtcgtcgaacagcgccatcctcggggcaaccgtcgccgtgggagtggtgaagacatgcttcatcctcgtggcgacgctcctgtccgactgcgtcggccggcgccccctcctcctcgccagcgccgccggctctgcggcgacgctggcctctgtggccctgacgctctgcgtcggcagcacgtccacggtaagcactgcggcgtgcgtcgcgtcggtgctggccttcgtggccgcgttctcggttgggttcgggccgctggcgccgacgtacagctcggagatcattccgctgcggctgcgcgcgcagggcaccggccttggcacggcagtgaaccggctgacgtgtgcattggtgaccatgactttcatctcgctcgccgactggctcaccatgccggggtgcttcttcctgtatgctggtgtggcagcagccgcgttcgtgttcgtgtacttggagctgccagagactagtgggcggagcttggaggatatgcacgagctcttcgccgccaagtgatcatagtccccctctctctctctctctgcctaaattggacagtgaactgaactgaggtcttgtgtttattaattgatttgaggtatgattattcaacttcaacctagaagcggtcggcttgcctctatacattaatttgagtaaaatgccgtctccagactacgcgaggtgggtgctggaacttcctcaatcagatgtggatgtggtgtaccatattagagtcatttgagtcttataactcgacaagttgtatcacttgggtcctagaacttgatatgctatgttaattag

SEQ ID NO: 42413 - DNA, 6513 bp, Zea Mays
tcccacccatccacccatcatcatctcgacctcttcccccaactcctcgccgccgccacttgccggtagggtttgcgagcccatcccgctccaatcgcccgccgccgccgcgagatcggcggctcccatcccagattcgttcccgcccacgccagcgcgccgcatccgatacccgtcccgttggcccgcgactcgcgaacgaggatgcctcagtagggcgcgcgcgtgtcgagctagggttgtcgcgtccgaggccatggacaccgccgcgggcccggggccccgggacggccccgatcggacgccgcaggggcccggcgcctcccccgaggaggccgccgctgatggcgtgaagacggacatcgcaggtggggcggaagcgcttgcagcggcaggcgcggccggtgaggccgatccgggtggaggcgccgctgcggcggggcgtgggggtgacgcggaggcctcggcgagcgagcccacggcggaggaggttaacgaaggctgcggcggcgccgctgctgctgcgggcggagatcgccccgccgcgcccgaggcggatgcggacggcggcgcgggcaaagggcggtctgctgtgcacgcggtgagtgaggtggagcagggccaaggcattgcgggggcagcgcaggatgtggatcccgcggtgtttgaggtgaagaagatggacgtgagcgagggtggcgacgcaagcaagcagaatcagcactctccgtcttgtacggccagcgaggtggatgtggggatcgttcctgtggcagtgcgagatttggatcctgtggggtctgaagtgatgatggaggtggacgacggccatgtcagggaacaagagcgcgcgggagtggctgtggcgggcagcgagtttaagatggaggaagctgatggaagagtggtgcatcaagggtctgctgccacatctgctgggggccttcaggcgcgagccgaggaagtgggagagtgcttggtcggccgttacattggccgcaacgcgccaatgcaagcggggatccttattgggaaggttgcatcctatgatagcacagctggcatctacagcgtggtgtttgaggatggacataatgaggatttggagcttcctgagctccacgagttcctcatgcccgacaagaatggcacgttaggcatgagtgtgaactgcaggaagaggaagctgggcctgctggttttgtcggggagtgtctcggaggtgaaagagccagcaagtactagacagagggttgacggatgcgagatgcctgccaacactgatgcactgcggtatagtgggtctggctcggatatgtccgaggatatcgaatcttcgagtaattcatccgatttcactaaagaagaaccatctgagccgtgtcctcctgtacaggctgtggagttgcccccgtcatcgggagacattcatgtgccagaagattccataagctatctcttttctgtttataacttcctgagatccttcagtgtgcagctgttcctgagtccgtttggtctggatgattttgttgcagccattaattgcactgttcagaataacttgttggatgccgtacatgtctcgctattgcgtgcactgaggcggtatcttgaatctaaatctgctcaaggatctcagatggcttcaaattgcttgaagtatttggattggacattactagatgcattgacttggccaactttcttactagagtacctgtatgtgatggggtgcattaagaacctaggggggcagagttttgctagaagccttctagccgctgaatactataaactttctgttgccacgaagttgagggtgctgcaaatactctgtgatcatgtccttgaatcacaagaatacaaaactatactggaagatcgagtaggctacaatgaggagatggaatatgagatagattctagcacctttttggaggctggttccagagcagtcttgactagagcctcaaaggcctcagcttacaaaatgctgaatgatttacagaactttgaaagtggtccaaatgtaacaaattcagatgttgctgtagcagatgtttctcaggacggtaatagtgatgattgccgaatatgtggaatggatgggactttggtatgctgtgatggctgcccatgggcatatcattcgagatgtatcggtcaaaataaagctttccttccccagggggactggttctgtccagaatgtgttgtcaacaagcttggaccaacttcatcaagaattgaacgtggtgcaagaggagctcaaatgtttggcattgatatgcacgggaggctattcttaggaacctgcaactatttactgatgtagagtcttatgcaagatattacaatcattatgatgttgtcaaggtactccagagacttgcactctcagatgcatatgtggatatatgcaggcaaataatggaatactggaaacatttactcggtagagttcagagtgagagatcaacaatattgaaagaagttggtacaagacatactccacaatccagcatgttgagttttactccaacaatgtcaggagatggaagtggctggacaactttaaaagatggtggggacagtaaaacagtagcacttcctcaaacaaatgtgcaacagaaaattttcgctaatcagtatacagtgtgctctgctgaacaaacggagaagaatgttgatgtttgcaagcaagctctgtcagctcagaacaacatacataatgcacctagaaatggagcttctggaccatttgtggcatcccccgtttctcatcagaatggatccattggaacgggtatgtctaacatagcacaagcacagccagctcatagtatatatcgtccagacttatccactgtttctgcaaagtcagaatcatttcgttcatctttgcaaggtaaacttcaccttcagatgtgtactgaaagacctggaaacatgagttgtggcaaggcagcaaagttgtcttcttttaaaccacaagcttacatgaacctctacaatcatggcaacattgcagcatctgctgccgccaatctagctattattgcatccagtgaaggtaaggtttccacatcccaactgtccgcaaaaccaaagaagaaggtggctgcagacaatgctctacagttgaaagcattttcctcagcagtcgcacaatttgtttggccgagtactgaaaagaagcttatggaagttccaagagatagatgtggttggtgccttgcttgcagaagttcagcaagtggaaacaaaaaggcttgttttcttaacatgaccacatcaaacgctgctaaaagttctgctcgagttcttagcacaatgcgcgtaataaagatttctgacagccatttccccagtattgctgcttatttagccaacatggaggaaagtttgcgtggcctgttggttggttcactacaagacatgcagcagagagaacggtggcgtgaacaacttgaagaagcttccaactgcagaactgtaatacccctcttgcttgagttggaaagcaacatccgtggagtagcattttctgcaagctggttcaagccgatagacgattggcctgcggaatctccttgtccatcaacaggggcatctcgtcctgcacaacaccaaaaacgtggggctggcggaaggcgtggcagaagacgtttgttggtgtctgaacccggtactgttactgatgatgacaacagctggacttggtggaccggaggaaatataataaaacgtactttgcagaggggggctcttctacattcaaccataagaaaagctgctcgccaaggtggtaagaaaaggttagcaggtttatcttatcatgaaggttctaattttccaagacgatctcggcaacttttctggagagcatgtgttggactaagccagacttcgtctcaacttgctctgcaggttagatatcttgatgctcacatcagatggaaggagtttatctctccagatcaaattccttcagatggaaaaagttctgacgctgacttttctgcactcagaaatgctgtactctgtgataaaaaaataatcgacaataagataagatacgcactgaagtttcccaaccaaaagcatcttcctgtccgtctgacaaaaaatatcttggaagcagaaagtgatcaggatgaaattagaaaaatgtggttttctgaaaaccacgtgccattgtacatgttacgagaatttgagcagcatgctgaggctagctccttgcctactccaggaattccggaatgttttaccaatttatacccaaggcgagtgaaagcacctgacagagatgttttttcatatctctttcacaagggagaagtctatccctgcgcgtcatgcaagaagggtgttctctacagggatattgttaaatgcagctcttgtcaaggtaattgtcataaagagtgtacatcaagatctgttgttagcaaaggaggcagtactacttccagtttgatatgcaagttatgtctccagaagcgaaatcttatgctcactagttacaatacaaatgcaagttatatccagcatctacagaagaataatggccaacagccagtgaccgctcccagaaatgtctctaaggttagttcttcccattctgctgagcctgcccccaaagtggaagccgagccagtcacaaaggttaaggcacaacgagttggaaatgtggaagctacaacccagccagttctaaatgtgaaagcccagccacccgccaaagtggtaactcagaacatcactagtgtccaaaagacaaaagctaaaaagtcaaagtccgaaaaaccaacgaaggctaaaaaagttcaagcgatcacatatttcggtctcatatggaagaaaaataagaacgacaaggatgatggaagcgagttcagggcgaatgatgtaatccttaaaagcaaggatggtataggttcgtcaataaaaccaaaatgttgtctatgtgacaaagcatattctccggaattcctgtatgtacgctgtgagaggtgcaaaaattggtttcatggtgattccttgcaacttgaagaagataggattggtgagttggttggataccgatgctgtaggtgccggaggagggccatccccccgtgtcctcattcagataattatgtaaagcctgaacccgaatttagtgagcaaacagttgcaacatcatcggtgtcaactatgctatccagtgggaagacttctgcttcagcagatcaggacccactgcttgcttcgtatggaatagttgaaccaatcggggaagagacaggggatgttgatttatcagcgaacacggcaagcattgccccgggaagtagccagaagctgtctataagaagagcactagctaaaacttctggataccttgaccaagctggtaaatctgtgaatgagtattatgtccagaaccagaatacacctccaggcaatggaaacatcaatttcagccacacgaatgagatttccttttcggaggctgacagcgtgggcgcttcaggactactggggtgggatttttcgagaggaaccgcgtatgctgccccacctggtttcacttctaatcgccagcagaaccgcactagccgtggcagctttgtgccggacgagtgtgagcgtgagccccagacttatttctcgttcactgagctgcttgaggctgacgacgcacagcttgatgacaacgcgtttgggatagctactggtctgcaaggtgatgctaacggctccggaagctttgtccaacgaggagttggttttggtggtacgtctttcatggcagaagatggagcttcgaatatgaacgtgccaacaaatggtcccacgcctgaagaggtagcgtgccacaacggcacgaacactcagccgccacctgatcccagatgttctgtccgtgacctccgcacacaccggtagtgctctccctgggaaccgaggcgtgtagagcctgtcgagagcggcaactggagttgtggtggttgccgcgaatggtgatgatgagcctctaaacttcactgccagttgcaatggcaggtaaatccaacggcatcccatatacttaccggatttctcgttaccggtcgctgggttgctgctgtcatgatgtgctactgatttctcggatcatttcattatttgatctaatcttaaccatcatacagttagagtagcgattaccgcttggggtttacactgtacatactgaaaggatgggtcgacgacgacgtaccatttccattctttaggctatttatttttttggggtgggagttttagagctaggatgctgctagcacatagcaacatggtatatgggtcgtctggaaaaaaaaaaccatattattatgtaactgtattaaccttggttgtctcttctcgccttctgagatacaagtgtctcttggtcagagtgggtggccgtttctatgcctatgcagctatgctccagtattgtcgcatttgcctaggtaaaataactaattacatggc

SEQ ID NO: 42414 - DNA, 963 bp, Zea Mays
tctgccacatccacggcttctcctgcgcctctggccgcactggaggaccgtataaggtgtcgtatgctgcgggagtggcagcgacgttcttggatggtcttgtcctcacttcgtgggaggacgggagcgaggacctcttgtgcggaggtgacactatcgtcggtgctgaggtggtggctaccgctggtgaggctgccccttgcagaggtggttgcctccgctaccgggatcatcagggccacctgccactgagtccccgactgtttggctttaatggcctcgttgtttccccccataggaggacgggggcgaggaccttccacagcagcgctcaccctgaggtggtcgctgctgttggcgtaccgctcggagcgaaggtcgttgtcgctgctggtgcagaggtggtcgccgtcaccggcgacccgccgatgcagaggtggtcgccattgctggtgaggttgctcagcttccagcataactcttgtcgttgaagcgtagtccattcctgcagaaatggagctggggtcccgtttgtaagggaatgtaataacatatgtttgcttgaaagcagaatgtaataacatatgtattcaggattttagtctaggaagccaagttgtgtgtccagaccccctggctggtggttctaggtactaggacacccgtcacagagtggtggagtgtgcaggcccacggttcgggaccaggctgagcagctacacggctccggaccacccctggagacaagtgtctcttctctagttccggaccccaggttgtcagacccacaagacttatagttccaagtactatggcacccatcacggagtggtggagtgtgcaggatttgggtacggaactaggctaaccggccacacaggctccggacctccccaaggaacaggcacctgttcttcagaaccagcccccagactttttcttgtttttttaaaggtgttgttg

SEQ ID NO: 42415 - DNA, 488 bp, Zea Mays
tgttgttttagataacaaacttttattatttttgcatcttcatgagcattacatgaacattcattattgtatttggctatatatagcaaacgaagaagaagtagaagtcgaagaagaaaggacttcatcaccaccaccacctgaggaacatcaggcaggcagctgtttctattttgatatctgcgggtccgagcctgaatcaccagtaacacaaggcaagccctggtgcatttgccacctccttgttcctttttaaatctttctcacttgcttgatgcattaggtgataggagttgagtgctaaaacaattccatcatttccttccttgaatttgattaccttcctttgaatccctgttttacaaaaggtttttcctatgcttagtcttgctctagcaaaacaaaatgttttgtttttacaaaagatgatgttgcaaagtgggagggatgtttttgaaaataaaacttgatggtggatccatcatggc

SEQ ID NO: 42416 - DNA, 305 bp, Zea Mays
cttgaatccttttaaaaccaccatacccttgagagtcttttctttagtcgggtaagtcttgctgagtacttgcgtacttagggttttacccattgttgctgcaggttacgagacacttgactgtgattggtgttaagcgccggtgggcaaggccttctataagtctaagtacttcttctatacttcttattgaggatggtcacttaagctagcatatatttcaaacttataaacaatttttaacaattcaaagttatttctttgaatcacttttgtaatcactctgatcatgtacattgtaaaac

SEQ ID NO: 42417 - DNA, 1900 bp, Zea Mays
gtactaggtaggtctttctccttgcaatctttccgtttcttcgtttgattccctcccgccgccgccgctggagacgcccaaccacgacagcgccccagggttcgtcctcccgctggaatagtaagtgaccggagaaaagcagcacaagagagatgtggtatctatgcgtcttctaccacaggctcctggactaccggcgaccggaggtggagtccctcgccgagctctttgccggcccaggcgcccgtgaatccgtcgagtggcgcatgccggagaaccaccacgtagactcccccttccacctcgttcgcctccctggagacgagcgcctcgccgctcaggcttgttggtgaagggggtctacgagctctggggctatggcactacctacgaggagctggagaagtcggtcagggagtaccccgacgagaggaagcttccgttcctggtcccggaaagcagcttcaagatcgttatcgacagcttcggcaaggtgatcagctcccaagagcagaacgagatcatacagagcctcacttacataccattcaagggacgtgttaatttgaagaagcctgatcacagattctttgtcatggagaccgatgactatgggtcgaacaatggtctcccaccggttgtcaagaggtcgatattctttggccgggaggttggagcagctgataggcatctcctgccaacataccagctcaagagtaggaagtacattggccccactgcaatggatgctgaaatggctttcctcatggccaatcagggtctggcctcgcctgggaagcttgtctatgacccttttgttgggaccgggagcattttggttgcagctgcacattttggagctatgacgatgatattgatataagggttgtacgggatggtcgtggccccaattgcaatgtttggagcaactttgagcagtataagttaccagagcctttgtgtttgctaagggcagacaacaatctcccaccctggcgtcctggattgaaggagatgttcgatgcaataatttgtgacccaccatatggagtccgggccggtggccggaagtctggtggtcggaagctcataaaaggcgtcaaaggcccttacacagtgcctgatgagaaacgggacaatcacatcccatcaaccgccccatatagcctcgcagagtgcgtccatgacctcctccaccttgccgcaaggatggtagtcatgggtggcaggctcgtcttcttctaccctgtactgcgaggtgaagatggcactgcgaacccgcagttccctgagcacccctgcttcaagttaatcacctcctctgagcagatcctgagctttcggtacagccgggttctgctgaccatggtgaaggttgcaccttacaccgaggagatcgagaagttggccgcagagcggcaccgggagttcagggagaaccaccagaagtggatggaggagggcaacctccattccgccgtgttcgagccagcccaggatgggaagcctgatagagactccaagcccaaatacagaggcaagtatgtgtagcagcgcagatactaacttgttgaatttagtggaaacacatttttggtggtttcctgttctgcatcctgtaccaaattttatgagctagtgtgttggcaggcgctgcgagatgtaccactgttccagagtaccattcaaatcttgtcagtccatttgatggatgaggaagtgtaattgcagcttaattgactgaacttatttttttggttaacctgcctttgacacggctgttgaaattggcgctgcttctgttactgaattatatgaaaagaaataattcagtaacagaagcagcaccaatttagtactaagggaaaaaacaagtaaaatacatcagtggtgtttgaat

SEQ ID NO: 42418 - DNA, 1121 bp, Zea Mays
ccgtccacacaacgcacgcgaggtccatcgctcctcctctccgtcaccgagaaaatgtcggtctcctccccggccatggcctcgccccctctcgccgcgcccggcactcaccgcggcccctgcttctcgaccctctgccgcttaccgtcgccttcctgctacccgcctctttcggcttcctcctcaccggctatctccaccgtctccgcattcgctgtcctcaaacacaagcccagaggtctgggactaaggtgccaggccgcggaggaggcaccaccgccggcgcggggtaagacttcgctcaaggtgatgatttcgggagctcccgcctcgggaaaaggaacgcaatgccgcatgatcgtcgagaagtatggtttagttcacatatcaactggtgatcttctgcgagctgaagtatcttctggcacagaaattggcaagaaagcaaaagaatacatggacaatggaaagcttgtgccggaccaagttgtgacagatatggtggtatcacgactgtcacaaccggatatacaagaaagagggtggcttcttgatggttacccaaggagcttcagtcaagcacaacaccttgaaaatttgaaaataagaccgaatatattcattgtgctagaaatgtgttggaagacggctggatcctgtgactggcaagatttaccatttaaaaaactaccccccggagaatgaggagatttctgcccgacttattacacgttctgatgacacatttgagaaggttaaatcacgtcttgatacgtacaagcaaaattctgaagctattcttcctacatactctgatttgcttaataagattgatggaaactgcccagccgaagttgtttttcaggcgatagatttcctgttacagaagatctgtgagaacacttcagcgagcaagttgaccaaaacaaatggaaaacgaccagattctgcggatacaggttcaaaaaatgagtggcgtggaattccaacgaggttgaataacattccacattctagggaaattagggaatacttctacaacgacgtgttaaaagctacaaaacttgctattgaagataaaaagactcggttgcagatagtcgagtactggaatatgtgag

SEQ ID NO: 42419 - DNA, 2191 bp, Zea Mays
ctcgcccaatctttctgctcgatctcgtcgaaccctaaatcccggacattaaacaaaaataagcgaggttcctgtgcatcgcttatcaagtgctcggtcggagactgtaatcgaaggttgttgtcgatccatacgtcatccagaattccaagagtcgggtgaagacggaggccaacagcgtgatattctccaagtgctcgacaccaaagctgaattagaatccttgccgtgttcgtggataacgcgtcagatttagaatgatgacccaagttgaccccaagtgcgggctactccgtatggtgatgctgatggacgaacctgtctgatcaagtgctcggacaagaatgattatcaagtggtcatcgtctaacaaacactaacctagtgttccttcaggtcaaagttttgtgctgctgatggtggtgttaagtgccggtgggctcggccttcttataagtctaagtaacccttctatacttcttattgaggatggtcacttgagctagcatatattttaaacttacaaaaagatttgcaatatttaaaagtgaaattcttttgtaaccactccaataaatacaatgtaaacttgttgtaacttgttaaatttggtaataagatttccgctgcaaaattgttggtgtgtgatttgtgtttacttaatcctgcggtcctggttgtaagtggtttattcgaggtccttggggcactcggacagatcctgttaagttatctagtgcacatgcatggtcgtctgaggtctttgagacaaggacaggtgcatgtgggcccgataccttgcgaggttctgccacagtgcaacactatatcagggatctgaagtgcccccgaggctccttgttgtatggtggcagtgacgaagatgacttcctttactgtctgccagacaacaaagagatacatgtctgccaggaaatgatggtcaatataggatatccgaagcttgaacttggcttatctgtaatttccaaggatgagtttgcagatagccttgcttacaatagtctgaagggattaattctaagcaaggctttaaaggcctagaaggaagcagaagatgagagctgccaaatagctcttgggaatcttcgctcagaagtcatcacactatggaacgaagctctcaaaaaggataaggtattactttccttagtggataggctgagatctaacgaagctaaaattgttgcacaagccgaagtggaagaactaaaaaggaaggttgttgaagcaaccgaaaaatttgaagttgaggcggtgaaacatgaaatttgcaagatcgaaaggtcaagagcacaaaagaacaccgatgagctacgtccttcgaaagacaaatgttatgaaatatccttagaatgagtcaagaaattaaaggacatatttgctagggttggggcatattcttctgagcaaaaattcatccacgacgaccctgatggagttgtccagtggatcagcggggaagccgaagcttttgacgaaatattaagcgaacgaggacatttctgcgcctttgctggtgcacggggggccacgtcgatcttagagaaagctggttgcgaacatgccaaggctgcagttcagccagaatttgtttttttggtggatgacattaaaaacctttgagccgaagcttctacactaggcaggaaattttactacgaggtgtggatgaagggcagccgtgagatagttgatgaagctattagaaagaatgaaaaagaatctcacgacgctcaagaagaagccaaacgagctgaagaagctgctgagcatgcgaggcttataagtacctttactgaggtatagcttcagaattcgtttttagcttcggaattaacaaacatattttatgatgtagctgaactttcaccgccaccggagccatacaacccagaagccaacccagccttgaaggaagcgctagatatgattataattgctaatgaagccgttgacaaagctgtcaacagattgcttaacgaagccgccaaggaagtgttgaaagaagattaaaactttgtatatttgagagcttagtttttgtacatatctttcgcttttgtaagaaccgagtatcaattatttgcatgtgtattaatgtaatatattcctttgtgatgcatgaaaccttcgtacataccatttttgagccgctggtgaaaaaaac

SEQ ID NO: 42420 - DNA, 1508 bp, Zea Mays
gctggactgcaagccattgatgagattgtcccgacattgctacgggctttggaagatgatgatacatctgcaacagcccttgatggtctaaagcagattttaagtgtccgaacagcagctgttttaccccatatattgcccaaattagtccagccccctctctcttcatttaatgcacatgcattaggtgctctagcagaggttgctgggccaggtttgaattcacatattagaactgttctcccagcattgattcttgctatggatgatgaagatgatgtaaaaaactcagccaggaaagctgctgaaactgttctgttggttattgatgaggaaggagttgaaactttgatacctgagcttctaagaggaatcactgacagtcaggcatcaatgaggcggggctcagcctacctaattggtttcctctttaaaaacactaaactatatttggctgatgaggcttctgatatgatgtcaaccctaataattttgttgagtgatacagacaaggctactgtatcagctgctttagaagcattttcaagagttgttgcatctgttccaaaggaacagctcccaacacacataaaactagtgcgcgatgctgtctctacagccagagataaagagcgtagaaggcgaaagggtgtgcctattcttctgcctggcttatgtctttctaaagcactgcaaccttttcttcctatatttcagcagggtttaattagtgggtcggccgaaacaaaggagcaggcggctgaaggtctaggagagttaattgatgtaacaagcgagaagactcttaaggaagttgtagtgccaattacaggacctcttatccgcatccttggtgatcggtttccatggcaagttaagtcagcaatcctatcaaccctgacaatcatcatcatgaaaggtggaattgcacttaagcccttccttccacaacttcaaactacattcgtgaaatgtctacaggataacaataagtctgtccggacgagggctgcagctgctctcggaaagcttagtgctcttagcacacgggtggatcctttagttagcgatcttctgtccatgttgcagtcaggagatgaatctgtaaaagaaagtgtgctttctgcactcaaaggtgttatcaaacatgctggcaaaagtgtcagtgctccaataaggtcacggggatgtgctcttcttgaagatctgctgcaggctgaagctgatgatatccgcagttgtgctgcaaaagtgattggcacattgtctcagtacatggatgacagagagattccagatttggtgcaaatccttttggaagtgggcacctcatcggactggtgtaccaggcatggtgctttgttagcattatcatccatatcaatgcattctccatcaaaattatgtgatttggcatcctttccatctctggttgatcttctgaaagattctcttaaagacgacaagttccctgttcgtgaagttgctacaagaactctggaaggaga

SEQ ID NO: 42421 - DNA, 610 bp, Zea Mays
cacccggttcttcgtcttccactcttcctctcctagatctcttcagcctcttctatcgttgccgcctcaatagacccagtggatgtcctcctctccatccagctttaatctcggatacagagtgacagcagtgacatgtagaaatccggtgtaggagccagttcccaaccaatattgaatgcacaatccgcagcagagagtgcactcgctcaatcagcgtgcatgttgactatgccagctgcttaacggtactggtgaaactgatctctctctctctctctctttgctttgtgttcagtagtgtctagctcttcgtcgagttgagtccaaactaaaacgtcccagagacgtctgttgtaaagacccgtgtctaatatgatatgcgtatcagaaatccgatgtaaagacctgttttttaaatgttattatgctcgattcttttagagacttttatatcgttgttttggtttaagtacccgagaatcaaacatatttttggatcttggttgcatggggtgcatcctaaagcaaaaaatctcattatcacaattgttgtagccttatgttgggttatttggataacctggattaatttagtgtttaatattat

SEQ ID NO: 42422 - DNA, 2305 bp, Zea Mays
aaacaacaagaataagcagtaacaacaataatctagcctgcctgtccttagcgtagtcatgccatggcgggcgatgcgctcatcgtcatcgtcactagcttcctcctcgcgctgccgtcagcgacggcaataggcaaggtctgcggcaacgccggcaactacacggccaacggcaggtaccggtccaacctcgactccctcgccgcggccctcccagccaacacgtcctcgtcccctcagctcttcgccaacgccaccgccggccaggcccccgacgccgtgtacgcgctcgcgctctgccgcggcgacctgaccggcaacctcaccgggtgcagcgcctgcgtgaacggctcgttgcagtacgcgcggagggcgtgcccctacgccaaggccgccagcgtctacgacgacaactgcctcatcggctactccagcgccaacatcctcgtcccggcctataacgccacccgggacacgagcacgctcttcgactactggaacagcatgaccatcgccggcaacggcacactggtggccgcccacgtcgacgacctgctgacgcagactgcccagcaggctgcctccagcccgaggaggttcgtcacggcctacatggacggctccagcaacgccgtcatcccgacgctctactccctggcgcagtgcacgcccgacctgtcagccggcgactgcctggcctgcctccagcggatcctcggcttgctcaacgccacgacgtcggtgagccttggagggcgggtcctcctgctgcggtgcaacttcaggttcgagaataacatgttcttcgacggcgcacagatgacgcagatcaggccgtcgtccggcgctccggcgccaccaccaccgtctccgacgacaaataaaggtatgtgcggtcaagttcgagctattttcatcatgaactaattgttgatgcacccttgtttgtctaggatctggggtgaagccttgggtaattgcggtgtctgtagcacctcctgtggcggtagtagcattctgcttcatcctttacaaccgtaggcaaaggagaaggttcagaagaggtagatctaaactacgacaaaagcatcctcgcaacaacttgaaaggagacgaactagattgggaaatggaaacagagctctcagagttttctgtttttgacttccatcagatattggaggctacagataacttctctgaagaaaataaacttggggaagggtcagtttcctgatggaactgagatagctgttaagagacttgcttcacattcagggcaaggttttgtagagttcaagaatgaagtacaactcatagcgaaactccaacacacaaatttggttaggctcttgggatgttgctctcagggagaggagaaaattttggtctatgaatacttgccaaacaaaagcttggacttctttatctttgatgaaaacaggaaatcgttactggattggaaaaagcgtctagcgataattgaaggaatagcagaaggacttctctacctgcataagcactcccgtttgcgtgtcattcatcgagatcttaaaccaagtaacattctcctggacagcgaaatgaatcctaaaatttcagactttgggttagcaaaaatatttagctcaaataacatcgaaggaagcactacaaggagagtggttggtacatatggttatatggctcccgagtatgcctctgagggcatcttctctatcaaatctgacgtattcagctttggcgttctcattcttgagatccttagcggaaaaaggaattccggcaaccacgattatggagatttcatcaatattctcggatatgcatggcaattgtatgaagaggcaagatggatggatctcgttgatgcctcattggtaccaatggatcactcatctgaaatcatgaggtgcatgaacattgcattgctgtgtgtacaagagaatgccgctgatcgaccagccatgttggatgttgttgcgatgctaagcaacaaggctaagaccctggctcagccgaaccacccagcgtatttcaatgtacgggtaggaaacgaagaggagtccactgctgctacggcgtcaggcagtatcaatgagatgaccgtatctgtcacaactggtagataatttttgtttgtacaaagtggttactgttgagcttatatatataattatccttttgataatgtgcaatgcagacatatttcattatatggggtatatgtttatttaattactctattttgtgcagctttcttttcttttcttgagtaaagagtatggtcacccgtcgtaatatg

SEQ ID NO: 42423 - DNA, 823 bp, Zea Mays
tcggaatttactattttatttcttcatatatttattttgttattattaattttttttcttatacagattttgggtattacagaaaacgatgggctcgacgacacgcgaagctatcaccagcgacgacacgacgatagcgacataggcgagcgtggatcggcacgggccaaacaccggcacgacgagtgtcgtgggatagcagcaccacaagaacaggcgagatgcgaatgacgcagtccagcgcgcagggagcaaggacagccagctcggaccatcgtgtcgagctcgaggaagacgatcgaaccaccacctgcacacggcgaccatggaacgagcgcgacacggagctaggcgcggcatggggaagccgccatggggagctcgacagagcaccggatcagggggagcagggaaggcgccgagcagaggcacgtgcggccaagcgaaccgaaggacgcggcgacatagaggagcgttcggtcagggggaagcaaggaacgttgaactggagctgagcgtgcgcgcaggggtgaaacgccggtgagccggagagctgcgtggctggggaaacgaagctccacggcgagcttgagggagatgagggaagcttggccaggcgccgttggagggagaggagttgcagagagatccggccaggcgcaggagctggagccgctcggtatggagatgagcgcagggaggaaggggatatgtccgagcgctaggaagaagaccgagcagggcgccgcggtccgagcgcagggggctgggcggagcacgcgacgcagagggccgctcggcgagcgcaagagcgcgacgcggc

SEQ ID NO: 42424 - DNA, 1081 bp, Zea Mays
ttttgtgtaagacctgacagaaacaatcatcggcttgtggggaagatacaaaataatgaggaattacatgcctaaaggagtaccattttcttcatgttggcgatgaaatgctacaatctaagtcgcttggtcgagattcatatgtctttggtgggttatcaattttctttacaaagatttgagtcacatgtatgttgatgggttggcatattagcaggagatcaagaataaaatggttctactgaaacccctacaagatgccttccactctgtgactcgtcattgggttcactcagattctactgccccttgacggaatgctttgctctgtggatgatgatcctgagcatggtgaggcattgatagcaaatgtggagtgcccacactgctgccggatgttctgtgcccagtgtaaggttccatgacacactggtgtcgcttgcgcagagttcaagttccaacgaccgaggaaggatgagcagggcagagaggacctactgccgaggaaggttgaacaagagagcaagtggcaaggtgccccgagtgcaagatatatgtggagaagatcaggggctatgtatttatcatttacggggacaaccgttgttgcaaaacctgcaatcgaacctggggaatgccttgaaatcgccaagctctctacttgaaggaaagaaactcatattaactaatattatatgtgtgctgctggttcattttcagaagcaattaccattcatcaaaaataggctaacacggctatatatcaggaaaagtcgattacaagcagaacatatattgacctataaagcaaaccacaaatgggcatcatagctgaatgataattgagaatgattcgtcttgagaagtacaaatcctcagacacgtcgtttttattcattcaagtcttttaaatctaactgcagatcatggcaagtatggtgtacaaaaggtcattacaatttttagggataattgtttgcattgttataaacatttcttaattttttgtgttctggtaggacgcccgtaagggcgcttttatgttctagtattcttagaagcgtcacaagatccaagtcgg

SEQ ID NO: 42425 - DNA, 893 bp, Zea Mays
tcaagcatcattatttttatctaagtgtacatgcaatcgttatctgactggaactcgagtatataacatatttggtctcttaagtaaatagaataagtctagtatggtctgctagtgtctttgctttcatgatgagtgtggatcttattcaccttaaaattttgaatgtgacaatattatttatttgtagattggtgctataatatatggtattcaacctgggttgacgatggttgttggtcctcctggagatgtacgaggatgcaagccaagtggcggttgatgctgtcggtagtatcagaaccgtggcgtcgttctgcgcagagaaaatagtggtcgcagcgtacagggacaagtgtgaggctctaaggaaacagggcatccgaaacggagtcatcggaggacttggttacggcttctcgttcttgatgttgttcttcacgtatggcctttgcttctacgtcggtgcgcagtttgtgcgccaggggaaaactacctttccagatgttttcaaggttttcttcgcattagttctggcagctattggagtctcgcaggcgagtgcactggcttctgatgcgaccaaagcaagggactctgctatttccatcttcagcgttctggacagggagtccaaaattgactccagcagcggcgacgggatgacgctggaggatgtcagtggcaaaatcgatttcagaaacgtcagcttcaagtacccactgtgtcttgacgtccagatattcagcgacttcaccttgcgcattccttctggaaagacagtggcgcttgtcagagagagtggcagcggcaagtcgacgataatcgctttgctggagcgtttgtacgacccagattctgtgtcccagtgggtcaagctatggtttgactga

SEQ ID NO: 42426 - DNA, 632 bp, Zea Mays
atcaattttgtagagctattataggagaataactttgatgcaaacagtctctttagtcgttatacaaaaggttaaagaaattcctgcccaaagttgctctgtcagacttgtactgaagaactgaatttgaatctaaaaagcagaagtggtcgccagtgttattgaccaaactttgggatcaagattataaaggatctagtgctcgattgagtttagttcctacagtcgaattgcagttggggtatagctccatagctttgatacaggtaagtgattatgttgtcatacgaaatttgagagtaaatcgcgctcaaactcgctcggtcaggcgcactgaagatgaattccatggtacagtgactggatcagactgccagctcggtcagctcgtcaccggtgatccgcgtgaccggatttgtgctggtcgccgggattcgtgctttgcacgcagaagatttctacgagaaggtaaagatctcccggaggggaatggataagatcacggattggagattatcaccgtgcttttagccgtggcaacgtggctggactacggacgtcgccgtggaagcgccggtgaccttggttgcgccacgccctagcttgttaccatgcgggtagtaatcgtggca

SEQ ID NO: 42427 - DNA, 2968 bp, Zea Mays
cttgcttgcgcttcctccgtccccctagccgctgcaggtcctagttgccccacccctcacgccaatgcagcttccccctgttttgttgctttgaccgccttaaacacctcagggcctgcagatgtcgcaccgaatcacatccccttcacgcctcctgctcgaattcctaacgcccgagaaaccaataacctggtggtgatgccgctgagcaacgccgtcaccgtcacttaatcccaactcccccactagttgtctctcttcttctcttcggttacaagagcagaccggagttagcgggcagtggaggccgcgatgaagagcccccctgtcatggaccccgaggcgccgccggcgggcactcctcccgatgacgaggaggagaagcggggaggacggaagggggtgccgtggcggatgacgctgagcctggcttaccagagtctcggcgtggtgtacggcgacctcagcacatcgccgctgtacgtctacaaggcggcgttcgcggaggacatccagcacacggagagcaacgaggagatcctcggcgtgctctccttcgtcttctggacgctcacgctcgtcccgctcctcaagtacgtctgtgtcgtcctccgcgccgacgaccacggcgagggcggcaccttcgcgctctactccctcctctgccgccacgcgcgcgccgcgctcctcccgccaggacgaaccgccgcctgggacgaggaccagttctcggacggagccggcggtggcaccaacaaggctacggcgcagaatggcaatgctgtgacgctgggagggggcgccgccgccagcgtcaggaggctgctggagcggcacaaagtgctgcagcgggttctgctcgtgctggcgctggtgggcacctgcatggtgatcggcgacggcgtgctcacgccggccatctccgtgttctctgcggtctccgggctggagctgtccatggcgaaagaacatcataaatatgtggaacttcctattgcctgtatcatactggtttgcctgtttgcactgcaacactacggtacacaccgggttggcttcatttttgctccagtggtgatcacatggctcctatgtataaccctgatcggtgtttacaatattattcactgggaacccactgtatatcgagcattatctccgtattacatgtacaagttcttgaggaagacacagagaggaggttggatgtccctgggaggaatactgttatgtgtaaccggttctgaagcaatgtttgctgatctggggcatttcaaccagttgtcaatacagattgcttttacatgcatggtgtatccagcattgatccttgcatacatgggacaagctgcttatctgtgtaagcatcatatcatggaaagtgactacaggatcggattctatgtgtctgtgccagttgtgggaagccaagccgtcatcactggtacattctcaatgatcaagcagtgcgcttctctgggctgctttcctcgggtgaagataatccatacatctgccaaagtacacgggcaaatatacatccctgagatcaattggattatgatgatactgtgcttagctgtaaccattggttttaggaacacaaaacacttgggaaatgcatcaggattggctattataaccgtcatgctggtcacaacgtgcctgatgtccctggtgatagtcctgtgctggcataagagcatattccttgcgattggcttcatcctgttctttgggaccattgaggcactgtacttctcagccgcactcatcaagttcagggagggagcctgggtcccaatcgttcttgctctcatcttcatcctgataatgtgcgtctggcactatggcaccatcaagaagtacgagttcgacgtccagagcaaggtctccatcaactggctccttggtctcagcccgaaccttggcattgtccgcgtccgtggcattggcctcatccacaccgagctcgaaaccggcatcccagctatcttctcgcatttcgtcaccaacttgcctgcctttcaccaggtactcatatttatgtgcatcaagaacgtgccgataccacatgtccggcctgaagagcggttcctcgtcggaaggatcggccccaagcagtacagaatctaccggtgcatcgtcaggtacggctaccaagacttccacaaggacgacgtggagttcgagaaggagctggtgtgcagcgtggccgagttcatccggtcagggtcgtccaagctgaacggcacggctgaggaggtcgacgaggaggaggagcagcgcatggcggtcgtccgctccaacagcgtccgcatgctggaggaagaggccacggtgcagaacaccgtcggggtcggcccgtcgtcgcgggccagcagggagatacagtcgccgtcgccggccccggcgactggggttgggcccaagaacaagaagcgggtgcggttcgtgctgccggcagcgagcccgaagccggacgccggcgcgcaggaggagctgcaggagctgtcggacgcgcgggaggccggcatggcgttcatcctgggccgctcgcacgtgaaggcgaagagcgggtccggcttcctccgccggctcgtgatcaacttctgctacgacttcctgcggaggaacagccggggaccccgctacgccgtcaccgtcccgcacgcctccacgctggaggtcggtatggtgtactttatctgactggactgaactgaacagccccctgaaactaactctgggagtgagaaactcagaaacataggaacatgaaaagataagatgaggtgaaacaaaaaaaaaggttttcagctgtatatgctaggttttgtaactgctggtgagtttcgttgtaaaatgcagccctgttttcttgttaggcgttcagcttctctcgtaatccactagaaaatttattattatgggctagtttggtaatatattttttcgaggtatttct

SEQ ID NO: 42428 - DNA, 845 bp, Zea Mays
cactccgaagcgctcgtcgcaaaagctgtggcactgccgcactggcacagtggcacgcgattcctttccttccgcgtccgcgtccttctcggctgtctgtgcagttgtgctcgcttgctccccacgcccacgtcattccccgtccgctgcggctcacctccagcctcacggtcccgcgaccgctatggccgacgcgtactggaggtacgcggccgctgccccgcgccagcagcagcagcagcagcagccgccgccctccgccggcgggggcgtcgcgcaccccggcatgggcggcggcgcaccgcagatggcccccgccggggggcagcagcagcccatgaagcggccccgccccaccgaattctcagatgtacccggtgcacctgacacggctggctattatccacgcgatgaagaaagggcagggtatcgtgctgctagagataccgagtctcttaacgcttcctacgaacgttttctacgtactgggcaaattcaatcctttggtggtggacatgctggagaacctattaggcctgctgtgggtggcaatgctgcctacccagttgatgatcgttcaatgatggctgctaggggtatggatagcagaaatattggtttcgttggtggaatgccagagccaccccttccacctgatgcctcaaacaccttatatatagaaggcgttccatctgactgtacacgtcgagaagtttcacacatcttccgaccatttgttggctttcgtgagtttgctcgtttcgcaggtccaaaggggaattcaggacctggtggtcgtggtaggcgataagttattggcgttcctttttgccaggtgattcacg

SEQ ID NO: 42429 - DNA, 1594 bp, Zea Mays
atcatttcgttattagtaggtgaactggaggttggaatgctcagcacgtcttccttttgttatggaggtcacacagtcaacggatttcactgagcttgcaaaccaggagccgtggctctcatctatgaagttggttgtgaaacctgacatgctctttgggaaacgtgggaagagtgggcttgtggccctcaacctagatcttgcccaagttcgccaatttgtcaaggagcggttgggagttgaggtcgagatgggtggctgcaaagctccaattacaaccttcatagttgaaccatttgtgccacatgaccaagagtactacctttcgattgtatctgaaaggcttggcaacaccattagtttctcagaatgtggaggtattgagatcgaggagaactgggacaaggttaagactatctttcttcccacagagaagcaaatgacacctgacgcatgtgctccattgattgccaccctgccattggaggtccgcacaaagataggtggtttcattagagctgtattttctgttttccaagacttggatttctcatttcttgagatgaacccattcaccttggtaaatggtgaaccgtatcctctggatatgagaggagaactagatgacacagctgctttcaaaaacttcaataagtggggcaatattgtgtttcccctaccatttggaagagttctcagtccctccgaaagttttatccatgaactggatgagaagacaagtgcttctctgaaattcacggtactgaacccaaaaggacgcatctggacaatggttgcaggtggtggtgctagtgtcatatacgcagacactgttggtgatttgggatatgcttcggagctaggaaattatgcagagtacagtggagctcccaaggaggaggaggttctgcagtatgctagagtgcttttggattgcgctacctctgatcctgatggccgtaagagagcccttctaatcggaggaggaatcgctaacttcacagatgttgcttctacatttagtggcatcattcgggctttaagagagaaggagtccaaattaaaggctgcaaggatgaacatttatgtccggagaggtggtccgaactaccaaactggactcgccaaaatgcgcaccctaggcgccgaacttggcgttccaattgaggtctatggaccagaggcgaccatgactgggatctgcaaagaagccattgattgcatcatggccgcgtaaatcacaaatgtggttgttccatttgaagtcacatccgttttgtactagacgttccttgtacgtgattgctctggtaaaacagagaacgatcattgtcatgagtaaactcggcctttgtaacacagttacgcaagtaataattaagatcttggtttggtgctctgccacccttctagggtgggccggtgaggtgaatgtacaaataacaatgcactttgtgatccaccagattgcagtgctctggtatttctagggtcttgtactgcctgtgctgttttgtgttgtttgtttctcactgcgtttgctgtttatccttggttgagagttgtgactgtagaatttgcaggcaaatcaaga

SEQ ID NO: 42430 - DNA, 1291 bp, Zea Mays
attttattggcacctgccggttgagttgataggtggctacgctgcctccaggtgttgcaatcatgatggccccatttgtgtggtgaaaaggtagctgacatttggcactaaattctgtgctgatgaagctatgtgatgcaccagaatcaaaaagaatgactgcagggtactttaaaactgaaaagatatcggtcatgacggatgctccctccagaatgtcaactaatgtggtgaagttcagcctgccctacctcacttgcaccctctgcctcttgccatggttctgatttgcattctgacccttcctctgctggtttctgggacaattcttagcatagtgtctggtgctgccactggtgaagcatctgttgtcattgccctggcggtactgctgttgttgcggctgctgcagattgttgttcctctgagctgggggttgagagcggttgggtgcctgctgctgctgttgtggtcggatcacccatcgtccctattgctgctggggtcctctgctctgagtgtcggacacaaacctgaagcgctgaggcagtgctgatggccctgtcataggggtcttcctcttcttctctgcctggcgagctgtgatgcaatcctcctaggagatggccaagttgaccaactcgttgtagctgttggccctgactgtgttgagatggtcacagagcttagtgttgaggcccctcctgaaactgtctctcttcttatcatcagtgtcagcatggtagcctacgtactgacacagatcattgaaagcttgggcgtactgcaacacggtacgacttccctgcgttagtgccaaaaactcgttgagcttgcggtccatgatgcccgatggtatgtgatgccctctgaatgctgtctttaactcttcccactcaaccacgtggtcgaccggctgcatgacgaggaaatggtcccaccatgtcctagcggatccacgaagctactgggcagcgaaatggaccttggccgcatctgagcactctctgttaagcagtgaaaactttgattccaccaccctgagccagacatcagcatcaagcggatcttccgccctggtgaacaacgtcggctgagtactgagaaactcctggtaggttgtcgctgccggggcacgctggtggtgatcaccacccccatagtgctgaggcggtggctgacgctgagcgagctgccgtagaatctcattctgctgagccatcagctcctgcatggtaggaggctgcggcagtggtggaggaatgctcattctgtccacggcgcactcttc

SEQ ID NO: 42431 - DNA, 2040 bp, Zea Mays
cggctggatcctggatggccccgttctcgttctcgtccaatttccggtccaccatcagcagacttgcgtcgtcgcggagggctcgcgtcggggtccatctgaacatccgccagaccgccgccaccatgccgcaacctaccgccgattcgagcaccatggtcgccggcgagcatcagcaacaacagcaacctgccaccgcgcggatctcctcctcctcaaccagctccggaaggctcgtcactccgttctggaaagagaagtatgagagggacgcgaggaggtactgggacatcttctacaggcgccacgaggacaagttcttcaaggatcgacactacctggataaagaatgggggaaatactttaagggacgagatggagaaaagaaggtggttctagaggttggttgtggagctgggaacacaatctatccattgctttctacatacccagatatttttgtccacgcctgcgatttttctccacgagctgtcaatttggtcaagaaacacaaggacttcaaagctgaccggataaatgcatttgtttgtgatattgcatcagaacaactaaccgagaatgtggaaccttcttctgctgacattgtaacgatgttgcaccagataaaatgcctatagttctggagaatgttagaagtgtcttaaaacatggtggccgtgttctttttcgggactatgccttcggtgaccttgcacaggaaagactgatgtcaaagggccaacaaataagtgagaacttctatgtcagaggtgatggtacgcgtgcatattacttttcaaatgaatatctggtagatttattttcaaaatgtggacttactcttgaggagatatgtgtgcacaacaagcaagttgaaaaccgttcactggagctggtgatgaacaggaattggatccaagctaccttcaccctaaattcagctagtcctcaaggtccaaatggtcaacacgatctccttgcttacgaaggagaggatgataaggtagttactgacacatctaagaagaaaagcagcggtgaagaaatcgatctttctgaagatttttgcaacatgtttgggacatcacacagccttgatgaggtacaaatcattggggtgaaagcaaaaggccacgacttcaaaataagaatgctcaggaaggaataccagcacacctgcagatcaactggcttaatgctctgggaatctgctcaattcatgtgctgtcttttagcagagaacccttcgatcgttgcaagcaaaagggtcctggagttgggctgtggctcagctggcatctgctcgatggttgctgcaagtttcactccctttgttttagctacagatggggatgaagaatcactggacctccttagacaaaatatctcctcgaacatggagcctaatttgctgagcagaatcatggttaggaagttattctggggcaacgaagatgatatgaaggcagtccgagagcttcatggtaacggcgtgggttttgattgcataataggcaccgacgtgacatacaatcctgatgctatactccctctcttcaagactgctaggggagtgatttctgagaaagctaacgaggactcggtacctgctctcattctttgctacatccagcgacgagttgatgaggactccatcctttctaatgcaacgtcccagggtttcaggcttgtggacaaatggataaatggagttcacgagagtaacggtaccatcagttcttggttctctggtaatgatgtctgcagtgctttccggcatacagtactttcagtactgtacttcgagctgtgaatgctgctatgcatgtgcaaggttactgtataacctgaaggatttttgtagcagctgtatcaagcaacggcaaaccaactttgaatctttaggccttgtttaatgatttcaattttacgtgaatcggactgtactggaatggattgagatagattttgacttctatggatttaaattgacttagtgccatccaatccatatggattaacggtgaaacgaataagccc

SEQ ID NO: 42432 - DNA, 1185 bp, Zea Mays
ggagtacatccggcgggctgccttggagcagcaagtcctcggcttcctcatcacctccatgaccaaagaagtcatgggtcaggtatcatcctacaccacgccgcaggaggtgtggaacatgctggaacagacctatgcattgcagtcccagtctcccgggcaagaacagtcaacaccaggattgcattggccatgactcgaaaaggtaacttgtctatttctgagtatgttgcaaaaatgaaggcacttgcagatgagatggcatctgcttggaagcccattgatgaagaagaactagtctcctacatccttgtgggactagatgaagaatacaaccatgtggtgtttgcccttgttgcacagaaggattctgtctcatttggggaggcacactcgcaactcctcaattttgagagcaggatggctttgttgtatggaggatcctagccatcggctaatgttgctgcccgtcgaggtcgtggtggttctggtccgtgtggccggggtcgcaatggccggtttaatcctggtcgcagcagcaacagcaatgcaccaggagggtgcagatctgatgggaacacaataacctgtcaggtttgtgacagaactggacattctgcccgcaagtgctggtaccgatatgatgaagacaactattccaactcaaattccaagagtgcagcagcagcaatgcacagctatggtgtcgatacaaataggtataccgacacagctgcaacggatcatctcacgtctgagctggacaaactgaccactcatgagaagtacaaggggacagattagattcacaccgcaaatggtgcaggatctggacacgaggaaggtacttcttcaagcttcaaggtagatgcagagatggtctttatccccttccatcagacagttcttggctaggggcatttggcgccatcaagtcctctccatctctatggcacaatcgtctgggtcatccatcattgcagatcattcaaaaaatagccaataataatcagattatatgttctagtgagtcaagtagtctgtttgtttgcgacgcttgtcaacaaggcaagagtcaccaattaccttatccaatgtcaacaagtgtctcttctaccaagcctttacagctcgttttctctgatgtatggggtccagcccccgagtccgttggtcgaaaaaaat

SEQ ID NO: 42433 - DNA, 798 bp, Zea Mays
ccaaaactgataaatgatgaatatgactcgaaccttaagctcactaggataagggacacatcagcagctgaagcaagggcaggaaaggatatacaaggtataccatgggagaggatacacatagccaggcaagactaccgaaaagctaggttggaacagtataagaactatgaaaatttccctcaatcaggagagctcatggataagttgtgcaagcaagtggagaagagcagcaagtattatgagtttcagcataacactagatcagtgaagccatcaattctccattttcagaggttcttgacttctctgggcacattgctccggtggagaagcatcctggcagtttgctagaaggtttctctggggttcaagttagcacacttgctgtgaatgagggtttgttggtagctggtggttttcaaggagaactgattggcaaggatttggaaggatgtaatataaaattctgtgcaaggacaactttgagtgacaatgctataacaaatgccatagatatacacagatcgacaagtggaagcttgcgcattacggtatctaataacgattgcggtgttcgtgaatacgatatggagagatttcagctcttgaaccactaccgatataactggccagttaatgcctgatggagcctccacgtgagggggagtattggagtataaatgagttgcccacctttccataatcagcttaagaatttgggttgaaatgatcagtgcatgcaacttaataatatatttaatgctttgacattcattatttgcttctataacaaca

SEQ ID NO: 42434 - DNA, 1661 bp, Zea Mays
cttcgacccgcgccgcgcctcccgaaagtttcgaacaaaagtccacaaatccccttcgccgtctccggcgagccccgcccctcatcgccgccgcgccaaagagacagtgagaggggggatggatcagtccatcagaaccgcatgcgagttcctctcgtcggtgctaaaccacgctgagtcctcgtcccgcgagctcgccgacgccgtctcccaacgccccgtccacctcgagatggcgaggacctcgttcctgcagaagctggagcacagggtggaggcgtcggccgccgacttgcagcacatcgagtccatcgccctcgacaccgtctccttcgaggagctcctcggccactgcggcgaggcgctcaaagtctacgcgcgccacgccgacgccctccagtcgcacctcgcttcctttggctacgagcccccggacgcacaacaccccgagatcgatgtggatgtggaagatggagatgtcgggaaggttggggaccctggagatagatgcctcagcgtgtcgcgttcagtgctcaggtcgggtaagcggcggtttgatagccacagcgatgcgatgtatcctctttggtttgattttgttcggaaagcaagattggcattgcctcggtagaacatctcaactgattgtatcagcagatgttgcatcttcagatgccatggatccaattggaggcactagtattaggaaatgatgcacttgtaagaatgcctacaggtttgaggacctatttattctggtacgtttatgctaagcaggagctgtatataggagatgcatcgaagctgaaaccctgagacacatagttttggtcggaactgcactgtgcttttcttgactgccgattagatttgaagagtcactgaaggatcttgggttttcagatgcttgtctagccactctttcttctgaaggcgcacattatggtgagagcccaaagaagctttacaagaatgctgaaagtactgatgatggcgaaaagatcatgaatgaagctgaaattatgactcccctaaatgaaagaaatggtcaaggtaattcttttgaaggagtgataagggcatcaaaggaggattatgagcaactccctccttatatgaagagtctagcatcatgggaggtctgaatttctttaactagtctgcccatagtacttatgcatgctcgatacaggagttgcaggagggaatatccaaactaaattcatacttgggtggtgacaagttgcaggggagtgttgctttgaaccaggaccgtgttgcagagataggattggggcgcaaaggaagagcctgtttgctgatgctgttgcgactcaatcagctaactatggagacagttgatggctctaccttttacaccctgtgcaagaacaacgtgtagcctgatactgctactgctacagcgtgtcatgcttaagttttcctttttcttttcgtatgtcgagtctggctagaatattgtatcatgttgatgtagcactcgatctcagctcaaaatattgtttttttctgagcagttctggtcatgtgatcttcattccaaccatgaaataaagtgtgtttgaggcaccgctcatctccctgcaattcacctgggagatgcatatagaattttcaaatccgactttgcaatttcacaa

SEQ ID NO: 42435 - DNA, 1896 bp, Zea Mays
ttgtaggaaatgaacttccatcagacttgatagacacactactaaagtggatcccaagcaatgatgaggagcttaggcttcgactgtcctcccgtagcaccgccacaccgcacgcgtccgtggcggcgtccgcctcggcgccggtctcgcacaccgctccctggctggggaagttcatcgcctccgagcccttcaacgtggggggattcgactgggcgatctacttctaccccgatgggaagagcggcgaggatggtatgttgaagtgacatgctctgaactgctcttggcttcaggcagtcaggcgggataacaagcagaggtttagtctgttggaggaagatggcgagctgttgatccgggcgaaccagggacacacagtaatactaaaaaatatagtctggaggtgacctcaatcttattggacagaatactctcttatgagacaaagttgcataagcccatcaaattttgcagtaatcagttccttgagttcatgtgcaggtttgaaacttttaactgctggtcagcaagtgcattgtgatgctgttaagtggggtctagatttagatacttctgtttcaaatgtactggttaaaatgtatggggaatgtggagctatgtcagattactggaaggttttcaactcaatggctgaacacgatgaagtttcttggaacactatgatgggtgtcatggccagttcacaaacacctatttctgaaattgtcaaagttttcaacaatatgatgaggggtggtttgataccaaataaagtaacatttataaacttacttgctgctttgtctccactgtccgttcttgaagacaatgtggtagataatgcactcatatcatgctatgcaaaatcaggagatatggattcctgtgagcatctgtttactaacatgtctgacagaagggatgccatctcgtggaattctatgatttcaggttacatctacaatggcaatctacaggaggctatggattgtgtatggcttatgatacacagtggccaaatcatggattgttgcactttctccattatactcaatgcatgtgcttctgtggcagcattggagcgtggaatggagttgcacgcttttggtattaggtcacacttggaatcagatgtcgtggttgagagtgctcttgttgatatgtactccaagtgtggtagggtggattatgcctctaagcttttcaattctatgactcagagaaatgaattttcatggaattctatgatttatggttatgcaagacatggtcttggaaggaaagccattgagatatttgaggaaatgctgcgcagcagagagagtccagaccatgtcacttttgtcattgtcctatctgcctgcattcatgctggattggtggaaagaggtttagaatacttcgaaatgatgccggatcatggtatactaccacagattgaacattattcttgtgtcatagaccttctcggtcgagcttgtaagattgacaagataaaggagtacattcaaagaatgccaattgaacctaacgctctcatatggaggacttgtcatctttccactttcgtccaattattttgagacaaatatgttaacttgatgctcatgcctatagacattgttcaagccggtacatttacatgattggggcttcagatgttaaactcgacaaaaagttggttacaaaatatattggatataaattattttggcataatgttttgatgtccaggttgcttttcttcactactataatagtaggggtcacgggtagctgcatataatttttagttcacacttaggaaatatatgtatatttagaaattttcaaacattaaatgtcacaacattcttaatgttttaagtattagttaatagttatcatttttct

SEQ ID NO: 42436 - DNA, 381 bp, Zea Mays
cgctgacttggcatttgcttttgcgtcacgcttgtacttataccttctttcaagccgaaggtacatttgtaatttgttatcatttccatttttcaataaatataagatagaaatgaggtaataataatattcaagtgcttatgttatttcctatactttatatgaatccttcttcattatttgttgtacttatgaaggtatgtccttcataaccttcgtccgaaactcattatatcctaagggaaataatgctttgaaggacgaaggactttaacgtttaacaatttctgtgttgccttgttcttaattcatagcattgcaggacaagtccccaagagtgccctaagggagaatcagttctatggcaagttgaagaagtgt

SEQ ID NO: 42437 - DNA, 2274 bp, Zea Mays
gggacttgcccgggggcacgtggaaaaagccgtggtccaatcccagccaaaatttgaggggagggggaggggcaacccaaagaaagcgcaggccacaacaactccctcctccacctcccctttttcccctcacccccaccctacccgggcacccggttgctgccaggaaaggagggccgggtccggaccaccacccctctcttccccagccacctactgttcttctccctgtcctttctctctctactagtactaggtctagggtcgcctggccgccagccaacccacgcgcgcacacgccccgtccggccgtacccgctcttcattccccactgcacacaaatactactgtgactccgtgagggagcaacaggaggaagaagcaggggggagaggggaggggaggggaggcattcgtgctccttttttccttcctactgtacgagtacaggactgcgctgcctgtctctcctcgcctgctgccgacttcgcggcctcgtcgccctgccatgtccaccatggacgaaggctacgggcctacttgggacagcgacgacgaatacgacaacttcatacgcaagatgaacccgccaagatggcacgtgcttgttccaagcctaaccctggtcagttttggcgattgattggccgcaggatcgtcatcgacaacgagtcctcggcggaggccacaattgtaagggtagatagcgcgaatgaatacgggatattgctggaagtgatccaggtcatgattgatctcaaccttgtcataggcaaggcatatataacctcggatggtggatggttcatggatgtcttcaatgtgaccgataaggaagggaagaagatcaaagatgaggcaaccctcacacagatcgaagactacatcagaaagtccttgggcgcagattcaagatacattccttcccgccggagatcggtagacgtcgccgccgcagctgaccacaacatcatcgaactgacagggacagacaggccaggactgctctctgaggtcagcgctgtgctcaccagcctcaagtgcaacgtggtcagcgccgagatctggacccacaacacccgagccgcggccgtgatgcgggtcactgacgaggacactgggctggcggtcacggacgccgagaggctggagaggatcagggagaagctgtcgtacctgttccgtggaggcaatctctctcgaggtgccacagtgtcgtcgaggactgccaccacgcacaccgagagaaggctgcaccagatgatgctcgacgatggcgactacgagcagctccagcggcaagctccaggacagtctcagaggcctaacgtcaccgtgaggaactggaacgacaaggactactcggtggtgaccatcagatgcaaggacaggtccaagcttctgttcgacacggtctgcactctgacggacttgcagtacgttgttttccacgcgaacatcgatgccaaggacaatcaggcttaccaggaattctatgtaaggcatgtgaatggatcgccaatgaacactgaaaccgagaggttgcgagtcatccaatgcctggaagcagccatcgaacggagggtatctgagggtgtgaagcttgagctgtgcaccaacgacaaggtcgggctgctatccgaggtcacccgcatcttccgcgagaacagcctgacggttacgagggcggaggtgaccacgcggggcaggatggccgtgaacacgttctacgtgcgcggctccgcgggagaggccgtcgaccagaaggcgatcgactccatcagggaggccataggccacagcctccaggtgaaaggccaggccgagccaccggagccgcagaagaaagagtcccccacgtggttcctcttcgccaacctgtttcgcccgaggtcgctctacagctttgggttcatgcgctgatcgagccgtcgcttccaagaaccgctgcccgtgcagtaagttcaccaccgttcacgaagcaatccaggacatggggggatcttcttcagaaggtggaaaagccttcgttgtgtcctagcagtgcaggtttggcatgtaggtagagcatggcatgggtggtgttcatatatatatctgccgtcgtcgtcatcagcatcatcatctgtgtcatcatcatcagcgtctgtaaatatgacagcatttgaccatttgtacatataacgtgtaaactaaaggacgtaaatataagctgtacagaatatagttaaattccagatttgttgcgacgtcgtaaaagccggcgccttttt

SEQ ID NO: 42438 - DNA, 740 bp, Zea Mays
gctcacccaggttagatggggatccacctggtggcgttcgtggtagcgggggcttcctgtaggtgtttcaagtgtcggcgctgctgattggaaccattgcccgtcggtccagtgagtcgtcgtcgatggggatcccctgcgtgtttccctcaaagatcaccgctgcctcctcgtcattctcctgttcatggcggacactcggacctggctcccacgcgcgctcctcccctattctactccatggccgatagcccctgttcctcccctagccgaaggcctcagccgtcgtccttgttgaccacatcggacgtcgtggttgaccgccctgtaccagttcaccatgaccacgacctcgccttggctccctgctatgctcgcccggcccgaccccaagcgccagcacgcgtccatggtcgcgtccgtcgagtttgccaaagctctgttatgagtgccgaactatacctataaagcctcgccggtgaagtccaccgccatcctctggtctcagctcgtcccaacactcgtgcttgcccttggctcgcgttggcgttcgcgctttcttgtcatcactgcggcgcgctcgctcctcgtccatcggacttcggcgtgctcgcgtttgccgttgagttgtcaaaccccgtccttccttgctcgactcccaagccaaatccctgatccgcgtccgcagcgctcgcttctcggatcctcgtcgctgcgccattattttcgtcaaatagaat

SEQ ID NO: 42439 - DNA, 1878 bp, Zea Mays
gcgagacggctcgcgagccggacccgtcaggccgtcactgcaccacatgacaaacccggaccgaacacggacgcctcccagcaagtggtgacccgtttctccattctcgccgtccgattataaatgcgtccgcaaatgccgccagtccgctctctctcgctgcgcctccgcccccaaatctgcgcaaaggcctcccactcaaattcctcgcggcgaccgatatggttgggagcgtgggcaacgggctggccgatctgggtgcaagagccgtctccatgaacggggcggggaaggcgctgcgtcctgccgaagcggcggcggcggccgccgccgcggagacgctcccgatggagctggatccgtcggaggccttagtggccgctgcggtggaggcgaagggcgagaaggctgccaacgggaggagggagatcgtgatggggaggaacgtacacacctcctgcttcgccgtgaaggagcccgacgcggacgacgaggaaaccggcgagcgggaggcaaccatggctagcgttctcgcgctctaccgccgctcgctcgtcgaacgcaccaagcaccacctcgctgcagcacttctcgattaacaaccttggtgatcccttcatcgagagcaactatggtgttcattcccggcagtttgaggttggagtgctggattggtttgctcgtctctgggagttagaaaaggatgagtactggggatatattactaactgtggtacagaaggaaatctgcatgggattcttgttgggagggaggtgttccctgatggaatattgtatgcgtctcgtgagtcccattattcagtattcaaagcagcaagaatgtacagaatggattgtgtcaaagttgacacccttatgtctggggaaatagattgtgctgatttccagagaaagttattgcagaaccgagacaaacctgccatcattaatgttaacattggaacaactgtgaagggggctgttgatgatctagacttggttatcaaaacccttgaggaaaacggctttaaaggtcggttttatattcattgtgatggtgccctttttggattgatgataccatttgttaagaaggcacctcaagtgacatttaaaaagcctattgggagtgtcagcgtctctgggcacaagtttgtcggatgccccatgccatgtggtgtccagataacaaggttggagcacataaatgccctttctagcaatgtggagtatctggcgtcaagggatgcaacaatcatgggaagcaggaatggccatgcccctatcttcctctggtacaccctcaacaggaagggctacagaggcttccagaaagaagtccaaaagtgcttgagaaacgcacactacctaaaagatcgcctcaaggaagcaggaatcggagcgatgcttaacgagctcagtagcacggtcgtgtttgaaaggccaaaggatgaagaatttgtccgaaggtggcagctggcttgtgaagggaatatagctcacgttgtggtgatgcccagtgtcaacattgacaagctagactatttcctgaatgagttagttgagaaacgggcgacttggtaccaggacgggataagccagccaccctgcattgccagagacgtaggtgttgagagctgtctctgtggccttcacaagtagcgagccttttgctttgcaagtgggttcattcttgagtcgagttaaaagtgttatgttgtactgtgttcattcttgagttgagttaaaaagtgttatgttgtactgtgttcgtgcgttctgcttctgtgtttctccacagtgtagcttatttgttgccatgggaataaaattccttctattaaattgattgatggaagttgcatcacggttggcttt

SEQ ID NO: 42440 - DNA, 1760 bp, Zea Mays
gtgttgaagattgcaggcggaaaggacctggaaccagacttgccttgagaagacgcagccagccagcaggttggtagtgacacaggaggatggagtgagatatacagcttcatttcacgtgacagtgaagccagtgagaccaatgcttttctatttggtgacatgggaacttatgtgccttataacacctacattcgcacacaatctgagagcttgtccactgtaaagtggatccttcgtgatattgaagcccttggagataaacccgcctttatttcacacattggggacatcagctatgctagaggttattcttgggtctgggatcatttcttcagccagatcgagcctattgctgccaatactccataccatgtctgtataggaaatcatgagtatgattggccatcacaaccctggaaaccatggtgggctacatatggaacggacggtggaggcgaatgtggaataccttatagtgtcaagttcagaatgccgggcaattctattctacctacaggtaatggtggcccagacaccaggaatctttattactccttcgactcaggcgtggtgcatttcgtctacatgtcgaccgaaacaaattttgttcagggaagtgaccagcacaacttcttgaaaacggaccttgagaaggtgaaccgaagtagaacaccgtttgttgtttttcagggccaccgccccatgtacacctcgagcgatgaaaccagggacgcggctttgaaacagcagatgctccagaatctggaaccgctgctggtgacatacaatgtgaccctcgcgctatggggacatgtccacaggtacgagaggttctgcccgatgaagaattcccaatgtgtcaacacttcatcaagcttccagtactctggcgctcctgtgcatcttgtgatcgggatgggcggccaagactggcaacctgtatggcaaccgaggcctgatcacccagacgtccctatctttcctcagcctgagcgttccatgtaccgcggtggcgagtttggatacgccagacttgtggcaacaagggagaagctaacactgacttatgtggggaaccatgatgggcaggtccatgatatggtggagatattttctggcctggtatcccccagtaacagtagtgttgctgaggcggtggatggaaccaaacttggcacaggagtcagcaccgtgcggaaaatttctccgctgtacttggaaatcggaggcagtgtgatgtttgcgctgctcctgggattttcctttgggatacttgtcaggagaaagaaagaagctgcacagtggactcaagtaaagaatgaggaatcgtagtagtgttgccaataccgtgagcctggtgcagtggtggtgatccaaacttgtgtgggtgtaattactggagtagaacctaacaaagtgaaggcatttctgacttcttggggggctccgcgtcctcttggtacaactagtgtattgatagtcttgggaaatgaaggttctgatcgcatatctgttgttgtaatagttcaatgtataagcatgtaataagtgatataatgttcacattgctttggttgacacaagtgtgtaacatgtgctaccacaagtgattctgggcgtcctttgtagttgaaccatatttgttttatgatcctgcttttctgtatcatctgcctgcttttgttagcagatgtacggaatcttctgtacttggagtttatacctaacaacatacttatatatttatattacaaacc

SEQ ID NO: 42441 - DNA, 2017 bp, Zea Mays
cagcaggacaggccaaccatacaacacaaccttcttccccatctgcttcaagccccatggccgccgtggctttgagcttgggcagtggcagcggtggtaggaggagacggtcgtgccgagcggcgcgcaggggggacggaggaggggcaggggcaggggcaggctgccgccatttccacgtccactaccagtaccacatccctcgccaggcagtgtgggcatcctcgcctcctgctgttgcccccgtacggtacctgctgatccttccggtgattttcttggcggcgcttgcctttctcgtgtgcttcggctggctcaccctggtctaccttgcgtcgtcgtcgctgtggagccgtagcgtggaccgcgccggcgacgccagtggattcgccggagaagacgaacgggaggagagacctgtgatgcctgtgacggacacggagcatgctgctggtcgttctggcgtctcaggagtttgtgctggtgaagggaagacggagataggagaggctggagatggaatctctgaggaacgtcggtacgtatcaaccatggtttcaacaggaatctgtttcagcgatgacgagcgagccagtgatgagaagattgtcaaggaagtgatggtgtttgagccgtgtaaagctaaagcatttgccgagctggatggttcttcggaggaggaggagcaccagctgctgctaatggacattccaatagattgttttcttgaagaggttatcaacaccaggcagttcagcatctcactcagtaacgcaaccaaattacttgacgcgctgtcagttggtgaagtaattgctgcagatacgaaggaagtctcagatttgagttcaacagagatctggaaattcgttgacaggcatgatactgcagcagaaaaaataccagttcacggtgctggggctgattttgtgattccggaggcaacgtattccgctgattcaacccttcatggccttgaagatgagtatgagagtgagatcaaacaagaacagagcctagcagaactatcagctgacactgttcctggaaatgtcaccgacgaatggcaagaaacacaaacttcggttactgagcataacaacaagcaggctgaacctgaagcagcctccagtgaaggatacagaaagcaggtcgttggtgtttcagacgaatctcatgattccgtacgtgaaaatatatctgaaaacgaagcggcttcaaacgctccgttccatcaaacaaacagcgatgaagatactgaactccaagaaggccttttcccgaacaagcgagcggaggcgtcaacgtctgcgtctgctgtctgcgattttgccgacaaccattggcgaacagcagaagaacttgctggctctgcggatgaaggaaacgttcacggagaggggaggacttcagtccttgaaacggcacaagacggggatgaggacagagacaatcatgtctccatggttgccgctcgttcggaggtccccagcaccgtggtggagcttttgtggagttcttgatgcgtttgcaggcggtgaagactgacaaggactcatcctaatctggtatcagcttttgtttacacagatttccagatgtcgtcagtccacacgggagtattaggccttctaaaatttcaaaaaaaaaacctaatgctcaccccattctgctacccacaatgtacctcagggcctgaggttttatccacaatgtgcagtggctttgaccatttgttttttctctctctctcattactttccttcattttagaagctttggacttccaactatagggtgttgctccaaacaaggattgggttttgccatttgtgcttgtgtgttgaccactggaaaagaattggattgatgtttacgctgaagccacaaaaataataatacattgtgtatacattcttttgttttgacccgtctatttgtgtggtgaaaggctacgagaagcctagcttgcatctaggaactaggttctaggtgggtagactcaagtataaaaata

SEQ ID NO: 42442 - DNA, 1391 bp, Zea Mays
agaatattatccttgcacataacattgtttatcgcgacctcggcgggtagattcgccgccgcccacagcccacccggtcgctggggcctccccgtcgtcgccggtcgctcgacattccccgtgccggtccgcgcttccgatccccagcgcttccccgagtcgctgcgtgctcgcgtttccccgagccaagggtcgaaggtcgattcagcgccgtcctcaccggagcttgtccacgcccccttgtcccttcgcgcccgctccttcgccggagaccaccacgctgtccttgagcccgtcttctcgggaaacggcgcttcacgccctgcaagcgggacgaccccgtcccgcatctacggtgaatattcgcctgtgggacgagcccatcccacttctcctcacatccaaccaaacgccagcgagaagaggaccgtcccgtcccgttacggttcgtctctccacccctagttccccaaaccggggcatcgattcatcgaaccctgcccggagacgcgagcaatcatagacaggcatggcgatcgctcggaccggcgtgtacgtcgacgactacctcgagtactcgagcaccctggccggcgacctgcaaaggattctctccaccatgcgcgagctcgatgacagggcacatggcattatgggtcagaccaaagaacagataaagtatattctaggagtatcatcccatgggtatgacaggtcaaacatggatgatgatgagtcggagaggatgaagaaggacattgaagctagccaggacaatgctctgaatctttgcaccgagaaagtcttactggcacgccaagcttatgacctgatagagagccatataaaacgccttgatgaagacttgggccagtttgcagaagatttaaagcatgaagggaagatacctccagatgaacctacagtccttcctccagttccggtggttagcagggatgagaaaaggaggtagcagcaagaaagcaggtacatctatggatgtggatcaaacaattgatccaaatgaaccgacatactgtatatgccaccagatttcatatggtgacatgattgcttgtgacaatgagaattgtggaggaggtgaatggtttcattacacgtgtgtgggtcttacaccagaaacgagattcaaggggaaatggttttgcccaacgtgcaggaatcttcagtgagaggttctccaagtagggaaaaaatccaaatgcatggggattagtggtgcactgaagaagctacctagtctctccgtattttattgactgtcgctatggaaggcgtgtttgtcgaactttttaaaaatttaattaggtttatagaaaatagtagcaacatttgtatcttcaagtttattatgaaaatatgttcaagga

SEQ ID NO: 42443 - DNA, 4192 bp, Zea Mays
gctcggcgtccgcggcggtggcggaaaagccgggcgcgggtgggaaggagggttcgctgtctgagtcgacacgcgaggacaaaagaaaagatgtcaatggcatcaaaattttaccagcatgctccaaagaaattttgccagatcatgaggtttctttcacattgagcctctatgagagaggttatctcatttcaaagtcagcacccatggatcctagtcagacctcaattcaggacggcaaaacactgcatccctatgatagagcatcagaaaagttgttctctgctatcgaagctgggaggctacctggcgatatttttgatgagataccaagcaagtactataatggatcagttgtttgtgagatacatgactaccgaaagcatgtgtccaaccaagcgcctgcatcatctgctgagctaggatcaccaattgtgaataaagtacgactgcgaatgacctttgaaaatgttgtaaaggacattacccttctatctgatgattcctggagttacagggattttatggaagctgaggcttgtattttgagagctctacaaccggaactttgcttagaccccacacctaaactggatcgacttcatcaggatcctgttccgcataagttgagccttggtatagggaaaaagaggaggctgaggcaaaatcctgaagttgtcacatccagtcacatgtctcatggtaaaaaggtttgcattgataggttacctgaaagtgccaaagctgatgagatgggcatcactagcagtaatgcagctcagcaggttggtggtaacattaccatccaaaatatgtcagtctcaggtggttctcagacacttagaccaaataattcttcacaagatgctgccagaacgcttttgcctcaatctggtctacagcaaaccttgtgttattctgctgctggtaatgatcatatggcaggaccacctgccaatttttctggaaccagttcatgcatttcatctcatcagagcctgattggttacagtgactctgtggctgccaacagccttctatctgtgaagagggaaatgcaggatgcctcgcttcaagatcctaagagaataaagcgaactggtggtattgatgatgtacagcagcagcagataaggcctcaaccccttggtgggcaggagatgcaatggaagaaccatcaactgcatccacaattagatgttaaggggatgcagtatgcatcttcactgagtggtcagagatatccttcttcgatgatgaacaacatgcaagatccaggatcttccttatattttagtcatcagcaaaatttgagatacgatgctaagcaagagcagatggatggttctgataagtcaaaagacaccttgcagtctatggcacctgaaacttccatgctggatcagcagcaatcccaatctcaacatttaccacaacaatcagtggcaagaaataatgttccaaacatgggacagtggcaaaatactcggttcgcagctgagaaggacttcaaaaaagaagacataattcagagaagaaagttagcacctagctctcgtgcccctactgggcctgtgattcagtctccagtgtcctcgaaatctggagagttatcaggcagttcaatgggtggccagtttggttctgctgtgacatcagctgtaacaggggtacagaaagataaatttgctgcaaattccggtactgcagttggatttccttctgtagcttccagtcctagtgattccatgcaccgaatacaacagcctgctgttgcttcctcaaagaggaaaacaaattctgtccccaaaactcaaccgcctgtgagtgctgttgggtctccagccagtgtttcaaacatgcatgcgctgctgaatgcaagcagtccatcgattgggaccacacctatgggagaccaagcaatccttgataaatttgtgaaaattgataacatttcccatcggtatagcataatttctacatctgctccctcccttcacgaatttttgttgtcactttcctttctattcttagtttctttggaagtctgtcatgggagactttttaaggaagttttgggttgcacggtaccagcttttcaataagaagaagtttgataaaatatctcaaaagaaaaccattatcaatcgaaaccaaaatgtagctggttgtctcaacagttgtttccattctgaggattatatagataccacaagacctctttgtaattctatgattagtggaactataaacacatgcaagggtagggtaataaactttgtgagcacaaaagacatgtaccaaggtcattcaaggccattcccggttgattttaacgaactgtctgatgaaactgtaagaatgcaatatggagatataaaagattttgatgatccaaattcatatggttgtgtattcatattaccgacaaagcactatgctgacttgtttgcggggcagcttatttcccttatgttgcaagatggacattctaaagctgacgatgaagttgtgcgtagcaccccttttgctaacatcagtacaccctttggacctttaccaaacaacgtagtgagtgatgtaaagcaagagggaggtgtaagccaacaacttaatgccgcagcccatgcaaatgtggcacctggaacacaaatgcaacagcttcctgtcaataggatgcttccatctgcaaatggcaaccagattctagcaatgcagcaaggttatatgcaaggggcagccatgcctccaaggagccagcatcttgaccaaaatttggttcagcagccgcagcaccaacagccacaacagcaaccactgcagcaaaatgctcaagcccaggtgcagcaaccatcatctcttccactgaaccagatgcaaagacctcaggttctgcctacgagcccattatctcagatgttggggcctggctcaaatctcccaatgggctcaagtcagataggtaagaataaggctcctcccacatctttgcagcttcaaatgctacaggcacaaccccaacaacctatgtctaggaaagtgatgatggggcttggctcagccatgaacatgggcaatatggttaacaatgttgttggtcttggtggcctcggaaatgttatgggaatgggcaacgtgcggccaatatcttcccccatggcatcgatgtcaggcttaggtaacaattccaatccaatgaacatgggaatggcatccaatcttgctgcagctggacttcggccaggcatgaaccctgctgctattgccaaggtgcgtatggggttggcacagcaaagggcagcaggcatgtaccctggaatggttggaatgcctggaagcagctcatcaatccttcctagttcagctggcttgtctatgatgggccagccgctaaacagaggcaaccttggccccctccagagggccatgatgtcgtctatgggccctccaaaaatgccaggaggtaactttcagctgaatgctcaacagcaaatacacctccagcatcagttgcagcagctccaacagaacccacagcagcagctccaacagctacagcaacagcaacaaatacaacaactgcagcagcagcagcagcagcagctccaacaacagcaactgcagcagcaacaacaaatgggatctccgttaggccctcctccaagcccgcagctgagctccggtcaacagcatagctaactccccgatggagcagctgcaaggcgccattaagggaggtcctggtagtagtaaccggagtccacttcttgcctatggaaggtgtaaacactgaccaagatcactctgttctcttgtttgctgtggtaaatgaggttaaattaggtgtgttataagttataggccatagaggacagctttaaggaccagctttatgcttggatttttatgctgtacattgtagttagtaggaatggtgtgttggagctcggtaatcagttctatgcaagcattattcaattggacagttttctactcttgtagcttcatgtttaaatttaaattaaattcatcaaaattgtggacttgttacgtaaccattgtggttaccgataagtatcttcatttgttcgccaacaattttgtaacgttgtcaaattcaattttggctgtgtatatgggtctgactggatatcggcattagcctatatccaggctgtgtgtttggttgcct

SEQ ID NO: 42444 - DNA, 1991 bp, Zea Mays
aagtagccgatcctgccatggagctcggtgtccgtggctgaccaccagctactagcccgaacagcagaagatggtgtcggtatacccgaggatgtcttgaatgacacaagaagcctctctggtgtcaaaagtacgccccacatacttgtgatcaaagggatctttactttcttgggcagttgccatacttaagcaaaacagaatcactcatatatgaggcgctaacccttgtcattcttgtcttggatatcttctacccactttcctacgaaggtttaaatctattctggaagaactccatgaataaattgaaggttcttcttctcttcatcttagcatgcgacatacttgtgtttatgcttagttctggacctttcagagtagctccgtacattcgtgttgtgtttctaattatgacaatcagctggctagcctatgtaacatttgaggacacaccacaaggaaagaccattttcacatcatacggtacaacattatatcagatgtttgtcctgttcaccacatccaataatcctgacgtatgggtccctgcttacaagagctctcgttggaacgccctgtttattgttatttatgtgctgttaggagtttatttcctaacaaatttaattcttgctgtcatttatgatagctttaaagagcagcttgcaaaacaacttgctcaaatggactctataaggaaaagtattctacagaaggcatttgatctcatcgatactaacggtcagggttaccttaacaaagaacagtgcatatcgttactggatgagctaaacaagtacaggtcgttgcccaaaacctggagggaagattttgaactaatcttttccgagcttgatcggagtggtgatttcaaggttacctccgaggaatttgctgacctatgcaatactattgcaataaaattccagaaagaaccaccaccttcatatctggagaagtacccatctttctaccattcaccacagtgtgaaaggttgaagtcctttgtacggagtcgcctgtttgagtatattgttgtctttgttcttctggtgaacctaattgctgtcgttattgaaacaacgctagatatagagaacagctcttcacagaaagtgtggcaagaagtggaatttgtctttggatggatctatgttgtggagatggcacttaaaatattttcattaggatttggcgcctattggatggagggtcagaataaatttgattttgtgattacttggactatttttattggagagactctgacatttgccttcccatcaacgcttccttttctttctaatggagagtggattcgatatcttctccttggaaggatgttgcgtttaacaagaattttgttgcaaattcggcgtttcagagcatttgttgcaacattctttaccctcatgtctagcttgttgccatacttggggactgtgttttgcatactttgtgtatattgctccataggtttacagttttttggtggcatcgtgtatgcaggaaacttgaagttggaagaaacagatctctttgggaacgattatcttcttttcaacttcaatgactacccaagtggtatggttactctgttcaatttgttagtcatgggcaattggcaagtctggatggagagctatgcacacctgactggaagttcttggagcctggtttattttatcagtttttaccttatttcagtattactgctgcttaatctgattgtggcatttgtgttggaggcgttttttgctgagatggaactggagaaagctggagaagctgatacgcaggattctaccccacaaggaagaaacaagcggcgatccatgcgtgtgaggacgaagggtactatggttgacattcttctgcaccatatgttgagcaatgaacttgatggatctcaaaactcggattgattactcatcttaatgggagttgtatatttctccaacaaaaaggacctacttcgttaggggagg

SEQ ID NO: 42445 - DNA, 264 bp, Zea Mays
agaatattcccataaagcagggttacagactgtaattataggaacgcctttacaaattaggcccgtaacgcacagcggccacgcagggcccgttgcgatgggccggagcatacgtgggcctccgagctagatgaggccgctcggtgggaagacctcgtagcgggccttcgtctgatgcagtatcaagcgaagggtgtccctgaccgttttgtctccgtcggaccggcgactacagcgaaggcctcgagcgaagggtggcgtctt

SEQ ID NO: 42446 - DNA, 361 bp, Zea Mays
taaagcccaatgttttcctgtttaccccatgaaaaggaagaacacgaaaaaattatgttatcaattacaaagctagaccattaaagaaaattgtgaggctaaaataatgtaagtagttattacattgaatatagggaccaaaacttctttgacaaaaggttctaatagccctgttaattcatctattttcttctgggacatttatctcctttttgcacttttttcttgaactatttgtgcacgtaatacagactaagcacattcttagaatctagatgttaaaaaggctatcaaatctaaagaatgttattctttgatactgagtatactatcattgtcagccatataaaaaaagataatc

SEQ ID NO: 42447 - DNA, 227 bp, Zea Mays
ttattgaggatggtcacttgagctagcatatatttcaaacttataaacaatttataacaattcaaacttatttctttgaatcacttttgtaaccactctgatcatgtacattgtaaaacttgatgtaacatgtaaaatttggtaataagatttccgctgtaaaattgttggtgtgtgatttgtgtttacttaatcccgcgattctggttgtaagtggtttatccgag

SEQ ID NO: 42448 - DNA, 1339 bp, Zea Mays
atacgactgggtcgctttgacttacgtaggacactcccgactctagcctcctgcggcttccgcatcctccgcttcgtgtcgtctgccctgctgcccaagcctccggaggttctagcggagccggctcactctcgcgacaccgccgcggcctccggctatatatggacggcgaggaggcgccccttggcgcgctcaacctggctgagtacgcccccgccggcgcccgcaccgtcgactgctacaggcgcatccgcaagatcggcgagggcacctacggtgaggtgtttgaagctgtggatattattactggggaaagagcagcacttaagaaaataaaactggatgatggcaaagaagggtttccacgccaaatcttgcgtgagattaaactattaaaaaagctggatcatgagaacatcatcagattgaaagagattgtagtatctcctggttctgcacatggaacaggcggatcagatgatcacatctataggggagatatctacatggtgtttgaatacatggaccatgatttgaagaaagtattgcaccatagtgccccatcccaagtcaaggtttatatggggcagctgctaaaaggattgcagtactgccatgccaacaatgtacttcatcgggatatcaaaggggctaatcttctaataactggtggtaagttgttaaaactcgcagattttggccttgcaaggctgttcactagagacggaactttaacaaatcatgtcatcactttatggtaccgaccccctgagttgcttcttggtgccacaagttatgctgaacctgtggatatttggtctgtcggttgcatatttgcagaatttttacttaagaaaccattatttcctggcagaactgagcaagagcagttatcaaaaatatttgaactgtgtggatctccaaacgaggaaagctggccaggtgtttccaagctaccattgtataagacaatgactatccgtcctgcgactcctaccaaacgaagcctgagagatattttgcagaactttgactgtcctgcagttgaattaattgaacggatgttgatccttaatccttcacaggatttctgcacaagatgctcttggatgggtctagggatctctaattggtgtaagtactacctgaagactgaaagtcttgtttctcctgctgacattggatttaggactagcaagcagtttaactttctctgttctagctttaaacataatatatatagatgcattgtacattattactcatggggaaaaatgtatttgattattaattaatagcaagtgattcttggtatattttcatatgatagcgtttcata

SEQ ID NO: 42449 - DNA, 2370 bp, Zea Mays
cgcttcgcacgtccccgccgtcgcgctcgcctccctcctctttgttgcctccgcgtcgacctccaccccgctctccgacgcgcttaccgtcgtctcggatttctggtgcactctcttctctacgacgcgagcaagggcggcgcttgccatggcatcgacgggaaccaggcatcactctccctatctctcgggaggggagctgtttgagcggatgcccaccaggaacaatgtttcctagatcacgatgtttgggccacttttggaagaggtcagggatgacatgttttcaagcttggaggacatcaccaacgcaccatatgcagatctgctctctattaattcaatgaggaaaggaaaggggtcatagaaattagtcttggcagatggaggggaacgtctcaatgactgaggcacattttttcttgttagttagctcatggatttttatggtccaagaggagttgctgctatatgaatatgacaacacccattaatcaacataactatatgaatacaatctgaaaggaaggtcggtttggtcagaaacacatggaggtactgatggaggctatgaaacatataagagacatgccagtgaggagcaggagtagtttagtcggttcttgctttatgaagtggatgcaattagaaagacgtacgagcaggccaacatctcgcggtggctcgccctgggcaaccggacctgcccgaccacgatgcaggagctctgggacgacgccctcacccccaacgccactctctgacagctcatcgtcacctggttctcccgcctggttctgcattttgttttcttatctgtcaatcatgtttttccatattactgcaggcgggtctgattaattatttaaatgtagtttatcttagatactgtttgaacgtatgggatgttggaggacagaagacaatcatgtcttactggagaaaattctttgagcagactaatgggttagtttggtttgctgatagttcacacataaggaggcttgatgattgccgtgctgaactccacaatctcttgaaagaagagagactagttggagcttcattgttgatttttgcaaataagcaagacatgcaaggagctctaaaaccaactggaatcgcgaagagtcactctccgacagctcatcgccgcttggttctcccgccggtacacaaggtttaagaagcgctccgcggacttccacggccgcgctgccgatctcgtccacagcctccggggcacggcgatgcccaggagacaggccctcgaggaagagcaatgtagagaagagaaaggtatctcgactgttccaaagcacaagtatgcatccaaagcctgttccccaaaaggatgaggcataaactccagacgatgctcctttaaattatttgccgcagaagaggctaattttgacaagccagttgatccagcaacttctccctgctataccagcgaccattttgagaggacaagctgtgtctacttacggaagtgcgacatacactctatcaatgttgacactaagggatgcatgcagcatggtagcatcattatcatcatcatataactcttgctcacctgtggaggatgaaaataacccatctgaacaaacaagtgctaagaaaatggaagacagagtatcaaaggttgtggaagtcttcgctggaagaatccagaagatggaaaatgactttataagtgattccctcacggttgtgtccttcacaaaggaaggatgtgaagccacactattatcaagcaacaaagccaaagttgtgtgacacaattataacaaaggaatcatcacccattagcacactaaaattggcgcatacagataacgcacctgcaaagtgggatcatttgaacatagttcagcaaagggccgacgcacttgagtcactcctcaagctctacgcaaagcttctggaggagaggctcgatgagctcgccgacgtttttcgaccatttggtgagagagctgtgtcatccggagagatgagcatacaatgatgtctgaccataagcctgatgactccaccgaagttttgagagtccccaacaatgcttttgtagcagcgattcgtttcaacatttttttgtttttcaaataccatttcgagagtgtaaataacttcaacggaattcaaaattgatgtacttaggtaggcctgagccctgtttatttttgatgtatatggtttgcatgtcaccaactgttgtgagcgatgattgattatttatcgtcttgttttatctgtctgtactcctttaatgcagcaccttcgtttgtcatgtgtcgtctcccctgtaagatgttgattaatattcattatatcattgtttattttttagcaatgaaaaag

SEQ ID NO: 42450 - DNA, 813 bp, Zea Mays
tctctgaggaggtactttttgggattataacttggggtttatgataaaatctggcttctactaacaataaatacctgaccaactaaaagcaacggcttgagcctaaccccacataaaagctagtccacttcagccaaacggggcatttgctgagtacgttgatgtgcactcatccttgctttaccacaaaacaccaggttgtccacattgtaaccactgctcaggagaagatgaagccgtggaaggagacttccaggagttccaagactacgacgagttctaagtgtgggttggcggcaaccctcagtcagctgcctgtgaaggccctatctttactgtgtttcgcttagcactttgatttacccgttaagttaacgactatgtggatgtttctgactctgtgatgtaataagttaatactcttttatgttattattcgagcactgtgcgatgatgttcatttatgtaatcgctgtgtacgtgagttctgatcctggcacgtacatagttcgtattcggtttgccttctaaaaccgggtgtgacagaagctatcgactataaagcttcggcacagtgacatgtctcaagacaaaggggtaaaccgacttaaagataaaatgactaaaagacccatgatattctgtgtcattattgtagttcattgtaaagggcataaatgtaattatacacaggctgtgccctgtgcctataaataggtgaacagtacccctgtactgttcgcgcgcccctgtaattacgcattgggcatttgcttttgcttcaccctggtattttttctttccttcaagtcg

SEQ ID NO: 42451 - DNA, 3461 bp, Zea Mays
gtgataaattacactaaatggttgcaggagcatgaatcactgacttgtgaaccattacctttatgggaaaagaaaaactccataagcagccctctggccgtctgattgaatctctcaaaatggagaggatgaggaacatcctgactcatagatatccatatccgcatgaacactcaagacattttatcattgctgtgtttgcttgttggcttttcttcatttcctcggataatttgcaaaaccttataatgaagttggacaagaattttaaatggtggtccatgtatgcttgtttgattggcttcttctatttcttctcatcgccttttatcaggaagaccatcaaaccaaactattcgaacttcaatcgatggtatattgcatggatattcttggcagcactataccatctgcccagttttcagtcaatgggcttggatttgcggatgaatctttccctcttcctcaccatttatatttcttctctaattttcttgatggtcttccatatcatatttcttggcctttggtatttgggttttgtttctcgtatggcagagaaaaaaccagagatgcttactataatacaaaactgtgcagttataagcatagcttgctgtgtgttttacagccactgtggtaacaggactgtttcaagagacaaatctattgatcgtagaactgctagctggattgtattctcactttggacaaagcatgatgacaacacactgatttcaaggctattgcgtatgcataaatttaaagaacagatttgctcctcctggtttgctccagttggttctgctagtgattaccctcttctctctaaatgggccatttatggagaattgtcttcaaatggatcaggttcctccaatgaaatttcaccagtctactctttgtgggctacattcatgggtctttacattgccaattatgtcatagagcgttcaacgggatgggttttaactcatcctttgacaatttcggagtatgagaaattgaagaaacagttgaaaccagattttgaggacatggttccctggtactctgggacatcaactgatttatttaaaactgtctttgacctcatgatatctgtgactctgtttgttggtcgatttgacatgcgtatgatgcagatactggtgatggtggcaactctacatatgctgtagcacgattacttgctcaacccttgttagttataaactctgatgactcgaggctaacatttcctcgtgggcaactgcttctcgttggtggtgaccttgcgtatcccaatccatcctcattttcgtatgaacgacgttttttctgtccttttgagtacgctctccagcctcctgcttggtataagcctgaacatatagcactggagaagcctgaacttccccttggggtttctgagcttaggcggtacagaggaccacagtgtttcatgatacccggaaaccatgattggttcgatggattaaacacattcataaggtatatctgtcataagagttgggtgggtgggtggttcctacctcagaagaagagttattttgcattgaagcttcccaatggatggtgggtttttggtcttgaccaagctcttcatggtgacattgatgtttaccagttcaagttttttgctgagttgtgtcaacagaaggtcggagaaagtgattccgtaattattataactcatgaaccaaactggctccttgattggtattggggtgatagcactggcacaaatgttgcatatttgatacgggagtaccttaggggaagatgcaaactgcggatggctggggacctgcaccattatatgcgacattcttgcattgagtcaaaagaaccagttcatgtacaacacttactcgtaaatggctgtggtggggcctttttgcatccaacacatgtcttcgaaaacttcagggtattttatgggaacaagtatgaaacaaaatctacatatccttcttaccacgattctagcaagattgcacttggtaatattttgaagttccgaaggaaaaattggcaatttgatgtaattggtggttttgtgtactttgtcttggttttctcaatgtttccacagtgtgactcatttcacatcttacatgaagactcctgggctggtcgtatcaatggtttcttcactgcaatgtggaatgctgtttttgagattctagagagatcttatgtgtccctaggtggtgttgttactctattgatggtatcgtttttctttgtacccacgaaactgtcccgtaggagacgtgttttgcttggttttcttcatgccgctgctcatcttacttcggcagtgctactgatgctacttatggaattagctattgaaatctgcattcggaaccatctattagcaacatcaggttaccataccctttatgaatggtaccgaaaagtggaaagcgaacattttcctgatcccacaggacttcgcgctcgtctcgagcattggacctttggactttaccctgcatgtattaagtacctcatgtctgcattcgacatcccagaggttatggcagtaactagaagtacaatctgcaaaaaaggaatagagtcccttcccaggggaggtgccatcatctattatgtctgtgttttcctgtacttctgggtcttgtcaacacctgtcgtatcgctggtgtttgggagctacttatatttatgcataaactggttccatatccatttcgatgaggccttctcctcgctgcgcatagcaaactataaggcattcacacggctccacatcaagaaaaacggagaccttgaggtcttcaccctggctgtggacaaggtgccaaaggattggatgctggatccagactgggacatggaacccaagcagccattccagatgagctacaccaggaaattcccaagcaaatggagggctgcgtcgggccttgacccaatcaatgctgtgcgcattgttgaccggtttgtcatcccgcgaacgccctcaagtcctacaacaccaggaggctctgtttcaagtcctacaacaccaggaggctccgtttcaagtcctacaacaccaggaggctttatgagatgatgttcatgctgctgtgaaatataatgtaatgtacacaaggatatcttcgacttctcgggagaaattgtacagtacacaaggtcctctaacataccacgggagaaatagttgggaaaaaaaatagagggcaaatctccacaagatccaaatgttgtacatctggtgttatatcagttgtcctgatcaggtgtaatgataagtttttcaaacttagggtgtgattggtaggctgaatccggccctgcctggttgcatggatgcagcctgaacatgtttggttggttggctctgtgttgggccaagtactggagatacatttcctggccttgggcctgggaatttgtctccaccattgccactctgctgtccg

SEQ ID NO: 42452 - DNA, 678 bp, Zea Mays
actttacaaaacattcttttcatttctaaaactgaaggttattacataggaagagttacatttattataagtcctgatatactcaaagtgcataacctattacaatagcaggaaggtaggaaccctccaaagcttatacacaagcctaactaatcctccttcagaacaggaaacaccctccagccacaggaacacctagagtactcctcatcacctacaacaacatgggttcgaaaaccctgagtacggagtgtactttcgcaagtcttacccgactaaggaaaaagactctcaaggatatgatggatttagaaatcaaggagaggcttttagcaagaatcaacttagatacttttgcagaaaaagcttactaaagtgagtccttactttcaatattttaatgccagattaaatattaatagactctgtttgcacctagtctaatttcaccatctcatcaatacaacatcattttttactcataatgtttatatcctgacttaggttgcagggcagcgatcaagtctccactctccggggatataacggcgatccgaatcgatttacttagctgaggatctctaaccacacgacatatgtttctcgtaactcttgcatatgtctaccattcccacggatcctccactgcatgaacaggtccgcgccacccgagagcac

SEQ ID NO: 42453 - DNA, 213 bp, Zea Mays
ggttgagagagaccttgtcctatgggacacctaggttctttggaaccgaacaccattaaaacaaatcgttgtgtcctcttgtgttcttacttatgttgcgatttgttcttccctctcctccctctaggttctcttgttttgatgtcatattctaagtcacttgggtttctcttcaagtaaattccacatctataagagcaacaagagcaaaag

SEQ ID NO: 42454 - DNA, 304 bp, Zea Mays
cagtatcctagaagtgctagaaacacaacccttgcttcaaagaagaagagaaaccccaacatggatctaggaattaggttcagcaagagagtgagggcaggcgaggacacaaagggaaaacaactggacaggatgactaaagttatgcaaaggagactgtccatagctgttgaggaaggcaaaaaaaggccacatgaacctgttcaagctgccaagtttgcatcagaggctggcatcattattcgggaaaccatgcctatcctaactcgttggaaagattacaaggacgaccagaaatactaca

SEQ ID NO: 42455 - DNA, 1532 bp, Zea Mays
ggtgcgtgcctacggcgcgtggcatcgtgtgacttgggcaactgacactcctccccgcgacgccgcgccgcctgcccggctgccatccgaatcccatgtcgtcgctgctcctcctccaggccctggctccagccatgaccgtcccccgccaccatttcctcatctcccctctccgcctcgcctctgcagccacagttccgttcgctcgacgcttctccaacgccgcttccagcaacaagccggagccactcctctcggaaccggatctggagtcaggtctgtatcttgtgtcaacgccaattgggaaccttgaagatatcaccttaagggcactgcgtgtcctaaaatgtgctaatgtgatactatctgaagacacaaggcattcaggaaagctacttcagcattacaacatcaagacacctcttcttagcttccataagttcaacgaacgggagagagagcccactatcttaaggaggcttcatgaaggtgaagcagttgcactgataagtgatgctgggacgccaggtattagtgaccctggcatggaactggctagactatgtgcaactgagaaaatccctgtcattcccattcctgggccatctgctgcaattgctgctctttctgcatcgggtttgccatcaaatgaattcacatttgcatgctcggtcaagaagagataggcttgagatatctgctcgtgaagctgctacacaaatattctatgttcctccccatggcattcagcagtttcttgttgatgctgcttcatcttttggcgattccaggcattgtgtggtcgcaagggagataacaaaaatacatgaagagttttggcgtggaactttaggtgaagcaaatgaagcttttgcaactcgacaaccaaagggagaaataacagtgctcatagaggggaagttaatttcagatgacgaaattccatcagaggatttccttgagcatgaactaagagaattgacggcaaagggatatactctttctgcggcggtgaaattggtcactgaagccacatcagcaaagaagaaagatgtttatgcactcgcattgaggttgtttggaaaataagtaaaatggaatttttggtcgcatctgcgatgccctcttcgacgggatcctccgcccctcgacgagtgaatcccgtcgccactcgggatgggaatgggagaagattcagaccgttctgccttgtccctttgaatctctggtgggtgctcgtcaccggcgaataccacgacaacgacgacggcactcgcctcgtcctcaccgcaaggaggacaaattagtaatattaagagattactctaattatatgttacacttttgtgtgagcacataattttttagaaggatgtaacaccttcaagtatctaactttgagatatgttgttaaattttgtatttttattacaacaatagctattaggtttgtttagtgttaccacatatcataaaattaataaaccaattgttatgatttgtatgtaccatacaagggtccaaagagttgg

SEQ ID NO: 42456 - DNA, 457 bp, Zea Mays
tttccgtaaaacccaaagacatggtttacggtgttacagttcaaaagatagctctaatgtctcccctagcaacatcatcgagccaacttgggacatcttgccgactaaagaacaactggaattcgaggagcaccaggaggagttgatcaaggaagcaaaagcaaagtttctaaccaacttcaaagtgtacagaaacaacaaggtcgttcgttaatgggcgactgatttggcttcgctccgacccactgcacctaccccaaggtaagtgaaacaaataaaatcctttctcttagagcttacatgaatgatcagcgagaccaaatgcaacatattataggggtatacaaaatgattataaaaggcaagtgtgtgcgtttgacaaatctaccgtcgcaaattttccctctcacgaggttgaatcgggagaaaatacgactgatttatcggctacaggttg

SEQ ID NO: 42457 - DNA, 345 bp, Zea Mays
gtagagttcaatcagttgagccgatgagcatcacaagcaaaagagggtgtagaaacacgaacaaaaaggactaaagcggacctgtgggtggctggccacgacgcggtgcctcacggcggcacagatgaccgatttggggaaaaatccaaattcgggcgctacagtggatgatttgaggcgagaagcggtgtgttgggcgcgtaacaagtaggcggagcaggggttgcctccagtttatagaccctagctgagcttatcatgaatttcggattgggatcgagttcaccgcggcctggatatttctatggtggcctgttcaccgtggcacgcgagagggaaatggtt

SEQ ID NO: 42458 - DNA, 656 bp, Zea Mays
agcagggagccgtcgacctctccaactcggccggccatggcaccgcttccccaagtgtcacactggagctcgcccaaccctctcccatctccttccccaagcacaagtcccatggtcgagctcacccctgtaggagctccctatgacgcctagattttcaatttcctatgagtttttcccccacgtgcaatcccggcatcgtcgtcgtgtttagtcacgatgattctcaactaccctatttttatttcattgaatttctaatgcgagcagaaatttttttggtgctatgttaatacgatgttatgtgtatatgtgtgtgtttgtgtgagtaagaggaaccgcaggtttttgcgtagagaggaaagtcgtgtggcgcgtgctaggtgtttgatggaatggatgaatcagagatccttgttgctcttgcgaaatccaagtctatttagtgttggtacattgattgatcacgtgatgtggaggacaagagctgggttaatcccaagatgatgctgatgaataaaccggaagagtggattatctgatcaagtaccaggatgagagatgctcaccaagtgattgtcatctaacaacactgacttagtgttattccaggcaagccccggtgcatttgccacctccttccgttttaaaaagtt

SEQ ID NO: 42459 - DNA, 1374 bp, Zea Mays
cgacacattatgaatcgaaataataataaatacgccaagaccgatgatgatacgcaggagctttagagaccattaaaccagcgatgtgccagatgcaactggggaatatccagcgaggtttactaaggacgaggggcaataaatgggtttgatctctgttcactcgatgggagggcttagctgtttcaagagaagagaggagcatggagatgagagggctggttctggttttggtcatggtcatggtcatggctcctctacctagctgcaaggcggctgatcatgattttgggacagtagtcggcgtcgccatcggggtcaccaggtggctgaggaggaaagcgaaggaaaccaccgctacagaatcaccagcagcgaagctatcatcgcagtcgtcgcagggcggccacaggcaggtagcagcagtagcagcgcatgcgcatgcgcatggcagtggcacggaggcgagcggcaggtggtcgggcctgtacaggttcaccagggaggagatcgagagggccgtcgactacgcgagcagcaggatctacctcggctccggcagcgcggggcaggtgtaccagggggtgctccccagcgggcagctcgtcgccgtcaagcacatccacaggacggccatgtccgggtccttcaccagggaggtggagcagctgtgcaaggtcaggcaccccaacctggtgtgcctcttcggctactgcgacgaggagggcgaccagtacctggtgtacgagtactgcgccaatgggaaccttgcccagaacctactcaggagtgactccgtgctcccatgggaaacaagggtgaagatcctgagggactgcgcatccgtcctgaggttcctccacacgcaccctgacggatgcatcgtccacagagacatcaagctcaccaacatcctgctgacagagaagaaggtgccgaagctgtccgacttcgggctggcgaagatgctggagatggaggagaccaaggtgttcacggacgtgagaggcaccatcgggtacatggaccccgagtacatcacccactccaagctcacctgcgccagcgacatttacagcttcggcgtcgtcaccctgcagctcctgtccgggaggaaggtcatagaactcgacatcgttgcgcgtgattcactcaccaagaaggccaaggatgtagtgagtgggaagaagccactggaggagttcatagacccacgtgtgagggacgatgtcgtcatagaagatttcgtgctgatactgaagatcgcagtcctctgcgtcgcgagctcaagcgtaggacgccccaccataaaggacgtgttcgaggagatggacagagccctgagaagtacagccgtaaagagccagagtggaa

SEQ ID NO: 42460 - DNA, 2494 bp, Zea Mays
atgaaggccgcgcgggggagacgctgggaaagccgcacctccgcgcccccatcaatcccgcccaccaccaagcttgccgcctaccaaacccgccagctccgcgcgagatccgccacagttatgccgcgcgagggagatggcgggatagccgctaggcagatccgcttgctcgcgagggagaggaaggaaggccgctccgggctaagcagatgcaagtcggtgcttgtcaagaacaaccggccatgcccggggttgccagggaagcccgtccacggtgtcgcaccattccccgcctcgaattcggggtctccaagcccggacgccatcagcacactccgtcagcgatttggaaaccgcgcagatccagaccatcaacgcctagggtggaggggattcttgcatgccgcgcagatccaggccattccccgcctagctgaattttttcatgaccttcacgaagaggtaatggccactgcttctagaggacatggtttattgatccggttgcagcagttagaggcagaattttcaatggttgaaaaggctattgtatctcagacggggcactcaaattacccacatgatgatgatttgatgttgctgctggtgctggagcctcaaaaagaacctgtgaagctggttgctactgttcaacagttcagaattaaaatagttgttactgtacaactgcattattgcaccccttcttgtcgtagcctctacatgaggtgagcccttcttgtcgtagcctctacatgagggacatgttaaatcattgaatattaagaccgacccgccatatttgctttcggtgagcgacgcgtgcctgtccacggccacgatccgggtctccccgcccaagtagcagagcgacttatcggtcgggcgcgggacgatccggcccccgaagctgcacatcaggcggagctggccccttcgcctcgcccccatccacctccccaattggttctcgttcttcagtgcacgatatcaatccactaaggtgctgggtgcagttaatttcccaaactatatttgggggtgttcagcaaaaactgcgtcaactgcgcccgtgcgggtgagggatcactagaggctggactcgcgctagagatggtcaaggcaaaagcaagggtctgatatgatattgacattcccttagttcctttgcgttactgcgatggtgtgaatggggacgcttcgagtgctcagtattctgaataatttgcaacagtttgataaactgctcagtactctgaattggaattcattgttttcattgcattttcctacattttgctgcccatttaattcaatgtgagtaggagtatcacatttgcatatcttcttcctaccataaagcttaacaagttcggcttgccttcttgcctaaaattgagttacagtatactttcgacagcgcaccttgaatacttgtatgctgtgttctttgtcatctgaactttgtgtgaactgttgtagctatgagcctggaccggcttttgaggaggtcaaagaataagccatgcttgatatatcaccaacagactcgacagaattttggttaattcagtggcctaaagaccagtctgagctagaatatctatccttcatgtacgttaaccccactggttttgctggagtaagaaaaagagttgaagacttgtacaaggcccatgaacaagaattgcaagattacgatactataacaccacatctgcttgatgtagtgttgtgctagcatgctctggtgttccctatatatttcttacacagttttctaactcatttcatatgggatcgtacaattaaccagtctgctacacattttcattagttccaaaatttgatggtggtattttaattcattaggctgatgcctatagggagctttacaattagctgcatgtaacaaggttcttagataactgtaggatccgagataggcagcttggacttcatggaggcgtcgtgggacgagcccgtcgccttgcactttgggattgagtttcacggagggagacaacccctttgccgcatggagaagcttacgaaggcaaggcaacaactcagcggatgtcgttgcacagcaggcagacacctgtgatggagcagtatatagcgttagttctatacatgtattttaatatctatacagagtaatctcagaaataaaaccgagtgtttgacagcgaggccggagcaggcgtccccagcgtccccatacgcgtttctcgcccccaccccgacagaggccgctcacccgtggtgcagatatcgcccttcatcttctctgccttgggcatcgccgtctccatcggcgtcttcgtcctcggcatggcatggtgagtcacagtgtgcctccacaccctgtgtcgccaaatctgcacggcgttggaggctccagtggtgtcctccatggaagagacataggtcaaagggccatacttcatagctatttccccctcgatgtttcaagtgaaaggtgagagca

SEQ ID NO: 42461 - DNA, 3481 bp, Zea Mays
ttgtgttagctgaaaagaggaaaaagagagagagaaaacaccacacgcggatacgagggcaaaggggcaacgcgtccaaccggccggacctcaccggctcatccctcatcgccctagtccccaagggccaagtccccaaccccggctgacgactgtgcccgtctccttccctgattcatccgcaagcccacccgtcggcgatcgtccatgacggaggatcgagcgcacaaggtcgccgacgagcccgccgcctcaggcaggcaaagacctgaaaggaagaagaggaagtgggatcaacccgcggaggacttggtctccgcggcggtgacggctgctgccgtgtcggggatgcctgtgatgaatttcggtgctcttcctggcgttgtactgcctggcgtcaccgcatatggagctgctacattgccaagtgtagtccctgttccgtattcattgccgccccatattgcaccatcggtgctccagaatgctgctgcagcagcccagaaattgagtcaggcaaaaataccagatgaggtcattgcacgggaaattgttataaacgatgcagatccatctgtgcgatataagcttacaaaacgacaaacacaagaagagattcagaaatgcacaaacactgtcatcattaccaggggaaaatatcaccctccaaatttacttcctgatggtgagaagcccctctatctacatatctctgctggatctcagttgaaagatactgctgagcgcattaaggcagttgatcgtgcagcttcaatgattgaggaaatattgaaacaaggaacaacctcagagtccatatcggtccctttctcctctagcactggacaagctgttcgtccttttagtgcctcagtttttttgggttttgatgcagatccatcattgaatatcacagctcgaatccgtggtccaaatgtatgactatgtgatcctggttttatttgatcattttgttactagcacatctcagttaattttgttaattactcaatttatgtgctgttgtctttcaattttttgaaagatctaatcataaagctttctctggcatcccaatttggatgggagaaactgcttttctgctgttggtgcttgtgctcttttgttattatataggatcagtacataaatcatatcatgaaagaaacaggggttactgttgtactaagaggaaaagattcggagaatcttggcagttgtcatagtgaagcctcacaacaacctctacacctatacctcacaagtatgcatttaaagaacctagaagctgcaaaagttttggcagagaacctcctggatacagtagcagcagaattcggtgcttccagaatttcttcttcaaaagtatatggtgctgttccacctcctcagcagttgttagctggtgtcgacacctcaggaacgaaatcagatgttcactatattgtagggcccaatgtgttatcgggagctacacattcctttgcatctactggagttattgctcctgttgttgctcctgcagtgacagtgcaatcaggggctccaacatattctggggttccactacccagtaacatggcctatcctattccaccagcaaacggtggggcattttacagtggttatggggacatttatccccaagcaactccgttgcagcagctggcattcacactcaagcatgcctcatcgtcggcaactcaggctgttccagtgacgtccacaccaacaagcatggctacaaaggggaactcaatcttggatgcggagatggataaacgatcccgaaggaaattccaggaactaccggtttcgaagggcccagcaacagaaagtcaggtattttctctgaccttgtctgaagctcacaggtggcaatagatatacatgtgggtttttcacaggcttgtaacaaatcggagtttgcattggctgtggagtgtaactgacaagatgcagagctcttcaaatatcttgttacttttttcagcaaatagaaatttaacctttgtgttttatctgtttctgtttgcttacagagttcactgatgttgattaacattgctagcatgccttaagttttgaaattggttggttggtatagtcttgttattagttgttgttagtaggttttgatacattttatttctttccactctttagagaaagttttgcatttgcaaaatcttcacattcagtggaagctccaagcaatataaatatacaaattacacaaggtccttccatatgaaacttcacttagttaagcagactcgactcatctttgttatgttattatagactctcccaatatgaaaattatatttacagcgcatctgcttctatattaagataacattctgaacttgtcaagggtcatgctaactagtattgtgcttccatgtgagatatgcttatatttgttctgtgtgcaaaattgtttctgatttcattcttatgcatgccattgcgttacctactctataacacaagaatttgatggatgaatcttcttgttttctttcatctttccagaactcacaacaggggtccaaatttgttaagacaggtttagatagttcaggtaacattgggagctcatcaattgcacctccgaagaaagttcaccctggatcaaatggaatgcttccgcaagaagaagcggatatgccatcacatctctctatatccactaagatgctaccaccacccctgaagagcatgctgccactgccacccagaagcatgcccccaccaccacctaagagcatgcctccaccgccaccaaaatttccttcagatgagtttttgtcaagaaacgagaacaagttttttcctttaaaggagccaacagcacctccaaggtcctttgatgcaatatcagtcttgccatctgaacgacgaccaagggagcctaaggaggaaaaaacaaaaggcacacctgtgtctgatactttgctgaaacttattgattatggagatgacgacgatgacggcgatattgatgtgacagacaacacacctaagggcaatccaactcctggttcagagcagaaaccattttgggctgtttaaaactgggtctgctaacgtagtctagtgtgaattcttgttgataaggatgcttgctgccttggtgcatcttctgaattgaagaggcaatcgagctccttgttcgtgtactgtagtaattctaacaggcaatgagatttctttgaacttgtattcattctggcctagtcaaaatgaaccgtttgttgttttggttcagatacgatgatgtttcgtttttagattcgacgttggttgctgaactcgtagcattttaatgtcggtattatataattgttagagcctatgtcaattttgtatccactgtcgtgcaaatttaatttttgtaatcagcctaaggtcacgacattgcttggaaacactttttttaatgaaggaaaatggcaggacatatggtatggtaatt

SEQ ID NO: 42462 - DNA, 447 bp, Zea Mays
ctactgataatgctaattttgtggcggcttcgaccgtggttgctgaaaatgattcggatgattccatgtctaagttttttgagtctgatgattctgggagttcggttgtgtggacggaggagtcttcggatgaggacttggattattttgcggccttggatgtggctgcggcggaggcttctccgcgtgtgatggatgctgaagttcttcctggtccgagtgctgggcgtaggcggcgaagggaggtggcgaagcgtagagtgagtgaggtggagagtggtcatcttcgtgtggatggggctggcaagcaggaattgttgtcctcgccggtttgggcgagtgtgggtgagggggagttgcgaaatctttttgagggtgaggagctaaggataatgctgtttaactacagggagatgggtatcatcccgaaggttgaaccaatgtatg

SEQ ID NO: 42463 - DNA, 4160 bp, Zea Mays
cccaagtggtgcgtcctgttcacccacgacgacccacgacgcctgcgtcggccctgcccgaactggcgtgcagagcagtgctccacgacgccgccaccacctgccccagcagcggcacgctccgacaacggcgaccatggcggtgcgggcgcggcggctggggagtctgttccctgctagatccagtagatggctgactcatcgaggccctccgtgaacatcatctgcgccggtcgtctgctcggctgcagtggattaggaggcttggtgtggaggcgctcagcagcgggtggaagttcccgtcaaggagtctgtcccgtcaaggagaccgtcgtgccctggacggagtcagagcaagagtcgatcaacattttcctcacgatgattgagcgacacaggcacaattcaccatgatcccatcccccactcaaacctgcaaaatcctgtagccgaacatctcgatggtctcacgtgccattcctttctacaggaataggcctataactgatttcaataagtttatgctgcatttcattcagtgtgtttggatgcatatagagaacacgaagtttaatgtgtttggtgcataatgagaattgaggaaatgggacattctagcatgctatgtgaattgtgaaaggctatagattaatgtgtacaggtgggaattcattatcggtttactaattatatagctgtttttccctattatctctctcaatttactgtgtataatgtactactaatctggaaattgatgtatgatagcattttttatgttggaactgcctacatttatgttggtgccgctcccacgagcgcaccaggacgccggcttggaggtacttgcacacaagggtcgagctcggacgtcgtagcggtgcggagggcctcggccgtagcatgccccgccccgccgcgcatgcctgcgcggtcggtgtcccgcagcacccacaccgagtggcctgtcttcaaagtcgtcctcatcctctcctcctggctcaacgagaccatcaacgtctggatgttcatagacctgctcgggttcatgctgttcttcgacctcaccctggtgcacctcggccagtacttcaccaaggtgtctggtatgattgggcacctctcctgccattgctcccttcgtccccagctccggcgaccgagctccaaccagggacgtctagcgctagcgcccaggacgcacgaccccctgctcctctatcctcagcgccgagcccctccgtcctgtttctggcagcgaaagcccagcccctgcggcaagctacctactcgatggaatgcccagccgcttgtcggatctacgcagcccctgcgcgacgtcacaaactccggtgaaacctcgctgcccttgctgctctcgagccccttatgtttgataaaatgttaaaactactgaatgattgttctactgcatgatccctagaacggttatacgcgcctcacacaagcatgcgctgaatttctcgctttcccaaccctatcgttttttgggtgtgtatggttttcccaggtgaggtccagatccaaatccaaatccaatgttcgttgtttgcatgagtaaggcatataggggcactgaatcgaagtgtcaagatgtaatctcgccttttggaatatcaatgtgctgttgatttctttggattatgaaatttgcagtgaattgtgagcagtattcagtttgatgagagaacttgtgacattttggctggcgtgcaggcagtcaggcgggataacaagcagaggtttagtctgttggaggaagatggcgagctgttgatccgggcgaaccagggacacacactaaaaaaatatagtctggaggtgacctcaatgtaattcaattagtgatggaacatttgggagtctactcattatgtatttcttctatctggaaaaacactcaagggatctttgtttagaggatggagacctaaatctgaccgaccttcattggtggataaatatgcagaaaaaggtatttctgttttttgagaaacaaatgtttgaaaataaattaagattcacaatagtaatatatccgcactttttgtgttatgtgaggtggagtcaagtggaaagatgatcttaaatatacatgttgtcatcttgtatggtgattatgtagtaaaattgatggcaagaaaactactggttactatgactaacacaaaataaaacgttctttttaaaaaaaacttgggtataccgtatactgttattttgatactatggcacttctgtcatgttatatgttttctaaagaatgcttccctgaagcagaacagtcatgttcattatatttcagttatgcatcagtatttgcacttgctaggttgatccttgatttctatggaattcaagtgttggacggatatgtacttatggactagctcagttttggagattagttgttttagttgtttttgtgtcatgtcttctataaagcaaataagttaccatggatcaattttgtgtcagaaggtgactatatcatctctgacaattggaatttcagttgtgagaagctttggtgatagatttttgatatatttctggtttgccactttgtttgcttgtttttttgcatgttttgaacttgttttattattgttaggtgaagcttcaattgatgatatattcttgtcagtatgctctttttgtgcaccttgtttttaatctctggcagaggagaccttcacctaaaaaacaaagatatatgttgaaatggttctttttaaaagattgcaacgtgatccgggtgtcagagattcagaaggtcttggacatcgccgacgagcgtagcctcattgacaccatcttcttctgctacctcgggtgcaatgcaaggttcctccaagagaatccagagtatgttgcacagggtgtaactttagctcagttttcgttccagatacctatacctctgcggcaggactatgtcaaaaagaaaccgaagttgataaatgcaagtgatgaagcaagtacaattacctctaagtcttctgaaccagacgaagtgaaccctatagcctgggcagttcctacaaaacatgagggcgatgccagtgaagaagcttctctcgccgatgagacacttgcatcagaagtagtgctaacccggaagaggaaaataggaagctctttgtcagtagagccaaaccatctctctgatgaacttgaaccaaagttggaggatgcttagaacggggagacgtctaactgaaaagtaaaagtgggcagcgtcgtgatgccaacttacccccctgccatggttttattggtcctctgcttgtttctcgttttccttgggagttagcttctctgttttatgtggtcgcacacggccttatttgtagtattacaccacaaaagctggctgacccccactgagggagggtgattgatgcaagcattgtgtatgatccttggacaagggaatcacggatgtttggttttgtcaccatggctgctactaaggaggcagatcactgcatcaaatatctggactgttctgtgttgcaaggtcaggtcataattgtttagaagtactctacacagaacattttattgttttgtcttcaccaccgagaatccaagagcgcctcccatagcctccacatccacaaggtcctgcttgactgcgacgacgtccaggctgatgccctcatcgtggatcgactcgcctcgctctagaaggagtggcccctctggagttgaatatgcagttataaccaatttttaccccttttatcctagaagagttgccaagacacggtataagaccatgataatagactaagagaggatttgtctctaattattatatgttttatttatgcagtcccatgagaactttgagtatttgcagattgatttattaatatattaaagttaaagattgtatgtgttgagtatgtatccattcttgttggaagtgtcttgcaattccaatccaaggatgtataaaagactgcatgggctaagtatgtgttttttcatgtatttggagtatatatactttttgttgcttgagaacatgtatgtacatacatagaagcttgtcaattgtgtgaacttgagttgatccctgtctaacctgagtatatatatatattttgttgcttgagaacgagtatgta

SEQ ID NO: 42464 - DNA, 2210 bp, Zea Mays
atgagggggtgggggaagggggtggtgtggcggcctccagtggcggtggctaggaagggccaacgactagggtccaaacctacaagttcataccactggtttatcaaattgcttcgagacttgggagcaccaaagatgctcaggggtcatttaactttcagattgcgttagcttctcttttgaagaaaatggctgttgatcacccatatcatacaatattccagcttttggctctagcaaatggtgatcgtgtcaaagacaagcaaagaagtagaagttcttttgttgtagatatggagaagaagcttgctgctgaaaatttgttaaaggagctatcttcctgtcatggacctctgatttgtcagatgaaacaaatggttgagatctacattaagttagcagaactggagaccaagaaggaggacactaacaaaaaaattccgctgcccagggaggcccgcagcattggtcagcttgaactagttccagttgtgactgctaccgttcctattgatcctagctgtcgttatgaggaaggctcctttccacatttcactgggttggctgactccattatgatcatgaatggaattaatgctcccaaagttatagaatgttttggctcggatggtaacaaataccgtcaacttgcaaaatctggaaatgatgacctgcgacaggatgctgtgatggagcaattttttagtttggtaaatacattcttgcaaaatcaccgagatacttctaaaaggagattgaaaatccgtacatataaggttgttcctttcaccccaagtgctggtgttgttgaatgggtaaacggtactgttccactaggcgattatctaattgggagtactagaagtggtggagcacatggacgatatggaattggggactggacatatcttcaatgcagagagtacctgatgagtgtaggatatatagtcggtcttggggatcgccattccatgaatattctcatcgaccaagacacagctgaggttgtacacattgatcttggtgttgcatttgaacagggtctcatgcttaaaacacctgaacgggttccatttcggttgacaagggatattatagatggcatgggtgttactggtgttgaaggtgtgttcagaagatgttgtgagaaaactctctgtgtcatgagggcgaataaagaagcattgctcactattattgaagtcttcgttcatgatcctctatataaatgggcactctcaccactgaaagccttacagcgtcaaaaggaaacagttgatactgattcatgtttggatgactcccaagaaccttacgatggcaacaaggatgcagctcgagctatacttcgtgttaaacagaagttggatggatatgaagatggcgagatgagaagtgtgcagggccaggtccaacaactcatacaggacgcggtggatgttgatcggttgtgccaaatgtttccaggttggggaccttggttgtaagctccattgaaagggatgtaaattttgatcgaaggcaagagcaacttttttcactgcttatgaggttttattctttggtgtgtttttttccctcaccaccctgtcaacattcctacaaagtacagcaaacggcttttggtaccctgtaaattgatgggaaggcaaggacgacatttgagtgcaggtgggttgtaccactcctgttttagagcatgtccagactagaggatgggtgattgcatagtgaggccacagttttctttttttgttgagcttcattaataccccctctgtctaaaagtcctcatcgtttaagcgtcccgcaccaagaccaaggatgcccctccgcattgcagccgctgtgaagttaattatctggcgccgttttgtattttcaaaacacgcatatgtaatgtcgcaaaaattcagctgcttcgatggttggccggccataggggcggtatccatacatcacaccatcgtgcagcgtacattcagctgcttcgacggttgcataccgtagtttttgttcaggatttactttgtaaagaagtgaggctgttttgtcatgtatgtaaagggcttgtttcgatgtagcatgaaatacgaagaattatgatgcatttgaatataccgtgctcccctgagcaaaaaacaaatcaacagaagctaccacctggccgccacgctcagagtcgtcttggctgaaggatttcttgggtg

SEQ ID NO: 42465 - DNA, 1793 bp, Zea Mays
atcggcgcagcccctttctccgccccccaccgcgcaccgcccgaccagcgacgggaacccacgccgccccctctccgccccgtgcagtcgctccccagctcccgcgccgccgttccctgctaaccccatccccttcgcctcgcctcgtgctaagagagcgcggaccactgcggtgccacgccgacgccttctgccggccccaggtggattctgtccgcagactcctggaggtgctgctatctagccccttgatctgagctgaaattaggagctgaacctgccgggcgagccgatgtacggctcgccggtgtccaaggacctcaacctcccggtgcagccgcccatggcctcgtccgggctgctgagcagcagcagcagatgatgttccactcccagcagcagcaggagatggtgagcgccaagtccggcctttaccgcaccgtgaactcaggcgtagaaaccgcggccgctgctggtgccggcggggccagctccagtgacaacgctagcaacctgattcgacagagcagctcccccgccggattcctcgatcatttgaacatggagaacggatacggggccatgctgagggcgggcatggccacggcggactccctcgcaggcggcggcagcaggctaaaagggcaactgagcttctcgtcacggcaggggtcattgatgtcccagatctcagagatggacagcgaggaggtcggagggagcagcccagaggcttccggcggcggcggcagggggtacatccctgggtacccaatgggctctgggtgggaggactcgtcggctctcttgtcagacaatttgtctggcgtcaaacgcccccgggactcgtcggagcctggccagagcggccttacgcaccagttcagcgtgcccaagacgtcgtccgagatggcaactattgagaaattcctccagttccaggacgccgtgccttgtaagatccgtgccaagcgggggtgcgccactcatccacgcagcatcgctgagagggtgaggagaacaaagatcagtgagcgaatccgaaagctgcaagaactcgttccaaatatggacaagcaaaccaacacatctgacatgctggatttggctgtcgactacatcaaggatctccagaagcaggttaaggtactaaaggagagccaagataactgcacctgctcagcaagcaagaaccagcagcactcctgctgaaaccgtaatgctcactgtacatgaatgacctcgaaagcatgtccactcgggaaagaaaaagattgtagcttttgtatgagcgaagggggatgaagcaatggcatcatcaagcattcaagtgattgggagaagggtaaaaaaagtggggagagatatatatacaggagaaacaactgtatagtttggctgtagctttgctatatatacacacacgcactaccctttcggtagaaagtggttaatttacctctgtttactagtagcaccagctgtaaatgtgccgcagataaacagtggagaagcttggaggtgttcagtgcgagcgatagtgtttcaactctatgaacatatcatcgttgggttaatgggcatcatctactggggtctggggatagccctgcttcctctcggacctcaggcctgaagcttgtatgttgttcagctatctgacattctgactatatcgatgcttaacatagctctagtgcgacaccaagagaacattcaggctctggacatggcatttatattgttccatcgccttggtcttaggctatggccagcggattgtgatatgacca

SEQ ID NO: 42466 - DNA, 1090 bp, Zea Mays
cgctacattctcacaaatggctgcgggtcgcacccggcgctcggcatccctccccgccgcaaagtcgcgccgccgtcgcctcgcacgcacgaacgccatcacttcgtcgcttacccatcagacagacaaacaaggccgaaactccacgacgtcccccgctcggcagcagcaacagccgagaccctagcgcagcatggcttggacaactgcggccacagtgtgctggcgcctgctccacctcccctccgcccgctgccctctctcgtcccgggcccggtgttccgctgcgcagagcccagacgccgtggacaaggagtacgccgacctcaacctccggcctctgtaccccaacaggggccatcacatgcgcatacggcagcacgtgaacccgctcagctcatccttctcggagcccacggggccgccagagtggaaggaggtgttcgacgaccccttgcttcccctcatggtcgacatcggctgcgttggtggagcgggcacagttctgggtgaatgaattggagcttatgaacgtctattttatgtttgcaaatgcaacagtgtcttttgagaaaatcatatcgtcataccctggtcccttgtcacttgtttcaatactgtgtcctgatccacacttcaaaaagaggcatcacaaaagaagagttctgcagcaaccattggtcgattcaatcataaataatctctgtttaggcggacaggttttcatacaatctgatgtactggaagtatctgtagacatgagggaaaggatggcttctggacaacccaatgggaatccggacagagcgagaaatccatgcagagcttgaaggagcaacgatatacaggagggtgtaccaaaagttgggaaaaaaaacaaagcatccaagtacaaagcctggcgaaccaaaacaaagagaagcccaagcaattagccaatgcttttgatgaagatgacaactggcataagtgttcctttgttggtcagattgtacttatggtgtttagcatcgggtgctgtcttcgttctgtccagaattcaggtctggaattgctcaccatctatcggtatgacatgtgcaatgactaa

SEQ ID NO: 42467 - DNA, 461 bp, Zea Mays
tccaacctggccatatgcaactaccttaaccactcgatagttgcataacccctctgtttaaccgacagagattctgacttacctacaccatataatccctcctatcgcaaaagattctaacatatcctaataatatatattctaccctggtagatatatctaacttaaactagtctaatctagttatatccaatctaatctagaacctgcctaatctaatatgatccaatctaacgtgagttacttaaacaagtttgttaataatggtaacagggattagaccatatttctataaatgggtttgaacttaaacgagtaccttagaccaactcgtccatgaaatcacaaactagcctatgttatagtttgcccaacccatttatcccaaaagtaaagtaaaactctgttcaacctacctactccatgtacccgcaattgttatcacaacttggataatggca

SEQ ID NO: 42468 - DNA, 1750 bp, Zea Mays
accacctctctcaaacatcaacacacactcgatcacttaacacaagcagcttcattcacactgattaccaccaaacatggcagcgtccttccccaccaccaccgcgctctccgtcatcctgctgctctccctgttcgtcgccgtggtccgctccgacacggcggccacgccggtgacgccgtccacggcgtgcaacgggacgacggaccccaacttctgccggagcgtgctcccgtcgaacggcaccagcagcctctacacctacgggcgcttctccgtcgccaagtccctcgccaacgccaacaagttcctcggcctcgtgaaccggtacctcgcccgcggcggcctctcccccggcgccgtcgccgcgctgcaggactgccagctcctctcggggctcaacatcgacttcctgtccgccgcgggcgccacgctcaacacgtcggccaacagcacgctcctggacccgcagtccgaggacttgcagacgctgatgtcggcgatcctgaccaaccagcagacgtgcgccgacggccttcaggcggccgcctccgcgtggtccgtgcgcaacggcctcgccgtgcccatggtcaacagcaccaagctgtacagcgtctcgctgtcgctcttcaccagggcgtgggtgcgctcgtccaaggccaacaagccgccccgccacggcggccacgggagggtcctgttcgacgccattgacgacgagatggtccgcaggatggcgctcgagggcgtcgcggccgcggtgtccgtggtcggcgaggtgacggtggaccagagcggcgcggggaactacacgaccatcggcgcggccgtggcggcggcgcccagcaaccttggcgggagcagcggctacttcgtcgtacgcgtgcccgcgggcgtgtaccaggagaatgtggtggtgcccaagaacaagaagtacgtcatgatggtcggagacggcatcggccagtcggtggtcaccggtaaccgcagcgtcgtcgacggctggacgaccttcaactccgcgacgatcgctgttctcgggaccgggtttgttgcggtgaacatgacgttccggaacacggccgggccggcgaagcaccaggcggtggcgctgcgctccggcgcggacctctcgacgttctaccagtgcagcttcgaggcgtaccaggacacgctgtacgcgcactccctccggcagttctaccgcggctgcgacatctacggcaccgtggactacgtgttcggcaacgccgccgtggtgttccaggactgcaacctctactcgcggctgcccatgcaggggcagagcaacacggtgacggcgcaggggcgcaccgacccgaaccagaacacgggcaccacgatgcagggctgcaccgtcgccgccgcgcccgacctcgccgccaacacggcgttccccgtcaccacctacctcgggccggccctggaagctctactcgcgcacggtgatcatgcagtcggaggtggacacgctggtcgaccccgccggctggatgccgtgggacggcgacttcgcgctcagcacgctcttctacgccgagtacaacaactccggcgccggcgcggacacgagcaggagggtggcctggccgggcttccacgtgctcaacagcaccgcggatgccgccaactttaccgtcggcaacatggtgctcggggacttctggctgccccaaaccggcgtgcctttcaccagcggactcatcaactgatgatagatgatggatga

SEQ ID NO: 42469 - DNA, 918 bp, Zea Mays
cggccatggaggccgcaagcccgcaagcaatcaggagccggggagatgtggagacgccggcgacgaggcgaagaagaaggaggcggcgcttgcatcaagcaggctcctcgacccggcgttcaagccctccaaactatcccaggaccggctcgacaagtttaaggaattacacaagaaacggttacagataactgaaaagccgaagtataaaagaaaactgaaagttctccaagagatgtacatcatacgtcatcaattacaggaatccaaggggatcctgcatcaggcctgtcctcgaggaacaaaagaaagctacattgggggcttgatattaaaggacgatggggaaggaaggcaaacatgtaaaaatctgaagacccaaccgcaaaagcatatccacagttccacaccccacttgattcagatttgaaaggagaaggacagaggaaagtggcaggccttttccacggatcatcaggttgcttgtaaggttcatgtttgtgacagcaaccagaaacactggagcgtggacagcagtctcagaactaagcagtaagctatagtatccaaacttacaagtgcgatgatagtttgtttatcggtttcgcttgctgtgtggtgtagtttgtctgtttttgtttgttttttttttggtgaaaaaaacactgatggtgcaagtgcaacagaggcccacgtggctcgtcaaccttttgcaaggcctggcaggcccgcgttgatttagcccttttcccttgtaccttatgtttatgatctgggggttgagcctattatgatcaagatgttgttgaggtatatattaagattattctctcacacaaatagcctgaggtgccgtttgaatctgttcattttttgaggaatttgaatttacataataaagtacgctatttgacttgg

SEQ ID NO: 42470 - DNA, 1848 bp, Zea Mays
tgttcaagcgaggtgccatggagtggaggcaagagaacagagatgtcagatgtcaaacggcaacccctccagctcctatccccaaactcgattgcagctcgtgcaccacacacggacacgaatcctcctccgggtcctccctctggaaaaccaggactacctcggatcagatgcagtgcctaccctgcggaccgtccaccaacgcgcccgctgcgcatgccgcggccaggagcgtcagccgtcggagggttgtcgtcgaagggcgtcacctcggcaacccacgacagcgaggaagcgcctccaaggtcaatgagggcaacaggtgaccgtggtgcaatgtcaagcaaaaccttatggctcgtgtcaaagaggaagcttattgctttgtcagccttttgtcttagcttacattcttcaagcatttgctttgggtgatacgtctgtcaaaatcgaggatgtgactcctaagatttttccatctgggccattatttccaactgagaaacggattgcagagctatttgaaataaatacttactcagttgtgaacatttttgatgcaacactacggccgcagcttaatgttactggtgttgtggagatccctgaaggaaatggttctggtgtagtgtgggacgattttggacatattattacaaattatcatgttgttggcagtgctctttcaaaaaatccgaagcctggtgatgttgttgcacgcgtcaacattcttgctgctgaagggatacagaaaaattttgaaggcaaattggttggtgcagatcgtgctaaagatcttgctgttcttaaggttgatgctcctactgatcttttgaagccaattaatgtgggacaatcctcggccctaagagttggctggggtgacaattggaggcggaattcaaacagatgcagctattaaccctggtaacagtggtggtcctttgcttgactcaaaggggcatatgattggtattaatgcagcaattttcacacagacagggacatccgctggtgttggcttcgctatcccatcatcaaccgtacttaaaatcgctcctcagttaatccagtttggaaaagttcgccgtgctggcttgaacgtggacttcgctccagatccaattgcgtatcagcttaacgttcgcaacggagctcttatactcaaggtacctgggggcagcgccgcagccaaagcagggcttgctccgaccagcaggggttttgccggtaacatcgttctcggtgacatcgttgtcgctgtggatggcaagcctgttaaaggcaaatctgacctgctgagggttctagatgactacggtgtcggagaccaggtgagcttgacgatccggcgaggctccgagaccctggaggcgacgctgcctttagaagaggcagacatgtgagcagtttgtggaaaatagaacccacgtataccgagctgtccacgactgtcgtcccattggaaacaattccatttcactaggaaatattgaagtgtccttttcgctctggacattcccttccatgcacgtgtatgagcatgatcatgagcttcacttctcgtgcttgtagttgccttaagatcagacagcctgatgttggagaacaagctgacctgttagttggattctgttgtcatctcattcccgtcagttcatctgcggtgttggctcaagttctatttttctcggctgacaaagatcgtgcgattgctgtgcacgcggtaaaagccaattaggtagtgtttggttgaggagccaagtagaatggagccgtttcatcactgattctaggaacggagccgctctgttctgtgtttggtaatctggaacggagcgattccgt

SEQ ID NO: 42471 - DNA, 540 bp, Zea Mays
ggaaaactggcatgaacagaaactgttgaatctgccattctgcagaaaactaaattcgagatcaaaacctaagcccacatcaaatccaacctctaatcctttaattcccatgatccacaacctccaaaagcatataattacagggaggaacaaggatctcatccatacctagggtttccccaagaaattctgcaagaagagatggggaagaacatctccttgatcctctcttccccttcaattcaacatgctcctcctcttctcgatccttgctgcgtggggggggatctagagggaggagggagccatggagagggtagggggaggctgccaacagggaggagagcaagagagagagggggcggctgcaacccaattggggagaaggtgagggggcggctagggttggggaggagagggggggctcccatccaccggatcaagatcaatggcccaaactcgctctcccctttgagctcccaatccccagtggaaaaaaatgccaaaagatctactgttttctgaggaatgcctcctgaa

SEQ ID NO: 42472 - DNA, 732 bp, Zea Mays
attctcgtcgctaatgatgctgtaataaccaaaatcaaaagaagggtgcaacgtagaagatgaagagaacacatcaagcaaacgtcaggatcaaaacaagactgcatatatatggacccagccaacgcaaactctcggcttcctgagaaacactctgcgcatcatcagttgcattgcgatgaattcagctacagagcttactttcagcttcaacttttgttcgaatttgggaggtgcaaagttgaattgtagggaagagaggacaagataaaagcaggaaacagaagataccaatgcaaggcttttacagaaatttcggacgaagatgcccagattcgctgtgaagcttacttcttccttgcatccaaagggaaaaggcgcgccggtcggccggtgccttctcttcgccagtgtaggcgcctgcctgccgctccatgaccactcgttctagtgttcatttccgcgcacagagaccaacgcagcattgctttcctcaaagatgcatggccagagttccacatctgcagcatctctcttttgatgaaggtgtcttgaggaataatttcacctttagcttttaactatggactctttttaaactaaagatgatgtttggagtgtttgggctcgagctggaatggaactgcacgctagtttcactgtgtactggtctctctcacccactgctcgatcgcctggctacctgtgtggcactacttcctagctagctaa

SEQ ID NO: 42473 - DNA, 1758 bp, Zea Mays
cgcgattccccaccccgcgcccgcagcccccccccccgtcctcccggccgcagccgagcacagccgccgcgcccacaaatcacgcgactcccgcttccatgtcctcgcgtcctccattgcagccgcatacatagcgtcgccccttccatcgatggcagccagccgcgcccgcaaatcacgcgactcccccttccatggcgtcgcccccttccatccatggcaggtccgcgcccctacgccccaaatcacgcggatggaaggggtcgcgagggagtctctctctggacgcgcccgtcgccgcctccaagctcaggagggagcggcgcccggcccccgcgagcgtgaacccggggccacaatgcttgaggcggaggaggggcctggcggttcgctgccagacggggtccaccgcagcgcccttcctcaggacggaggagccccccgcggctgcggcgggggcaaggaatgcccaggcggggttcaccttcgtcatgaagttcggcggctcgtcgctcgcgtcagccgagcggatgcgggaggtggccggcctcatccttagcttcctcgacgagatgcctgtcgccgtcctctccgccatggggaagaccaccaataacctcctcctaggaccttccatttctagctctcagcgcctgagtcagggccgaagagaaggcggtgagctgcggcggaggaggggcatctgaaatccctgagctcgctgtcatcagggagctacatcttaggacaattgatgagctcggtttagataagtcgattgtttcagggacccttctccccaacacgcaggggtagcgtaggaggtgttgtggcggcattatctaggaagcggtctgtggacatgaggcagatcaacccgaaggtgcctaaggaggaggctgtcaccatctccggtcgactcgtccagatcctctccgaccatgggcccctcaccatcggcaacacctagaacaacacgaaggtacccaatcaaccagtcagtcaggcagagtggcaaaagctggggagcgatgcaggcgtcagagcagcaacaacggaggactctgccagtgtagatgagaaggaaacacgcaaagagcatcaaaagcaagttcaacgatcttatgtcaacccatccacctctgaatgaggcatattcagatgtgtgtgtattcagagctcaatatgttacatcgaccttcccaacccgccggcagagcttaagaagctcaagcacaagaagtgcctcgtccagtccccccaactccttcatggatgtcaagtgccaacgatgcttcagcatgtccaattcgcttgtggcataggaatctcatcctagattcaatagaggggctgcaatgccggcatcgccatagctggaaatcgagcactgacggacaccgggcgccgagatgggccgtcttgtccaccgccgcaagaaccgcatgcgttggagccatccttacacctgctcctacttccgcgccagcaacccaacacgccgacgacacgagctcctccttataaaagtgacatctttattgtatagataacgaatggttatagttatttattcttgtgtccaagtggtattggatttttttagcttggggttaaagaaaagacagtcatgtactttgcatcttttttgtatttatgttttatgctaaattgtggaataacactatattagttgttagcaaagaatttctgagatattaaggttgatgataatatatgttgttatttcatttaatc

SEQ ID NO: 42474 - DNA, 4979 bp, Zea Mays
ctccgttggtagggtatagtaatcaccttgagttatgtaagtgtccaggtatgttgtgccagttttaagtcatttccgacttaaaccgcttgttgattgagagtttgtatgaagtagaacacaaaaaatttattgataatgaaagctcttacttacaaagtatagtttgcccaccagattttgaggtacttctacgtatagaattttctaaggtgttcaatattccacgaatttcctacttcgggtccgtccatttaggtaagtcggtaggatcctggccggataacctctgcaatgatgaatggtccttcccatggagatgacaatttgtgtcgcccttctcctgtcagcactcggcgaaggactagatctcctactgcaaaggatcgatgctgcactgctttgtcgtggtagcgccttagtgtttgctggtatctagacgattgaatgacaacaatcatatgttccccttctaatatatcaacatcctccagcctggacgcttcagctttagctatgcttttgattgttagcctgggtgccccaaagatcaaatctgctggtaatactgtgtaatacccactttgtaaaaaaatctaaaagaagaaattatctgcctttatggatatgtgtgtcatctttatctatcatttcatgtggacacctcacttacatagataaataattaacaaaagaacacccaaataaatcatgcatcatgctgggatttttcttttgtgtgcatattgtggcaaaataaaatactaatgtgacaaggaatatattaaaagtccaaagtggaatttaaaagaaattctggaatttagagaagaaagaaaatgcatatacaaaataaatattttaaaggtaataatagtatgtgcaaaattatactcttaatccgaggaagctttaccccagagtaaatttgaatttagattttgaatttcaaactcaaagggaaaacaaaacaaaatataaaagaaaaacaaaaaaagaataaaaaaagaaaggggaaaccacgctcaggcccaaaacctagcttccggcgcaccccgattactctctgcgcagcccagcacactcgcctgcagacaactgcgcatgggcccttggcgtcagcctcgcactcgcactcagggtggccgtaaccctctcaatgacgggtggggcctgcttggcggccggttgctcgtgcccacactaagacgcggatgactcgctgcgctctgggcccacttgtcatctctattccatgagatcggggcaacgacgctcgccgagattcgcgggtcaccagcgtaacaaccctttccgggtcttctggcctcagctgggcgttcccggttctgcatgcttacataaggaggcgtgggcgcccgggtcgtgcccctttaacatccgttgttccgcgaaaactccaccaccgtgaatccatgggagccatctgtggcagaacctcccaagttattgggcccacatgcacctgcccttgtctcaaagacctcagacggctatgcatgtgcaccagataacttaacaggatctatccgagtgccccaaggacctcggataaaccacttacaaccaggaccgcaagattaagtaaacacaaatcacacaccaacaatttgcagcggaaatcttattaccaaattttataagttacatcaagtttacattgtacatgattgaagtgattacaaaagtgattcagagaaataactttgaactgttataaattatttatagttttgaaatatatgctagctcaagtgaccatcctcaataagtatagaagagttacttagacttataagaaggtcgtgcccaccggcgcttaacaccatccacagctgcacaatctagtacatgcaacaacatgggttcgaaaaccatgtgtacgaagtgtactttcgcaagtcttacctgtctaaggaaaaagactctcaaggatatgctggcttttgggaatcaagggaaggtttaacaagattcaaagactctattttgcagaaatgcttactaacagtggatccttaaaaatccagttttattgtcaggttaagtgaagttacctgcatctagcgttctttcttcctagttcaatcacttggcctaaactagccatctttttgtcaacccttcagttcactggattgctatgtgtaagtcagtgaccaagtcttcatgtccgagaagtaacagcaatccaaatcgattaatacccagctggggatctccaatcacacgacatatgtagcacttaacccttggatatgtcaactcgccaccgggtttcttaagaccagaccgggttcacgccaaccgagagcaaagatacaccaccgtccagtctcttgccacggagggtacacgctactctcgccatctctccactcccattgcgtgttggcctttctggtattagtctgcccaaggcaaagcttacccatgatgaagcatgtgccagttaaagggtcctcggtcagcaggctcacatcgacacggtccttaatcgagtcagacggagacactacaccgaaacttccttctcgtgcaagtcaaccacccagtcttagctttattattttcaacccaaaatttggtacctggcagaggtacatcttttccgatgttgaacccatcaaggcctttgacggattcaccatcattagtattttcttttgtaaaaattctcatccactaaagcatcactttggttttaaaacaaaacatttttgttcttctagagcaaggctaagcatcataaaaaaattttcataaaagggtatcaaggaagggtaatcaattttccaatgaaagaaatgcatcaacggtttagcacacaacccctatcacctaatgcatcaaataaggtgataaagattttaaaacagcaagtaggtggcaaatgcaccggggcttgcctggaataaacactatgttagtgtttgttagacgtcgatcacttgacaaccatctttttcttcgcacttgttcagattatccatcttcagactcatccatcagctatggggagtagtccacccgttacgtcattttggggtcgactcggctcttgtcctccacatctcgtgattaataagcgtacctaattgaaatgcatgttgtacatgaatgcatatagacaggaatagtacaagactaaatagtgctacatgatatcgaattacactagtaacgaggcgttgtaccgtttcatacggaaacactagttatcgatgtatgactaagcgcaatagccgtgcctttctagcttaaccaaatctaattcaaacatcaagcagcaataaatatgaatacacgctatgttatccttagctaaagcataacatcgagggcctaacaatattcagactcctattattgggcacccagagttatagtatgtgcaggaacaatttaactaatcttttaaatcatgtttctagattaatttgaaatacatactaattaaataaatgctaaacttattcttcacattattaattataccactatgcacactaagacatttcatcttatgacaaatataactacccaatttaactaactgaaataataaattggctcaccacgatcgaatcgatttgataaccgcgagtgcgacgacggttctcagtttagacatccgatcgagctcctggcaatcgctacacagacttccctcacattttcattccactctaggatcactctccggaagacaaagtcgacgataagccccatggagtgaacgacgacattgctgcacccaccacatggagacgaacgacagcaatgccacaacggcttcacggacatgttgaagacgcagggcacgacaacaatgtcgatcgggattcatgagatcggtgacgaagcttagctggagcattttatcgaataggcggtatgcgaggcacgacgtcaacgaccggagcggtggatgcattgcaactggggctatacagacgcggcgaggctgcgcaggcctggtgtgctactcgacagtcaccaaggcactgcgcgaaggaggaaatacatccggcgcgcgtgctagatggcgtccatggcgaggatgaagcagggagctcaccacagggccagcagcgagcacaactagaggatggggagttgccgacagtcggaaggggcttcggcagggcgcgcacacgagggagcactgcggcgcgaaggagctgctcggctgctagcaaggacccaagcacaggggcgcgcaccagagaaaaacagaggcgatcagcgtccacggcgaggtccgagcgtccagagtttttgtcgaggccgaacacagagggatccacaaatcctcggcacgacggtggccatagccaagcagaagggcgcggctgcgcacagaggagctcggctacttctttccctgtttgtcatgccagactcaagctgctctgtgggggcgcgagctagggagatgggtaaccgagctggtacaaggagaaccggcgagcagagagcgcgccatgggagggagataggcgcgagcaggaagctcgacggcggcgcgtgcgcagggagacgcgcgtagagaggagcagaggccgagcaaggagccggtgtccagtgagcaagtgcgatgaagagcggccaagcacccagggtgagctcacggcggggtcggactcggcggccttcgcgagctaggcgaccgcggcgcgcagagagcagagcacgcggcgcggcagtggaaggcagggcagggcgacggccatggaaacgggcagagggagggagaagcaagggcgagcagggcgcggctgtgagggagatggagggagaggagggagctggagaccgagctagagagcgagcagggaggggcgagtgccatgggaagccaggggctcggatgcctgcggctgcagaaaggatgaagacggcggccaggggataaagccgatgccagaagaaaaatctgtataccacgtgtgaag

SEQ ID NO: 42475 - DNA, 1941 bp, Zea Mays
ctgacctgctccttttgcttcgctggccgaggaaaggattgtagttttttctttctttctgaagcatctatgcttcttcccaatgggtttcatttcattctctatccagtgtgagagatgttctgagtaatctatatgattaggcaggatatatcccttcttcatggtctcgggatcaaatttgttcttgttcctggaacacatgtccagattgataagctcttggctgagagagggaagaaggctaagtatgctggtcgctaccgcattactgattcagattcattagatgctgcaatggaggcagctggccgaatacggctaactatagaagcgaagctgtctcctggaccaccaatgttaaatctccgtaggcatggtgttaatggccgttggcatgaaatctctgataatgttgcaagtggaaatttccttggtgctaagaggcgaggggttgttggtggcattgattatggattcaccggtgaagttaaaaaaatagatgtttcacggataagagaaaggcttgatagagacagcatagttgttgtgagcaacatggggtactccagcgcaggagaggtcttgaattgcaatacctatgaagttgctacagcatgtgctttatccatagaggcggacaagcttatttgcattgttgatggccaaatatttgatgagcatggtagagtcaatcgttttatgtctattgaagaagcagatatgttgatcagaacacgtgctaagcagagtgaaattgctgcaaattatgtgaaggttgttgatgaggaggacatcaatcatgtccgctgcctcccaatgaaacatggtacagaacatggtatgaatggaagggaccatattaatgggtatactgcatcttttcggaatggtgtgggtttcaatgatggaaatggtctgtctggtgagcaagggtttgctattggcggggaggagcgcttgagcaggtcaaatggttacctatcagagttagcagcggcagcatacgtatgccatggtggtgtccaaagagtgcatatcatagatggtactgttggtggagcattgttgctagaactattcactagagatggtgttggaacgatgatagctagggatatgtatgaaggaacaagaatggccagagaggaagatctttctggtattagaaagatcattcgtcctctagaagaatctggtgtcctggtgcgccgaacagatcaagagcttcttgaagcattgacatcatttattgtcgtggaaagagatggctcaatcatagcgtgtgctgccctcttcccttttcttgaggataaatctggggaagttgctgctattgctgtatctgaagaatgtcgaggccaaggtcaaggagacaaattacttgattacgttgagaagaaggctttgtcccttggacttgagaaactattcttgcttaccacaaggacagcggattggtttgttcgtcgcggctttaaggagtgctcgttcgattccctgcctttggtgaggagaaaacgtatcgacctctcgcgcgggtcaaaatattacatgaagtggctccaggcagcagaggttgggcatatggctgccgacggttttgccatgagatgatgagtgctgcaaacaagcatctctacgaatctagtcgatggacgtgaggtttctttatgagctgtgcagtcgcttatacatcgtagaaatgtatatttattgtgcaagaaaataatcagtcaataatcgaagatgtggttgtgtttcttgagttgatttcttcttgagcatagcaatgctcaaaagagttgttgatctgcacactgctgacaaagcctgcacgactgcgctttttaaactgataaatacttagctgcaaattcagcaatgttcttgttgagctccctccatcgcctcctctagaaaaaatgcgtatgttacgca

SEQ ID NO: 42476 - DNA, 825 bp, Zea Mays
ggttcgattaccatttggattatcttgtgggcctagagacttggtcggcagtttcgtctccctttcttactcggttgggacttggtcgcctatttcgcctcgctgacttgctctgtggtaacttggtcggccgctttgctcgggcagaagttttataatcttcacttcgagtgcatgttcataggacttctcattggagagtacagcagattacccaaagctaacggctggtataggggtggataagtctaagaactctaaacaaccgcagcggtatcactatgacccacagttgacacgagatttcggggtaaaggcaagagagaaaaggtaggttccgtctgccaaagttcacagatcaaagcactaatgccgtgaacagcactccccgcgtccggagaacggcaattctcggaggttcagacaggattggaacggagaagggtgaggaggaggccaaaatccagcatccccacccccctcagatcacacctggacgcccaaaccaaatggaaattcagcggtgtacctggcggaatctcgcagcagcggtggagactagtcgaactcctccaatggactcatctgctattgtgagctgaccaacggattgcagggaagtagtcgactactacgatacagcagttgagtgggaacccgaggagggggatctcgccataccagagtatttggataactctcaggtcagcgagagagagatttcaggagagagagagagagaaagagaaagagatactggctgcgggatttgcttggagggcagattatataaagatgaaaggtacagagaagccatgctattgg

SEQ ID NO: 42477 - DNA, 705 bp, Zea Mays
tgacaatacctttttagaggataaatataggaagtttttgaatccttcaaaagtgactctaagtttatggcgctcttacatgaccattcatacactgctcatgctatgggctatactgcaacactaaacgctatggattgatatcgggatcctattcaaaccttgatgtcgaccacatgaaactcaaggagggtgcagggccacaccacacatatggactgctttcagtttgtgtgtcaaatctattttccacaaataaattatataaacaaaaggatagcatcacaaagaaggatgggacagtgatgaggctttcaggtggtgggcatagctgctttcgggatagtgatgaggcaagattaagattcaaacggaagttctgggagaaggctgtggagatagatgatctatgtggaaaggatggtgcatggtggggtattaaaggttacatgcaagacaatttcaaccatagcaataaggtcacctcgcacaaagagcatttttagaacagtaggctcgtgaaatctgtgttggatatgtattgggagcttcgtcctattaccggttcatccttaacacaccaaacaaggtatgacccaacacgtgcagttgaccaaatcattgaagatggtcactacaccttgtttcgaagcctagcgagattggatgcctcagtgttcaattgttacacgcagatggtatttg

SEQ ID NO: 42478 - DNA, 586 bp, Zea Mays
aaaagaagacgaatctacttccaaagcccaagctgaagcccagaagtgcgaaattgaagatcttcagaaacagctggttgaagcgaagttaaaatgtgctattgccgaagctgaccgagacgccagtgactactggaaaaattactgggaaaaaacagttgtggagcttcgttcttcaaaagaaagatgttatgaaaaatctgtagcatgtgtacaaaagataaaaaccagcttcgccaatattggcgcatattcgaatgaagacaacttcgtattgggcgatctcgaaggtccaatcgactggatcaacggcgaggctgaagcctttgaggaagttttgagtggccgtggagatgtctgcgtcttctcaggtgccaggggaattgcggctattttggagaaggcaggatgcgaaaatgtgaagattttggcccaagccgaagctgctttctctattgatgacacgaaggatccctcggccgaggcaagcttagttggcggaaagttttttaccgatatctgggaaaatggtggccgagggatggctcacgaaattataaagaaaagtgaaaaagatactcacgat

SEQ ID NO: 42479 - DNA, 841 bp, Zea Mays
tcagtgtccgcgcattttacaacacggccacaccaacgccacgacatggacgccgccgccgccgcctcactgttgccccgcgccgccgcctcctcactgttgccccgacgcgttctctctcctctccatgtttcccgaagcggcctccttccccgtcaaagctccttcctcgctgctcgctgtgcccactcccgtgcccctcctccacatccgcctctgccgcgcgccgactgcgatgatgctgccgccaaggcgcacccgcgcctccgtctccgcctgcttgcggaggagttccgcgcactcccatctgacgcagatcgcgcgcgccggctcctctcactcgcggccgcgctgccgcggctcccggagcccgaccgcgcccagggcaaccgcgtcatgggctgcgtcgcgcgggtgtggctcgtcgctcgctgcaacgcgtcaacgggctggcggatgtggttctcggcggactccgactctgacctctcgcgtgggtactgcgcctgcctcgtcgccgcgctggacggggccaaacctgaggacgtcctcgccgtcgaccccgccgatcccgacctcgcgccgctcggggcggggacaacggcggcctggtcgcgggccagcacgtggcataatgtgcttgtcggcatgcagaagcgggcgcgcacggccatcgcggcgcgcgagggtaggcaccccgggaagccgtttccgtcgctcgtcatcgcgcgcgacggcgccgtcagcgcgcagggcagctatgccgaggcccagactctggtcagcctgcgtatagggaatgaaccagctagtgtcaacatcagccttattttcccacttt

SEQ ID NO: 42480 - DNA, 4532 bp, Zea Mays
cttttcatgccccttgcacaaggagcaaaataccttacctgagtcgctccgatcacaagcgtcgggcgaccaccttcctcctccgcggaatcctgctgtatctggtgcctagcgctggtcgtcgagaggacgggcggggaggcgtccgccggcgagggactgagcggtggagacctcggtgggcaggcgcctacgagcccccggctgacacggtcgaagctgctgcggacggccgggctccaagcgcaccctcggtgtccgcgtcgccctccgttctcttctttgactcctgagtttcagtggacgttggcggcgtttgagacccggcggcggcgtatccgccggccactgcacatcccccgcggcgcgccactcctatggtgtttctgatcaaatggagcaagcctgcaatggcgcactgccggctcctccaccgctacgtctcgtccgccgccgccagagccgcagcgccgatccctgcccggcacgtgccccggtcgcccggcacgtccgcgcaaagcgcccgcatacgggagctcggccgcctcggccgcttgcacgaggccagggaggtgttcgactcgatgcccttccgcgacatcatcgcctggaactccatgatcttcgcctactgcaacaacgggatgcccgacgccgggaggtcgctcgctgacgcgatctccggcgggaacctgcgcacgggcaccatcctgctgtcgggctacgcgcgcgccgggcgcgtgcgcgacgctcggagggtgttcgatggaatgggcgtgcggaacaccgtggcgtggaatgccatggttacctgctacgtccagaacggggacatcaccctcgcgcgcaagctgttcgatgcaatgccgagcagggacgtctcgtcatggaacacgatgctcaccgggtactgccatagccaactgatggaggaggcaaggaatctgtttgaacgaatgccagaacgcaacggggtttcttggacagtgatgatttctgggtatgttctaattgagcagcatggcagggcttgggacatgtttcgcacaatgctatgtgaaggaatgacaccagagcaaccaaaccttgtttctgtgctttcagctgtacgccatcttggtaaacctggcattctagagagtatccacgttcttgtgcataagactggctttgagagggatgttgttgtcggcactgctatacttaatggctacactaaggatgtgaatatgcttgacagtgcagtaaagttctttgaaggtatggcagctaggaatgagtacacatggtcaaccataatcgctgcactatctcaggctggacgaatagatgatgcttttgctgtttaccaaagagatcctctaaagtctgttcctagtaggacttcaatgctcacaggccttgctcgatatggaaggatcgatgatgcaaagattctatttgaccagattcatgaacctaatgttgtatcctggaatgccatgattactgggtacatgcagaatgaaatggttgatgaagcagaagatctttttaacaggatgccctttagaaacacaatatcttgggctgggatgattgcagggtatgcgcgtaatgggaggagtgaacaagctttggtttcactccaagctctccataggaaaggaatgttacctagcctgtctagtttgactagtagcttctttgcttgttcaaacatcgaagctcttgagacaggaaagcaagttcattcacttgcagtaaaggctggctgtcagtttaatagctatgtttgtaatgcactgattactctgtacggtaagtacagaagcatagggtctgtgagacaaatctttgatcggatgacagttaaagatacagtgtcttataactcttttatgtccgcgcttgtacagaataatctgtttgatgaagcaagagatgtattcaacaatatgccgagtccagatgttgtatcttggactacgataatatctgcatgcgcacaagctgaccaggggaatgaggcagtagagattttcagaagtatgctgcatgagcgtgagctacccaatccacctatattaacgatacttcttggtctcagtggaaatcttggtgctccccaacttggacagcaaattcacacaatcgctattaaacttggaatggattcaggacttgtagtggctaatgctcttgtctcgatgtatttcaagtgtagttctgcagattcccttaaggtttttgattcaatggaggaacgggacatttttacatggaataccatcattaccggctatgctcaacatggccttggaagagaagctatcagaatgtatcaactaatggtatctgcaggagtgttgcctaatgaggtcacttttgtgggccttttacatgcatgtagccattctggtttggtagatgaagggcaccagttcttcaagtctatgagcagtgattatggattaactcctctgctagagcactatgcttgcatggtcgacctacttgggcgagctggtgatgtgcaaggagctgaacattttatttatgatatgcctattgagccagattcagtgatctggagtgcgcttctcggggcatgcaagattcacaagaatgtagaaattggtaggagagcagctgagaaacttttctctatcgagccatcaaatgctgggaattatgtcatgttgtcaaatatatactcctcccaagggatgtgggacgaagttgcaaaggtacggaaacttatgaaagaacgaggtgtgaacaaggatcctggttgtagctggatgcagataaagaacaaaatgcactcatttgtcactggagatgaggaacatgagcaaattcaaaacatatatgctaccctttgggagttatacactttgctaaaggccacagggtatgtacctgacacggactttgttctccatgacatagatgaagagcagaaagagagctcgcttctgtaccatagcgagaagcttgctgttgcttatggccttcttgttacacccaagggcatgcccatacagataatgaagaaccttagaatatgtggtgactgtcacactttcatcaagtttgtatcctctgtcaccaagagagaaattgatgttagggatgggaatcgattccatcatttcaggaatggaagctgttcatgcggtgatttttggtgataaactatcagagcatgagcaggtcttcttcatgctatcccctcaaacacagaatcccactgaaagagagatggagttgaatgagaaatctgaaaagaatacgcaagaggtagatgagaagttccaaaacacaaacttgtatctcaagaacttagagatggagcttcgggagttacaagtgcttcataaggaatcgaatagatctgaaagttttactgtgccaacacatgcacacactggtggtgcctgcatctagcttttcagatcaaagcctgacaggtatcatagggcaaagtgaagaagaaacagaagagttgagcaagatcacactagagaataaggatattcagcttgatatcgatataagagtgtctgatggagccgaccctatggagctgcatgtttatgattttaaaggacctggtgtggccttatcgatgtacaatagcgatgagtttattaggcctttcgctgaatcctccatggatatggctctttcaaaaaagttgtctctttatctcagcaccaagaatacaatcctcaagaagtatgacgacaggtcacaattggaccatggtgctccattttgcttactgtgatatgtgcagcgaagcgatggcgatggtgtttttgatgttcaggacagaatcaatggccgcaccttatgtgattgtgatagcatagttgtttgcgaggtaattacaaagctgcaggctgccgcctggaggcagtgggaggccctgggcgaccgaagggtgcatgatattctagtttcagatcaatgctgagtgcagggagaggcaatgtcttacctcttggatgttcatctctatattagtccatccataggtatgcagctttggaccgtcgatgttaaatcttgtctcaccagcgactacttctgatggtgtggctacctgagcagcttgtaccgattctgccttagcttgccgatcaacgctgtccaccaggacagagctgaaaacttgaaatggcaagaccagaaccctgaagttgaagtgttggcaagaaactcagataggtggatgaacgttgtgagccacctagctaagagcttgaagacgacagatggtaggtgttagaaatggaaggccatgcggctcccatgttatggaaaaaaaacccaatcatgaattttggaaagctcaagaacctttgttgaaggagataaggcggatccgttcaaggtcaacaatcgtgatgagaaattacagaaaagaggaagaatattgtcgatgaaaaaaagtgctcaaagtaggtgatgtaagtaaaggtgacagactctaaattttacactataagatttaaagacccatttatagttatttttaaaca

SEQ ID NO: 42481 - DNA, 340 bp, Zea Mays
cggaagcaaagcgttacccttccttttagcgcttcagcgcgctgacgtgtgcgcttagttccgccttttggaaccctaaaccctgggctttaagaagacactactgctgcaaccatgagcaccatgaagttttgtcgcgagtgcaacaacatcttgtaccccaaggaggacagggacaggcgcaccctgttctttgcatgtcgcaactgcgagcatcagtgcaccactacaataatggcatttgggcacagcagtgatggggttcgaatgagcactagattgtttatggggatggggttgttccccacccccttccaaattataggattttagtagggtc

SEQ ID NO: 42482 - DNA, 3741 bp, Zea Mays
cgcgtgcgctgtctccccccaggccccccacctctctggctctctctctctctgcgagtctgcgacgacggggctaccgccgcctccgtacgccaggtgccgaggtcttcgttggtcctttcgccggcgacatccaccagaaattatatcatcaattcattaccgggtgtacatttgtacacagtacacccatgtccttcactggatccgcccctgtagtgaggataatatctttggagtttcggagggggcgcgctagaaggatggtttccaaaatgagatttcggaatgctctcggttctagaccatttcagtgttgttcgcgtgagaatcatacatatgtccggaagctgttggaccgagtgtcggagagatcaaagctccttaaaaaggtgtctgttttggtgggttacagtaatccacaagatttagttgagaaacaaagagcccctggggaatcttctgcagagttgattagtgccttgaaagaaatcgatttcccagaaattactgcaaagtttccatgcataaaagttggtgatgcatcacctgttgaactgtatgaggattctactaacatgaagtttaaagaagctgcactttctgaaaagctcacaaatttcatccaaggctcagctcgaaatttggagtcagcttatgaattccataatgactgtcatccattgaatcaaacacccacaactgcaggtgatctttcaatcagtgaagagatccctctcattgaaccaatagttgatacgaagtcccccgagtcattgtcagatgctataacctctgacaatagtatactggataaaagtataaggtgcttgcctggaacaactagtaggcaatatcgccagctagaggatggtggtttccatacggtccgcaaattattgcagcattttcctcggacttatgcagatctgcaaaaccctcaaggccccatagaatatgggcagtatattatgttatctggggaatcaaggttaagtccactttaggtcttcttgaggtggttgttggttgttccataatcgagtctgaattgagctcttcagttgagagtagtcactctggagcagagcaaaagagaattcacttgcacctcaacagatttttcagtggcgcacgtttttcttcccaacattttcttaacttaatgtcagcaaagcacaaagaaggggatcttgtttatgttagtggtaagataaaaaaggtgcttgctaatggccattatgagttgaaggagtacacaattgacgctattgaaggagaaggggaacacagcactatgcttgctaggaaaccacaccctatatacccgtcgaaagcgggattaaaacctagtctgcttggcctttcaatctctagggccttgaagatattgagcccagatgttgatccagtgcctcccgatgttctcgttgaattcaacttgcctaatctctttgatgcttacatgggaattcacaaacctaaggatcgatctgaagctgattttgctcgaagaaggcttatatttgatgatttcttttacctccagttaggaagactatttcaaatgcttgaagcagttggtacgcgggttgagaaggaggaattgttatacaagtgcaaaagtcatgagctgaatactgttggtgtagatgattggtctcctcttacaaagaaattgttgagggctcttccttattggcttactcctagtcagttggatgctgttcaagagattatatgggatctcaggagaccagttcccatgaacagactcttgcagggggatgttggttgtggaaagaccattgttgctttcctggcatgtatggaggttgttaattcaggatttcaggctgctttcatggttccaacagaggtgcttgctgtccagcattatgaacacctaacttcattgctagagaagtttgatggagatgagaaaccaaatattgccttgctaactggttcaacgtccacaagggagtcaaggataattcgagatggtctgaaaactggagagataggcatggtcattggaacacactgcttaatagctgataaaactgaattttcagctttacgtatctctgttatagatgaacagcagcgctttggagttgtacagagaggcaggtttaacagtaagctatatacttcttcctcaaagttgagtggtgaaaatacaagttcagacgaggcttctgattctgaaacatttatggctccacacgttcttgcgatgtcagctacccctattccaagaacattggcacttgctttatatggtgatatgtctcttactcagatcacggacctgcctcctggaaggcaacctattaaaacccttgctcttgaaggaaatgatgtagggtttgaagctgtcttccagatgatgagggatgaactgatagacgggggcaaggtctaccttgtgtatcctatcatagatgagtctgagcacttgccacaactccgtgctgcaacagctggatttgattccataaagcaaaaattcgaaggctatccctgtgggctattacacggccgcatgaggagcgatgagaaggaagaaactctcaacagttttagaagcggagaaacacgcattctcctgtcgacacaggtgatcgagatcggggtcgatgttcctgatgcttccatgatggttgtcatgaacgctgagcgatttggaatctctcagctgcatcagctgcgagggagagtaggtcgcggtgagaggaaatccagatgcatattcctggcttcaacttcgagcacgctgccaaggctgaaggtgctcgagaagtcctccgatgggttttacctggctaatgcagacctgctgctccgtggccctggcaatctactaggtaaaaagcaatctggtcatcttccagaatttccaatagctagattggaggtcgatggtggtattttacaagaggcccatcttgccgctctgaaagtgctggtcgcaagcaacgacctagcgttgtatccacggctgaaggtggagctcagcatgaggcagccattgtgcattcttggagattgacatgtcaacagtactgctcgtaggctcgtagcattgggcgacgcgtgtactgtggataactattggtcgtaggctcgtagcgtcggcaaagttgacatgccgtctggtgagcgaggcgtgtaccatgaataactgttagactgattgtgtgagtgtgtgtgggctggtaccattgttaggctgccggttcattagggttagagttgagtctatatattgtaaccccttctctatgcaatacaatgatccacttcactattctacatgttattagactaggttagggttttctgaaacccacagtagccaccggtcgcctcccaccccacagcagccgccaccacctgagccgtcgtcgccctccaggaggctcctccctctcggggcggcacttgcccctggcgcggctgtgcatgggcgcggcccctcgtagctcggcgcgggagtggcagcccctggcctcgacggcgcgaggcgcgaccccctggcagtgtggacgcgacggtccgtccatggcggcgcggccacgccggccccggcgcgggaaacggctcggcggcgcacgacacggagcctcatcacgaggcaatggtggccacggcgccgccctggcggctggctcctccggcgaggtacagcctcggcgcgacctaggcgcgagcgtaggctcgtgggcctcctct

SEQ ID NO: 42483 - DNA, 392 bp, Zea Mays
ccagggagccggtgagctgtagagcgagcagtaggcgcagtagacaacagcgacgttggggagtcgagcgtcggcacagcgatacagaagctggagacgtcggtgttcagcagcaccacacgacgacgcatcagagcaaggacaaatgagtcaggtgacggcttctgagcgcgacgaggaggatgctgttcggcgagtgcagcttggacgaataacagacagaatggtccgcgcagagatgtttgacggcgggatgcaccagagacagcgacgtgaggaagcaggaagcaagctacattggcctagaagctgatggatggcagaagaacaccagctcaggcgagctgcaaggagagcgcgcgcacagccagggggagcgtgacctaggcgag

SEQ ID NO: 42484 - DNA, 5055 bp, Zea Mays
tgaagattgtgcctatatcgattgttctagttttgaggcaaataacatcccacggtctatccgttacctatccatttccatgcaagatcattgtgctcagaatttcgaggaacaaatgggaaaactgaaagaaaagatatacattaacaatttgcggagtttgatgatatttggaaaatacattatgttacatctgctcaatattttaagggacacatttaaggaaataagacgtcttcgtgttctatctatattcatatactcccatagttccttgccaaacaacttttcagagcttcttcatctccgctacttaaaacttttgtcaccttattactcagaaatgtcattgccaaacacggtctcaaggttttatcacctgaaatttctagatcttgaacaatggggaagtgatcgttctttgcctaaggacattagccgccttgaaaatctatgccattttgttgtttcggaaaagattgattccaatgttcctgaggtggggaaaatgatcttcttacaagaattgaaagaattccatgttaataaagagagtgttggatttgagctacaagaattgggtaaactagatgagcttggagggaagctcaatatatacgggcttgaaaatgtgagaaccaagaaagaagctaaagaggccaagctgatgtcaaagaggaatttagttgagttgggattaatttggaacatgaaacaagagtccaccgaagatgatatcctagatagtatccaaccacactctaatgttaggagtctttttattgtaaatcatggtggtaccctcggtcctagttggttgtgcagcagcgacaccatatacatgaaaaacttggagactctacatctagagagcgtatcgtgggctaaccttccacctattgggcagttctatcacttaagagagctaaggctgagtaaaattgttggcatatcacagattggacctggcttcttcgatagcacgacagaaaaaagtgtctcacacttgaaggcagttgagtttaatgatatgccagagcttgtcgagtgggttgggggagctaactggaatctgttctcaggaattgaaagaatcaagtgtactaattgtcctaggctgacagggttgctgttgtgccttccacccttgcctcacacttcaaaggtatcccgtattcatatgggagacttttcttatgaaggtcgtaccatgttgaaaattaataacccctctagatttgccttcgaaaatctgggtgacctagagacattggtagcttgggatgcactacccttgtcctttatggatcttaaaaagctacattccttgagacgtataaatgtcactagatgtgaggaaacatttttgagaggactggatgatggtgttgtgctacccacagtccaatctctctaccttggacgatttacacctaccaaaaattatttgtcaaaattattcaaatgttttccagcactttcttctttgcatgtgatggcatcaccatcagatgaggacaacgaggaagtggtactgcattttccaccctctagctcgctgagagatgtcaacttcacagggtgtaagaatctgatcctacccatggaggaaggagctggattctgtggcctctcgtcgctcgagtcagtgaccatacacaaatgtgacaggttattctctcgatggtccatcggaggacgagcaactcagactcagagcatcatcaaccctctcccaccctacctgaggaaactcttcctttcttatatggaaactctgcctcaggaagctctgctcatgaatttgacatctcttgagaaactcacactatgtaattgtcttggctgtgagcaaagcaccgagcgaatggctgtactcgcgaatctaacatctcttaccacgctatatttatataattgcagaaatatcacaatggatggattcaatcctcacatcacatccagcctcaagtatctatgcgtgtacaatgagagaaatgatggaactgatccgtattctgtagcagcagatctacttgtagcggtggtgaggaccaaaacaatgcccgacgtttccttcaaactggtgggactttatgtggacaacatctcgggagtgcttgttgctcccatctgcaagctgctctccgctaccctcgagacgttaaacttcagtaatgattggcggacagagaacttcacgaaagagcaggacgaggcgcttcagctcctcacgtctctccaattccttgagttttataactgcagggctctgcagtccctcccccaaggactgcaccgccttccttctctccacggaataactatctatgggcctcaaaacattagatcactgcctaaggagggcctccccgattcactacgaatactacgtataactaactgttgtgctgagatttatgaggcatgccagcaattgaagggaacaaggccagatataaatgtacttgcctccaaagctcgtgtgcaaaattgaatacctgcttctgcatgtcttcacagtcagctctgcttcaacatgcctttcactctacaggtaaatactgtgaaaacatcttcctatacgtgagatagttgatcttcatcgattctacagccaggatgatgtcttattggatgatgtgttggtcatggttggcacaaaattcagtagcgttcaaggcaataaacgagaacaagcatgggatgtggaaaattttagaaagtaaagacaagtgaattcttgacgacgttggcttggcaccttagtttgagtacataatgaaagaacaaccttttagcaaccctggagcatctagaaaatatcagtcatgtaactatcgttaatcatttgaaaaccactggaagacaggagatgtagcaccacaagccattcctttgatcatttgaaaaccattgcggctctttctgattatatcaaccagttgagtggatgaaagaccaaaaaatgctttggaagaagggctcacaattgtggataataaggcatccagtattatagaggaaacaaaggaaattcaaattagacggaaacctgctagtccaagttcttatatgccaaattcatcagtagatacacatacactctacaccctaatcttctttgttatgacatttattgtttttttcatgaactacgtacatcttaattttcaattcatctagaatactgaataggtgatgattcatcaccaaattgataagtgaatattaatacatctgaaacctaaaattaaatatatattatataagttgttgttaatgttcattccatttttgaacacttgcatgaattttagttctctgtttcttttgaaaaattctgtgttgcaaaaatataaatttatatgaaaatatattatatggtgatgagaagtttgagtttagtatatggtttcatattagctatacattgttggtactatcggcttgttctctttttgtttgaaaaaaatactatcggcttgttcttaaggacacataaaggactagttcggaagcaagagaattagaggagagatggctaaaatccccttcctaattaaataggaagggaatttgagcaccctcaatcccctctaattcccttgctttcaaactagcccaaagagtgtcactgcatcctctgaattatgatatattgaacatggtgttataattgtgaaccgatgagtataacttattttctccatattctgaacaacccattacttaaacagatttgcatcctactggagacattgctggcagaggaattgagactggcataggagaactcaatatatgcttgtgaataacgcatccagtgaaagatagtagattttcatcaattcactacccaggatgttgtcgcattggatgagaatgacatggaagacggcgaactagaggaagacaacaacctcatctaagctgaaaatgtgttgcctgtggttgaagaaaatctagcagatgaacaacactgccttccctgtcctctctagacctgaatctctctgatggtttggattcgtccatgattgatcctgtacgatgaaggatcagctcgtccaacgtttttcaaggaacgaactcaatctgaggaattaccttttcattggtcacctggggtactacgaggaatgacttcacgatagacgactcggttttgcgacgcaaaccaaacgccatggttaggctcagatgttggatcagatgattcctcgtggcttcgtgacgcaaaccaaacgacatggctaggctcagatgttggatcgtatgatttctcgtggcttcgtgacgcaaaccaaacagcctgtaagtccgcacaccttatctatcatggtcattgttgagctgatcagtaattggagtcgtgtgataagcttaatggacctcctatttgtcgtgatcttcacagatcaacaagtgagcggcctttgcatgctgcatgagatcaagcaagccgccgactggcaatgctccacctgccattcagttcgttggtgaggtattaatcaccagccatgttggcacttggcggcatgcagatggagcagaacatccaggtgaagcggacagatacatgatcgatcatgagttggcgcagacacaggccagacaaccagaggctatattccaattcatacattccatgataagcaaaggaagatccaagacaacacaaatatacaaatagttagttatacaagcaaaaatcctgttgttttgtgcctcccattttctagtccagaattaatatgacaatttttcactgaaactggttggatcagagaccaggaaaaaaagggaaatgacaactacagctgtgttttttttttcaaagaaggcagctgcccgtcgatgatgtgctcacttgaggatttcctctgccttttcagtgacactgcttcatccttttcagagtcaaatgaatctctacctcatttcactgcacatacttccaaactgatttgctgtaacatacttgagtttcggtatgacattaatttttaactcataagagaacaaaatcagaagaaaaaaaaacaacaa

SEQ ID NO: 42485 - DNA, 754 bp, Zea Mays
aatagatcagccaacaatcagtggatttataccatgtagggtcgagcctcacctgcgcttagcctgaggaggggagtggctccgggactgggagggcgacgacgagaaggagcaggagcgcggccgggagcgggacgagatggagccgaaggagatggagtgggacggcgagcaagatgaagatcctgagaaggaacgatgtagggtttacagagtcttactctgacaacagagttctatcattgccgaagctcttgttgatggcatcacaaccccatgcataataacggaagcaattgcaggcgaggaacccaacaaggtcgtgacgccgagctacctgatgcgctgccacctacatggtcgtatctcggcaccaacgccgagctccttgagaaattactttccagttgcatgtgcttcgttggtgacggttgcagcatagaaatcagcagcatagaaatcaacaatggacgagacagggccatgtgcttgcgtcatagcaatcgatgaacagacgacaagagaagccaattgaactaaaaaaacaggtttagaggattatagttcaaatctactaattttatatttgtctcaccttttcttttatttctttctctccactggacccggctttgcataatcgattatgttcatgtggctagaaccctggatgtgatggaggtatagatatacgcgcccatgatgtgttacactagtgaccatgctcttgctccgaaatatatatatataaaat

SEQ ID NO: 42486 - DNA, 136 bp, Zea Mays
tatggactatttatgtactatggactatgtatatggtattggttgtgaatgtgttttgtgaattgtgtattttgcttgtgaatctgtatatgtgatattgtgaattgtgtattttgctgtcaattaaaaggtgcag

SEQ ID NO: 42487 - DNA, 659 bp, Zea Mays
cagcaccctccctgtcgccagacggcccactggctgtggctggctcacttcactcggcgctcggcggccgcacccaagtcccaaccgcactgcgccgcctcgatcaaagcaaacccccaggcccccaacccgcccagcgccctgcccccccgccgcagtgagtgagatgatcatcggaggggcagcgggcgccgggaacccgaggaggaggaggacgcaatgaaggcgcagccgctgctaccggcggcgctcaagaggcggaggggcccgcgcgtggcggtgcttgcgctcgtcctctgctccctgctcgtgcccttggccttcctcttcgaccgcgccccctccggatgcgccggagaagatccccagaagtagtgcaggaacgattcatcaacgaacaccagagaagaacatctccaaaggcagtgctgcagtcattcatcaacaaacaccggagaagaacatctccaaaggcagtgctggagtcattcatcaacaaacaccagagaagaacatctccaaaggcagtgcaggagtcgttcgtcagcataagcaaattggtagcaacacgacaagggatgatgctaaaccaaaagtttttgcagcaccaaaagttgaaccatcagcggatgtgacggattctactaaagtcgcaagag

SEQ ID NO: 42488 - DNA, 842 bp, Zea Mays
tgcgggcatgtgttctggaaatcccacagaaatgggacgaatgtttaccgttagcagaattctcatacaataatagctatcaagaaaacatcaaaatggcaccatttgaagccttgtatggacgacgatgtcgtactccgttaaattggtctgaaacaggtgaaaggtactttttcaggcctgatatggtaaaggataccgaagaaaaaggttcaacgaataatacatcatttgaagaaagctcaagctcgctaaaagagttacgcagacacacaccggatacccttatactttctagatgaagattatgtctatctgaaggtctccccaatgaagggtgtaacacgtttcggggtaaaagggaagttcgcgcctcgatacattggtccttttcttattcttgaaagatatgggccagtggcgtatcgactttagttacccgaaaccttgtctgcagtacatgtgtcacaattgaagaagtgtcttcgggttcccgatcgaaccattgaagtaacagatattgccctagaaccagacttgacatattctgagcaccctattcgagtcttggatcaaaaggacagggttacacggagaaaaactctcaagttttacaagatacagtggaaccagcattcagaagatgaggctacatgggaaactcaggactttttagaaaagaatttcccaagctttttagcctcatgtaatttgtaaagtgtatgtaatcgttgtaataaaggagtgagccccaaaccacccctgccttgtaccaagaataaggaaataaagacatgtcgtgtttccttttccattacttaccctaggacttttaatcttgg

SEQ ID NO: 42489 - DNA, 4354 bp, Zea Mays
ggcaattctcgtgccggcgcacttcgcttctcactcgatctgctttgctctgctctcggtctcggctgcttgcctgcttcgagtcgtcgccggcgggagcagagaacccacccgcacggtgcgatgtcgttgaccgcggcccccgtggccttcatcggcctggacgagctcagcgttgagctagctgcctccttcctccgctccggcgcttgcgtccgctccttcacccccgaggcggaacggtcgccttctgcggcgctcgcggagttgaatggcctcctccagtgcgcgagcccagtggaagccgcgcgagatgctgcgctggtcgtcgtgctaagcgatgctggtggggttgacgagttgttcttcggggttgaggggatcgcgaaagggttatgcgcgggttctattgtattgattcattcgacattgctgcctagtcagttggagaagctggagcaggagcttacagatcagaagaaggatgtcttccttctggatggatacattttcactggtttatctgatgaattaaagcaacagattattattgttgcatctgggagacaggacatagcagaaaaagctagcaaatttttccatggtctatacaaaaccatttattttgctgaaggtgaattctgcactagcagaaaaattaggatggtgaatgatttgctggagggcattcattttgttgcgtctattgaagcaatgtatcttggtgttcgagctgggattcatccaacaattatttatgacataatatcgaatgctgctgggagctcgaggatatttgtggagttagttccaaaacttctgagtgaagatcctttgctgattgattttctaaaatcaacaaggaaaaaagcaagccatgtgatggatatgtcaaaatcagtaacatttccactgccacttctgggtgttgcctatcaacaattggtacatggttcatcagcagtaactggagatggatctgcctcaccgctgaaggtttgggaagcatcgtttggagtaaatattgtagatgctgctggcgaacaaatttatgatgcaagcaaattagctgatcagcttgttgcggaatctaaagcagcgaagcggattggcttcattggtcttggagctatgggctttggaatggcatctcatttgctgaaatcagggttctgtgttgttgcttatgatgtctacaagccaacaatggccaggtttgctgatttgggtggatcaacaaaaggttctcctgaggaaatagcaaaagatgtggaaatacttattatcatggttgcaaatgagtctcaagctgatagtgttctttttggaaacgctggtgctgtaccagttttatctgctggaacatctgtcatcctttcttctacagtttctcctggatttgtgatccacctcaacagaagattagaagctgaatgccgacagataaagttggttgatgctccagtatctggtggtgtcaaaagggcggcggatgggacactaactataatgacttcagggacagatgaagccctccattgcactggttctgttctatcagcgctgagtgaaaagttgtatgtaatcaaaggaggatgtggagctgcaagttctgttaagatggtcaaccaacttcttgctggggttcatatagcttcagcagctgaagccatgtcatttgctgctcgactaaatttgagaacgagaagagtcttcgaaattatgcaacatgcaaggggttattcatggatgtttggaaatcgtgtgccacacatgctcgataatgattatacaccctattctgcagtggatatatttgtcaaggatcttggtatagtatcttgtgaaagttccaattcgaggatcccagttcacgtctctagtatagcccaccagctgtttatttcaggatctgcttctgggtggggtagatatgacgatgctgccgttgtgaaggtctatgagacattaactggtgtaaaagttgaagggaaggctccgatgctcagtaaagaagatgttcttcagtctcttccatctgaatggccagaagatccaattgataatcttgtacctattgcatctcatagtagcaaaaagtttcttgtagttttagatgatgatccaactgggactcaaacagttcatgatatagaagttttaactgaatggcctgttgaagcccttgttgaacagttcctcaagctaccaacttgcttttttattttgacaaactctcgttccatgactgctgataaggccatgctgctagtacaaactatctgtaaaaatcttaaagctgcggcagagaaggtccctggtgttagttatacaatagtcttgagaggtgattcaactctacgtggtcatttcccagaggaagctgacgctgctgtctccgtattaggtgagatggatgcttggataatctgtccattttttcttcaaggtgggagatacactattaacgacatccactacgtcgcagactctgatagattaattcctgctggtgaaaccgaatttgccaaggatgcagtttttggctataaatcttccaatctcagacagtgggttgaagagaagaccaaaggacgggttttggagaaccaagtttcaacaatttccataactctcttgcgtaaacaaggaccaactgctgtttgtgagcatctctgtagcttggagaaggtgtctgtcgagatggtttcaatgaaatcaatggaggacagagaccaagaaatcagacgaattgttgaactagggaatgcttatatacaatccagaaaagacactctaattctcaccagccgccaactcattactggaaaaactcctgaagaaagcttagaaattaattataaagtgagttcagcactagtggagattgtgagaaggattgatagtaaacctcattatatcattgcaaagggaggaatcacttcatctgatattgctacaaaggcgctggaagctaaacgtgccaaagtcatgggacaagcattagctggtgtacccttgtggcagcttggtcctgagagtagatttcctggggtcccttacattgtttttcctggtaatgttggtgataacagtgctcttgctaaagtggtgaaaagttgggcttccccatctagaagttctacaaaagaaattcttcttaatgcggagaagggcggttatgctgttggtgctttcaatgtgtataaccttgagggaattgaagctgttgttgcagcagcagaggctgaaaagagtcctgctattcttcagattcatccgagtgctctaaagcaaggtggagtcccactggtagcatgttgcattgctgctgcagaacaatccagtgtgcctatcagtgtccactatgaccacggcatttccaagtcagacttgcttcaagctcttgaagcgggatttgattcagtcatggtggatggttctcatctaactttaggggataacatcttatacacaaagagcatatcttccttggctcatgcaaaaggtttacttgtggaagctgagttgggtaggctctcaggctctgaagatggcatgaccgttgaagaatatgaagcaagatttactgatgttgcccaggctgaggaatttattgatgagacaagcattgatgctctagcagtttgcattggaaatgttcatggaaaatatccacctagtggaccaaaccttaaattcgacttgctaaaggaccttcgtgcattaacattaaagaaaggagttagcttggtcctccatggagcatctggtctatctcatgagctcgtaaagcctgcaaacaagccatgagtggtagatttaaagctctagtacaatgttgaggagtgcatagacttgggcgtgagaaaattcaatgtgaacaccgaggttcggaacagctacctggcgtccctcagaaagccagaaaaggacttgattcaggtgatggcgtctgctaaagaggcaatgaaagctgttgtagcagagaagctgcgcctgtttggatcgtgtgggaaagcctgagcgaagtacttgcgttgcgccggcaacatgcagtacaagaccgactgcatcatcgggttcgtgatgctgctgctactgtgcagttgcttacagttacagctcattgcgttgaacagctgaagtggttattgtactttgcagtgtagcgcaactaaggctaattcataaatcgtaataatgtatgtatgctgccccgctgtaaaaatgctccgtcgttaataaatgccatcgcgcttgctgtgcctttgtttacatttttattcgcctctcgagtgttctaacatgcaatctcagttgtcctatttagccctagtttgaaaactcaaat

SEQ ID NO: 42490 - DNA, 502 bp, Zea Mays
tgttctttttctttgcaaactaggtccagagaagtgtatctcggttttctctatgctcttcgaccaaaacttggtagtctagcgtctgctaatgcttttgtaaccgaagcaagccaactaaaactgtcccaccgcccagagcacacccttgcactccctgcatccagatcgtggtgaccacgcccattccttttcggtctcatcgtggccagccgttctcaaggttaaccggaacatcgccacgccgccagtaaacaccgccgagggagtgtcttcgcgtcgaccgactaaattgttgtctctccgagccaaccaatagcacctagaagatgaagttgaagtggaagtagaaggagaacaaattccccaaccagaagcttctacatctgaagttcctcctgaaggtccttctgaagaacctcctcctgagaacagggcttattttgatatctgtggtgaggtggtagtgtctcctccacatcaaggcaagcctcggtgcatt

SEQ ID NO: 42491 - DNA, 211 bp, Zea Mays
cctgcctcctcgctgacgttctcccacgtcgcgtccgcagcgctaccacgaattcaacatcgcccaggcgtccccgtactcggtttcaggccattgcaccaaacgcgcatcttcaaagtgccatcgagtttcatctcacctcacggtggccagggatcttcaaagaactctgccgtcgtggtttggcgccgtgaattacccctgcgccgac

SEQ ID NO: 42492 - DNA, 1790 bp, Zea Mays
tcctcggtcaaggaggcccccgaccccctcttcaacgctatcctccaggagctccggctagacgccctcccgatccgtctccccgcagtgacgccgacgtgcgtggaagtgttgcggtgaactgcaggctatgggaccacctttatgtggctgcgctgttgctgggtgacggctggccgggcgcgggcgaatgagagagtcgggcgacgccacgaggccattgatgtgctaacatgcgaatgtcagggcctatcttagagtcgcggtaggagccttccaaaagcaaattctccatcaccaatagcatcatagaggtaccacacgcagggagatatagcaagggaatgaacatgcaaattcttaagcatgccctctaggcacccagacaaaccgtagatgaaggtgatgattgctcgctcgctcgcttttattttttggttcttctctctgccatcgaatgtcatgatagatttattgattaattaatgtttctcaatcttcaaggaggttcaatgcaaaattagatactctttgttttcactcaccttggaattatttgcactgttcgagtatgagttacaatattgtgctttcgattttggctgcaaacaaggtgtcttcagtctggaagagtagatgtttacttctcggtgaacatgcaagttcaatttttgtttggttgtatcaagatgttaatttactaatgcattgcttactaattttctttcatttgcatatgcaaaataatgaaatgtcaggactaaacttttacactaaatactggtttgcaatttcttgtggccacagaaaacgaacaatactgttgcaagtccttgtgtaccaaatcatgtctctaattcatgttagcattatccgcattttaattcttggatgactaattttgaccttacaactgcttctttatctttaggtcaggacaatatgcgagtcaccttagtattacattggccttagtaccttatttactaatatagagccaggatcaaaaatcacatttactgataggttgcatatattgtcggaactgtattgtgatgtttgttaccaatatgcaccattatgagtgaaatctgcatctaagctttagatcaggtattcttaatcagaacaaaaacattagtgaaacaacatctttcggtttgaaatgctttgtgacaagatctttcggtttgaagtccagtgcagcgaagttgaaaaatacttctgattcttacagatttggcaaaggaggttcggtttatttcagctcttttcgttcaagctcgtgcaacaggacgtttgatccttctacaatttgttggcgaggcggatgaacactacacagcttaacaagaacgagctatcctcaccaccgaaaatgtagagtattataaaaaagtaggacaaacagcagatacattttaattttaccacaaacttatgtacaggatgaagcacacccaagttgacaaagtcctagattctacaattccagaaaatgaagcttgttacatcctcatgacatgcatgaaggaattttcttttgcgtatatgtggagggcttcgtcacttttgaatgaaaaaaacatttatgtacatataaatcacttggtgaagcctttctcgggccatgtgtgttgatgcaaccaccgggaaaaaaacaatgttattagctgttgacatatgctacttcaatactgcttgatatgtattgcactctcagttccgtctactgttggtctaaactgcatctgtgtacatacagaccagttgtattaaactttctgaat

SEQ ID NO: 42493 - DNA, 1088 bp, Zea Mays
gcagaattctatactcgatgttgagactcgagacagcacctataaattattttccgtggatgcacaatgttaagtatcggcgtgatgcttttagtaatcaaacaagcacacatttgtcagcggaaatcgacaagatcatggagcacaacatcagtgtcatcgttcctcatcagaacctcagcaacctctgcgggcgtaaccgtcacctccttgatcagtttctcaatctctggatacgtgtcatggtactcgatggagtggtagttgttggcaaggatttggaaagactctggggtgcaataccccatgtggatgtgcatgtccatccttccaggccgcagcagtgccgggtcaagccgctccttgtaattggttgtgaagacgatgatcctttcttccccacttgttgaccacagcccatcaacaaagttgagcagtccagacagcgttacctgttcagaaaatccaaattatttgtcaagataactgaggaagtggtggaatcgagaagatagtactcaccttgccttcccccttgttttgttctgtagaatctgactcatcatgtccctcggcctcctgccgttgtttgagttcgatggtgcagtcaatatcttcaatgactagaatggatcggttgtccatgttaacaagaagcctcctgaggtctgagttggatgtgaccgcagttagctcgagatcatatatgtcaaacctgagatggttggccatggctgcgattaggcttgacttcccagtcccaggtggaccatacagaaggtcatcgatgatggactgcttcagcttcttgtccatggcaagcgtgtcgaatgtagatgggtggtggagttcaatcggggaccaattgccgtactcagtcatgtgtatcatgagggttctctcctgggctttaatggccttggctgtggccaaaatgaacgggagacaaggcaccacttgaactccgtgccttgataaacatcgagcatctcgtcgccctcatccatgctgaccatcatcttgtcgtcctcgtccatgctgctgacgcgcaggcgctgctggatgtcggtgttcatgcgcgtggcgag

SEQ ID NO: 42494 - DNA, 442 bp, Zea Mays
ctagggaagaagcgcaactgcagggcatgcccacgtccgcgctggggaaaacggattgcaggggagcagcgcccagggaagatgcgcgcgtgaaacgccatggctgggcgcggcggctggagaagaagcagctccgctgcaggaaaccagaagcggccgagcgccaggagggagaagtggaaggagcaagactcgggcgcgcaccattggaggactggacggagcttggtggccatggctggagcaccgcagcgcgcgacgcaatggagaagaggagcgattggcgcgtgtgggagatagagcagagatgcgcgggcctagctgggaggccgcgacagggggagaagacgagggagcctagctccggctgggctgcagtcaggcgcggggagcagacgaggaaagcagccgagcgaaacaattaatatcagggagagttttg

SEQ ID NO: 42495 - DNA, 1389 bp, Zea Mays
atggagggtggtgcttcaggatctgcagctgtgactgactctgctatggcagaagctagtgcagttgaccctgacttagcgttggctcatgactcatatgctttcttgataaattggttggaacggttcccacagtacaagcatcgtgatttctacatcactggagagagctatggaggttggaaatgcggtaattgacgattaccatgactacatgggcacatttgagtattggtggacacatgggcttatctccgatgaaacttatgcaaagttgtgggaggattgtaaaaatgatgtgtctgagaacccctccgaggaatgccaaaagatttatgaggttgctgaggctgagcaagggaatattgatttgtatagcatctacacacctacttgtaagaagacttcattgcaaaagcgcagactaataaggggaagaatgccctggctgccgagaggatacgatccttgcaccgagctgtacatcacgaagtactgcaacttgcccgaggtgcaggacgccttccatgccaatgttactggaataccatacgcctgggtgggctgcagtgacccaatatatgagtactggaaggattcgccgaggtccatgcttccgatctaccgtgaactcatctcggcaggcctaaggatatgggtcttcagcggcgacaccgactccgtcgtgcccctcacggcgacgaggtactccatcgacgcgctgtctctgccaacgatcaccaagtggtacccttggtactacgacgaagaggttggtggatggtgccaggtgtacgagggcctgacgctggtgacggtccgaggcgcggggcacgaggtccccctccaccgtccgccgcagggcctcaagctgttcgagcacttcctgcggggcgagcccatgcccaagcctgtcgagagcgtccagtcgttctagatgagcttgctgccgcgcttggctagttggctttgatgaatagtaaggccggacatgtggcaagccatctccactccacatttcttcaccacgttttcaataactggcgctggccgaaataataagagcagaacgaataaaatgccgctcgctagaatgatctggctgtgcgtgtttgctttcgagttatttttatataccacctacacactttcacgttggaaaatcgatagtggtcgctacaaaagttccaaggataactggataagtttggcaaagctatactccatgctaaattcatatgggtactgacatactgtcaccgggaaaggctataccttctgcgaccgtcaagatccattgtcatcgtccgaaaagtgtgtttagttttaatccgtatcggcttctgttgcttctaatgtgtttttgtgtctgtagattacaactgcaat

SEQ ID NO: 42496 - DNA, 2178 bp, Zea Mays
ggcccatcgagctcacttccactttaacttaccctattacctttctgctcgtggtgagtgctgacaccacctcacgcacacaagccgccggcggcgaccagaccgaccacctcgcgcactagccttgctcgcttctcgtcgccggctcgttgccggctcgtcggcacgatgtcgtcggagcctccacccgccccttctgccgccgcagcagagggactggctgctgacctttccgccgccaccctcagcaagaagcagcagaagaaggacgccaggaaggcggagaaggctgagaaggcggcgcagcgccagcaacagcagcagccggccgacgccgaggacccatttgcggccaactacggctatccgcccggtcagcaagaagatggctttcgtcgtgctgcgccagagcatgagcaccgtgcagtgcgtgctcgttgccagcgccgacgccggcgtcagcacgcaaatggtgcgcttcgccaccgccttaagcaaggagtccatcgtcgacgttgagggcgtcgtgtccctccccaaggagcccctcaaggccaccacgcagcaagttgagattcaagtcaggaagatctattgcatcaatagggctatcccaacccttccaattaaccttgaagatgcagctcggagtgaggcagattttgagaaggctgaactggctggagaaaagcttgttcgtgttggtcaagatacccgcttgaactacagagctattgatctacgaacaccctcgaatcaagccatattccggatccagtgtcaagttgaaaacaaattcagagaatttctgttgtcaaaggactttgttgggatccacacgccaaaattgatttctggatccagtgaaggtggtgcagctgtattcaagcttctgtacaatggtcaacctgcttgcttggcacaatctcctcagttgcacaagcagatggctctatgtggtggttttgaacgagtatttgaggttggccctgtgtttagagcagaaaattcaaacacacacaggcatctctgtgagtttgttggtcttgatgctgaaatggagattaaggagcattattttgagatggcttatttgtatcaatatttaaacacttgactgaaaactgcaataaagaactcgagacgataaacaggcagtatccatttgaacctctgaagtatctagacaaaacattgaagctcacttatgaagaaggagttcaaatgttgaaggaagccggaacagaaattgagcctatgggtgacctcaatactgaagctgagaaaaaacttggtcggcttgtcagggaaaagtatgacacagattttttcattatgtatcgatatcctttggctgtgcgtcccttctacactatgccttgttatgacaacccagcttacagcaattcttttgatgtctttattcgaggcgaggagataatatctggagcgcaaaggatacacactcctgagctgttgaccaagcgtgcaacagagtgtggaatcgatgtcagcactatctcgacctacattgaagtcttcagctatggcgcgcctccgcatggtggtttcggggtgggtttggagagggtggtgatgctgttctgcgccctaaacaacatcaggaagacctcgatgttccctcgcgacccgcagaggcttgtgccgtaatttactgagtccaatgccctgagtttgcagcagagcgtactggttgttttgatgttctttgagcatcgaacatcgctaacttgcaatctcagctactgaagccccggttaccgtggttcagagttcctgttaaattcacaaagctacttgtatctattagattgctgaaaccagcaagtacgatcctttttgggatttgatctggtctaattgttgttaagtggaggtattgctctcagtttttttgtgctctgtttgtcggcatatgccaagagctagggcttcttaagttctaagtttttagacgagtggattccttttttttaagagccggcaaaagttctgccctgcacctgttaaaaatagatattaccctgttccaattctaaataatatgacgtgtcgccttctagatatttatattatgtagatgtacaatatgtctagatacagatagtaaagtaatgtatgtctttataaagagagaagaattgtgctgcgaatgaa

SEQ ID NO: 42497 - DNA, 2092 bp, Zea Mays
gccagagagagagagacgggaacggataggaataggagcgggggagtccgaggataggcaactcattgcttctgaatctctctcctcgtcgcgacgagatcctctgcatctctacttccccggggaagtagctgctagcgtgtgggtctgacctctcctcatcccgagttcttcattttcagagtcttgactcttcaggcccagaggctccgcaatgaactttttggaatctattgcggtgaatggacacagagaccgacagcatggaggcgtcatgagcagacagagcatggtcgccgtggagcagctcaccggccctgccagtgccagacccgctcacacgtgcgctgctcagcctcatgctcaccagctgctcagtgctcgatacgatcaccgtggcgcgtgcgcgtctcaagttgaattaccggaccggatctcgccatccaacgcttccacgttctgcacgagcatgtactcgtcgtcgtcgtcgtcgtcggcggcggcggattcctccaagtcgtgccggcgggcaggcgctctgccgttcctgccccatcctcctaaacgtgagcagcagcagcagcagcagtcatccagctctccatcactgctcgtctgtactgacctcggcaacggtggtcaagacgaggctgaagctgaacatccggctgagctcaaggacttcctgaacctctctggagaagcttcatggagaggcggtttccatggagagagcagcggcgtcgctttcagattcggagagcaggtggagtttcagttcttgtctgaacagctcgggatcgccatcaccgaccacgacgagagccctcgactagatgacatatacgacaggccgccgcaaacctcttcttgtccggtactgtcttgctccgaccaagaagaaggtctccagagggcagggtctcctgttaaagctcagccgagttcatctcgagctgcatcatgtaataacaagccaagactgaggtggactctggagctccatgagcttttcgtgaaggctgtcaacaagcttggagggccagaaaaggcaactcctaagggcgtgttgaggcttatgaaggtagaaggcttgaccatctatcatgtgaagagccatttgcagaagtatcgttttgccaagtatcttccggagacaaaagaagacatgaagtcctcttcagaagacaagatatccaaatcagagatgcctggaagcaacgctggcagaaagaaaagcttacaagtagcagaagctcttcggatgcaaatggaggttcagaaacaacttcatgaacaattagaggtgcaaaggcagctacaagtgcgcatagaagaacatgcaaagtatctgcacaagatattagaacagcagaaggcaaggaattccttatcagctacgacaagttcaatagaaacagagctttctgaatctacaaaggaagagaaacctgagacacaagcggatacttcttcagctcagttgccaaataaaaagaactcagatactgacatggaatgactcataaccaaagaactcattatgtatgaacaactgaacatgttgactcgccaagcactttccttctctaaccttgtagaatacaaacacttctgcctagatgcttctctcttgtatcatcatccctagtgcttgaaagagttctagctagccattgtatatgatttattttcagatgaaaatgctacaaaaaaaggaggaggaccagccattcatctattccatgtgtcactaaatttatttctgcctgtaaatgacgacagctgttcacagaagaaagaatgactttctgatttctacagtttctgcgtgtatcgtaagaacaaaactgttgcctacacaaactggggatctatgtagaacttcctgtgtaattttctgcatacctacagcagtgggtgtgcttgaatggccccttcaggtgaggaatgctgaataggccagccacttctgttttcttcttcagtgaatcgcaggagctcctcttgccctcttcgaagaggtttctttggagaactagaagtatagtcccatcccatcattgaaggtgctagtttcgaagaggctaaa

SEQ ID NO: 42498 - DNA, 2284 bp, Zea Mays
atgatcgtgaaatcaaggggggtgaagaggacctgcggaggcatgaaggaaatgtctggcatggggacggagaaaaccagtggattgggagctcacatcgcctgtgaatgttttgtgccgtggatgggtctttcttcgcgcttggaactgaacagaaaatctactcaaagtttcacagattggtatgagctgatcacccctggttgtgtagttccttctgcaatgatttactgcactcactgtgctgattactgcccctccataaaggaccctgacaaaggatacatatgttgtggtacatgtgggaaggttcttgatcaggaggtatacactgatgagcctacttttgttaaggataacacaggacagagtcgcttagctggaagtattcttgcaagcattgagtctggatattcgatttctcatcaaagaaccttagacaaaggtagggatgagattaggcagattgtcaataacttacatgtcagcggtggagaaactgtcgttagcaaggcttatcgcttctatgagctagctgtcgaccgtaattttaccaggggccgtagaacaagccatgttgcagctgcttgcctttacattgcctgcaggcaaagtaagaaggcttatcttcttattgatttctctgattatctccaaataagtgtttacgtgctaggtgctgtttttctccagctctgccaagttttgctactcgcggatcatccagttgttcagaaacttgtagatcccagccttttcatccatcgctttaccaaatagaagtctcagacacagctttacgcattgtagctagcatgaagagagattggatgcagactgggaggaaaccaagtggattatgtggtgcagcattatacattgctgcactctctcatgggtgtaattacaccaaggcagatattgtctctgttgtgcatgtgtgtgaggccactctaacgaagcgattgatagagtttgaaaatacggattctggcagcttaacgattgaagaatttctagcaacagctgatgaatataatgaagcgtctgtttcaaaatattcgcctaagtctggggaaatcctttgcaaacacaagggtaaagattttgagcattttgcccatggactttgtgaaaaatgcttcaataagttcactaaactgtcgggtggactagaaggtggtgctaaccctccagcattccaacgagctgaaaacaaaagacttgaagctgctaaaagggctgaagaagctgctgcagttaaggaggcagcgctggaagaatctctttgcgacacacagaattctgagattgagagtaccacaactcctaaaaaggctttaagcggggataaatcttcaacaattggatctgggggactcataaatgactctgtgccaccgaaggatcctgaagagggaggtgaaaattgtgaaggcaatgctgatccagaaagcctttctgacatcgacgatgtagaggttgattggtaccttcacaatgaggaagaaacacaatataaaaagattatctgggaggaaatgaacaaagagtaccttgaggaacaagcagccaaggaagctttggcagctgaattggcagctagagggattgttgtggaagagggaaagaaaaaacggaaacgtaacgaagacaccaagagctcgacgcctgctgacacaccggcagaagccacatacaacatgctgaaacggaagggacttggttccaagatcaatgagggagctgttggcgaattatacaagactaaagatgaagttgagagcgcgagtaggaaagaagagatggagttcgacgcactgtttgggccggacaacgctgatggcgagacggtcgatgatggtggttacggctatgggggctgcggcgatggtggcgcggaagcctacaatggcattgatgacgattttgatttctaggaggatgtgttatgtgtagcagcatttgcagctgaccagcacgggctagattcttcatctgtgcgttatagtttatagttagtttcatttttcttttgttaggggagtttgaccaaatcattatggagctattggatagtgcacttagttttggttgtataataatgttgggaactaggttctgcatgggcgtcgtaactgtcgcaagccctatgtggtcaagcgcctataccatgggcatttgttgtacatcccacctccaaaagattgcaagtggtgatgtaacattttgtattagcaataaaggacacaagaatgcattcatttgaaactttgaaaatctc

SEQ ID NO: 42499 - DNA, 2098 bp, Zea Mays
atggatggtcattacatccgacaaatatgttcatatatgggactaccatacaaggtcagattggctaaatttatagcccgcaagcaatgggttattgcgggtgctactagtggattcatcttcgtctatgattatgactcaaaaaaggaaataatacacgttttgtgtaaccacacagaacccatcaagtctttggctattcacggaactgagccccttgtgctgtcagcatccgtggatggcaaaattttgctgtgggactatgcaaatgactggcatttgattaaaacatttgatgcgagaagtcaacgtttggtgcaagtcgcgtttaatccaaaggacaccaatatgtttgctagtgctcagggcaaaacagtaaagatttgggatcgccagcatgatgaatgccaatacaaattagatgggcattcacatcagatcgagtgttttgattactttagtggtggtgattttgataagctatatatagtcaccggctctcaagataaaactgccaagatctgggactgcgagaatgcgggctgtgtccagacactggaaggacatgcaggtcccgttagagctgtctgttaccatcagaatctctcgttattaattacagggtgctctgacggatcaattcatctatggaactccactaccttcaggcttgagcataaactgaactttgctgacttcggattactgagttctgtagcttgtttgaaaggatcgaaaaggattgcaatcagaagcagggaaggattagcacttgtagacatagacatagaggacaagaaggatagcgatgtggagagcatcacgactactgcttccatgaacgacacaggtccaattacagaagagaacggagtggcagcagaccatatctctgatgaccacctggcgcagggcgtagtatatgtacatacagagattataggcaaagtcaattcagcatgcaccatagacgtccatccgacaaagccatggtagtggaatggacgattcagattaagggagcgaaagttagttcagctaaatttatagccagccaggattggattgtggcgggtactacccgtggattcctccacgtgtacgattgcgaatcgaggaaggaaatacgccgtctttgtgaacacccgaaatctatcacgtcattggctgttgacgatgatgcccttgagctggtgctgtcagcgtccatcgatggcaagattttgatctggagctactggcactactatcacgcacgtagacgtagtacctggcatttggaaaaaacatttgacgcgggaagccagtgtctgaagcaagtcgcgtttattgctccaagtgtccatcgcagcagcagcactatcatcgctactgctcgagacggaacagtaaagatttgggatcccgatcgttctgacggatgccgtgagttcacattggctgcggattcaggtcagattgttgaatgtttcgattggtttagtcgtggtactgatatatacttggtcaccggttctcgagacaacactgccaagatctgggacatagaggatgggagttgtgtccgaacactggaaggacacgcagatcatgttaccgttgtctgttaccatccggatctttcaatgctcattacaggttcaagggacggctcgattcgtctgtggaactccactaccttcaggtttgagcatgagctgaactttgacctcgggtctctgagttctttagcttgtatcaagggatcaacaaggattgcaatcggatatgaaagaggtctagtactggcagacatttgcactcaggaacatagagcatgatctataaagcggcataataccttgagagcgacagaataaaatctaaacattgataaagcggcaaaaatccctggcaaacatttgctgatgcgatgggattgcatccaaacatttttcttggtaagctaatagactgcaataagtttttccatggacttgggaggtgtcgatctgcggatatgcttttgtatggtttaaacatatcatcggatagaaatttatactactatattaaaaatttaatatggacatctcgtgctactatgactttatccttc

SEQ ID NO: 42500 - DNA, 573 bp, Zea Mays
agtcaccacagatgggaaaatccccaccgtcgcggactgactggtgcacaggcgcccgggcccaaccaagtgccttgggtgatgtacctcggttcgagggtgtcgttcagcgtctctggtggggcgcgaggctttgtgccatggagaattgctcgtcggagtcgcttcgccgccgcaagccgtgggcagagccctatgtgccacgttctatggtaaggaatgtaccacaaagttcaccatcagccctgcatcgctcagggagtgtaagatcgaagactatcgtgctcgaacgggggattcatcgatcgcagaggggcgcaacgtcgaggtgtcttctccgtcgctgtggctgggatttgtggaggaagacgacgtcgtggccgtagatttgtaaatggacggtggatattagatgaagctatacccgttcagttgttaaatccgatctgttgatctagtcgcggtcggctcagattaggtgtgggaaacattttgcacggatggatctgtgtcgtccgatccagatcgaacaagtgaagtctggtctcgggtgtttaaaatctacgccgttgt

SEQ ID NO: 42501 - DNA, 4018 bp, Zea Mays
cgacgccggccgtgccgcttccgtcctcgctttcctgtcaccgccgccgccgactgccacaacctctttcccatccctctcgtccccatcctctgccgccgcccccatcctcgccgcggctcggctggtgcggagcggacggacggagatccgccgacctcgggctccgctgcgtcatcgctacgccggctgaaggagtgaagatgatagacatggtgtctgctgttgaagagcttagtgggttaagctctaaagaacttaatgagatgctgaaggagtcagacaactttgttttgcagtccaaggcagaaggcggaggtccaaagcagacacttgtggacatggaaaaactcgtgtcctcgcttcctcttcatctcattgctgtatgtttggagcttcggcaaggccccgatttgacatatgtgcttcgtggcatgcgctttttgcatagtttgtctgacctagcatcccgccatactagactggagcaggttcttcttgatgatgtcaaattatctgaacaagtcatggatctgatattcttcttactttctattcttgctgaacagaagaaggtttcaatgggttaaaccaaaatgtttttattgattcatgtgtgctctgctttgaattgtcatctgatactaattctggtaacagctgttgttttaaattaggagaataatgttggcgcttctccgcttgtgcatgcgtcacttgtagcagctagtcttcatctgctaacaagttacttctcttcccagtggcatgaacttgtccatattctgcttgcacatccaaaggttgatatctttgtggatgtggcctttgatagtttgcatgaagatgtgaggctgttaaatatcagattatcatcaatggacttcggtatctttcctgttggttctttggaatctcgtcttgctcacttcatctgccaacagtgtgaagcatcattgcaatttctcttgttgttgtgccagcaaaagctgtttcgagatcggattttaagaaataaggaactctctagaaatggaggcatactgtcactttctcacactatactgaagttagctgtccctgaatgtttgaagcaatcaaccgatcttgttgcttctatttccaggctcaaggcaaagatactttctattctgctgcaactttgtgaggctgaaagtgtctcttacctcgatgaagttgccactaattcaaacagcatgcggctagggcaaaccttggctctagaggttcttaatttgctgaagattgcatttggaaagaaaaaatacattacttctgattctcatgataaggttaagatttaccccatgggatctatgcttatcagtgcattgcgtcttgttgacgtcttctctgatgattcaaacttcagatcatcctttttgactaacactgttccgtttttaacccagattctagcaactcctcacggtgaatttgtttctagttggtgctctgtcaacttaccagcaattgaggaagatgcaagtctagattatgatccttttgttgcatctgaggtggcactgttagcttctaataatgtgttgactgaagctaaagctgactattcatgcccttttcgccctagcctgccttcagtggcatatgcacagacaagaacatcatgcgtagtgaaaataatagcaaatttgcatgtttttattccaaacatatgtgaagagcaagaaagggatctttttcttcagaactttcaaaagtacttggtgtctgggagttctaaactgtcagcagaccagccagcttctagtgattttgatgccactaaagtctgtagaaacttaggatctttgtctgattatgctaaaacattggttcctaatttgttaaatggggaagacttgttgttattaagtgatttttctgataagctacaatcttggtgtaaatcacaagttgcagtaaaggtggtacaaaatgatattccaccagaaagcatggaggacatgcacccaatgcagcagcccttgccaacacgggcaagcactccggactccaaaatgaataactttccaaagaacatggaagtgtctgcaccaatacccccaataaatcgggaaggaaatgataaggatgagactccaaagaacacagtctctagaaatggtggtttcctacagaatgcagttggtcaagacctagtccatcttggcgttgcaagaacagccagtggtggctcttcggccgtcacttccgttgttagcactggacaccagcgcagcaaaatggatcttgatccagcttccggtagcgtggacaatttcaaaacaccagaactcacaaaagaaaatggtctccagggggatgacaaaggagaaagtagtgtgtatgatgagaggcaacctaagagaaggaagcggaacattatgaatagtgagcaaatagatgaattagagaaggctctagtagatgagcctgagatgcacaggaaccctgttctattgcagggttggtcagagaagctaagtctgcagggcccagagatcacatcatcacaacttaaaaactggctgaacaatcggaaagctaagcttgctcgcattgcaaaagaaagagggacatttgagggagataatgctgataagccatctacccctcatcccggcgagtcttccgaaagtgctggggaggacaactatataccccctgcaagggtgatgactgctccatccaaaggcagactggtgagcccggacggcaatgagaaaacatcgcaggcagagctatcccccaacacgatgctgatccgcccattcacgagatccttctcactggagcccggtcggctcgtttcactagttgacagcgacgggaaggaggttggcaggggcaagatattccaagcgccagggaagagcccagccccagtggagagccgcatctgcacggttgatgtcaccgagctcaggaccgagaagtggagggagctcccacacccttctgaggcatctgggaggaccttccaggaggcggaggcgaggaatggtggaatcatgagggtctcttgggactccggcaggctgttgcctgtagtgtagcaaggcagaaacttttcgtcaggttgctgtataccgctaggcacaaggtgagcagagggagcctttggtttagggcgagagactggatcatgggattcttgggggcctaagtaacactgttaaaacctgtggttaactgtggtgtatccatcaactaattgtctcaagcaatgcaggtacggagtagttactaattttactgctggtgtttggtgtcacctgcaacgtgacgtggtaaaccaatgctgagcgatggagttgcatgtaaataattcagcactagaggaaaccaaaggggctgcataatgaactttagcttttattgtgggaaaaaaggtgatagcgttcttcatgttcgatcaattaaacagcaccagtaaattgatcatagggatgtggacttgctgaggcttgagtatatatggtgttcctcgagcttccttaaacaagcatgaagtttgtaggcacttcatcacttgttggtgagctacagtaatcttgagcccgaccctataaataacatggttcttaggctcgttaccaaaatgagcattacattacaaagcagcttttagacatatattggccaagaagatgttggagagaaatataagtctcaaatgttgagtgatatgttgcttcgtgaattattctcaaacatttaatgacgaggccacatacgaatttctccattgatttttttcactaaagacaccatacactgacaatgatgagatattggagagaaacaaaagtctcacataattttcattgtatatcatttgtgagattccgaactattgtttttatacaggtcaacatgctttagtttttgttaccatagtagttgtgagtaaattggttataacaagctaacgagcatcaaaggtcgcttcattcaagataattttatgttgctttaacaaacaaacaaacaa

SEQ ID NO: 42502 - DNA, 659 bp, Zea Mays
ggaatggtcttggtagcttttctttctcagatttgattatacttgggtagattcaaaaggcacatttctcagattcaaaaggcacatttcagattaagaagttcagggatgcacttgcaaagcacaaagcagataaatgtagccttggcccaacttggggactagaatcagaactgttggccctagctgcaaacaaggatctccaaggagacactactggtttcaagcatggaagacttcgcggaggtcaggaccgctgacaagccaaggcttctgacatcactgatgccataggcaatatagggatatgatggcatgcccttggtctcatccgagagatgaaatgtggtgatcgccacttcctttattcacgtgcagttcttcactattctttgtgtgtatagtttgtttgttccttttcatagtcgcggggtgtaagcttccagatttttacttgtgaagtctgcccacactggctgctagaaatgaaaaaatgtgttagcagtagcagcaacaagcgttgtgggcgtttgatcttctggaagtcgtgtggtggttgtatgaatctatctactccggtaatgttgcatttcataaatcactgcacatgagtttctcttgttctttatagtgaaatgaaatggtatggtggctttgtg

SEQ ID NO: 42503 - DNA, 202 bp, Zea Mays
cccctttccttcctcccttcttccctccaccgaaaacaatcgaagatttgcaccacgcgatgtagatccgagcggcaacgaaaagcaccttgggaggagaagatgggggggtgggggcggctagggtttggtgtgtggctgcaagagtttggaaaggaggagatgagagggggggcggcggccaaaggttgggagaatgagg

SEQ ID NO: 42504 - DNA, 1179 bp, Zea Mays
ccgagctcgaccccaaactgctgtgcgtcctgtcctgtctcccagtcgaggtcccgccgtccacgctctgccttgtcgcccagctcggcctctgctctgtccctgctgctgcgcgtgcgctcatcggtgttcccaggtcgcccggccggagttttcctgcgcgcgccgtttttcccagctcggatttcgccagccgccgttgtcctatccgcgtcagcacgtgatcgtggtcgtgttcatcgagtttgccaacgctctgttgtctattcgaccgtcgtcgctgttgtgtgcctcgttgcgtgttcgtcgggtgtcgtttgttatacccagcactcgtgcttgcctctggctcgtgttaacgctcgcgcgcctgcttgttgtcactacggcgcactcgctcttcgtccatcgggcttcacgtgtgctcgcgtttgtcgtcgagctattgaacctgtcctcccttacttgtgatttcgtcgttgctagagctcgcgctaacctgctcgaccccacctcaccagctcgctccaaactcgatcttgtcgtcgttccgtacgtcattaagaaatcctatggatcgggcgaagacgaagctagcagcatgatattcaccaaatgctcgacaaaaagctcgaacaagtcttcgatcgtcatcctcgtctacgccaagatccgagaagattaggcacagaagaaaataaatcagtacgcggccggagaattctcgatatggatgaagatgaaacgcgattcgacgcaacactcaccctattttcggtgaaatgctaagctgaaaggcgtcgtcgatttcgttgtttcaagtcggatttaattgatggtacgttgattaaccacgtgatgcggagaacaagagccgagtcgaccccaagatgacgtaatgggtggactactccgcataatgaagctgatggacgaatctgaagatgggcaagctgaacaagtgccacacaaaaggatggtcgtcaagtggacaacatctaacaaacactaacgtagtgtttattccaggcaagccccggtgcatttgccacctccttgtggttttaaaatatttatcatcttgtttgatgcattaggtgataggagttgtatgctaaacaattgatgcattttcttccttgaaaaattgattacccttccttgataccctttttgaaa

SEQ ID NO: 42505 - DNA, 353 bp, Zea Mays
gagaaatcaccggaaggtatggagaagaaagtgaagccgcaccacaccgtcagatgttcaacgacaagctcgagccaggatttatcagcattctcacgagtagtgagtcacgtttgatgctggtaagctgaatttatttgcttagtaattttagtgccttgccggtaggcgctattggcattttatgcgaagaattttagttgtacagtaaagtcagtgctatgcattcatgtgcattatgcaaatcatttaggtacgtttattgactacgtgatgcggagaaccagaattgagttgaccacaagatgtgctgatgaacggaactgaagatggttaaatcaagcaagtgctcg

SEQ ID NO: 42506 - DNA, 1883 bp, Zea Mays
agattcgtcactgcggctatactgaaactgggtcaaggtggttgctatgctgtaaatcaacaaaaccttttagtctcaagaaagttgggcaggctagagttgaaacccaagtacccaacaaaacccacaatttaaggttcgaacacatggatagctgttttccaggcactttattcaaggcaaaatctttgggacccccactacacactgatgtctttggaggtttctatttgacatgtccaaaccatctcaaccgatattggacaagcttttcttcaattggtgctacctctatcctatcacgtcaatattctacaccgtacaacatagcagggctaacatcttcatcaatatacacgtctttgagcattgatcctaaataatgaaagcatcgccaagaaggaaaaggagcctcattcctaaagatgaagtcattcctccacttccaaatgcaccataccaccagggccagaatttccatgaaaaaattgtggccaaaggcatccttggcgtcttgaattatcgagaagaagtcaagctcatgattccaatggaaacccacataacttcagcagtctgtactgaaaggacagcaaaacaacagatgaaaggcaacaggtgtgtctttgacaattctaggccatgtgttgaggaagtgctaaaagctgttaatgtggaaggggggctgtggtgtttggctggagcttccaaactccaggaacttgtttttgggtcggtgcctactggtgcttttttagccctgtaggttgtggtcgccttcttcattgatgtggcgcgacggttgtatttgagggatggcgtgtgtgtgttggtgtttgtgtttcgggtcactcttgacctttgtacttactttcttccttaaatgaaatgacgcgcagttctcctgcgctgttcgagaaaaaaagataagtcgtctcctcacactgcaggtcacacagagtgcagacaaagtactgtcaggtgccagaaaaccctttcttctgaggatgttctttgagttaattctatctctaaagaccaaccatacaaagatcttgaatttcttaccagccttagactgccaaatccagttaaaggcagcagggggctgaattgattgaaaagtaaggctatagaacttggatgagctgaaagtagagttgccccacggatgggtccatttgtctttatcagctctagaattctgaaggttattgacaagctcatgaaaagtttgatatttctgagcagcataaggagataaaggagtatggatattgtgttccagatccatgttggctaaaaattcttgaaccaaacaatcttttttcctggcaaaagaaaagagacaaggaaaagtgaatttgggggagatattgttaatatgggacaattgtgattatacccttcgttggccttttagttgtgattttaccctccacattttttaactttgtgtttttacccctccattttaaaaacaaactaccgtttgcccttgcctcttaacgacgttagggaaagcaagaattagttattaaaaataaaaatataagaagaaatgggtgaatggtccaaactaccctcctattctatatgggcgcaatcccagtaggggtaaagtcgcaattacataatataacgaggggtaaaatcacaaaaaattgtatgggtacttttgccttttcgcatcagatttaacactgtcaaatacatgtcacagcgaggggtatgacaaagctttgttttcaaaaaaagaggggtaaaatcacaaagttgaaaaatgaggggcaaaaccataattgtaagacagaggggtataatcataaatgcctcttacaatattgttgtatatgtccttaatgagtccaatgtactgccca

SEQ ID NO: 42507 - DNA, 1757 bp, Zea Mays
aaaactcttttgaacacgtctaagaatgtacggacaaggacctgctctgtttctcggcgagtttttcccacttccacctctccgtccctgccgagctgcggcggccgcatcgactgttagggcgaaaatccgttctagtctctcggcgattttcggcaggcggaggcagcaggatctgcgggaaggatttcgtgtcgagatggctgggcgcaaggaaactgcactcgacctggcgaagttcgtcgacaagggcgtccaggtgaagctcaccggcggccgccaagtgacaggaactctaaagggatatgaccaactactcaacttagtgctagatgaagcagttgagaatgaaagagacaactccaagtcgctgctctccagggagaacctacttggagtcctacaatcaaatgagatctgaggcattttctgatatgtattttttgcgtgcactgtagttcttgtttaaattttcgctgatgttatgttcagctctttcttatctttcactgttacatttgaaagattgtgaaacttggacgccttcaattttcaccatcacagtagccaatgacgagttgtcccaacatgtgaggtgtaggtaactccaagccctgtttcagggagaacctacttggggtcctacattcaaatgagatacctgggcatttactgatgtttataaataaggcctaatgttttgtcttggtttgttgcatgcattattctgtttgagaattgttctttgatgactgatttagtatgcttaggtagctgtgtgttattgttcatgtaatgattatttgttgttgagatgtttatgccttttcttgtgtctagtgttttatcagcaaaacaaattactttgtggcactgccagtgatgatttgtctgcaaaatggatgtcctgtggactcaagtcccctgtttcagggagaacctactcgaggaaacatggtacataatatgacatcatctgattaaactgaggcattacagaagaaccttatttccttgtcagtttttgcttcgtgctctttccttgtattctgaaagtttttctgcttggtcataaagaatcgtaaagcttggttgatgtcatataacgatccaagcagttgtctttcagtgatgtttctgtctgcaaaatggatgtgctatgtatccaagtccctgttttaggcagaacctacttggagaaacagcatcgaatgtgacatgaatacagagactgagattgtagtgctgctttattgttatgttctatttctctctttcagttgaagtttcgtggaatcgtagttattttttgtcttgactatgcatcgtgcaatttaaatattgattgatgaacctggaattcatttttttgtgcacctaactagcttctgaaccttgcagactcgtatctacagagaggaatcaccaagccaattgtactcatctttcctctcactgggtatacaatatagtagttgtagcggtctttccgtagtagaacggagaaagacctgtgcagtgagtatttgtgtacttggccgatggctcgaatcgtctgacctaatcagcgagaatggcaaccaaatatgcttcgtacttgaaacctgtgttgtttttagacatgtgcgaattttcacagttcatttgattggtgatgcctgacaatttggtcagatctgataccgcggaatatataatgcaagtttgaaacctgtaatgcaattgttttgttattggatcacttacagaggaagagt

SEQ ID NO: 42508 - DNA, 1021 bp, Zea Mays
cctcccgaacggcaacatttcttttctccaaaccatataccctagcccgtgcacaggtgggcgcccgccgccacctgcggctcggtggactccggcatcgacacccctggcccccagcgccgcagatcgcaagctctcagcaacgcgtgcttggtaggaacccgtgccgaccgactcttcctctgcgggacggtctcgagtttggtcgggagatgggtgacgggagctgctgcgtctgcaaggaggcgccgcccaagtacaagtgcccttcttgtcgcacgccctattgctctgtcacatgctttaaaaagcacaaagaggaatcttgtcaaaagatattgcatcaggaagaaattagcaagtcagcattgcaggaggaagttacggaactgaaagggatccaagacgctctcagggatcctgaactgcagagaatgatacttcaaattgatgggtcttccgaatcagaaaaagaattggagaaagtgatggaaggtcaagcttttcgcgagttcactgataagattcttgacattgtcaacccacaagaataaccgtctaccctgtttggtgggattctgacgctagagtaaacagaagcatccgggcaaacaaagcaaaagtggagctcatctctgttttcctttttccaggatggtataattcataacatatcttgagtcgcctgtttttccatgatggggtagactttagaacacatactgtgtcgcctggtgaaaggaaattacgtctgctgaaaaatctctcttgccaaatatagtttttcttctgtattctagtgttgtattctagtgtggtagacagcgactctacactgactactgagggtgtgtttggtttggttttgacttttgctctctaaaaacgaaaagcaaacggcccgagccagaaagcagcttttttcaaaagcatgctttcttgcaatgcaaattgaaagcacatttgaatctatttttagcggcttttgaatggaaccatgtaaataatatggaagaacttg

SEQ ID NO: 42509 - DNA, 405 bp, Zea Mays
tctcactttgcacgagttcgggggagcccagcccaagcaggcgccgccgacgaccgcgggggcggaagacgagtccgcgtcccgcgcgctgtcgcgctcgcatgcgagctgacgacggccagccacatcacgagagcgcggtggcggacaaagatgcggttttttaagaatcccggaaactaataaactgactgcggcggcccgcagttccgtgtaaagcttaagaacagacagaggtgggcggtgttgttgcttccgtcgtcggtgttggtgttgctcgtgccgcgcatcgagtcaaggtgtgccgtggacgagaggatgccggtcgccgcgaaaaggatactgcggctgagggcacagcagagagaaagactgcaagaccgatgcgagtcggagcgagagaga

SEQ ID NO: 42510 - DNA, 2863 bp, Zea Mays
cacctacacagacacacacagaaactttggatgcaaacgaggagggagcccttgaaggcaaaccaatgcgcaccgccgcttattcattaaccaaagacttgcatccaaccaatcccaccacttgtgtctacctcttcgagtcaggctgatgggaggtgcctgtcagcaactctccgtggacggagatgcgaggacgcctgcgaatgaccgcgatccggccggcctgctccagcatgatgatacggaaaaccagcagcagcagcaggcctgctgggagcgcttcctcctcaaggagactctcaacgtcttgcttgtggagagtgatgattcaaccaggcaggtcgtcagtgccctgcttcgttgctgcatgtaccaagttatctctgccgaaaatggccagcaagcatgggcttatcttgaagataagagaaacaacatagatcttgttttgactgaggtttttatgcccggtgtatctggtatttctctgctgagtagaatcatgagccacaatatttgcaagaacattccagtgattatgatgtcttcgagtgatgctatgagtacagtctttaaatgtttgtcaaaaggtgctgttgactttttagtcaagcctatacgtaagaatgaacttaagaacctttggcagcatgtgtggagacaacggtgtcacagtgcacagaactcatggactaagcttgctgtggagatcgacagtccacaagctatgtctctggaccagttagccgatccagccaatagcacctgtgcacaagtaatccactcaaagtcagagatatgtagccacagatggctaccaggtagcagcaacagaaactgcaagaagcaaaaatacactaatgatgactttaagggaaaagacttggagatagatggtcctggaaatctatatatggatcaccaatcttccccaaatgagagacccatcaaagcagcagatcatgaaaacaattccaaggagtcaatgatgggaaatttaggggatgcaactgttcgagctgctgacctaattggttcaatggccaaaaacatggatgcccaacaggcagcaagagctgcagatacccctaatttctcttctgaagtgccagaagggaaagatgactttaagggaaaggacttggagataggtggccctagaaatttatatatggatcaccaatcttccccaaatgagagacccatcaaagcagcagatcatgaaaacaactccaaggagtcaatgatagaaaatttagaggagccaactgttcgagctgctgacctaattggttcaatggccaaaaacatggatacccaacaggcagcaagagctgcagaagatacccctaatttctcttccaaagtgccagaagggaaaggtaagaatgaccagcatgataattatgttttgccatcacttgagctgagtttgaagaggtcgagatcatgtggagatggtgccaacgatacagtcaatgacgatgaacagcggaatagtgcattaaggcgatcgaatctctcggcttttacaaggtaccatacatctgcggcttccaatcaaggtgggacaggattggtaggtagctgttcgccgcatgataacagctcggaggctgtgaaaacggattctacttacaacatgaagtcaaattcagatgctgccgcaataaaacaaggctccaacggcagtagcaataacaatgacatgggttccactacaaaggatgttgtgacaaaacccagcacaaataacgagagggtgatgttgccctctgctattaaggctaatggatacacgtcaacattccatcctgtgcagcagtggatggttccagataatgcgacagcagggaaagcgaaggctgatgaagtggccaacaatgcaggcagaaatagtcatcctggtgacgtgcagagcaacctgacgcaacaacatcgtccaacccttcattacgtccattttgagaatagtggatcaggtgccctgcaatgtggttcctccaatgtatttgatcccccacttgaaggccaggctaccaataactatggtgtgaaagccgggagcaactcaggcagcaacaaggggcagaataatgggagtacagctggtgcgagcacggctgctgcaaatgctggacggacagatacagagatacgggctatcgataaaagtggacctggaggtggcagtgggagtggcaatgacacatatgtcagacggcttgctgcgagcatgacaccacgacaagaacagctaaagaaatatagagagaaaaagaaagatcggaactttgggaaaaaggtgcggtaccagagcagaaagaggctagccgaccagcggccaagggttcgtggacagttcgtgaagcaagctgtgcaaaatcaagagggagatggagagagatgacccccccccccctctggcttcagctcatggttgttagacgtggcggttgatgattcttccttctctggtgtgatctgatatgatcgacaacacaccatccttccttttcttcattggtttcttcacatctagaatttactgcctgaccgggaaaaaataagctaggaacttctatacatgtgtatgcatttctaatcatgtagaagaataagtgtgtcttgactctagataattttaggtagagtcatgctcgctctcctacattatgtgatgtaactgaagtgttgttgtgttgtcatgtatggtcttggatcactttctgtcaatatattactagcccacaactactattaatttgatgagatgtatataattaaaaatattgtaatagtccttcctttggtaggtagacaacaaacaatcttgaattcagtgcatacataaatcactgta

SEQ ID NO: 42511 - DNA, 1669 bp, Zea Mays
actggctacttccttctccccttcaaatttgcgtagcgttgaatccacgccctcccggaacccccgaatctaccgacgctccctctcagtctctcacaacgctcaatccaaacgcgagccgcgagcctaaccctagcaaccgtgagtgatggcgcgcccaagggctaagaagcgtacgacgccccaggcggccgccactgattcggtcgagccggatgccaccgtcggtgcttcgagcaagctggaggaggcggcggcggagccggcaactcgggagcgggggaagcgcgtcaaggcgccgcccaagcccaagcccgagacggaatacttcgacgagaaaggaaatttcgaggatctatggttatctgctttccccgttggtaccgagtgggaaaacatcgataagataaaggagttcaactggagctttgaaaatgtagaggaagccttagaagaaggaggagagcttcatgggaagaccctttatatgtttggaagcaccgagccccagctattgtatgttaatggtgaatcaaagatagtgcttatcccaattgtcgtcgctgtagactgtcctttcccaccttcagacaaaattggcataaattccgtccaaagggaaaatgaggaaatagtgccaatgaaggcgatgaagatggcatgggtgccttatgttccccttgaggaccggctgagcaggattgacattttcaaaacaaaaatattcacgctcggatgcacacagcgaagattatatgccactgcaacctcttgaagatgaagaaaacacaactatcaatttcttatatcctctggaacccccgatagtagatgagttcgactgggaaatggatgattacgaggattttgcagatcagaaagtccaagaaggtagcctgcccgagggcgagaaagaaaaattcaaggagttcctgaaggagaaggttagagaaaggaagagagagctgagacaggctaaagaagccaggaagaaagctattgatgatatggatcctgcgatgaaagaggcattcgagaatatcaaattttacaaattttatcctgtgaaaaccccagacacgcctgatgtaaacaatgtaaaggctaggtacatcaacagatactacaggaatgcccattatctgaagtaaaggctctcctgatctcacgtgcttgaggacgagcttgtcatttgagttggtgtaaaaaaattttgaaacccgggggagaaaagtttggtgacatctttggatggtcttactgttgtactgtactgtactagaattgccctcagactttcgctgtccggtgcatacagtcagaaaggttcaaggtagttttgagactaaccaaatcatgatggaacaatttgttcctttgtcatcatggttactgcacaccctgatggttatgctgtgactttttttaacatctgctatgagcaagctatgaattatgctgtaatctgtctggtgaagcgaccaggtacagtagggttcagactggttaacaatgggataacctggcttctaggcctgtttgtttttttccaattaataatcggtcttttgatctaatttaaattggtttctactccctttgccctacaatgaatgttgtttgacttttttggcataagttcgactgactcgtcttattcaaaatattt

SEQ ID NO: 42512 - DNA, 1094 bp, Zea Mays
aagcgtaacacacctctcaagtcgggccacaaaacacccaagcctccaccaaattaaaccgccggcgcctccacttcgcgttctcgcctcatctcctcccgctcaggatccggcggcgaaggtaaggcaagatgtacaccgcgaggaagaagatccagaaggataagggccttgagccctccgagttcgaggactccgtcgcccaggctttcttcgacctggagaacggtaaccaggagctcaagagcgacctcaaggacctttacatcaacggtgctatccagctggatgttgccgggagcaggaaggctgttgtgatccacgtcccataccgcttgcgtaaggccttcaggaagatccatgtcaggatcgtcagggagctggagaagaaattcagcggcaaggatgtggtaattgttgccacaaggaggatcgtgaggccgcccaagaagggttcagctgttcagcgccctcgcaccaggactctgactgctgtccatgatggcatcctggaggatgttgtcttcccagctgagattgtggggaagcgtgtcaggtaccgtctggatggtgccaagatcatcaagatcttcttggacccaaaggagaggaacaacacagaatacaagctggacacctacactacggtctaccgcaggctgtgtgggaaagatgtggtctttgagtaccctatggccgaaaatgcataaatatgacgcccggatatccccattttattttgttgaatctggatgtttctttggggtctcaactagactgctccgtatgtacttcaaaaaccatagttttgatgccaaagttgttgcctaggaatttggtactcgggaattggtagcggacctgaacaatgttaagttttgagcatttaaatttacctttgtcatgataacatgttgcgagtttttatttaattgctggacgtgtttgatatgccagactgcattgttcgtttgattctacctagaatcaaatcaatatgcaactacaagcctcgcacctgtaacgtctaacctgggtttttcttgttcatttaaactttgtaacatcatgtccactctgacttgctctggcag

SEQ ID NO: 42513 - DNA, 935 bp, Zea Mays
atggcttccaacggcagcgacatggtgatgatgtacgggacacggcgctgctggagccatccaagcagcccaagccagcgactctctccgtcaaggtatcataattcctggattccaaatctgagacggatgttgatgttgactataacagcttgtactcaaagcagggctttctacagggatgaaatcatgtctgcaatcgagaaacacataactgcttggacattttttctaggagctagatggatatcctctgcctgcaagtatagatatgaaagtatgtatatgaaattttctgttctggcattagaatgccatgcatatgttccctcggtaggttctgccactcttgaacttcagtctgtactcatacaaacagaaattatgtttggttgcagcgaggggtataatgcctttcttttcccaatgcaaatggaagtcatgttactacaaaatggaagtcatgttactacaaaataattgtcctatcttggcaattttctttcttgtgtaatgatggcccagatgtttagattactgattagcagtttttctatgcattattctgagtttgtagacaacaaacatgggcgtcttttgatattaatttttaggtcaaaggtcagttggaaaacatacctttgcatcaggtgctcggcacatcctttgccagtaaaggcatcgcactacctgggaggctgggagaaacggggtgcccgctctgccgctcattcataaaggcacagaccatagatgatgatgactcaggacagtgccaaaggtatattcacatcggatctgatgctaaccagaaggaacagagcggaacaaacataaataaacttggcaggcagtctcctatagaagttgaaaggcacggagggcatcctgctgcggaaccggggatgtcgcagcagttgttgattggggcatga

SEQ ID NO: 42514 - DNA, 5094 bp, Zea Mays
gccgctacgacttccttgttggagccagcctaagtccataacagcttctgcattgccatcaaccatagaatgagaaagaccgtcttcctcatcaactacgcgccgacgcgcggacgctcccgtccccatcgcgacccgtgcgccgggtccacgctgaaccctttcaccggggcggcgaaagatatcagccgcgacgccgacgggctcgagcgccggtgagcgctcgcgcacccgggccaataaactggcaccggctcctcctctcgcgtcgcagagcctagcctcgggatgacgtggcgtaccacaacaccaccacacctcactcagccctgcgggtctccgaccaaccatttctagaagcctccaaaccctagcgcaggaggaagaggagttaggaggagctccagggatggcgaaggcgaggaagcagaagggtgacggtgccagtacgggaggaggcgccaccgtgctccaccagaagctctgcctctccatcgacatggagaaccagctgatctacgggtacactgagataaaagttctagctgaaaacaacagatttgctctacatgctgacaatatgacgattcagagcatttgatggatggtgcaactgttgagtttgactattcccctcattggaaaaatgaaagtgatcaaccgaattggtcttcagtatcatgtttgaagactgctgctgatgctgcatgttcaatgtatactttgtctctaaatcgagaagctacaccaaatcttattgtgtcatctgagagatcagtcaagtcaatgactgaacagcagttagatgaaaacagtgaaaagcatgaagaaaatagtggaaggcttgaagaacatggtggaaatcctgttcaaacttcctatgatcaaattgttaatggctgcagtggaagagggaatagaaaattctgcagtggaagaaggaaaggaaaaggaaaatgataaggaaaaagaagaggaaaatggaaatgagaagagcaaggaaactggaaatgagactgaatatgaaaaggtgaagaacataaaactggttcacatagattatattttggagaaggctgaaactggcgttcagttcgttggcaatgtcatgcgtagcagtagtcagacaaggcgggcacactgttggtttccttgtgttgatagtgccacagaacgctgtccatttgacctagaatttacagttagcatggatttcattgctgtcagcaatggtgacttgctttaccaggtctctagtaaggaagatccttcaaaaaaacttatgtgtataaattgaacactccagttagtccacagtggatatccttggttgttggcccacttgaagttcttcctgacagaatcacagaaatgacataaatgtctcacacatatgtttattccctgctttggcaaagcttcagaacactattgcatttttccacaatgcatacagctgttatgaagactatctttctgcaccatttcccttaggccccgtttgtttcctttcatttcgaggaattggaatcttactaacagaataggctaattttttagaatatgacattccaccactttccaaagttatcatataagcctatctcaaattcatgaggtgagagatggaaattgattctatagatttacatgctaattttccgatgtacaacttatagcacactcttctacctgcacctctataacataaatatactatataactaactctctcatatgatttaggataatatacaaatatattatatgtataaatatataaacttaattagttttgtctaaattataattattaaaatggaattcaattccaacgaaacaaacgggcccttaggtttatacaatcacatttttcttccatctgaaatgacaatattaccagcaagcttaggagcctccacatgcatcctcagttctgatatcttgcatgatgagaaagttatatagatcaggtgcgtttgtttctcttattttactaccctgtcccctctgatctagaccaatgatttgacaccatactttttaatgagatccgaatgcgtggctgctatagcatgtgcttatcaattgtgcttattctttattaaactatttttcatatcagctgttgttttgaagccctcctttcactgagagcatttagtgtcagtaagcaatccatgaatgcataatttctgctccagtatttgtgttttaactaagttagattctggtttagatgcctatatgacactacattcttgttaagttgatcatttaattagtttggtacctccagcaaatactgtaaatatgtttatggaatatgttaaatacttctgtatgtttgcttgccttatattttgtattttttctgtatagggctttgtaaacctgtcatcctttggataggagtgcatgaaaatctgcaatccatgtgtctgaatcatgacctgctattacttttactttatcttcctaagcattaaccttgcttctttgtatccccttaactggtggcttgataacactttgtattatgcattaaccttgcttctttgtatccccttaattagtggctcttggtaatgctttgtacacctgcattacattatagtcaagtattatgtttcataccttgcagtctgcactaacttgtaaaatagttcagataattggcacaagaacgaaactggcttatgcccttgcaaagcaatggtttggaatatacacaagtgcagaggagtccagtgacggctaactgctcagtatgtgaatctgatgttagtggtgcaactgctttgagctctactgctgcttcaagtgatttatatggaactcaagcaatcggttcatatgggaaagttcgttcattgaaagctgtagctgttttcaaatgttggagaagcagatgggaccagactcatttcggaagattttgcaggtgatagtggctccaagtcgtgcataaaatctaggcatgagcttcctagcctctcttctcaagcaaattgatcggttcttgcaatttgacaactttatgcctggttataatggggtcttgactgtcagctgcattcgtacccttgtacgaatagcaaagaaggtgccatcttttgtatgccttgatcacatttttgaattggttgcccctttccgcaacatggacaaaccatggaaagttcgaattgaagctagcaggattcttattgatcttgagttacaccataaaggactcgatgcagctcttttgttgttcttgaaatatgtggacgaagaaaagtctttgcgaggttggattgctagagtactttttgatggttttgtatgctttgctatcttttgacatggaagctgttgaaggagcgacaaagttggctgttcatgtcttgcgtatatgtcaaacaagtattgttcctcacgccaatgatcaaataaattttggcaactctagttaggggtggtaacgggccatttaatttagcctagcaaatttacggatcgaatcaagttagggccggatcataaaacaatacaattttgaactaacaaaattaagggctttgttggtttgtgaagcaagtattagggtcatgatccattaccacccctaactctagttggtcttcttcatctgcttgctggcacaaaggcatacaataacatatttcttcgtcatcaagtgttctgcatattgcaagttgctgctggaaggtccccaacgttatttggtgttccaaaggtcctcacaccccctctggtggtcaactacatcttcagtgatcaacacactaaagatgattcctcaattcctcaaccatcatagtctcaggaaccttccactagcactcctagtgtccgggaggtcttaccgacctctggacccactcaagatgctgataattatcttactgcagtgaaagaaggaatgtggtcaaaattagggtgaagcttactgcatcttccagtaaagcatctgatgctgaccatagaggccattctgatggcgcaagaaatgaaaatgaaccgggtcaatgcagctcaatgtcaatggatgcccccatggctggagcagcaaatgaaccattaaatgtaagcaatcataacattgaggaacaaaactcatgtcacgaccttggatcaaggatgtcggcaagtgttagcaatgctaaactaatggacagacatgatatttccaaggagctacagtgcactgctgattccaggctggatactgttcccaaggatcagttctctcctgccattaatccgccggaagttttagacaaacctggcagtcagcttgaaggtgtctccaactatgatgtaaaccaagctccagagactgaacggagtggaaacagaagagagagaaaaaaacaagaaagataaaaagctgaaacgtgacgaaaaactagataaaaaaatatgacccagagtatctagagaaaagctccttaataagaaggaaaagaaagagttggccagaaagcagctagaaggtgaagagctacccctgaacagcggagagcagtgaacccttcaggttcacaggaagttttgccttcaaggccaccagctccagttctaagtgttgaaacacctgttcgaatctctgaaccccaggtatcaagcaaggaaacagctgtagatactgcacgtgcagcagccaaaccaaggataaagatcagagtcaagcccttggtaagaaaatctgaagggaattaaaaaagattgtagaattgtggccagtctgccatcatttgtaaggattactgtacagcaggaaaaatgcgggtttagttattttgtgaatggctgatgtatcctgtaaaaaaacattgctctgctctagtaatttctggggtaatcgaaatctgagttctagggtagtccatattttctgctgcagttgctttagtatctcagcgcttattatctcacaggttttaagtgtttgttcgatttgctgggcctaaaactaaaactgaaggatcgctgtgctcaatttgtagctgttgatgcattcatttcagatttgaggaggcttgacggaattaactgctgagcttgctcaaacatttttatgacgct

SEQ ID NO: 42515 - DNA, 1050 bp, Zea Mays
tcgcgttcgtagtgccatacaactaacgagcatttcttggaggatgtcagcatcagccaaattgcatgccggacctgaggggcggtctacgagccgctgccctggagcctgaggctgaagatcctcatcggtgcagctcgtggcctcgcgttccttcattcgtcagagaggcagatcatctacagggacttcaaggcttccaacatcttactggattcgcacttcaacgcgaagctctcggatttcggattggccaagcatggtccagacggcggggagtctcatgtgacaacaagagtcatggggacctatggctatgcagctccagagtacgtttctaccggccacctgtacgtgaagagcgacgtgtacggcttcggcgtcgtgctgctggagatgatctccggcctgagggcgctggacccgagccgcgagcgcgagaaggtgaacctggtgaactgggcgaggccgttgctgtccgaccggaggaagcttagccagctgatggacggcgggctggaggggcagtacaaccccaaagccgccctcctggccgcccagctgaccctcaggtgcctcaacggcgaccccaagagacggccgtccatgaaggaggtggtggaggcgctggagaagatcgagtcgtcggcgaagggcaggatggcgagggagccccggaacagctcgcgccgtggcctggtgcagtcccctaggggtgacagcgctaggaacaactccagctccaggggcaggtagacgcatggtctaatcttgaggatgattctgatgcatgtgtaaaggtagtagatgaccacgattcttgttgtcatgacgaagtttacgccgatcatgataatcaatgtagcgatgctgctcgagcatgactttgtagcatatatatatgcgtaaattcaaccattattcttccatggaagtcttgtctgagttgagctagattgcacttacaataccagcaatgccatgaagtgttgtctgagttgagctgcatcaggctgtattaagtactatatttatagatttcgtatcaac

SEQ ID NO: 42516 - DNA, 148 bp, Zea Mays
aggaaggagaagaagaaggactcctccaaacggaaggagaaaaagtctccctcttctcaccacaaagagaagaaggaaaaatcttcttcccacaagccgcatcggaaaggagacaagcacaagaggatgaggaaagtggtctactacg

SEQ ID NO: 42517 - DNA, 1268 bp, Zea Mays
tcatgacttcactccgcactaatgttgagctcgagggtgaagcaggggagccttcttaccgtcgtttagttctccgtctggtttctcatgtcatcaggctatacagctcttcacttgttactgaaagtgaggttttccttaatatgcttgtaaaagttacccgtcaggacttaccattatggcatcagatacttgtccttgaaattttaaggggtttttgtgttgaagcctgcactctgcgcttgctgtttcagacatttgacttgaatcctgtgaataccaatgtcgtggagaacatagttagagcacttgctttggttgtagcttcaattcaggcttcagattcaagcgaagaaactctagccgctgttggtgggatgttcagtagtaaagctaaagggatcgagtggagtatggaccatgatgcatcaaatgctgctgttttggttgctagtgaagcacatactatcactctggcccttgaaggtctcttaggcgtagttttcactattgccactttgactgatgaagctctagatgttggtgagcttgaatcacctaaatgtgaatcaaatagtatggaatgtagtggacagttggcccttctttgtatggctttggtcaattcaacatggttaaccatccttgactctttgtcatttattttgacgaggtcacagggggaagctataatattagagatattgaaaggataccaagcattcactcaggcttgtggagttctccgtgccatagagcccttaaactctttcctagcatcactttgcaagtttacaatcaataatccaaatgaaggagagaagaaaagcatcttgcagtctcctggatcaaagaggtcagaaacttcaatggatcagcgtgatagtattattctcacactaaaaaatgttcaggcactaagaacactttttaatgttgcacatcgattacacaatgtccttggtccttcttgggttctggtattggagacactttcagcacttgatagagctattcattctccacatgcttcaactcaggaagtatcagcttctgtttcaaaactttcaagagatacatcgggacagtacagtgatttccatattctctcttctttaaattctcaggagttgaaccgatatgggatcaaattgctgctcatcatcttgaggatggttactgatgcatcagaaaaagacctcatctccttaggctttcagcatgatatgatttctctgtgggagttttcccctggcatagctccttag

SEQ ID NO: 42518 - DNA, 212 bp, Zea Mays
cgcgccactgacgggagagagagagtgcatcgagagatcggggatatcctccaccggcgtcgtcgggtcatcggtgaccattccgggcacttattcgtgtccccaggaagtccctcgtggccccggtgcgctgagatcagtgggtgcccttcgaattctcactgtcatggggacatcatcgtcatgctgcactccttcaacgttgggcccct

SEQ ID NO: 42519 - DNA, 773 bp, Zea Mays
gtggaggcactgtctcttcaccagtgcctagccatagtgctgctagagctcgtcagcgcactctgctcccctggcgctgctctaggttcagtcggcgtcttcctcacgttgctggtcagcagagctcgcccgactttgacctctgccttgcccttgaccccacttgcccgtccctgttctcgacgctcgagctcacctcagctccgctgtgcccctatcagcggacgtgctcggtctcggccacgtccctgcaccctgtgttcagcctccttcctgcatcagcggacgtgacggctgctgcgagcaccccttccttctccccagcctcaccgtggccaacagcttcaaatccatgggcgagccaccctcttcaccttgctgcgcgccggaagcctctctctgctcgaatcggtgtggtgctctggccatgcgtccactctactcggacctcgagtctccctgctgcccacaactgtcacactagccatcgtggcgtcgttatttcctgctgcgccgcgacatcgtcaagctccggtgcttagtgtcgaagtcgatgcgccgttgtcgctctggcttcctttgtcgtcgcgcggtgtgtggcggtcgtgtccacctccatggcatcaacatctgcatccccggcatcgtcgtcgttttagcagcttgttgcaccttgcgttcgcgccagaagacaaaagggaagcgagtataggtgcatcgtcgatttcatggtttcaagttggatttagctttggtaaactatctgagaatcg

SEQ ID NO: 42520 - DNA, 1719 bp, Zea Mays
cggcggccggcagcggcacgggggcacctgccagcaccgcgcaacataaggggcaggcggcgctgcagcgtcttgtggtgggcagggcgctgggcgcagggcagctgccagctgcgagccgccactgcaatccggcagcgtgtcggcgccgacaagagctcaccagcagcggcaggggcgctcggggccgcgcgtccggcggacggcaacaccagcgcagaaacgattagcgagacgcgagtccgaatttccctcattctgtggccatttggtacaggcgtcggactcccaggaggatgaccggtggcaagaggttcggcggcgggcgggtgccgacggggaccccgtccctcgcgtggtcgtccgtcgtcatcgtcgcctccctcctcgttggcgcctccatcgtccacaacatctacaagcctgacatgaccattccacctgtggagggtgccgccggcggcggcggccaagaaagctgagctacgaatggctggacactgcatgcaagagaggaggctgggcatgggagtagtgagggaccggccatcagcacctttttttttttgttctagaacaaaaacgatattatgttgttcttttctgttttgctaccaaaagatgtgaggctgcatagtatttgcttcgttaggcgctactggtcacgcgtaaccatggtatatgtacgttgattttgttttttctaatgcctaataatcactacactcaaaatgtacgggcttgtggtggcactgcggcgggaggtggttggttggttccacttccatccaggctgctccgtggatgcgacggtgattcacgagcggatacgcaagtgtagctgtggcctgcacttggggccggattgtgacccattatcaggcttaggcctgcgtgcggggtcgtttgccgttgtgtacacatggaagaacggggcaccaagtcttgcttccattgccgccgccccttccgtgcacgcgcgcacggcgcacctatacatatgcaccgccccatgccccgcacgccctccctctcccagcgacaccagagagccgaatttacttcgttctcagcctccgttgcccctcgcgcgcgttacgctgtaccaccaggctcgatcggtcgatcctttgctgggcgtcagagaagcatggcagcagctggcaagtcgtcggccatggaggaggtggtggcggcggcggattgactggcaggccgttgacaggggcatcgcctacctgctcatggtggccacgtacgcgcttcactagagccgtcttggcttcggtctgctccggccggcggcagagatcacgggaaggaaggctttgtgagctctgcttcccggcctcagcgtgagagttcccccgcgccaaacttcattcgtttctcttccactcttcctcttgtatggagatggagatggagatatgcctgtgtctttaccactagaaaaaaatgttgttttttctattgtctttctgtgattattctgtgcaaaatggtcaattgttgccaaaacgatcaatgttaccatggtttcggcttgcgtctatcttctgttgtgattgggttcgacattcagagtttgcacaaggccatacatagcatacatatatggcagagtttgcagcgtgaggaaaactgtcatcgccgtgtattttagcattatacataacataccccatccgttcattccaataggcatataagctacca

SEQ ID NO: 42521 - DNA, 284 bp, Zea Mays
gtcgaattaaattcacctgtttagatttgtttccgctctaatatacaaaatagtgtagaagcattgtgttgtggtttcagaaaccggtggacaataaatttgtgtttgatggagaagcaagagtggactcaatccaaatgatggatcacggagatccgagcaatgaacacagacacggggtttatactagtataggcttacaccctaatccagtgtagtgctaatcgtagtactgctttgagacgtgttacaactagtgtgcttgtgtgtaaaatgaaagtttc

SEQ ID NO: 42522 - DNA, 1281 bp, Zea Mays
cgatgacgttgtgtgcctgtgtatgaaaccgtcctgcggaattgattgcaaagtttcttgatgagaaacttcgagctggcaataaagggacatcagaagaagagctggagggcatacttgataaagttttggtcatgtttcggtttatacaaggtaaagatgtatttgaggcattctacaagaaagatctagctaagaggttgctgcttgggaagagcgcatcaatagatgctgaaaaatcgatgatcacaaaactcaaaactgagtgtggaagtcagtttaccaataagctggagggaatgttcaaggacattgaattatccaaagaaataaacgattcattcaggcaatcatctcaagctaggacaaagcttccctcaggcattgaaatgagtgttcatgtgcttacaacaggctattggcctacatatccaccaatggacgtgaaactcccacacgaactgaatgtgtatcaggatatatttaaagagttctatttgagcaagtacagtggaaggcgtttaatgtggcatgcctatcagttgaaactatctgagatcaataattatgttttcccgtaacttattgctgccatcagagtgtggttttgatgttgttcaatgacgcacaaaaattaagcttccttgacatcaaagattccactggtatcgaggataaagaattgagacggacactgcaatcgcttgcatgtggtaaagttcgggttctccaaaagataccaaaagggagagatgtagaagataaggatgactttgtattcaatgaagattttagtgctcccctctatcgcataaaggtaaatgcaattcaaatgaaggagacggtagaagaaaacacgagcaccactgagagagtgttccaggatcggcagtatcaggttgatgcggccatagttcgaataatgaagacgcggaaggtcctgagccacacccttctaataaccgagctttaccagcagcttaagttccctgttaagccagctgatatcaagaaaagaatagagagcttaatagaccgggagtacctggagcgggacaggagtaacccccagatctacaactatctggcttgacagagctttggaggatcattaaagagaccgctcactttattatcagaaaagacactgtaaattggtttgttttccagttccttgttctttcctgtttttcttctctgggagggagttgtaactgttgcaacgtgtctgtatacgagaacgtctttttttcagtattagtataaaatgtataagcataa

SEQ ID NO: 42523 - DNA, 799 bp, Zea Mays
tgaaaagactacatatagatagacattgtaaacaggtgtgtaagcaaacccctttggatgccacaaacaaataatcgaattctcagcaggccatccatctcagaaaaatctggtcctacccaacacttgaaaccatcgtggatcactcgccgctcggtacacgatctaaacgatgctgtgacgtgcacgcttcgccgaactggtggtgatcatcagagcgcagagcaccggccggcaagggccagccagccaacgcacccccggtgtccagtctccccaggccatgtggtgcgcagctggagcgagatcgcaggcggccaggcgcagagcatcaagcaaagctccgcggcatcaaccagacaaccagcagcagcctgccgcgcccagagagaggcggacgaaagaatcctttcccttttctcgcttcgccaccaccaaaaaaactaagcttgccccgtcgtgcgccgtacctggttgaggatcaggctcttgccctggcgcgcgcggccgcagacggagatgaccccgacggggcccttgacgagctgcagcgccgccaccgcctcgaggaccatcacgagcttgcccttgtcgtcgcagtacacaaggcggagcggccgcgccgccgtcccccgctcatggcgcggtcgatgcaggcgagggaagggaagagagaggtgaggggagagataagatggaagggagacaaagaggcggcggtggctgggagaaaagccaggagcgcgcggctgctaggtagatgggcccctagtgggccttagggttagggagggttttc

SEQ ID NO: 42524 - DNA, 507 bp, Zea Mays
aacacaaagaaaatggaaaagcacgcgcgacccactcccctaacttttcacccatgcggcccatgttctcaccgcgtgcacacacctcagaggagcgccgacgtcggggacccactggccagctgctcgccatcacacctgcgcgtgttgccccactgactagtggccccctcccgtcagatcttcccctcgcaacgaactcaccgagcttggcggtggcgcgcgaatgccgcaagagttgttgcgacgccctggcccagtccatgcctatttacatggccacgatcccagtgccgtcctagtctcctccttgtgcatcctcacctccaccaaaagatcgttgcgtcgtgtgaggaggggagggaacacctgaacccgttcggccgtgggtggggaggcgcgtcgccaccattgtctggtgcttgtggggcgtttgtggaagctcagcgtgccctgaccctgtgcagtggggtcgttgggcgtgtggccgtccagggtgcgcgaatc

SEQ ID NO: 42525 - DNA, 1695 bp, Zea Mays
taagcaaaagatagagtcatagaaccctggcattgacataaaaccaccacatatatcccattggccattcccatctgctgatcctgaccggccgacccgtcggccgtcgccaactcgtctgctcagcccatctgtatcacaattcccaagagcttgagctccaagtacccggcctgcgcccacggccgggcccaggaaccgccgttctgctgcaccggcggcggaagaagagacggatagcgtggggatccggctgatgcgccggcggcaatgggcatttgggattccattctccccggcggcggccggcgcttcatcaagcgcaaggacagcgacgccggtgaggcaggtcgggcactagaggaactgaggggctcactgtacaacgactttcatacttcagaaggggccaggcgccagcagcagaagctttgtggccctattgttgcactgacattcaactttgtggttgctgttgggattatcatggcaaacaaaatggtgatgggtgctgttggatttaacttcccagttgcactgtcattaattcattaccttttcgcttttgctttaatgtctgttctcaaggcattatacttgctgccaattgcttctccttccaaatccactcctttctcctcattatttgctttaggtgctgtcatgtctttctccactgggcttgccaatatcagcttaaagcataacagtgtaggtttttatcagatggctaagatagctgtaactccaaccatagtggtagcagaatttattcttttcaagaaaaaggtttcccttcgaaagcactagcttggattattcctagtgctgtaaacaaaatcctgtggtcaaatttacaacagagtggaaattggacagctcttgcgttaatgtggaagacaaccccaattaccatatttttctttattgttttgatgccattgttggatcctccaggccttttatctttcagttgggatttcaagaacagcagcacaattatcatatctgctttgttcggtttccttcttcagtggtctggtgccttggcacttggggcaacctcggctctcgcacatgttgtgctgggtcagttcaagacgattgttataatgctctctggttatctggtatttaaatctgatcctggattcaccagcctctgtggagctgttattgccctcgcagggatgtcagtgtacacttacctggggatgaaagagtcagccgccaacgctaggagaaattccttaaattcaaggcaaaattctcatttgaagaaggccaaggctattgtagatggagaaaatccagaaacaaagcctatggattctgtgtaaaatgagtgccgtcctcctgctaggtttaagaacctgccattggaagcaatgaggtttggtgagcatacttatggagtgagtttccttcaccaaccagttcatccgaaaacttaatttcactttctttagttcttgcttggagttctattattctttaggcaatggtggtcaaaattgttttcatcgttgatcacattcattgcacgtaggaattatcattgattctagttttaggtaactttggttactgttccaatccatatcctgtcatgctttatttgtttacttgccttgtggattctgttcctcagaaaatagatgaaaggtggctgaaaatggttcctggttgaatttg

SEQ ID NO: 42526 - DNA, 3566 bp, Zea Mays
cgggtcacatcaaacgtttgacttttaaataggagtatgaaatatagacccaaccaactgaactagattcgtctcgtcttttaattttcggctgacaaattagttttataatccgactacatttaatacccggaacggaggttcaaacattcgatgggacatggctaaattttagcgggttgtgcgatacggcccaagtgtggttcagcaacgccgaagaaaaatcagacaagaagcccctccggccctcgccctccctagtccctattcgccgcgcccgcgcccgcgccgtctcgaggtccgccggtctccttccgccgcaagctttgctccattccaccgccgcctcttccgcctccgtcggcaaaatgccggtctacagcatccgcggcgtcaacgtcgacttccccttcgacgcctacgactgccagatcacctacatggaccgcgtcatcgagtccctgcaacaggggaagaacgcgctgctggagagtcctacgggtacggggaagacactgtgcctgctgtgtgcgtcgctcgcgtggcgccgcactttcggcgagttcctgcgggtcgggcgtgggggcggtgggactaagcagttgccctacgggagtcagccgtccgctagccagcagtcagaggactctacgtctcagaagcagcagcagtcgcggtacccagtcatcatctacgcctcacggacccacagccagcttcggcaggttatcaaggagctcaaggctaccagctacaggccgaagatggcagtgctaggttcccgtgagcagatgtgcatccacgacgaagtgagcaaactccatggaagagcacagaacaatgcctgtcacttcctctgcaagaaacgacggtgccctcataataaccatgttgctgagttcataaaaaacaaacctgagcttgggaatgagccttttgatatagaagatttgataaatattgggaggcataagggcccgtgcccatattacatctcccgggaactttcaaagtcggttgatattttgtttgccccttacaactatcttattgatccgggaaaccgtcgttccctaaatggcataccatgggacaatgcagtacttatatttgacgaagcacacaacttggagagtatatgtgcagatgcagcctcttttgatttatttccgaataacctcacagcttgcatagcggaagctcatgaatgcatcaaactgtgttcagcaaagaggtccattgaaaattctgctgataaacaatttgatcctgaaaactatgcaatcctcaaagctcttttaatggcacttgagaaaaaaattgctgagctgttaattggatccgagttgggctacacaaaagctgggagttacatatacgattttctctctgaactgaacattacatcagacacatccaaaaaactgattgagacaattgattgtgcttctttgctactagaggaaggaaattctgctcaaactgggccaggggtccaggcaaaggctgcagtgtctagattggagtcaattagggacatgttagacataatttttaggggtggtggtcaaaaccatgcaaaatattatcgagtaagtcttcaaggacccttagttggtggtgtttcaacccggggctggcgatggaagaatttctcaagttgggtgtgcgctctatcatattaacctcaggcaccttgtctccgttggattcactagccatggaactaaaccttgaattcccagttagactagaaaatccgcatgtcatttcttcagaccaagtctgggttggagttgtgcctgtcggcccttcgggacatgctcttaattcttcttatcgtacgcgtaatactatacaatataaacaagagttgggcactgcaatagtaaatttcgcacgcattgtgccagacggactccttgttttcttcccttcatattctatgatggacatgtgtgttgacttctggaaaaataggaaccattcaaattcagcgtctgagaacacaatttggcagcggatctgtaagcacaagcagccagttatagagcctaggcagtcatcaaactttcagagtgcaattgaggattatagagccaaattacacgattcttcttctggggcaatattttttgcagtttgtcgtggcaaagttagtgagggtcttgattttgctgatcgtgctgggagggcagtaatagttactggaatgccctttgctactccaactgatgccaaggttcggctcaagcgcgagtatttggataagcaggggacaccatctaataaaaacacaaagatgttgacaggagaagaatggtatgtgcaacaagcagcacgggctgtcaatcaggctgttggacgtgttatcagacatcgccatgactatggagctattatttattgtgatgaaaggtttgtgtggccaaattatcaatctcagatgtcatattggctccgacctcatataaagtgctactcaaagtatggggaagtagtccaaggattgacccgattttttcgagataaagcttcttcagatcctttgacactagagccaacagattgtaataattgtatagcaccaccagcaaacaaacacatgcttaaagagaagctatcagatttggctgccagtgcacaagatgagtgcccacaaatcacattatcaggaaattcaaccatgagaagaagtaacttcatgaagttggctcagatcactcctgctaatcgttcaacccttactacaaaacacaactttgtgtctacatctacgaagcacaacctcccagaagaccagctgtcacaggataccaatgttgatattactgttgacttggcaatacaagggcatttgaaggaacataccttcaagtctttagggcttaagaaagctaaaacaatggacagatccaaagatgctgttgttttagatgacgtctcttcaaaattgcctcaaaatatagggtcaagagctttggccagataccaatgtggtggacctacacctgaatcaaagaaaagcactatagcaacagcatgcggaaagaatgatggggcctgtgaaaaaactgaaggccaggaatctaactcagggccagccttcttgaagctggttcaagaaaagcttagtcctgcagagtacacagagtttgttgaatacatgaaggccttaaaattgaaaactatgcataccaaggactcacttgaagcaataactaagcttttttcgtccccaggaagacttccacttcttgaagggttcagggtttttgttgcaaagaaccatcttccattatatgagcagcttgttcgaagacacaataatgtttctagtacatgacaaccacttctgctatgttcgcaggcatattcagtttttttgtttgtgccatgtatttcattaagtgataagtacagttttggttgttttcaacacttaactgtttatcaacggaacattagcagattcttgggtgcatgcaattacttttggaatgtgttatggtgcttctgtaatctaaggaaaagaaatggacctgaaaaaaaaaactctatttaag

SEQ ID NO: 42527 - DNA, 3132 bp, Zea Mays
ggaatgaggtgatgatggatcaactcattctattcaacaaaccaaataaaaatgtgagaagtgagaagaagatgaatcactttattcctcgaaccaaacacacccttaatgttttactctagagcccatgctaaacacgccatgagtcttggtctatttaacacactttaaatagttaataggtctgtataaacttattaaacaatatatatggatctaaataacacactccaaatagtggtactgatgcactttactctctcaacagcaaccacaaaagaaaagggtgcgtagcccctaacccatatgtgtgtaatattgactcgatactgtgtgcctaccacgatttcggagagaccgagacagcggacttccgtaccgcgcgccgccgccaccgccatctatcctggaagcctgctgctctccacgcaaccacgccggcccccgtcaaccggtcgccatctctcctggactcctgctctccacgcaacgccgggcagccccgcctcagctcctcaccctcctcgacaactctccctccggccggtcgccccccacgactccccggggcccgtcgtccgcacgggcacgggctgcacggtggtgggagcagaaccagagcagccgaggaggcacatctactccgggctccggacctccctcggcctcaacccctctggagtctggattctgccatttcataccatctccgcttcgccactgccagcgcgctggccctggagcggaggcaagaggggtgactacaaggagcttttcgtcatggcactgcctaaggacggctgcctcgatggtgccaagatcacagaggtaggaggggtcggctacaaggagcttcttgtcatggcgctgcctaaggacgacagcatcgatggcgccaaggtcgcagaggccatcggcgtcaagctgccagacgtcgggggggccataagggtaaggaaatctccacctgattttatgtcgtttccatgtttgtggagcaatgaaagggacacgactttcggttttggccagttacttttttttctgaactaattgaaactggcgtactgtgttttcccaattggttgtggtttaatttcaggtttttgacgcgatgattcgtcacagagtttcagattcttatgttttgtcacaagggcaagtctttttgctgcttaagtgctagtatgcaaactgtgtatgtttgatcatcaagtgatgattttctaccgtttttgcaagtaatgacttgctgtgaaaccgacatttgggctataagatgtggtattttgtggggccctacagaagcacatagttgaatgtacattacttacctcaataacttgtaatttacactataatgtatagatacggcgtcttcaataaatactgaaatgccttttgtttatatgatggaattagataatgtggttgctaattcgttacacacttacgctattaaatgtactttgtaacttgaactatcttactctctaatcttcggtacattgacaaccatacaatgccaaagaacttgcagttgcaggtaggctttgcctagagaagtcgcttcaatttcaatcctcatagatgccttatatatgaatttaaactttgaagtaacgatgaatttttgactgatcgtttgaggccttccttttatccaattcaccacagactattttgaatagcagagaggccagagaatttgccagtggggcactagctggtgctatgtcaaaggctattcttgcacctctagagactatcaggacaagaatgattgtaggagtaggacctaggcacatttttggtagtttggtggatatcatccaacaaaacgggtggcaagggctttgggcagggaatacaatcaacatgctccgcatcattccaacccaagcagtcgaactcggaacatttgaatgcgtcaagaggagcatggcagaagcacaagagaaatggaaagaggacggatgcccaaagatacagcttggtaatatgaaaatcgagcttccacttcacctcttatctccagttgctattgccggtgctgctgctggaatagctgccacactggcgtgccatcctctcgaagttatcaaggatcgcttgactatcaaccgagaggtttatccaagcattggccttgccttccgcaggatctataagacggatggtataggtggtttctatgctggcctgtgtccaacgctgattggcatgattccttacacaacatgttacttctttatgtcttactgcaagcacaatcagcttccctctggaagtagcaaggaagcggttgatggccggcgccctgcaggggaagtgcccgcctaacatgattgccgccttgtcggaggtgatccaggaggagggcgtcatggggctttaccgcgggtggggggcgagctgcctgaaggtgatgccgaattctggcatcacctgggtgttgtacgaggcatggaaggatgttcttctggctgacaggaacaagccacgctctttagcgaactaaacaggccgtccttgagcaatggaggcgttgctgggattcctgatctattttcagttttggaatcccggctgcggcgagtggggtacatagggcgcgtttctctcttttttgattgactgatgagtggtaagcgttttgttgtgtcatcggcacacagacaaacatcattaatgtgtcaaaaaactaagcgaaaagacaaacccttctgtatttcctgagtggaaagatggggaacctaaccctacctggagcctctgcaggaaccttttccttcatctaccaatcagatacagggagcttcaggttgacagatcgcaccaactgaaggacgaacctgttctgcgacaacaagcaggataagctgaggaacctgttttgcaagctaagttgagatgtaatttttgtcttgggctgggtggttatagtgttttctttcggcttttcttttctttctgcctcaagtctgaagcgaagtttataaattatttttcctcggctaatataatttgggtggcaaagcttttgccgcttccttaaaaaaagagtggtaagcattttgttgtgtcatcaattctgaattcttgtgctgttataagaaaaaaggatttggg

SEQ ID NO: 42528 - DNA, 3145 bp, Zea Mays
ggggtcatggcgggtagatagttactgctcaaggtcattgtttcaccatatgccacgacgggcaggcctcggtagtaatatctcgcagccgccgtgaactcaaccttgtccaaattcatgatactgggggccgatcagtataaattgagtattcccctcattccacccttttgttacgaacctagtccaccctcagccatcccctctcgtccaccgtagctcgagttcatcggatttccctgaaatcggtcaccatcgccgccgtgagaagccgccccgtggccataccatctcaggttagttcatctccctctgatccccgttttagaacctctctaacctctagatgcttacggtcttgaccaattgaacgctaccgtagtatagtcctaggaacgtcgtgttgtcacacgggaacgtcgctgtggacacccctcacatcgaccgactcttccatgccttctccgtccaaactcgtgcgagcaccatgaccctagtgagccactagtactttccaagtcgatagattgaattctaccacattctgtaacccggaacaggctcgccggtgtctcggctccgccgtcgtcgcggacagacacgaacctggggtagactaactagattacccgtggggtatgctcggatggcctccaagagggtgtccctgtactcgctaccaccagaataggtcgccggagatgagtccgggcgactccggccaggtgctcgaccggcgcacggtctaggacctggagttgtaaaggttagggaagagaaggacttcggtgaaattgtcagtgacatagtaaaatagtgccatgggctcttcactagttgtttgaaacatcatgggcctttgtgcaaagtcgccagggcgggcgcaggcgcgtttccctgttcgtgggctgatttgggctgaactcagcctagtcctgttaattattttctcttttctttttcctggtagcttgtgaaatccattaaaaatagtaaaaaagtgataaaaacatgggaccaattttactaggctcctaaaattagttagcatttaaaaaaattattccaagatttttatttcaaaccataaattatgtagcatttaaaggtacttatgtagagcctcttggaattttagaaatattttaatagtcccaaaaatcataaaactttttgggtagacttaatatgtttgttttaaactttgattgaagtttgaacttttttagacactgtttggccaggaaatcaatagtcagtctaaataattaagcccttttactacccagtgagttcaagggtagttttgcaagtgaaacttgcaaatcatgaacttgctaaaacttggtatcctaagaagattagttgagttaatctttaagggttatctaactaggaagtcctgatcgttgataaacattgtgaaggaaagctatattcaagacactgctttctatattcttgcatatccatgacatagcatcaacattcatatatatatatatatatatatatatatatatatatatatatatattattgcgtatacaacacgaagaagagtctatagtagaagaagaagttgctccttcgactgagaatcctctcgtggataataaattttacttcgacatctgtggtgaagtagctactcctacaacacaaggcaagcctcggtgcatttacctttccttgtattttaaagttttattaactttgaatgctgcattatgtaataggaatggtgtggtaaactattgttgcatttccttccttgagaaattgagtatcattccttgttacctgatgtattcaaacatgttttaatgatgcttagccttgcttagaaaacaaaatgttttgttttaaaaaggtgatgcttcacactagaatgggagtttttacaaagaaaacatatgatggtgaatccatgatggtcgtgatggattcaacacatgaaaagagtacttctgacaggtaccaagttttgggttataagcttataagatgagaccgggtgagtgacttgcatgagaagagagtctcggtgtagtgtctccatctaagtcatttaaggtctgagccgatgtaggcttgatgatcgaggacattttaactggccatatgtcccgtcgtgggtaagctttgcctcgctcgaaccaataccaaaaaggctaccccacaatgggagtggagagatagcaagagtagcgtgtaccctccatggcaagaggctggacagtagagtatttgtgctctcagttagcttgaacccgttctggtcttgagaaacccgggtgcaagtggacatatgcaagggttaaatgctacatatgtcgtgtggtaggagatccccagctgggtattgatcgattcggatcgtcgttacttctcggacatgaagacttggtcactgacctacaccgtagtgacaagtaaactcagggtgtggcaaaagatggctagtgtagtgtcacacccggttttagggtcaaaaccgaatgcatagcatatgtgttccaggatccattttccacatatatgttgacgtcacaagtataatatataaaaaacaatgcaataaaggcgtaaaagggagtatagtaactttattacatcatccagacataagagtcttaaacagtatattatcaaagtacaacggaaatatcaagggcaatcttcgacaggaagatgaccaacgtgtcgctagactcagtactcatcgtcaccatcgtcaaagtcttcctcatcagattctgatcaaaaaattagcaagggtgaggtcacttacggtgggggctcagcaaatgggaggaattatgcaaggttaacaaggtagtctaaggttgtgcgataagcattttagtttgtcaatattttattaacaacgcctaacttactaattgaaagtgtatcccaaaaatcccaattaattatgagcatatgattatatcccaagatgaacgtattttactttagcccctgattttgtgtaagattcatctaggtattttccagttcaaaagaaataaaaaacatgccttataattttatgtgctacccccagtagtctatataagttcattgtgatctaatttctgtagcgatatgtaatttttgtttgtatatttttgagtctgaa

SEQ ID NO: 42529 - DNA, 3363 bp, Zea Mays
ccgatctggtttatacgaacgtaacaccgaggaactacgatccccaacggcccaattcaacccgccccacgcgacgccgaccgcagatccttcatctctttcctccctcgtaggcgaacccgactcaaaccctagccccctctccttgccatccccgcccatggatcgcgatcgctcctcacggcgcactcgcaacgacgacgggcaccaccgatcccgcggccgggacgacgaccggcaccgccgccgtagtcgccacgacaccgaggatcaccagcacgacggtggagacgaggaccgtcgccaccgccgccaccgcgacaaggacggtggcagaggcggcgaggatgaccgccggcaccgtgaccatcacgataaggacgacagccgttgccaccgctaccgtgacggcggtgacgacgatcgccgccgcgggaaccgacgttccgtttccccgtccgagtccccgccaccctcggcgaagcgggaccgctcgtctagccgcccccgggagcttgtcgagcgccgcgactccaccgaccgcgagccgcggtcgccgtcgcggaagagaaaggggcacgagggcggtggcgacggggacgagcccggccgcgaagggggcaagcgggccagggcctccgtagacccgcctccacccaaggaggagaggcctaggcgggagcgccggaggtttgaggatgtcggtgcgaatgggaagaatggtgatgtgagtaagtcgagtaaggaaatctcatctcatgggcagaagggggagttatcaattaacggagattcacagaacggcaatgggcctaatgctggttctcagcaactgctcagtgccgttcctatgccatcttctgttcccattccttcaaagccaaagcaaaaaaagctttgcaactgaagaaggaactgtcagaaaaactcaagaaattacctatgcttaataataagcttggtacatctgttactgctacacaagtttctaaagaagaagcaaaaacttctgtatcagctgtagatgcacaactcttttctaaaggagaagcaaaacctactgatgtttctgttctgccaactagtaccatctctggaacgccggccgtaggtggtgctatcggtattccaggtcttacgaacattcccaatcttgaatctgtgaagcgagcccaagaacttgctgctaagatggggtttcgccaagatccacaatttggtcctcttatcaacttattccctggtacatccactgaagttactgtgccacaaaggcctgcaaaggctcctgttcttcgccttgatgcccaaggtagggaaattgatgagcagggaaacgttatcagcatgacaaagccaacaaatctgagtactctgaaggtcaatataaacaagcagaagaaagaggcttttcaaataatcaagccggacttggactctcttgcaaaatcaagtgttcattttgatgaacggatgggcataaaccaaaagaagctccttcgtcttaaaaggccaggatttcagttcgttgaagagggtaaactcactaggcaggctgaattgcagaaaattaagagtcaatttggtgaagcgcaagctaaagagctcaaagtaaagcaagcccagcttgctaaggcaaagacagaagtagacatgaatccaaaccttattgaggttgctcttggtgtgagagctccaaaacaaaagcagaaggaagagatccctgaaattgagccatgggatgcaaaaattttactttctgccacatatgaggatgtctctgtggagaaacttaatttggacaagatcaccatatatgttgaacatccagaaccatatgatccacctgctgagcctgcaccaccgccgccccagccactgaagttgactaagaaggagcagaagaagttgagaacacaaaggcgtcttgctaaggaaaaagataggcaagaaatgattaggcaaggcctcttggagccacctaagcccaaggtcaaaatgagcaatcttatgaaagtgctaggctctgaagctgtccaagatcccacacggatggagatggaaataagaactgcggctgcagagcgtgagcaggctcacgttgaccgtaacattgcccgcaagctcacaccatctgagcgccgtgagaagaaagaacggaagctttttgatgatccaactaacacagtggagactatagtttgtgtttacaagataagagacctgtcccatccacagacacgcttcaaagttgatgtgaatgcacaagagaataaactgacaggtgctgcggtcattactgatagtatcagtgttgtggttgttgaaggggggaaaaagtcaatcaaaaggtataataagctcatgctaaaccgtatagattgggctgctgctgttggtggtgatgaagacgcagaagcagaagcggaagctgacaagccagtgaatagctgtgaattggtctggcagggtagtgtggcaaagcccaccttccacaggttcactgtacataactgccggagtgaatctgcagctaagaagatattcgttgatgcttctgttcctcactactgggatcttgctgtcaattcctcggagggttctccctgagcaaagcacctgttcagaaccttggtagctactgctgatctttgctggctacatgctagttatgtgtggccagtgttatagcgcttgttatggtaagacccttaccacgagtatctacatcaatggcctcatcagttgaagtactgaactcagtaatgcctggtgttagggggtgtttatccctccattttatttcatttgtccctagattgccaaatacagccatatttgtcaatttaggaactaaaatggaataaaatgtagggactaaaaattagtccctataaaccgaacacccccttaatctgttgtgaacatgctatttcagagatgttattgttggattttcctgtggcctagaaactgttatgtgagcaactgttgaattttgcacgctcagcgtgcatttggaataaaccaattgcatcaaatgactgcgtgtatttagtattgttgcggtgtgaattgcgggcagtgcctgcacatcaattacaaattcatcaacttgtgtggatgtttataatggttcatcaattttaaaagtataattctggatcaataaacttttcaagctcccttggctcgaatttttttttcaagttgtttaacgtactcactcggtcctaaaagaccatctcaagttgtttaggcacacaattacaagttcatcaacttgtgtggatgtttataatggttcatcaactttaaaagtataattctggatcaataaacttttcaagctcccttggctcg

SEQ ID NO: 42530 - DNA, 1104 bp, Zea Mays
caagctttcaatgcatatgagactcagggcacaatatccctgttatgctgcatttcatgatgaagagtggggagttcctgttcatgacgacaagaagttatttgagctgctagtgctgtcaggagcattagctgaactgacatggccagcaattctgaataagagagacatattcagggaagttttcatggattttgacccagtattggtttcaaagttaagtgagaagaagattattgcgcctggaagtcctagctgctccttgttatctgaacagaaattgcgtggtgttattgaaaatgcacgtcaaatactcaaggtttgtttgaattaaatcacaagtatcatagaggaatttggatcatttgataaatactgttggagcttcgtgaaccacaaacctatattgagccgattcaggtactcccgtcaagtgcctgtcaaaacatcgaaagcagatgccataagcaaagacttggttcgaaggggtttccgcagtgtcggcccaacagtcgtatataccttcatgcaagtctctggcatgactaacgaccaccttatctcctgctaccgttttgctgaatgcgcggcctcctctgctggcgctgctaaactttctgatggaagcctagcaaattcaagtgatagcagccatggcacggcagagcagaagatgaacgggacgaatgggctggattcaggtcttgaactctccaggactatcgatgagctcagcatttcatagcggggtaggagcggtgctgaagcgatatggtgttagtttgtgtattttatgtgctgtagtataggtgtgattcggcgacctttttctgtagtttttccactcgtcaatgtaggctagaaaaatttttagtcttcggtgtgtcaggacccttgaacgacagcagggtaccgatgtactaccttcgtccggagataattgtctatctcgtattttgaggtgcttccttcgtcccgagataattgtttatctcgtattctgagaagttaaatattttaaatttcgactattttatttaaaaataataatattaacatttgtgtcacgtcacaacaccttggtttcccaaggtacaaaaaaaa

SEQ ID NO: 42531 - DNA, 2992 bp, Zea Mays
tccattggtcagtgtctccccgcccgcctctcccatcttcaaaaaccacccacggcccgtcccctcgacctccccgaaaccccacttctcggatcgagactagggttagggtttcgtcactcccgccccgattcgaaccaatccgcctaggcccccgccgcgccatggccgccggttccattgtggtggacttcccctccatgggcgccgccctctgcttccccaacctcgaatcactcctccgagactccgcctcgggtttcctctccgccgtctccgccgccccggcccccggcgccgccgacctcaccaacttccaccgcgtcttctcgcgcgtcctcagcacctactcagacccgccgctcgaggtcgtctggttcttctccgcgctctccttccacgaccgccctgacgacctccgctcactgctccagctcctctccgccttcgccgcttcctcgcccggggccgccaagccgctcgccctcctcgcccccgtcgtctccgagcttttccactcagataagccgcgcagggagaccgaggccgtcgtcgaggctgtcctcagctacatcagcatctgcagcagtcgccccgccccctcttcgactgaaggcaccaccgccgacgctgtgaggctgctgccggctttcggcgatcttgtcaaggtgtggagcgtgcggcactcgagggagaggtgcccgttccaggtgctgttcccgctcgctggtgacgaggccaggcgggagctcatgaaggaaggctgcagcgttgactacctcgctggggtggtgctggttgaggcgttccttctcaggctctgcctcaaggtgcagaatgcaacaggggtgcctcgctctgagctgcagaaggagctcaagatctgggcagtcagctccatcccggtcttccagagccaccaattcttcggggtcctgctgaacatgctcttgaactctccgctgcctgtttactctctagtggtatgtgtttcctgactaatgagcaatttgagagcatgacacaacaagctagtattattatggattcactgcttattaacaaaattataagagtattaattaagcattcacaaggcatgtggtagttgtatggaccataaaaatattaacaaacatggcaaatagcttataaactcatttcatgaattaagaaacatgagtcatgatcatgctttttcattacctgttctgtaaactagttatttacctttgtgaaataagaaatgtgcaacttgttgccttgttcttcaactgtgcttggaatcaggaatctttcctaatttgtggaaactaaagaggagaacagaacggtatatgactattgtgtatcgcaaagctggtgttactatagcattttgctgtcatcatctgcaaggagcatgatttaagatggagttgtgtctcatctttgtgatatgcaaacaggttgaagcctgaactgtggtttgtcctagtatacccttttgtttcggatcatgattatgccttttttatgcggaaatggcaaaataggggtttatgtacaattttacttggttacgtatttgatcactcctataaagttgccagactggttgatttttccgagtagatggctacttcaattttcactgtttagaatctaaaagtatcatatgtcagataccagaccaggagtaacgcctttattgactgagttttgtcagtggcagtttcagttttcttgactcatgtaatttgtgttgtgtttggtttcttggtgactcagagcgctgatgatgaaatcttggtgagggatgttctatatgattctcttatcctggtggattattcattcattaacaatggtgctggagttgatctcttgcctgtatatgtgtcgagattgattatcactcttgatgctgtcaatgatgccaggaggaaaggtgatcaaggtagagcagtgtcatttattaatgccttctcaacctcaaatattcccaattttctcatcaagtgggctacttgtcaagctggctctggtgcactcagcaaaccaatttgcaatacgccccaagctattctcaaaatgtatatgttttcttttcacagagtggcttattgaccttgaagataaggggctcaaagtgtttggagattacagttcttgggttatgaggaggtttgtttgcaatgaggtcaagaatgggtatgggaacatggttcagtcagatgcagaccttttctttgttgataaacagagtggtagggaacttatggacaccaaaggcagcgaggatgatgaagctgttgaggagatggagactgcaggtaatgcttttatggctgctgcccagtcaatgaagggggtaactaacggcataaggaagaggaagagctgcggaaacgaagatgcagctgctgtgaagtttgtgaagtacaaggtagaagacagctcagtgaagggctacctgttagcagctaatggcatgagcagtggcagtgaggtagagaacccacagtcggatgatgagatggaagaatccgactgatgcatagaaaatgacagcacccactaatgcttactttggggagagttgctttgaagagtttcttggacaaccgcctttttggagtctggaccagccttgtttcagatgccgcttcttaatgatgtcgtgcagtaccctgttctaggccaataatctgcaggagggcccctctccagctaggctttttttcggatatagtggtaaccgttagctgaccctacttgacaaggagcatgtgatgtctgctatgagctgtatcgtgttctttgttattataatgctatatagtagagacctcaatgtagtcttgcttcattttgcttttgtaatagatgggtacgttgttgttatcccacggaaccagttggaactaatgaactgttaacctttcctgtgtatagcgcctttctgtgcttacttgtgtatggtgtcttttttgtgctgacgaggaagtcc

SEQ ID NO: 42532 - DNA, 1059 bp, Zea Mays
aacttccgaaaaagcggacagagaaaaagaatagatgctcgaaatgttcattcctacccgtcggcaatggcctctcactcgccgtctcactcctctcgcactagcgctcgcttctcccaaaccctagctcctcctccgtagctctcagctccagctccagctccggcgatggcctccgtcccgcactcgccgccggtgatccgcaagtcgggcaacctaatggtgttcgtcacgccaccggcggagcccgagagcccgaggtccgagttctctacgcccccgacgagtccccgcgccgaggaatcccctgaatcgccgccggcgcagatggcccctccgcccacgcctatttattcggtttcggtctccacgccgccacttgtcaagacggtctctccgccacttcatgcggagaagctctcccgaccctcgctggtccaggtgccgccgttgcagttcgcgaaggtgtcggcagggtcggacggatcgctgctagcgttcttctgggacgcggttgcacacgtgcaaaaagcacactcgaggttggacaagcacatctcgagatggttcgggctggaccagtccaagtaccagtgggcgctcaacgactattttgagaggaccggacaggagatagattcgagcacgctggagcacagttgtaaaaattcagaaagcatgacaaagtgaattatttatacctttatgtgtgtaactaagctgatgccgtgtcaagctgcatataccttttggtttcatgaagattgaggcctccttttctgcatacggaagcgcttggttatttccatgggataaattcctcgacaacgacggggatggaagaaaaagcttcaccgacatgactagtttggcagtgaggagagaaaaatcctttggaaaccaatccatggattttagatgtcaccttattttcggatagaatctcccctcttcggtgtactctcctcttcggtgtactctcctctcggtgtacttatttaacattgtttgggaagcaataagctaaatgcccctcttgaacaaaaaatacataaaaaa

SEQ ID NO: 42533 - DNA, 933 bp, Zea Mays
ccgcctcgtggatccccgttgcctcccacctcgtgcctaccctaacctcgtcaacgcctccgcctactgctccaatggcgtcgccttcgactcatcgcctcccccgactcatggttcgccattgcttcccgtatctccccaagctcgccactattgccctcggaggagcccagatccagcggcgggctcgggaagccgacgctggcgcggatggaatacaaactccagataagtggaagcaacctcctcactgattccagcgttctggtcctcgctgttccaggcttcatgttgcagtaagatacctccccctcgattgtaggtgtcaactaacacatgaattcttgatttagatcgttttcccccggactatgctatgtcgagtaaataattttgattctttcgagcattggttccttcatgtgaagtatgtgaggtaaagctagtatattattctttgattgtgtaggccatgtttgcctatttttactgtttaaggtaacttataatttctgattgcattacgttcatcattattcatggtttccttcaggatttaccttcaaagatcataaaatatttgggccagaagaataggtttagctttagctcatgaacgaccatccaccgttaggagatagaatttagcatatttttcggtaatagcactacttttcttggggatagttggcctcattttgattctaaatataaacttgaatattgttatatgttgttttgttgatatacttttgtgggctctttgctttaagtggttgtcttcaatcagaccacatgtctggaaatacttaagcagtgatgggactatcacatttagtatgctcaattttacattgttgttttctctcttttttataccttgttttagtgtgttgcgcaatccacccatctcttctttagagtcaaaggcga

SEQ ID NO: 42534 - DNA, 1235 bp, Zea Mays
taagggaccaccttccatttccatttcagggtaccactaaacaatgggggttctctggtcatagaacagactgaagctctggtatcagttgatgtgaatggtggtcacagtatgtttggtcagggaacttcacaggagaaggctattttagaagttaatcttgaagctgcaaagcaaattgcccgtgagttgcgcttgagggatattggtggcattatcattgtggattttatcgatatgtcagatgattcaaacaaaaaactagtatatgaagaaatgaagaaagcagtagaaaaggatcgatcaacagttggtgtttcagaactatcaaagctaggtttgatggaaataactagaaaaaggctaggacacggacatgtgtatcgcaacatcctctgtggtggctttggcgaccaggtccgaccaagcgttactttcatgatcagtgagccatgtacatgctgccatggtactggtcgtgtggaagctcttgacacatcgttttcaaagatcgaacgtgaaatatgtcgacgtcttgctgcctctcgacgaaaatcagaccctgagaaaccaaaatcatggccaaggtttctgcttagagtggatcatgagatgtgcacgtatttgacgtccggaaagaagacaaaactaggactcctgagtagctcccttaaagtgtggattttgttgaagattgccagaggtttctcccgtggcgcttttgaactgctaccgtactcggagaaggaaaactactctatggagaaagaaacatcagagttgccccaaaaagagtccaggcccaagctatctgtctttcctatcaagaagtggatgagccgggccaagcgtgctaagtgattctcttttattagcatggggccttcctttgtattcacaacttagaatgagtaaagattcaggaagaggatcattcttttcgttcatgaaatctcagcgtcggatatctagagatctctcgaccagcttttgtttacatttttttaggaattcagacaattccatgtttagtttaatccagaaaattttcagcaaaaatgtgacgatatatataactgtgcaaatctagtacccttaatagtagtagatctcttaaatggttcttagtgttaccataagatacataatatatttatcatgagaagactacgattactcttttaagttactacattgttatgctccttaggatttgcttatgaggttcctcgtga

SEQ ID NO: 42535 - DNA, 1880 bp, Zea Mays
ctccgcctccgctacctctgacctctccaatccgttactgctcaaggctctgcgctagccgcccgcgcgtccggctccagcctctgccatgggatcagccggtgaggcactcccgccgccggccagtgagacgcgaccatgggacaactattctcaggccaagctttccacagtcgctcttgcgcccaaagggaggcgtgcggcgtcagacgcgccggcgggaggggaaggcggctggagcgggcaggacgagaagccggcggccgacgacgactggcttccgatcaacgcgaggaggaacgccaagtggtggggcgtgggcgtcacggtgctggtcctgtcgtgggtcatcacggtgtacacgctgtggcagatggtggagatgcacgagtgcgtgccggggaagcggttcgaccggtaccacgagctggggcagcacgcgttcggcgagaagctgggcctctggatcgtggtgccgcagcagctggtggtggaggtgggcctcaacatcgtgtacatgatcaccggcggccagtccctgcagaagttccacgacatggtgtgccatggccggtgccggcgcatcaagctcccatacttcatcatggtcttcgcctccgtgcacttcgtgctctcccagctccccgacttccactccatctccagcgtctcgctcgccgccgccgtcatgtcggtcggctactcggcgatcgcgtggaccgcgtcggcggcgcaggggaaggcggcggaggcggaggccgactacagcctgcgcgccacgaccacgccagggaaggtgttcggcttcctgggcgcgctgggcgatgtggcgttcacgtacgccgggcacaacgtggtgctggagatccaggccaccatcccgtccacgccggggaagccgtccaagaagcccatgtggaagggcgtcatcgtcgcctacgtcgtcatcgtcgcgtgctacctccccgtcgtgctcgtcggctactgggccttcggcaacggcgtcgacgagaacatcctcatcaccctgaaccggccgcggtggctcatcgccgccgccaacatgatggtcgtcgtccacgtcgtcggcagctaccaggtgtacgccatgccggtgttcgacatgatcgagacggtgctggtcaggaagtactggttcacgccgggattcaggctccgtctcattgcccggactgtctacgttgcactcacaatgttcgtggccatcacattccccttcttcagcgagctgctcagtttcttcggtggattcgcctacgcacccacgagctacttccttccctgcatcatgtggctcatcatctacaagcccagaaggttcagtctctcatggttcaccaactggatatgcattgtcattggggtgctgctgatggtgctatcaccgattggcggacttcggcagatgattctgaaaatcaagacatacaaattctaccaagactactctggcctaagccataattaacacgcgcccatcatcggctgaaactggtttctaaatctcatcgatgccatggaattccaaaaaaaataaaacattctcagagaaagatacatacatgtacagtctcatgactaatgatgatcagtggtcttgttaatttgtcttgaaccatgaattggttatggattaccatatgcatatatgtatcagtattgtaggggaaatgtttgtgtgtgttcactttggactttgatagagtagcttgtagtgggacattgagaaagatgcatgggccttacatggtctatgttaaatcccatccccccctgatatcattgtatattcttttcttcttcaaatgattcttcgtaatatattattctatctgaaatcaaattattgttcactctag

SEQ ID NO: 42536 - DNA, 574 bp, Zea Mays
gttcaacccagtagttttgataaatgatgattgatatgtggtgtcctatgacacactccttccacctatcgtacagtgagatgacaatcactcttgaggatgtagccatgaatcttagggtttcaattcgacgcaacatagtgagagataatatggagttagtaaggtgggagggatgtgtggatcatttcttaggacatccttttctagatgttgaggtggccaagaagtggtacacgagtggtggcatcttgaggtggcttaatgagtagtttgaagagtgcccactggacgcataccaagtagtcgtcaactactatatagtgcttgagcgcttcatatgtttagtacgaccctcttcttgaatggcacgaggatacaacctcgtggatgtacaccatatgcttgtggagttgggatgatgtcaagaacctaaggcaagatggggatccacaatgttttccttcatttattgtcagctccgtgaggcttgtcgatggcctagaggtgcctagtccactcagctgggatgcacaactatttttttagatattacatctttcacatgaggagg

SEQ ID NO: 42537 - DNA, 778 bp, Zea Mays
atacgaagtgctcgaaagggtgttataaacatgttcagacttcagagtgtaaaattgtagatttttggggggtaatatcattttctcctggcaagatgtggctacgataatctaaagccatcgcacggcaaattggccagcggcggcggcaggtggtggtgtgagcctgcgaggcttcctacctgcgctggaagtttaggtgcttgatggcgaggaagaagagaaagacgaagaggccaatgatggcaagatggaggcaggtcaccagcacaaagtagcgatcctgcaggcccaggtacccctctaggaactcacgcaccgtctgctccccgagccccggcaccaggatctgctccgtcctgtctgcgagctgtgagaacattagcccataaaccgtccatgccgccggatccgcccagtacacccaccgccaccacacaggcatcatctgcagcaaatttactcaactcgtcagccgattcagatggggggttacctctctcacgattatgaagccagagaagacgttccaaaagataaagatgaggaacgacagccccatggcgatctcgatgttgggggtcagggccaccgtcatcatcccgtatagagtgtagtacatgaagctcatcacctggtataggaagaaccagaagaatttgctcgctgtcacctggaacccaatcattgggtacacgattgatgagaagatcatcacttgcaccaacatgtaagacaacagttcgtccagtgtcaaccgtctttcgtactgttctca

SEQ ID NO: 42538 - DNA, 299 bp, Zea Mays
ccgaagcgaatcggctccctttggtcttcactaaaatagcctagcttcagtaacttagccatatcgcctttggtaatagtagacttcccaaactctaagtggctgggtttagatggcgttgcaccgtactcatcttcaaattcatcttcttcaacgtcagcttgttttgcttcggcggcagatatatcctctgatgttgccagcccagaccgcctcattgcttcggaaattggaacagtttcagtggcttcggtctcatctccctcacgttcaaccctggcagtggaacacactctagc

SEQ ID NO: 42539 - DNA, 1418 bp, Zea Mays
attttcttaaaaaaaatctcaatcgcaacaacacaaaaaagacccgcaatatcgattagcgagagtcgttcctccaccaaaccaaccaattcgcttctccgtcaacttcacttcctcgtcgacgcctccgtcccaccaaccatgccggcggccatggcggctgcggcggcgcagaggctcctcgcggcgagcacgaaaatcatcggcgttgggcgcaactacatagcccacgccaaggagctcggcaatccggtccccaaggagcccgtcctgttcctgaagccgacctcgtcgtttctccacgctggtgtggccaccgccgccgtcgagatcccggagccgctcgagtcgctacaccacgaggtcgagctcgccgtcgtcatctcccggcgtgggcgcgacgttcccgaggcgtccgccatggactttgttggaggttatgcacttgctttggacatgacagcaagggaccttcagtctgttgctaagtctgcaggccttccatggactttggctaaaggacaagacaccttcaccccaattagtgcagtagttccaaaatcagctgtcactaatcccgatgatctcgagctctggctgaaggtagatgatgaactaaggcagaaaggaccgacaagcgacatgctattcaagattccttttctgataagctatatcagttccatcatgacattaatggagggtgatgtgatactaacaggtactcctgagggtgtgggtcctgtccgagtaggtcagaagattacagctggtataactgacctaattgatgttgagttcgatgttcagaggcgcaatcggtcattttccacatgatgcaataagcaagaaagtaatggtgaatacaaagtgcagtactcgtcctcgaccttgaatcgcattactggacctggagccattgcagatagctcttgagccttaccttgatttaatttacctgggttttgagagactatctatgaatatgctaactccagcgacttgaaacagcttccgagtggggtgcacggccgatctatgtaacgtacgcgcataagaaatggtgtcctacaaaatgccttccacttgcttgaaacgatatgtagatggacagcgacgacgaacaccttaactccctctcgctagatatcgagccagcttagttcggttcgactgagcttgagctgactcgttaaggtaaagagatgacttggttcgttaaacaattgagtcagagaattagcttggctcgtttgcaagtttgggctggctcgtttacctcgcgagtaaaaaaatacatgtatatataaaatagtatagtcaattgctagttaattttatacaaatttaacattagaaaagagtaattatactcataatttcatatatattacatcttttaaaccctatattaacat

SEQ ID NO: 42540 - DNA, 435 bp, Zea Mays
tgtgcaccagataacttaacaggatccgtccgattgccccaaggacatcggataaaccacttataactaggaccgcaagattaagtaacacaaatcacacaccaacatttttgcagcggaaatcttattaccaaatttttacaagttacaaaaattttacattattttatcggagtgattacaaaagtataagtttgaaatatatgctagctcaagttaccatcctcagtaagaagtatagaagagttacttagacttataagaaggtcgagcccaccggcacttaacaccaccatcagcagcacaaaactataacctaaaaaacaatagggaataaaaccctgagtacagaattactcagcaagacttacccgactaaagaaaagactctcaagggtatgctggctagagggattcaaggtatggcttatcaag

SEQ ID NO: 42541 - DNA, 2179 bp, Zea Mays
gtcccaggcagccagcgcaggaagctcaccgggaagccggtgcaatcacacaccacacatccccgctacaaatcccagcccccggtcgacatccctcccactcctcccccatgcgcaccggcaccggcaccggcagctcaccgatccccggagccgctactataagtacaaagcttccccggcggcggtccacccggccatggcggcagtcggagcgcgcccagtgctgtaccaccaccacccccacccggcgccggcgggcggcgcccccgcccccatgtcctcttcctacttctcccgcggcggaggcagctccagccccgcgtccagcctctccgccgcgcacttggacatatccgagttcctcttcgacgacgccagtggtggcggtgcgatcagcgcaggcggcgctgggagcgcggcggcgccggagcggccgcgcacggaccggatcgcgttccggacgaggtcggaggtcgaggtcctggacgacggctacaagtggaggaagtacggcaagaagtccgtcaagaacagccccaacccaaggaactactaccggtgctcgacggaagggtgcaacgtgaagaagcgggtggagcgggacagggacgaccccggctacgtggtcaccacgtacgaggggacgcacaaccacgccagccccagcacggtgtactacgccagccaggacgccgcctccggccgcttcttcgtcgccggcacgcagccgccggggccggggcttgcaggtgtggctgaacgctccccaggcaggaggcatcagtcgcagcccttggctacgccggccgtgccaccaggccctagccatgtttgcagactccgcatgggtaggcactgaagcaaactagtagacctttttggctcttgtacacaaactgaactatatgaaactttggtactacttttttttccctgtcaaatataccccctccggccttccattcatcaggtatgtttgtatgagattgcaagcccagtgtgtgtgtgtgtgtgtgtgggagttacaatatacacgctgacacaccaacaccaaactacacactggaccctggagtacaaaactgtcatctgatacagcgatgggtagagaggccttgaatcatgaaggttacagcgcgttaattttagtgatcgtctcagccgcttggctctttacaagctcgactatcatacagcattaggggcatactaagtgccagggggggctcacggtagagatgccgattggagagatttttagccaacagaaacaagagcggggttgagcgccataaccctccacggaaaacgcatctaccatatatacatgtacaattcttgacgcccaacggacccaaaaaaaaaactgtgggccggtcaagtctcgtgcggacgaccagctagcacctagcagcagttctttggccatgccatggtcagctcagctctactgtgatggacccagaacgcccgatgctacgagttgctcctgagcttttctttcgaggtttcaggtcaaccacgatgacggtgacgttgtcctcggtacccttcttcagcgcgaccctcacgagataatccgctgcggcttgggcagcggggtcggtggtggatccatcaccctcgtcgcacaacgaccacgatgcgccagcggcaccgttgttcttgtgccacacttggatttgccggcgcgcagctttgcatgcctcttcgttcgtcaccacatcccacagcccatcgcttgcgaggatgagacagtcgtcatctttcgccctgggaacgaccgtgacctctggttttggaatcacgaacggcttcagataccggtcccctgcagcgagtgtttccaacttcgagttagcaaaaaaaaaaggtgacggagaattggacaaatgctacccaattccaacccacagagaagtcagctgaactgctggttcaactaaattttctagtgaaattgggggaaacaatattgtccgggagttttaacatgatggcgtatgtgtatctgatctgaagatggcgatgaatgtgagcatttccagacaagatacattgatggttaggcatggtccaagctgcaagtgccacttgcaggaaccatgccatgaggtacctttgccgtgtcgattaaagttgtcttttctacttccgacaagttcatttctgttgg

SEQ ID NO: 42542 - DNA, 2344 bp, Zea Mays
cccaaaccccggccgaccaaccccaaccacggacccggactggctgtccgcctatcacccgccactattgctcttgcagcctgcttctctccccccttctcgccgcgtacgcacgggtcgcacgcacgcacaccccgttcgtgccacactgccacctaacccccctcccccacgatcccgaggctactagcactaggcgtcgtcctcggcagcaacggcggctgggctcccgccgatggcggcgtccctcgccgccgccgcctctcgcctcgccgccaccggcggcgagttgtcgtggtcggcgcggccctgccccgggagtctcgtggcgagcttccccagcgccgggcggctccggcgccccgcttcgggcgtgcggtgcggaggtggggttttgcccgcggccgcggggacgggggcggaagcggaggaagggggccgcttcgttggctggttccgggaggcgtggccttacatccggggccaccggggcagcaccttcgtcgtcgtcatctccggggaggtcatcgccggcccgcacctcgacggcattctgcaggatatatcccttcttcatggtctcgggatcaaatttgttcttgttcctggaacacatgtccagattgataagctcttggctgagagagggaagaaggctaagtatgctggtcgctaccgcattactgattcagattcattagatgctgcaatggaggcagctggccgaatacggctaactatagaagcgaagctgtctcctggaccaccaatgttaaatctccgtaggcatggtgttaatggccgttggcatgaaatctctgataatgttgcaagtggaaatttccttggtgctaagaggcgaggggttgttggtggcattgattatggattcaccggtgaagttaaaaaaatagatgtttcacggataagagaaaggcttgatagagacagcatagttgttgtgagcaacatggggtactccagcgcaggagaggtcttgaattgcaatacctatgaagttgctacagcatgtgctttatccatagaggcggacaagcttatttgcattgttgatggccaaatatttgatgagcatggtagagtcaatcgttttatgtctattgaagaagcagatatgttgatcagaacacgtgctaagcagagtgaaattgctgcaaattatgtgaaggttgttgatgaggaggacatcaatcatgtccgctgcctcccaatgaaacatggtacagaacatggtatgaatggaagggaccatattaatgggtatactgcatcttttcggaatggtgtgggtttcaatgatggaaatggtctgtctggtgagcaagggtttgctattggcggggaggagcgcttgagcaggtcaaatggttacctatcagagttagcagcggcagcatacggtggtgtccaaagagtgcatatcatagatggtactgttggtggagcattgttgctagaactattcactagagatggtgttggaacgatgatagctagggatatgtatgaaggaacaagaatggccagagaggaagatctttctggtattagaaagatcattcgtcctctagaagaatctggtgtcctggtgcgccgaacagatcaagagcttcttgaagcattgacatcatttattgtcgtggaaagagatggctcaatcatagcgtgtgctgccctcttcccttttcttgaggataaatctggggaagttgctgctattgctgtatctgaagaatgtcgaggccaaggtcaaggagacaaattacttgattacgttgagaagaaggctttgtcccttggacttgagaaactattcttgcttaccacaaggacagcggattggtttgttcgtcgcggctttaaggagtgctcgttcgattccctgcctttggtgaggagaaaacgtatcgacctctcgcgcgggtcaaaatattacatgaagtggctccaggcagcagaggttgggcatatggctgccgacggttttgccatgagatgatgagtgctgcaaacaagcatctctacgaatctagtcgatggacgtgaggtttctttatgagctgtgcagtcgcttatacatcgtagaaatgtatatttattgtgcaagaaaataatcagtcaataatcgaagatgtggttgtgtttcttgagttgatttcttcttgagcatagcaatgctcaaaagagttgttgatctgcacactgctgacaaagcctgcacgactgcgctttttaaactgataaatacttagctgcaaattcagcaatgttcttgttgagctccctccatcgcctcctctagaaaaaatgcgtatgttacgca

SEQ ID NO: 42543 - DNA, 2908 bp, Zea Mays
cacagcacacaaaccccgcgtaggggtagagatcacctcacccctcccgactccggcgcatccattcggtcgctgccggatgcgtgcttgacccggccatggatgactctgtccctttcaatgacctcggtccctccaagcccccgtcggcctctttctacgacgatatgttcgagtcctacttcaatcgcgcggccgaggcccccgagcccgcgcctaaggcttcttcctcgccgtcgacgccgccgcccgtgttcgacaagccagtcttcgacgacgatccttacacggccgatccattcgacgcgatccccttgtttggaggcggtggtggaggggaagaggaagacttgcacggtggcgtccggagtgcggcaaagccggagaggacggagttggaggtggtgggttttgatgaagatttgttccctgggttggctgggagcaccaattttcccatggagaagccggccagggaggtggagcgggaccgtcaaccagtggggttcgacgacgagttgatccctggattcgatggaagcatgaagccagcgccgcaaatggagcctgagacagtggcgtttgatgatgatgtgatccctgactgcagtggaggcacgagctatccctcttcggcaagggaggaacctataacgagacaagaaagtgaatcaatttcctctagcaaaattagcatgagcatgccagaagatcctttcgttactttaggtggtacacacaaatcgggatattcatctttagggttgttttcaaatcttctgaataacattggcatgcctagaaaggaagcggacacaacgcctgataataccagtgggatatttcagggttctgatatctttactgagtttccaaaagccatgccacccttttcgtttacatctgaaaaccagagtgatagaactgaaaggagatatactgaaaacataatcagcacgagtcactccgatcggctgcctcaggagaagacagtccaacaagcatcaacagaagcacctgccaatacattgactgagatgaacttccctgaagcatctgttgtccatgaagtacctgttaccactagttttcagacattgaacccatttgttgaggaagacgatttgttagaggtgaatcaatcttcacaaacgactaatgatgtgtggctaactgttttagatattgctttagtgacactacctacaagtgcgccacctccttcaaggcctccacctccacttgctgctaagaaaccacctactgaatctgtaactagtgaagcatatgcccatcattgtaatcaacgctaccatcactccatatgttcttcaaacacctctaaaacatcccaaattgatgaattggaagattttttcttgacaaagcctgcaaattctgccattggtcatccacaagttctaaagcatgaaggaaatgggcattatccatctgcagctactgcaagtttcatggactggactgagatgggacactgtaaaagggggaaccaaggggcatttgattctatgttcactagcagtcaatatcgacagccagaaatagatgagaaagcagaggtatgtgctcatgaaacagaaagtacagatgaagaaaagagattagagaatgaacaaatacaaagagaacataaagaagagcaaataagagcagaaagggagatggaagaagagcttgagagggaaagagaaaatgtgagacaaagggaacaagaggagcagaggaggcgtgaaaaagaaagagtggccaggcaggctgtagataaggctatacgggaggcacgcgaaagatcagctgctgaagcacgcatgcaagctgagaaggaggctcgtcaaagagcagagcgagctgcagtatggaaagcagcaacagaagctcgtgagagagctgcagtggaggcaaaggaaagagctgcgaaggctgctgcagaagctaaggaaagagaagcagcagaggctagagaaagggctgcaacagaatcaagggaaagggatgccaaagttgccgcagatgcaagggaaagagctgctagggctgctgctgaagctagggaaaaggaaacagcagaatttcaggagaaagctactgcagaagctcgggcaaaggctgagcgagctgctgttgagaaagctgcagcagaagcacggtggagggctgaaagagcagctttcgagagggttgctactgaagttaagcaaagggcttttaatgatgctagagaaagggctgccgctgcagctgcagctgaagcactggcaagagaaaatcagcaaaggagagcaacaacagaacctgaccttgagtcattctttggcatgccttctcgatcaagtagtctaccgagatcatacaacaacacaacaacgaatcctttcgatgttcaacctggcaatgctggttctggtggtgtaaggaggacaccttctggttcaggttttccctttactcagccttcatcaagcaatcttatggatggcctatcttctatatttggagcacctttaccatctgctgtatttcaagaagtggatggagagagtgaagagagaaggaaggcaagattggaacgacaccaaagaacaatggagcgtgcggcaaaagctcttgctgagaagaatgagcgtgacttgcaagctcagcaggagcaagaagagcgacatagaattggtgaatcacttgattttgagataaagaggtgggctgctggcaaagaaggcaacctacgggccttgctaacaacgttgcaatattcgctgcatgcttgatgggatcttacctaacttgaatggggtgctagtgctcattatggagaaatgcaccttttagtgtttggctgggtttcatggagtttctcatctgcttacctttgcgccaagtgacagttgat

SEQ ID NO: 42544 - DNA, 3618 bp, Zea Mays
cgtctccgtgcgccgtagatgtagcctgttccaacgtcatcgttcgcatcacacggccgtgaggagcaactctgttcctcatctcccgttcaccccgcgggcgcagggcgcgctctctcctcgtggcgatcgccgaccgtagcggccgctgcccgggttttcgtcggccgcttcgccatgtcttcgctggacccttcgccagcgacgagcacccaacagaagcaattggagagtttggtaaatctactgacgcagggaagcaggttctaccgcaaagcatataatgaactgttctcaggtgtaactactgagcaggatccggattcatcgactaatattcctgagtatatgctttttgggtggcatctcttcttaatgctccatttgagatcaccagaattgttcaaggacctggtgtcctgcatccatggattagttgctgtgttggccatacttttgattcacgtgccagctaaatttaggagcttcacgattgaaggctcttctcacttaatcaaacaaactgagaaaggcgtggatcttattgcttcattatgtcataactatcatacctctgaagaacgtttgaaagaaatgttgcacaagtctcacaatgcaatagaagacattttccatatgaaagcactaagtgcttcagagtgcaaaccagaaaatttggataagatagacacagatgacctgatgtatttcaaaggtctgattgatatggaatgtttccagtcaaatttggaaaaaatggagaaactatgtaattctaatagctgtaaaggggagcttgattttaaatcaattttgatcaataatgattatattccctatgatgagaactcgacgggggattccaccaatttaggacattcaaagtgtgcctttgaaacattggcatctcccacaaagacaataaagaacatgctgactgttcctagttctcctttgtcaccagccaccggtggttcagtcaagattgtgcaaatgacaccagtaacttctgccatgacgacagctaagtggcttcgtgaggtgatatcttcattgccagataagccttcatctaagcttcagcagtttctgtcatcatgcgatagggatttgacaaatgctgtcacagaaagggtcagcatagttttggaagcaatttttccaaccaaatcttctgccaatcggggtgtatcgttaggtctcaattgtgcaaatgcctttgacattccgtgggcagaagccagaaaagtggaggcttccaagttgtactatagggtattagaggcaatctgcagagcggagttacaaaacagcaatgtaaataatctaactccattgctgtcaaatgagcgtttccaccgatgtttgattgcatgttcagcggacttagtattggcgacacataagacagtcatcatgatgtttcctgctgttcttgagagtaccggtctaactgcatttgatttgagcaaaataattgagaactttgtgagacatgaagagaccctcccaagagaattgaaaaggcacctaaattccttagaagaacagcttttggaaagcatggcatgggagaaaggttcatcattgtataactcactgattgttgccaggccatctgttgcttcagaaataaaccgccttggtcttttggctgaaccaatgccatctcttgatgacttagtgtcaaggcagaatgttcgtatcgagggcttgcctgctacaccatctaaaaaacgtgctgctggtccagatgacaacgctgatcctcgatcaccaaagagatcgtgcaatgaatctaggaacacagtagtagagcgcaatttgcagacacctccacccaagcaaagccacatggtgtcaactagtttgaaagcaaaatgccatccactccagtccacatttgcaagtccaactgtctgtaatcctgttggtgggaatgaaaaatgtgctgacgtgacaattcatatattcttttccaagattctgaagttggctgctattagaataagaaacttgtgcgaaagggttcaatgtgtggaacagacagagcgtgtctataatgtcttcaagcagattcttgagcaacagacaacattattttttaatagacacatcgatcaacttatcctttgctgtctttatggtgttgcaaaggtttgtcaattagaactcacattcagggagatactcaacaattacaaaagagaagcacaatgcaagccagaagttttttcaagtatctatattgggagtacgaaccgtaatggggtattagtatcgcgccatgttggtatcattactttttacaatgaggtatttgttccagcagcgaagcctttcctggtgtcactaatatcatctggtactcatccagaagacaagaagaatgctagtggccaaattcctggatcacccaagccatctcctttcccaaatttaccagatatgtccccgaagaaagtttcagcatctcataatgtatatgtgtctcctttgcggcaaaccaagttggatctactgctgtcaccaagttccaggagtttttatgcatgcattggtgaaggcacccatgcttatcagagcccatctaaggatttggctgctataaatagccgcctaaattataatggcaggaaagtaaacagtcgattaaatttcgacatggtgagtgactcagtggtagccggcagtctgggccagataaatggtggttctacctcggatcctgcagctgcatttagccccctttcaaagaagagagagacagatacttgatcaattataaatgcttctccatcagactgatgatcccatattcagtgtgctgcaagtgatttgacatatgtggcttatccttcagtgagatgaagaaaacctgaaatgctatcaccatttaaaacattggcttctggaagttcaggtgattagcaggagacgttctgacattgccattgacatgtacggtagtgatggcaggagacgttcttaaacagcagctgctccttcagcttgtaatgtctgattgtattgaccaagagcatccaccttgccttatggtactaactgaatgagctggtgacgctgactcatctgcataatggcagatgcttaaccatctttaggagctcatgtcatgattccagctgcaccgtgtgcaaatgtgaaggccctgcaagggctttccaggccgcaccaatcctgcttgcttcttgaagatacatatggtgccacctaaataaaagctgtttctggttatgtctgtccttgacatgtcaacagattagtgttgggttgcagtcatgtggtgtttaagtcttggagaaggcgagaagtcattgctgccagcattgtgatcgtcaggcacagaagtactcaaaagtgagagctacttgttgcgagcaaacggagggcgatataggttgatagccaatttcagttctctatatacaagcagcggattttgtttagagttagcttttgagatgcatcatttctttcacatctgattctgtgtgttgtaactcggagtcgcgtagaagttagaatgctaactgaccttaattttcaccgaataatttgctagcgtttttcagtatgaaatccttgtcttaaatt

SEQ ID NO: 42545 - DNA, 856 bp, Zea Mays
tactacattacattacattactgctactactactacactacactatactactctacactagtaattactactacattattctaactatactatactaatatctaaaagaccagtggcatctagccactggccctgttgctgccgccgccgctgccgcccctggtgctgcctctgctgctgccgccaccgccgctgccgcccctgctgccgtcgccgtcaccgtccttgctgccgctgccgccgcccctgccgctgccgtcaccgtcaccgccgccaccgccttcgtcgtcgtcgtcgtcgtcgtcgtcgtcctcgtcctcactgccgccgtccgagtcctcctcatccgaggagtactccgactcatccgagccctcgagcccggagcgctcgacggcccggatatacgtccagacctccaccgcgagcccctgggagtcgtctgagttgtcagacgactcacgcaggggtatgggagccggagacccctcatactcagaggagaactcctcctctgagtactccgagtcaccaaaatcctccgatggaggagttggctcacgcttgcgcttgttgttcttgcccatggtggaagcgaaaggaagggaagaaaagcaagcaacagagaacaacaagagatatgaaaaagccggagagacaacggcgttatttatagaaggaggaggcaaccgctcacctccaaccgcggtcactgaacagtcgcaaagcattcaataagcacttcaacctgtctgaagaagcgtcaggcggctgacgccgtttcacgcaacaccacacccattgggactccagtcaacagcacgaaggatatgattacacccgccgtcacatcaca

SEQ ID NO: 42546 - DNA, 1568 bp, Zea Mays
cgagagttctatacgacaaacgagcgtgtggtggggaaaatgaatagagagtgagatagagagggtcggaggggtgggcagtgcgtcacgggatgggcgcaggggcgaggctacgcacgatggcacgagcgagggtgatgttgagcgtgatggcaggagcgagttgcgcgcgagagcgaattggcggagcaggcgaggacgcaagggcgaggacgcgcctacgacctacgcaagagcgagctgtggacagtgctcgtgggctgtccagcgggcggtgcgcgggtgttgtgcagcgagcggtgcacagtggttgtgcgacgacgatagcgaagtctggttggggcactcgagcactcgcggtgccttatttctatttgattttgcgcaggttaccaggtcttcctctatgatcagcgtcttgagaatgtcagcacttccatatcttggacatccctcttagtgtttgttgaaatgtctcttagaaaatgcttctccgaatattgcattacattggcatcattcaaatttcaaaggctttgaaaataaagaagtattggtctgtagactttgatttagtgtaatttcattcgtgggattctcttcgaacaaatatataggaaaatacatctctcaaacattctacaattgttttgtttgtatgtttagagtggaatgctaggataaaaatgtagatcatctgctactgatatgtgcattcgtttgctgaaatgaatgaatgaaaaaacttgttgtgattctccctctcataaataatttttttgtctctactctccgcatgcagtttatatgctccagaaccaggaggctcatgctgcagagcaggcagtggcgctgagaggctccgggatctaccaccgccccgggatctaccaccgccctgagcagtcatcacattcttgtcaagatctggcttggcctttctctttgcttctgcaattacgccatccttgggaacaacagacaaaagcgttgggtttattaccttcgagcaatcatggaggacttgaaaggtaacataagctaagaatggttggacttgagacattcaagaaatgcaaggaggaacaacatactgcgtagaaaaattagtccagaattcctttctcaagtcgtctggatgcaacactaagaaacaagtgcaagctgccactaagtgcaaaagccattctggagctcacagccataaaaatgaataaccagtatgtatggcagcagccttgatgagcaactcaaaaggcgagatgattggtggaggcaacaagtatcgtcagtataattcaacgagattgaagcacacagcattatccacagcaccgccattgtttgtttgaatgaaatagctagcaaaatcgtatagaccaacatcacaaatgtgaacgacggggatcaatttttccttctctactattcattacaatagatgagctctttcttatctccaagaacatttttttgtaacacaatggcaggagctctggagcccagcatccgcgactttgtggggtagctcggtgccgccgccgctggggagcctactgctcccgagt

SEQ ID NO: 42547 - DNA, 660 bp, Zea Mays
tgcctcatgcgctgctcgtctgaaatacccaagtcaagtgagcatcctgtgcgactcaagctcggttcgtcaagatttttcagtcaaggagagattccaagagtatgtggataaacaagccctaggtcgatgcccccaagtgctcggcgaaaggcctgaacaaggatcatcgtcgtttattcggattgctagtcgatatggataaaggtcgtaattgtgtgctgcttggttgccgtcgtaattatgaaatggtcgcgaggtgtggtaaaatataggtgtgaggtacacctgctagcgcgaacgattaaatattgtatttaactcgtaggctgtacaagttaatccgatgaaatggcttagaaaactagttaagttagttttaagtatggttatggccaattgtggttagcaccatcgatctgtattttatgcatcttaatttacaaaatggaaacatatgtctagtataatcggattgatctgatgcttgtgatatacttgtgttcaatggtgaattaatcacattgtataatgatcgtcaattagtaggtgatgtgaatggtgcctcgatgggtgttttgatataggacttgtgtttggtttattatcacttgatatttgaagtagatgcgattacgctagaaaagtatgataattgcg

SEQ ID NO: 42548 - DNA, 394 bp, Zea Mays
cagatatatggtgcctccagctttgaagtcgtcaatgtgaacgtcgttatttctatagtacgatggttataagtattcatcgagagcaaattatcgatggaggcctatcttgcctctatcgatgtatgcttgctcgctcggtggtgttgttgtgatggatcgaagatgctttacccgcttgcatgacctgggtaatacatgtccgttgggcattccccgctattttgggggatgtgttaattggggtcggtgattttcgggtatggattctttcctcattcggcatcattacataaatctgtcgcaagatgagacgtactggaaggttcggaagagcaactccgtgaggccttgttcatttctacccaaatcaaggaggttcgggggattaagg

SEQ ID NO: 42549 - DNA, 144 bp, Zea Mays
gacttcctcgtccatggttctggagggagtggccaaaactctcatagcccgcaggagtgattagtgagtagtgagtttgtttgaaactatggacttatggtattgaaactatgtatggactatggacttatggactatggacta

SEQ ID NO: 42550 - DNA, 1713 bp, Zea Mays
cacagaacaggatcgacctcttctctgcttatgattcagagacacgatgatgtcgcgacagtgtgcaaaccgcatctttcttaccggaggttccagcttcctccatggcctcaaatctagagttgcatccagtaggagtcacggcaccgtcagactcaactggcgctgcgtgagaactaatctctggagggccgagcgccttggtgtcaaggctactccgtctgagcatatcattgcagtactgcaagcgtcagatattttcagtggcatcaggaaatggagcaagttgcaattggtcgccatgacaggggtgatggcatgtgtagttctggtagtcccttcttctgatgcagtcgatgctctcaagacatgcacttgcctgctaaaggaatgcagaatagagctggctaaatgcatagcgaacccatcctgtgcagcaaacgtagcatgcttgaacacgtgcaacaatcgacctgatgaaactgaatgtcagataaaatgcggagacctgtttgagaacagtgtagtcgatgaattcaatgattgtgctgtttcacgcaagaaatgtgttccaaaaaaatccgacgtcggcgagttccccgtccccgatccatcttcgctggttaagagcttcaacatggcagattttaatggcaaatggtacatttcaagtggcttaaacccgacgtttgacacattcgattgtcagcttcacgagtttcatgtcgagggagacaaattgatcgcgaacatcacatggagagtccgcaccccagactctggcttctttaccaggtcaaccgtgcagcgttttgtgcaggacccatcgcagcccggcatactctacaaccatgacaatgagttcctgcactatcaagatgactggtacattatctcatccaaggttgagaacaaggatgacgactacatatttgtgtactatcgtgggcgaaatgacgcatgggatggttatggtggttctgtattgtacacaagaagtaaaactgtacctgaaacaataataccggagctggaaagagctgcaaagagcgtaggtcgggacttctcgacgttcatcatgaccgacaacacctgtggtcctgagcctcctcttgtggagagaatcgagaaaactgtggtggaaggagagaagaccatcgtcagggaggtgaaggagatcgaggaggaggttgaggagctggagaaggaggaggcgtcactgtttcagaagctggcagaaggtctcatggaggtgaaacaggatttcatgaacttcttgcaggggctgagcaaggaggagatggagctgttggatcagctcaacatggaagcgactgaagttgagcaagtcttcagccgtgcactaccgttgaggaagctaaggtagctgcagagcaaaggacttggagaaaacaagccatcaagtactggccgaaacggattctatttgccacagcagtacccacagtagagattgttgaacagatacaacaaacatttttaattttcttttctttttcttttcttttcttttcttttctttgtttacccttttctgtggtcaaaacacatgcctacgttagccctatttgtaaagcatcaagagacaacgtaactttttcttgccaaacagagaaaaaaaacaagtgtacttaagactacgctgaccatctcttgcatgacaattgtttgttgttatagtttcctttgcca

SEQ ID NO: 42551 - DNA, 244 bp, Zea Mays
acaccaccgtcagagagaagaaaaggtgaggagaagatttggtcgccgtcgtcgtgcgcgagttcgggtgccgccaggagttcggtggcaggtcgaggggttgctcgccggggtctggggatctggcttgtagtgtattggactttgggggtgctcgcgaccgtgaagaatttctcaccggagttgattctaccccgcctggccgccatacccagtgcacaacaccaccctctgccaatcggag

SEQ ID NO: 42552 - DNA, 458 bp, Zea Mays
tgcaggggtagatcgcgattgagtcatcttctaccttcattgtttcctatgcgtagaacgatgcgtgagcagggagggtcatcgagcagaggggtttggccggtagcagttgcctggggtcgcggcttcactcggctcaacggcgttctgggcatgtattcgtcgaaggggactcgtcttcgccggcgacagggaaggagcaggtcctccagtcacagcgagcggcgcgatggcgcgaacacacacgcaaacaagcaagcagtgaagaggagcgtgtgagagcgaggcagggaggcagaatgaaatggcccagtgcacgacgccctttatagagagcgagagaaggtgagagggcgccgaggagagggaagggcgcgatcgacgaccggcttcaaagctattgatgtcgtcggcttcaatggagaagaacgtggggaagagaaatggctgctttgaag

SEQ ID NO: 42553 - DNA, 4732 bp, Zea Mays
cttcctcccgtggcgccaaaaatttcatttcattttccccaaacccatcccccaattcccccccaaaaccttcccagtgtgtcttctcgacgaaggaagccatctcgtctctctccgctccggcgattgatcggcggcgccgatggtgttcctgcagcgcagccgccccgtcaacccccgcaagcgcccggcaccgccgcccgagctcgagcccgagcccgagccccccaggcccggcccggacgcttcatccgccgtcgacgcggcggcggcgctgctcgcggacgcgggctgcacgctcctcgtcccgccgcaccagccgccgtccctcccctcgccgcactccttcgctgcccgcctctcccgcaagctctccgccggcggggacgcctcctcgccctcggcccccgcccggcgcctcctcgagggcctcgccgccttcgcggcctcctcccccgcgcggctccgccagctgctcctcccgacggcgccgcacgagccgagccttgcccgcgcgctcctctccgtccccgcgctccagccgggcctgctcgcgctgctcctcgagaagctgcccgagcacttcggcggcgacggcgcgctcgacggatcgccgctgcaggacgacgtggggaggctcatcgtgtcgcagttccgctggctcgatttcctcgccgacgccgacgccttcgtcgacaagctcgtggaggtgctctccgtggccccgcaccgcctgaagaaggagatcatcggctcgctcccggagatcgttggcgacaagagccacgccgccgtggtcgccgcgctcgagaagctcctgcaggaggactccgaaatcgttgtcgccgtgctcgatgtgctgtcggatcttaacctcaacgaggagctgcaggagcaggcagtgactgttgcgatatcatgcatccggacaattgctccagaccagacgcctcatctgctcaggttcttgctgttgtcggctacaccagtcaatgctgggaggattatatcgcagatacgtgagcagctcaagtttgttggtgttgtcgatccacgggctgcacggagtaagaagctcaaagggaaggcatcagctaatagcactgatggggcaatacttgatacactgagatcaggcctacggtttaagaatatgctttgtgaggctttcctgaaggagctgaagtcagttgaccacccgagggatcacaaagtgattgatgtttggctcatcatgcttatctatgccaatggtggtgctctagagaaggctgcaaagaaaatactgaagtccaagatcttacatgagtgcataagagagacactgtttgatcaatgtattcatgggaacactgaactggtaaaggaacatttcatgtcatacctctcagttagcgattacttgttggcttgcaaggaagagaaagctagagagtttgcggcttatttgttcacagcactatttgaagagttcactgatacatactccaggcaagagcttgtgggttcattggtcactcatataggatctggggttagttacgaagtttcatctgctctggatatcatgatttctttaacatccaacaattcggaagaactgattcctatatcttcacacataactggaaaaaacatactttcctttgtatttagtgcttttcattttcttaatagacatatcaaccttttcaatacaggaatattggattacttggagagttttggcgaagataatcttcggaaggtttatgatatcttctgtcgtttggcactggctgctggcttcaatactggttcaggtggctcttcagttgctaacgaggttctaatggtggtgaggaagcaggttagtaatccagacatgaagtatagacggatgggaataattggggttttaaggatagtttctactatcgcttccactgatgtcaatgctgctgtgaactgttcatcatctcagcaaccaaattgtgaggaggccctagaattgctgaagatgtctgtcaactcatgcaaatttgtgacattactcttgatttttctatatgatgaattagctgctttgctggatagcaaagttatccactcttcaattcatgactgggtaggagagcatgttgcagagttatttgagacaccttttcttgccgatcttgaaaatggtgaactaccagagaaatatctatgtgatggcatagaaggagaattatggatgaagttggatggaaatatctctccaatccttatgtcccaattttcacttttaacaacaattgaacgtttaggaaatgaaggctcacttggtggaatagatgcactacttggctgtcctttgcaccttccctctaccaagcacttggatggagctaactggggaaacctgtcaggattgcagaaaaaaacagtgtgctattccctatactatgcaataaactggatcagggagttgctcaatgctttcggcacacaggttgaaagtagggttgataatgtttcacagaaagcaaggaacgagacagcagtaaaacttctgaagcgtctaagaaatctgatattacttgaaggcttgctgaatgcatttctcaaagattatccattatctttacctgagttgcgatatcttggggattgctctggatcagcaagcaccagcaaattcaacattccaaagaacatgggagaggagagcataaatggtgcttccagcaaaagacagaagggttgcaagggcaaagtctcagaaaaagtgaatcctgatgataaactcaagcaacctacaatactggatgctttcaaaagagcaggagtaacagtcagtcaagcaacaaataaagcttcttcacaaccatcatcaagtggaatgatgtcaaaggatatcgaacaagatgctactgatcctggtgaacttgggcttatagatttaatggcagcaccagttaaactagatatgcaaagatacaaattcagaactatccgtgcaacgtgcttgtctttgttgaactactcagagtgtcaaggttcatcttcttaccttcaaactgagttaccaacatatctatatcttctccgtgatctgcataacaaattagataatctgaatccttcaatcaagccttttcttagtacttctaaagcaaaatatactcctactcattgccataagagtacacaagattttcttgacaaaatccagccactattcttagttttaaggaagcatctggatggagcagtttcaatgatcaaagatgaatcagagagctgttcagatgactggagttcacattcatcttctgctggcaacccagacataccatatgtggttgtctccaagtcatcaattgtgactgctgtatgcaaggagattcttggctgctacaggaagttacttggcattcctgatctgttgaatcaaccaaacatgtcaattctgaagcaacttttgcagactttacagccaactgaaaattttgatgatgttctttccgagttccaaccatctcttgctccttgcaatgttgattacctgtattgtggagcatgtaaaatattggaggatattatggattcagtgtcctcattttcataccttctgtcttctaatgtgttaattactatacaatcaattgtaaattctgttgttgtgttgttggacaaatctggggaaccaaatgggaaaaatatacacatgggatgctccaaagcaatcattccctttctgcgaaagcgtcttggatactcagctcataagctgctcagtgctgatttccctagcgaagatgctggaaaaggatggcagagtaaaggtgatcttatacagaagatattgcaaatataccttaggaatagtgactctacttcagatctacttgctgagataggtcgtgaattgcctaaggaaccttcgctcaaaacaaaagataaccaagatgtatcgtatggttttccaacattgtgttcctccactattacctcttggtaccgtgtgcttcacgaggagaacacagggagtttaaacaagacgatcaaacaagcactgaaggctagaggatcagttgatactattcttcaagagattcagaaatcagtggatgcatttgtctctctaataggaatgtgcaagtcccacgaaaaggtttctatgcatgcaatggcagttaaacatggggggaaatttattgacacatttctgaaagccttcaactttctagagagacatttcgagcaacataatgacaccatagttaaaatgctaaaacaactccagaaaggaacaagaataatccaatccatatgttcagatgctaagggtaacaagcggacaatgatcacaagcaaagtacctcctgcaaagagatccatggagcggttcttgttccaggtcaaggcgctgctacacagctgctccgccgagaaggaatttcagatgggcaatttgaagcacaaggacttgcaaggccatgtggtgagctctcaggcgtatgggaacgtggatgaggaagatgaggagcagacggaggtcgactccgaccttccagctgatgagcacgataatggcaatgccatggaggaggatgctgtggaaggtagcaacgagacgccgatggaggaggaagaggaatagtggcatagattatgtagctcgacggcggagggtggcggcggcacacggttttgctcccacgtcgtacacgtaagcagtgacatggatggatgtacgtggacgttg

SEQ ID NO: 42554 - DNA, 313 bp, Zea Mays
caccgagctgttttccctaacgctaatgtcgtgctttggccggaacaggggcatgtcgccgtgatctggtgctatgggtagctccaccgcagaccatacaactcacgctttccccgatcaacctcgcgcgagcaccgtgatctatgtaagtcagtgatactctccacgcctttggtttgagctctaccatataggtgcatcgggaccgggcacgccgagtcaagaactccatgggtattgtggccggggtggactactgctcgtcgtgggtgttggaggattgaggttaatgcgggttggctatcaacgcatg

SEQ ID NO: 42555 - DNA, 486 bp, Zea Mays
atttttttcccacttccccactaccctttcaagttttctagaaattacccaccattgtcattataatccaccgaatcgtttttgcgcttattggatcggagaagcccgccgcccaacaaaaacacgccgcccagcccccaccctccgcgcgatccccgcccgcggcacaggatctcgccgcctggcactgccgatgggacggacgcctggcactgccgacgagactcacgcctggcactgcccgcgacacaggatcccgcccgccgctccgacgcgtcccgcgcggtcgacgtacgacgggggcagccgaatcccgccgcagatcagctagggcgccatgcagggtgagggctcccatgcgccgcccggtggtcagatcaggggcgccatgcacggtgagggctcccatgcgccgcgcgggtcagcatcacgagatcaaggacgcgcaagtcaggaactggacaacgcagcgcaaggacgcgtcgg

SEQ ID NO: 42556 - DNA, 875 bp, Zea Mays
ctttatctttgaagattgtaccaaacatcacagaaaaaggtaggatattatgtctagagctcacaatgggctctaaatttagtagtgatagagaatcgtcctactgccccagctctcctgcaactggaggagcaccttatgatctttgtcactttgtgccacttgttctgcaactatctaggcgagtgtcccttcaactgccggtttagccctcctcatcgctccgtcggaccggagtgccgaccgtccagcacaacgcttgtggcgaccatgcccaaaatccgcttgcgattgaccatcagtgataaagatgatttggaaagaacgacgacgaactaaatctcgttaacatgaacatggagtaaggtggatatgggagcggccaccaaccgatgatgtcgtcgccgttgtgcaagaaggaggcgagcccggggtcaacgatgagcgtgcggggccctaggatgcgtgagccgagcgcctagaggcagagcaacgtggcgacacagaggggctggagccaggtgacggcgatgaggcctgccagtgcagcgcgttggtccgtgccgcacgtagtcccggaggaaggcgcgaccatcgctgatgcaggccggccaagcggcggggccagcggtgatgagcgcgcccagcagggtgaacgacacgaccgtagagttgcaggcggattttgggcgacgccgacgacgggtgtagattaggcgcgacatgcgaggcgaggatggggcacaacaactatggatcgcgggtgtggcagcggagatggaagggcggcgtgaatgttgggcgggcaacactcacggagagatagggaaggggcacggtgtatgccatggcagccaagtttgggaagggacgcg

SEQ ID NO: 42557 - DNA, 252 bp, Zea Mays
gcgtgaacctagaatcccacaatccatccgcttcccgtgtcgatttccaccttcacgcgccattttcgtcctggaggcgtcaccactattccaagttgcggccggagatccatcctcgacggagtgcatccggcaaggggacctgctgtcaatctgtaggcagcagctcgccgtgacaaccagagggtgcgagagatggcgtatagcggtcgatgttttccctaatggcacatggccggggatggagacaac

SEQ ID NO: 42558 - DNA, 1741 bp, Zea Mays
tcgtctcccaccccacccgcaccaaacccctaatcaccacacaaccaaaacccaaacaacacgtgtcctcctacaattgccgacgtcgccgtcgtcttcgccagagcagcgccagcggttgttttgtatctcctcgtcggacccagcgttccagtcgagcatggcttcgattccgcctccgtcttcctccgtcgctgccctcacccgccaacccttgtgattgttgttgatgacgaatcaagggaaaatgaaggagatctgataatggctgcctccttggttaccccagaggcgatggcttttatagtaaggcatggaacaggaattgtttgtgtcagcatgaaagaagatgatctggaaagactgagccttcctttgatggttaccacaaaagaaaacgaggagaagctatgcactgcttttactgttacagtggatgcaaaagagggcacaactactggagtatctgccaaagacagggcaaaaacagttatgactcttgcatctcctgactctaggcctgaggacttcaaccgccctggtcatattttccctttgaaatacagagaagggggtgttctgaaacgagctggacacacagaggcatcggttgaccttgccatgctggctggattacctcctgttgctgtcctttgtgagattgtggatgatgcagatggttccatggctcgcctgccaaagttgcgtgtctttgctgaaagggaaaatttgaagattatatctattgctgacttgattaggtataggaggaaaagagacaggctagttgaacgtgcttctgttgcacgcttgccttcgcaatggggcaatggccatggatattgctacagatctgctattgatggcatcgagcatcttgccatggtgaaaggtgatattggtgacggccaagacattttggtgagggtgcactctgagtgcctcacaggcgacatttttagatccgcaagatgcgattgcggtgaccagcttgcaatggcaattgagatgattgagaaggccggaagaggcgtaatagtttatctccgtggacacgaaggacggggtatcggtctgggccacaagcttcgtgcttataacttgcaggatgatgggcgtgatactgtggaagctaatgaagaacttggtcttcctgtggactcacgagaatatgggattggcgcacagatactacgggacctaggagtccgttcgatgaagctgatgactaatagccctgcgaaatatagtggtctgaaaggttatggactgagcattgcgggcagggtgcccttggttacgccaattaccagcgagaacccccaaatactgtgtcccatccgtgaacatggaagagccaccgaagacggagaggaacttgtcaagcaaggatacatacccgacttgggcattttggtcttcagttgcggtcgttgcacgagctgctagaggtgtttgtcatcgttgtaacatcagcgtggtccaacatcttccgtatgttcgcaaacattcctccaagccatgaagaggtgctttgttgatcaatctagatgaggaggacgaggtcaactttgtgaaggtacaaatggagaatgtaacacccctggtgttatgtgaactaaaacattggcatgccatcatatgtactggcattatattgctcgtgttacacttagaatgcatccactagactaaaatttcaaaaaaatatgtgatgtgatacttggttgggtatagggta

SEQ ID NO: 42559 - DNA, 6045 bp, Zea Mays
cgtgcgcggcagcgagcgtgcgtacacgtcacgcaccacgtcagaagccccccaacccaccggtcccccactcagaccgtccgacgaacgactcgacgactgtcgactcctgcacaggcaacacctcacctcgatgatgcatccgctccgccgcatcctcgctctcttactcgtcggcctcctccccgcggccgcgtggtccttggcaccaccccgcttcccgaggccccaaccccgctcgcggccgggagctaatggggtgggagactacgagtacgagacgcgatacttccggcagcggctggaccacttcagctttccaggggtcggggacgaggacgaggacgaggcggctgcgttcttccagcagcggtacctggtgggccgcggcggtgggtgggctggacccggcggccccatcttcttctactgcggcaacgagggcgacatcgcctggttcgccgccaactccggcctcgtctgggaggccgccccacgcttcgccgccctcgtcgtcttcgccgagcatcgctactacggagagtccatgcctttcggtagcaaagccaaggcgtacagcgactccaagtccctggcgtatctcacggccgagcaggcgcttgctgactttgctgtgctgctcactgacctcaagaggaacctatcggcagagggcagccccgttgtgctctttgggggctcatacggtggaactgcttggatgagactcaaatatccccatattgctattggggctctcgcatcatcagctccgatcctgcagtttgaggacattgttccttctactatattctatgatctcgtatctgatgattttaggagggaaagtttaagttgttttcttacaataaaagactcctggaaagaattagatgaccaagcaaacgagcaagatggtcttctgaaactaagtaaaacgttccacctttgccagaccctgaaaacaagtggagacctttcagattggttgagctcagcgtacagttatctggccatggtggattacccacttccatcagaatttctcatgcctttgccagccaatcctattaaagaagtatgcagaaatatcgacagtcaacctaagggtactggtactctggaacgtatatatgcaggagtaaatgtatactacaattatactggcactgttgactgctttgatctaaatgatgacccccatggaatgggtggatgggactggcaggcttgtaccgagatggtaatgccaatgtcttacagtgaacaaaggagcatgtatccaccttataaatttgactacgcttcctatgctgaggattgcatcaaaagctatggtgtcaggccaaggcctaagtggattacaacagaatttggtgggcataatatcactaaggtcctggaaaattttggtagtaacatcatattcttcaacggacttcttgacccatggagtggcggaggtgtcctgaagaatatatctgagagtgtcgttgctattgtggctccattaggagcacatcacatcgatctgcgcccggcaactccagatgacccggattggctggtggccctgagagaatcagagctggagatcatatctggctggctatgggattactacggggctggaggagcactcttccagcctgtagctgtgaagggctcctcttcatactgaggaaccgcaccctggctaataactcaaatgcttggtctcagaaataagagggccctgctgcaagtgccaaccaccgttaatgctgctgcagtgctgcgtcatggagaaggaagatcttcatgttgatgatcgggtccgctcctgcatcatgtgccatatcagtagcatttggtctgtgtatcaaatgggacatgtacttggctgatgaggtgaggaaaacactggataacgtaacgactctttcgcagtggtggtggcggtcagcaggtgctctagaggcttgatatcacgtgcatgtgccgctgtaaataacataatgctctatgtacgtgtacatctctactactctataagcctgtagtgtaggcgtgcacaccccgtgcaccgtgttctgcctccaacgtcctctcgcccacgcgctccgtcaatcacgcaagttatgccaccgatgtcgcccgaccgccccatccgcattgcccccacccccgtccgccgctagatgcggatcccgccgcttccagcatccagccaagcccgtgagccgcacgccgctcctgctcccgctccgagcgccttaggtcaggcggcgttggcccgacggcggggggaggcatcacgctgccatccatgggcgcgcccccgccgccgctgcacccgacgcccacctctcccacggcgcgcccgcaccaccaccactacctcttctccatcaagcagctcaacacgctgggcgcggcggccgtgctcgccttctccaccacggtcccgctctcggagactgccttcgcggtgctcctcccccctacctcctcgtcctcgcctggctcgccttcccgcagcgcccaggccgctcgagacccggatcccgcctctacccctcggcaccatcgtcagtgtcttcgatggccacaacggccccgacgcccccaccccgacagacactgagccctcttccgctcgcgtgactggtgccccctcaaccctcgactctcctccccaccgtggccccttccccagccccagtgaccagcgcctcccttcctaagtgcggccatggcgaccatcgtgccctagcccgcccctgcaccatggcaagcacaccccttctactcctctcgccccaacccctgtgcagcccagcgcggtggcctataacccacagcaaggcgcaactagctggctggtggccctgccccggtgagcccctgctaggcgcggccagcaacccccgtggtctagcccctgcctaggcacacccaaaacccctgcccttgcaacttgtcctcggcgccgccccactcgcccgagatctgccgcgacaacaggaattggacgtacattgggactttgaagtgcagctaaggctacctggcgattggtggaaagagatctgatgacggcgatcatggtcgaagagtaggagaggccctagaagaaagcggaataaatgcaccgagctgagaaaggacagaacaaagaaagatcttaaaatcaaagctaaagaagtggagattcaaaatctaaaaaaaagctaatgtcatggaataaatgaggttgatgtggagctaaaaagggaggctatgtttttttgggtgaggcggttatcattggcttgttatgtgaacattattgtgatgtggtttcatgttgtccaggtgccagtttaacaactttttgcaccaccatgtcgagaatatcattgggtcatgtctggagagtaataatgatcaactgatgggccatgtccttgatgagtgtaaacttgttacaagaattttggaagcagagaagaactctgctctatcgtcagaattggacggtcgcatcgacgccaggttccagcagaggagtcgttactctccttgattccttcaccgagttcaccgaggaatatgaactgaaaatgaaagagaagggtgagcaactgattgtaagatctttcatcagtgcaacctctccttttttagctttcatcagtgctacactcccacagtccccacatgcacgcagatgtttgaaaatataaaataaaatcaacaacactgcaaatttactagctcaactacaagaggcatggagttattattaaaaaatgaagtactcatgatgaattccaaacaaaaaatctgacctaataatcaacataatataaattgttgtagctcagtcctatagtcatactgagctactgattagaatgttcaagaatgaaccattagatttcctgtgctaaaatgaggattgatcataagactaatgacgatcaagactatcaaggcccctacaaacaaagctcatgggaaattagaaagtgaaatgaaataccatgttgaaaacagggccaaagtagctagcaattcaaagaggcaaaatgctgcaaaatataatgcttcatgaggtcagtaaatacatatttggtaattccatgctaatacactgatgctttaagatgcctgagacatctatcttctttgttagttgttttcggtgttgtcaaaatctcaggtgccacaatggatgaaagaacaacatgtagaattgggttccaaaggacttgagggctacttcatcacaacctgtaactgaagatcttgaataactgactacatcaccatgcaagactaaagtttttattttattaagaaaatgaccccaaagaagaagatgtgtgatatatccctgatgactgcatatgtgttgagggttactacacactgaaaaatagaataacagactctgtggctgttagtgaagagggattagtcaaaaagagaacaaggcgtccaaaacctgttggcaatgagggggctgtcagaaagagaagaggctctgccatcccacaactataattgttcaatatatgtatgcattagacttcttaattctattaacttattgaattgtatgtgcatgaagttttttctttcatgtattacaccgcatgacatagttctttaactaatggcagtgtacctttttaaacctttagatggctgaattgaagggagaagatgatttatcagcaggctctatgagcacaactgcatagtcaagacataattcttcggcccctgcagacttcaagcagctaagaagtgttacgcccattgacatctttccacgacaagagacctgggcaagagaatccggacgtgctgagggggagaggaaggagaggaggaagatatcgggcaagagaacccattgacatccttggatagggtccgtctgatgccattcatcgctgtctttgatctcaggaaggcatcttagccagctcaattttattagaaatattgttgttttaagatacagagtccatggttactattgtacgcttttctgagaaacttgtcatcccaataatttggttctggagctatatactgatctagcttgttttagtaacaaatgtaagttgctcacatttcctttagactgtcactagaactttgaacgatcaactcgtgcttctaaatcaagaattaccatatgtgttttttgagttcgatcccttctattttttatttggccaccaaacgaagtttttacatgacaagaatgttataaatacttctttaaatcacgagtttcgtgtgtcacgtacgtgcaatgtaggtatatttctctttcatgcttctcgcgatcgattgtgccgtcgcaacgcacgggcattaacctagtctgtacatatgctgccagtgtgctgtgtgcgtctggtgtcgcactcgagtagtacgcgacgggtctcctgcggccctgttggagtcgtcaattgtcagccaccttcgaatacgagtagggatgacaattgacaacggggacagaccaggagctgtatgaaataaagaacattgtagatgctcttaatgagcaacgcgagaagttgcaagagcaaagaaagctgcttcattcagaccgagaaccaatctgacagcaaatccagcagcttactgggttagaagagctgaaaattgaatctgagaacgggcaactaactgtctttgacacaatgtgagaacttaaagaaataaaggtggcgtggaaaacctgaaagagaacggtgttcacatgtctcctgacgagaggatgtataaaaacgcaaatgcaaagcacactactgtgaagagattggaaccgtctcctgcgatccacaccaattttcctgggtgttattagaaaatgtgctcaggtgatattcaaaggctgtgcagagaagagcgctgatgatccccacaacacaacgatagattggtacctgcaaagttggcaatgcaaatgtcaatggctctagcttaattagctgctgctgcctattcagatgaactgttatttggtcatcagctggaaaatggtgctgggaa

SEQ ID NO: 42560 - DNA, 3455 bp, Zea Mays
cccaagccacctctgcttctcctccgtctcgtcgtcggccatgacacccgccggtggcgccaaccactccccggcgccgcgtagcctggtattcgccttctacctcaccggccatggcttcggccacgccacccgcgccatcgaggtggtgcggcacctgatcgcggacgggcacgaggtgcacgtggcgacggccgtgccggagttcgtcttcaccgccgaggtgcggtccccgcgcctccgcatccgcagggttatcctcgactgcggcgccgtccaggcagatgccctcaccgtcgaccctctcgccacgctggataagtaccgtgaggcggcagtgttaccccgcgagttcatcctcagggccgaggctgagtggcttagctccatcaaggcagaccttgtggtctcggatgttgttcctattgtgtgcaaggtggcttcagatctgggtgtccgctctgtatgcattgggaattttagttgggacttcatatatgctgaatacatcatggaggctggatatcatcaccgatctattgtgtggcagatagcagaggattactcccattgtgacatattacttcgactacctggatatggcccaatgccggcttttcgcaacgtcattgatgtgcctcttgtggttagaggattacgcaaatctagatctgaggtgaggaaggaactaggaattgaggagaatgctaaggtgctcgtttttaattttgggggtcagccagcaggatggaaactgaagcaagaatgtctccctgatggttggatttgtttggtctgtggtgcctctgattctcaagatgttccaccgaacttcattaagcttgcgaaagatgcttacacacctgatgttatggcagcatctgactgtatgcttggaaaaattggatatggaactgcaagtgaggctttggcctgcaagctaccattagtgtttgttcgcagagattacttcaacgaagagccatttttgcgaaatttgcttgagcactaccaaaacagcattgagatggtcagaagtgatttccttgctggacactggaaaccgtacctacttcgtgctctcacacttcaaccatgctacaatggcccaataaatggtggtgaggtggtttcccagattctccaggacactgctattggaaacaaatgtatttctgataaagctagtggtgcaagaagattgcaagatgccatggtctcaggatatgtacttcaaagggttcctgggagagatgcaggcattcctgactggtactctgtgtccgaaaccaaaactggtggcggtccgacctcacaaaatgttgctacaaaggaaagtgcagcattatgtattgaagacattgagatactccatggggaccttcaaggattaacagatacagtggactttttgaagagcttatctgaacttaatggaaatgatttgaagagccctaagaagcaagacctagagagaactgctgcatctgttctttttgactgggagacagaaatatatgtagcaagggcacctggacgtttggacgtcatgggtggcattgctgattattcagggagtcttgttttgcagatgcctcttcgggaagcttgccatgttgctgttcagagaaaccatcccagcaagcagaagctttggaaacatacaaaagcaagacagcttgttaacggaggcttggtacctgtgatacaaattgtatcatttggttctgatttgagtaaccgtgcaccaacttttgatatggacctgtcagattttatggatgatggtaaaccaatatcctatgagaaagccagggagcttttctgtcaggatccatcccaaaaatgggctgcctatgttgctggaacaattctagttttgatgactgaacttggtgcccagttcactgacagcattagcattctggtttcatctgccgtgccagaaggaaaaggtgtttcatcttctgcatcagtggaggttgctacaatgtctgctatcgccgcagcctatggttgagaatcatgtagttggagctccttgtggagtaatggatcaaatggcatctgcgtgtggagaagctaacaaactccttgcgatggtttgccagcctgccgaagtgaaggaattggttagcatacctactcatatacggttctggggtctagattcagggatacggcatagtgttggcgggggagattatggatctgtgagggtaggcacttacatgggacgaaagatgatcaagtgtacagcatcagatttagtttcagaatccttgacttcagggtcccctgctcagtctgattgttataaagaaaatggtgtgggcgtactgaaatctgaagctgcactggagtatttgtgcaacctaccacctcacagatatgaagctgtttatgcaaaagacattccagaggtgattagtggagaagcattttcagagaaatatggagatcacgatgacacagtgacagttattgatcctaaaagatcttacagtgtgaaggctcctactagacatcccatatatgagaacttccgtgtcgaggccttcaaaacgttattagaggcaggtaatacagacgagcagctgtcagcccttggagaacttatgtaccagtgccacaacagctacagcgcatgtggcctcggttctgatgggactgacagactagtcaacctggtacgagaagtgcaacacaggaggacatccgaaggcggaagccctagtctgtttggcgcaaagatcaccggcggaggctccggcggcacagtatgtgttgttgggaagaactgcgccaggagcagtgaagagattgcagagattcagcacagatacaaggctgagaccgggtatctgcccattcttttcgacgggtcgtctccaggagctgggaagtttggttacctgaagatccgacgtcgttgtccctagtggctgattgggaaacgaagaacttcagttcgagctttgtcacatatcactcaattgttaagaacctcactccaactctccaagccattgtagaacatagaggcgtattgccacttgcgatgattcgtcgttcacacacaaaatattatcatgtgctacaccaattctggaagctactagaggaaaatgtgaggaatataaagaaactcttgttgagcagatgtagtctagtggtctccgtgtgcttgctgcagtgtaaccaaactccaagtagatgtgctctgggctctggcatgtggtatgtgatgaagtcgaggatggtttcttgccgtttgatgaccagtgtagtcgttggttaacttgtcagtcgtaaactgatgttgtcagttaggagcggataaagtttgtgtgtgttgtcagtgtatctgtgtgtaagtttattggacagaccgaaagatacaccacgaacccagatgaagtaggtaatagtcgtatgtgaagtttttatcatta

SEQ ID NO: 42561 - DNA, 1310 bp, Zea Mays
gcctctatttctctgtgaccaattcctgctcccgcgctctacaccagcgcccaaatcgagcggaatcactgctcgcggacgggattgctccactgccacctccagtccacttcgtcttcctcccttccccagttcagatctactccactgccaccttcctcccccgagccgcttctcatgacgtctctgagcaaaaaccctaaccctaatcctaatacaccatttgagatcgggaagcttttcaggccaacgaatcacatgtccaacgccaccccaaccccatcttccccggcgtcactggaggcccggcgccatccggcccctactcctaccctccggtgaccccgcccttccaccgcggaccctacatccactatccgcaggacccccacgccatgacccgcccagttgtctccttccccatgccaaacccaaacctcaaccccaacccgaacactaaccccaacgtcgtcgccctgggcgccaaccccggcgcgcgcctcatgcagctgctcgggaactccggccgacacagttcgagaccgtcgtctccatgccgccgcccacatcggagttcgcacaactgcagtcgctcccagcgatgccatccgcgccatcggccaggatgctgagcagcaccagcagcaaggtgcccagggggcggttacttggcaccggggaacgagcggtgcacgatgttgactcgaggcttcccggggaagggcagccaccacagctggaggtgacaccgattacagggaagcatttgagccttctctatcatcaagctgggatcccttgagtatttggagaggtattcaggagatcagggatgaagaaatggaagatgtcatagtcaaggctgtggactgctcgaagcaatcagagtcgtgtgtagggcgagttgctgccatggtggctttttcttgcgggcgtgagctccgctcgccgccggtcttggacgccgtggctaggctcctaccacccctccctccacccaggactccacgccgccaccgccacacgacagtacgcatacactcttcttcctcccctcgctctcgatggctggcgtctgttccctcagcgcctccgcccatgcctggctcccgcacttgccagctcctcgatggagatgaatgaagaaaggaagatctgcaagaataaagtcgaggcggaggcttggtttactggtcttagtgcctgaatatgtcgaggacagcatggatcccaggtccaacatatagatggaatccggatcgctggacttccttttgatctatatacgacattcaataattagaaccaga

SEQ ID NO: 42562 - DNA, 3418 bp, Zea Mays
agaaacggagcaaagtcgaaaggggaaaaatgagttaaacccaaatcgacaccaaacccactccaggaacacccgcctccgccgccgccgccgccatcgccggcggccactacaagcgcggcgtccggagacagtactgcgctaccaacccctagagcctggattctgatgagccctccatggcctgtcatatctgtcccctcttcaatctccgactcttgctgctgctcggcgcggttctcgggaacggcggcctcggccggggcggcggagcggaggcttcagatcgggcggacccggacccgtactcgatcctgatgtggcacgactactcgccgccgtcgcccccgctcccgcccccggacccgccgtcgccgacggcgacatgtgagggggacctccacgggaagggtgacttccacacgcgctgcgaggtctccgaggaagtggagctggacggcgacgtctacatcacggggaacggcagcctcgtgctcctctctggcgcctccctgacctgcgagaagtacgggtgcgttatatccgccaatttctcaggcgaggtgcgcctcagccgcggcgtccgcgtcacagccggcagggtctcgctggttgccaccaacatcacggtcgccgacacggtcgtcgtgaataccaccgcgctcgctggtgatccgccagaccggaccagtggcgttcccacggggacgcacggcgacggtggcgggcacggtggtcgtggcgccagctgcttcgtcaaggaagggcagacgcaggaggattcatggggcggcgatgcctatgcatggtctgacctcgaacacccctggagctacgggagcaaagggggctcgaccagcgttgagaaggactatggtggtgacggtggtggcatcgtgtggctgtttgctgaggacctggtcatgaatggcacagttctcgccaacggtggggatagcaatgagaagggtggtggtggttctggagggagcatctttataagggctgcatcgatgcatggtggtggcaagatcagtgcctctgggggtgatggtttggctgggggaggtggagggcgagtttctattaacgtttttagtagacatgatgacacccagatttttgttcacgggggaaggagttcaggctgtccagataatgcaggagctgctggaactctttatgaagcagtaccaaaaagtcttattgtcagtaacaacaatctgagtacacaaacagacactcttcttttggagtttccaaatcaaccactgtggacaaatgtttttgtaagaaatcgtgccaaagttgctgtccccttgctctggagtcgcgttcaggtcgaagggcaacttagccttctttctggtgctattctaacttttggtctcactcgttatccatactcggagtttgaactgatggctgaggagcttcttatgagtgactcaacaatcaaggtgttcggtgctttgagaatgtctgtaaagatgctccttatgtggaactccagaatggaaattgatggcggtggagattcgatagttgcaacatctttgttggatgctagcaacctgatagttctgaaggaatcatctgtgatacactctaatgctaatcttggagttcggggccaaggtctcctaaatttgtctggggacggagacacaattgaggcgcaacaccttattctttcgctgttctacagcatacaaggccccaaagctgaattgtgaagctgatagctgccctgtggaaataattcatccaccagaagattgcaatctaaattcttcattgtcatttacccttcaggtctgtcgtgttgaagatattgatgtctggggtctcgtacaaggaactgtaattcatttcaatagggcaagaagtgtcactgtgcatacatctggaaccatcagcgcatcaggcttgggctgtcgaactggagtagggcaagggaaaatgttaagcagaggtatatgtggtggtggtggacatggtggaaaaggcggggatggtttttataagggaaaccttgctgagggtggagctatctatggcaatgctgatctaccttgtgaacttggcagtggcagtgggaatgactctaccgagttgtccacagctggtgggggtataatagcgatgggctcatgggagtattctttgccaagtcttgccctctatggctcagtagaatcaaatggtggtagctatactaatggctctgttggaggacctggtggtggttctgggggcacaattcttctatttgtgcatactttgtccttagctgaaagctctgtcctctcaagtgttggtggcttcggaaatgctggtagtggtggaggtggagggggaaggattcatttccattggtctaacattcctactggagatgagtatgtgcctgttgcagctgttaagggatcaatacttgcaagtggaggagtcagcaaagggctgggatattctggtggcaatggaacggtcacaggaaaagcttgcccaaagggtctttatggaacattttgcaaggaatgccctttgggaacatacaaaaatgttactggatcttctaaatctttatgctttccatgccctcctggtgaactccctcaccgtgctatatacataaatgtcagagttcttagtggagggtctgttcttttttttggtggtcatgggtgtcatgagctcgcgtccgtgctgggcacgctgagcaacgtggaagggttcgcgttccagcgcgacgtgtcctacacggcgttccttgaccgggtgcacggcgaggaggtggcgctcaacaagctggggctgtggcgggtgccgcacccgtggctcaacatgttcgtgccgcgctcgcgcatcgccgacttcgaccgcggcgtcttcaagggcatcttgcagggcaccgacatcgtcggcccgctcatcgtctaccccctcaacaaatccatgtgggacgacggcatgtcggcggcgacgccgtcggaggacgtgttctacgcggtgtcgctgctcttctcgtcggtggcgcccaacgacctggcgaggctgcaggagcagaacaggaggatcctgcgcttctgcgacctcgccgggatccagtacaagacctacctggcgcggcacacggaccgcagtgactgggtccgccacttcggcgccgccaagtggaatcgcttcgtggagatgaagaacaagtacgaccccaagaggctgctctcccccggccaggacatcttcaactgatgatagcccatgcatgcatgcatgttttagtttcttgggacaataatgtgaataactcccagctagcggctattaattaatctgtatatagattgatcactgcactgattgtatgtcaaggtcattatttacgttatggtaaaaaaaataccctcgtcgtata

SEQ ID NO: 42563 - DNA, 2725 bp, Zea Mays
cggactcgttcacgcattcgcggttcgcctctttctctcctataaaaatccaccgccccccgccgcctccgcagaattccccaatcccaccgccaggctccgcacgcgcctcggaacctagcccagtcgactccttcagatccggcgggatcgccggctcctaccctcgtcgccacgttccggcatctcggctccccggcgtcctctacccgacttctacacctgccatcttccccaggcggcgtcccgacgaatcgcttggtcgacaggctacatcaccaccaagtcagcatcgacgactcgaaggattcgtgtcgtcgtcgatcgccgatagccggtcgccggtcgccggtcgcctcttcgtagatcgaattggttctgtgattattctggttgcagttcgctgtatttcatctgagatctgaaaaaagttcgggcctatctcgtgatagagaggcctttatatatacgtgaaaaaggagacatactcgccatccgtcatgggtgttgtgtattaccaatataagagtgaaaaggaaatctgttctatgcctgtgctccatgcttttatctctgtgtctgaactcaagcagcttatactgacaagtggtaagcacggccatgggcgaacccacggccgtgccagggaggatattatcatcttcaatgcccacagcggcgaagaatatgcagatgaaagagcatccatacctcagaacacaactgtgctggcggaaagtcacagaagaattttctgtgccttgcaagtcagtggttactgactcaagctcaaagtcatgttcttccacggtagtgcaagatgaagatgctgcaattgctgcagtgattgatgccgctgaactcaaatcggaacaactcccgtctaaaaaaggacaaggcagtggaaggtttacgtcaggacgtaactatgggtcattggaaggggaggcacctccaccaggctatgtctgtcgctcttgcggtgttccaggccatttcattcaacactgctcacaggaaaacaagatacctccacctggatacatttgctacagatgccgaattccagggcattttatccatcgttgcccaagcattggtgatcccaagtgcgacaacaataaaatgctttgttctcttgtcccagtagttacacctgtcaatggcattttggattcacttgtcccggcttcccccgttagtgctgttgatgacttgccagcagagctccactgcaggctatgtaaaaaagtgatgagagatgcagtattgacaagcaaatgctgttttgatagtttttgtgatagatgcattcgggattatattattacagagtcgaagtgcatttgtggagtcaagacactagcagatgacctcattcccaatcaaacacttcggagcacaatcagcaatatgttgggaacacagactatcagtggtggaagtggtacaacaagacacagaagttcgtcaggcagcaaccctgaccccaaaatacagagccacactgcctcgacaagggaggtgaagcaatctagagaccaccagctaccagcagcatctgcacttgatgatgtgctccaggttgccacagaaggtgctctagtgaaccagcctcgggagaaattggtacccagtgctaaaatccttggtaaagatggaggcaattttgcacaagtgtcagcagagaagactgtagcaaatgctgaagccctcaaagtaaaggatggaactgaatcgacttcaaaggccaccactgtttcaggggcccgagaacacaatgtcacaaggacagatcaaccgaagaagtggaagaaggcagtcttaaccaagaactttcaacctaacaatgttggatatggttacaatgttccatttgaccctgcatattgcaatcccttcatcaatggatatccttgggcaactgaaccttacatgtatagctcaatgggggtgccgtaccctggttatccgatggatccatattgtgtaaattcctttacctgcataccgtcgcaggctcttgcaatgcaaggctatgcaacaagctaccaaaggcctgaaactgagcccatgcatcgtgggggcactgcagctgcaccttcaaagcgccctgagaggagtgacaggcccaaggacactcgtcatcagccccaatcacgagagcacgagcgacaattgggctcttctcatgtctcagaatcgagaacgaggaacagaacaaggtcaagctccgagggaagggaccgtgggcattccgacagggcctctgttgaccaccatgaggaccactctactaggaagcggacgcgcgattcctctccgaagtacggtgatagacagagcgaccggaggtcgagtcacggttccaggagtatgatgactcctgaggaggatgcaagcgacgatgaatgtaatttcaagaggagatggggtcgcagatcatcaggaggcgtggacacaaggcactgaacggaagaatgtggactacggcggaccgaccaagtgcagcaatacattgctggtcaccagtgctcacctatccattttcttttactcgtaattgtatgtattcccctgcaaacaaaggggaacttccggttccctggcgaaatgtaatggtattaccatgcgatctctccaaatataaatggaagtttgctaagctcacgagttcttttttacttcttttaccctaacgccccgttttggaatcgaattccac

SEQ ID NO: 42564 - DNA, 3253 bp, Zea Mays
ctaaacttcaagcgtatgatttcattttagaatgatagacctgaaaatttcaattatctacttcggaaacttcaccttattggtgctcttaaaaagaagaacgctttgtctccatgcaatctgctagatagcttgattgtgaatatacagaatgccataagcacgggctaccaattagacaggaaaaggcttctgggagttcctgttagcatacagccttgcagttcagctatttacagtatattcgtaactggaaagggatcttgttggattccttttgatatgtttatggagaatgcaatggatgggagacatcttcatactatatcatcagttgaatatctgacagctagaaaagcagcagttgttctgtctaacctgaaaactgggagtgagaacatgtacagttctttcaaagacagttcctctattaaagcagttggaaatatgctacatcttatcgtggaagcctgtatcgcaaggaacttaatagatgcatctgcttatttctggcctggctatgtggttccacttaaagaatcctctccagttcaggcatctccatggtcatctttagtagaagggtctccacttatagaacttaaggatgcccttatggtcacacctgcttcgagtgtagaagagttggagaaattgtactcttttgcagtaagtgggtcaccggaggaaaagttggcagcttcgaagattttgtgtggtgcatcacttcttcgtggttggaacattcaggaacatgttgttcaaatggtgcttaagttgttatcgacattcctccctttggattctggatcagaagggcgatatgtacagcatatgcctatgctgcatgctcttgtatcaggaatttcttctattgacactgttcatattctctcactgtatggtctggtgccagaagtagcatctatgttaatgcctctctgtgagaattttggatctttacctccatctgatcataggagttgtaaacttgaagaggcttctgtgtactcagtattctcatgcgctttcctgtccctgcttcgcttgtggaaatttcatagaccacccattgagagtgctttatcaaggcgtggagtctctgtttggtcagagctccgtttggattttctcttgttattacgtaatagtcattcttctttgaaaaatctgtctaatgttactcaatcaagcatatttgaattagatccaccatttcaaaaaccattgtatattgattcatttccaaagctaagggcatggtacttccagaatcaagcttgcatagcttctacactttctagtgcttgcagcaggacaactgtcctccatgtggcaaacatgatactgaaaatcatatgccataataaagtgccaaaaggtggtgtcctgtctgtaaatcctcagtcaacagcaaattccactacgagtagttcacctgcaggcgtacaggaagatatgtgccagtggccaacacttccagcatgggaaattcttgaagctgttccttttgtgcttgaggctatgctaacttcatgcgctcatggaagactttcatcccgtgacttggttacaggtttaagagatcttgcagatttcttgcctgcttcacttgctgctattgtcagctacttctctgcagaagtcactagtggcatatggaagccagttatgttgaatggaatggactggccaagtccagctgcaactcttccagtagttgaatcggagataaaagaagctcttgcatttgctggtgttcatatcaatatctgtccacgtccacgttctgcgatgccaatgcttccattgccaatagcagcgctaatgagtttgtcaataacagtcaagatggaggaattcagccacctacacggcatcatttcccaaggaattgaaatttgtgcgacatctagttcatggcccactatgcaaattataggcgcattgtggtcccagaaggcacggcggtggcatgattttatcatcctgacttgttcgcagtcccccttcactcgagataacaccgcggtggcacaactgatcaggagctgcttctcgtctttcctggggcctttggttgatgggcgctcctgctccgtagcaaacagaggagttgcgaatctgctggggcagagttctgatgaaaaagcacacaggcttgctgtagctccagggtttctctacatgagatcctgccggttatttccaaacaacacctttgtttgtgaagagatcttggaggtggtcattgagagagcccatgcgctagcaaatgaccgcagttctgacagacctgcccgtttgaggtcagagtgtttgccgctatcagctgcgtcatccttggtagagcagatagcatcacttgcagcgactatgctttgccacgctggcggggtgaatctgattcgtctcctctacgagcagatcatgcccaccctgctgctttcaggtggagaagctaagctcggttccggtggtatggtatgcagcataatcgaaggatacacgctagcgtacgttctcctcttctcgggcgcaaccgtctggggagtcggagaaacgtcgccagcttacactttaatatacacatccaaaagacaacgggtcctcgacaggcacctggagttcatggccagggtgatggagggtaacattgtgctgggctgtggagatgccacgtggaggtcctacgttctgtgtttcgtcaacttgctggtcagcttcgtgcccgcgtgggtccctgaagtgaagctaaatacgctgcagaaactggcatctgggcttcggagatggcacgagggcgatcttgccctctctttgcttgagctagggggagccaagaccgtgacttcagtagttgaatctcttctgcggtgagctggtgctcaactgactgtatagttttctacgacaggttggtccatatacacattataacatgttaatgatctaaaaattcagtcatcagaaagatgaacagtacagttctaccgaagcttgattattcgtactgtcagtcagctaaagagatgtccagcagtttctatagtagttacatgatagtgtgtaattgatggaaatgtcatttactggcagtcgtccatttggagtgtataaaaatcatggaataattggaagaatgcagtattagaaaacagcattgctgggagccaggcgtctgttccatcggatgacccgtgcggatgtgccgttagccttgttgcttccatttggtaattcttgcgccgcc

SEQ ID NO: 42565 - DNA, 1645 bp, Zea Mays
tgagaggctacggcccaaatttgatgcttcggttgtggagttgcaaggctgaaggcgcaatctcaccacaatccctcccggcgccgcccgccggtcgctcccgacgctatgttccgccttcgaaattgcattcttccacatctactcttctcgtcccgccgctcctcttcctgcatcacccccctccatcgcctcctctccggttccgccgccaccaccgcgagcaaccctttcacggtcgccgactacctcgtcgccagatgcggtctctccagggagcaggtcctcaaggcatccaaaatcaaaaggatcctcgacctcaggtctccctcgaagcccgacgtcgtcctcgccttcctggcgggcctcgacatctccggcaccgacctcacaaccgtcatcgccaatgatcccagactcctttgcaccgacgtggggaagaccctgtctctccgcgtcgccgagctccgcagcctcggcctgtcaagccaccaggtcggccaggtagtcatcgccgcccagatccggttccgcagcccctcgttcctccgcaattttgaattctggcttgggctcttcggctccttcgacgagctcttgcggttcgtcaagatgaacggcaacctcctcagcgtcaacctcgagaaggttgccatgcccaacctggccctccttcagcgatgcgggatggagatttccgatattcccaacactttcctgtcccggatacttgtcaggagcactgagcacctccaggaaactctggcacgcgtttcagagtttggaatccagcagggatcgtgggttttccctttcgcgttcatgaggtttgcgatcttgaaccgtgagaagctcgacagtaatatacagctgtttgagaagcttgggtggtcgagggatgatatagcatcagcagtgaggaaggcgccgaatatcctgagcttaactccggaaagggttcataaaaagttggattttctaatgggtgttgttgggttgcagatggcagtcattgtgtatcggccagtgctgctattgcatagtgtggagcgtcggttgttgccgcggtattacttgatgaaatttctcaagaacaggggattgatgagttctagtttaagcttcctaactattgcatcgatgggcaatgataatcttctggataaacttgtgcaccctcacgagatgagtgtcccaggtcttgctgctgcttatgcttctagctgcgctggaaaacaccagtgggagctccttgacgacatgacaaagggaaagagaaagagaaagtgctaagacatgttctggtaactagtgctgtgaaggatctcttctaaggagacctatactgtcaatcaccaaaaagagcattgggtttgatctgaagggcagtgctacgtctatgtgactttgagcaatttctggtacttagggcttcgctttcaccaggttctcggggcattgtgtttttggaataccttctaggactgctgtctgacggccttgctggctaaggaaaaagtggggattgcggtctctaagttctgtctccaacaacaccctgtaaagggtcctgtcctctaaatatagaggactgtcaggtcccctatggctccagcaaggcactctattccgtcctctaaatttt

SEQ ID NO: 42566 - DNA, 422 bp, Zea Mays
cacgtacatggttcgcgttcggtttgccttccaaaaccgggtgtgacacttcggctttgagatgaaggtgtgtgtgatatgaaggtgcaatctgaaggaagggtgaacgagcgccgaagctgtggctgaaggaccttcggcttagcatgataacgatggtgaaagatggaaccgacctaaaggagaaaagactacttagtccttgacaacttgccttatggttaacagtaaatgtcagggacatgaatgtaattttgctcgggctacgtcccacgcttataaatagatgaacagtaacaccgtactgttcacacagctttgtaatcgcactcgcgtcactctcacgctctcacattttgacaaaccgaaggtatcaatgtaatattaatgttgtggatattcacttgcgattacgaaatgag

SEQ ID NO: 42567 - DNA, 3482 bp, Zea Mays
acaagtgcggtgccataagtgacagccacctcagtctctgtctgtggagctctctctcgcgcgcgttgccatctcgcaggttcttcatctcgtcgctctgttcaggcggcgacaggagatggacggggagcaggcggcgcggtgggcggcggcgcaggagggggttcccgtcggggcggaccttgtcgcggcggcgctgcggcagctgcgcttcctcgcggcggtggaccgccgccggtggctctacgacgagggcccgctgctcgaccgggccatacgcaggtacaaagcatgctggcttccgcttcttgacaagcacactaagggtgtggttgtagatggtccattggttgttcctcttgattgtgagtggatatggcactgccatcgccttaacccggttcagtacataagggactgcaagaaagtgtatggcagaatactgaacaataacaacgttgagtcgtccactcaaacaaagtcgacacttgagtcagaaaaagtttggaaagagctgtatcctgaggagcccttcgaattgttgttcacaagaacctttgacactgccgtggatgtcaaccctgcaggtgcagaggaggacattacctatgatctggtctcggctgttaagagacaatcctctttctattatcaggttggaacaccaacaatgcatgatccacggtttctccaagaagctctagctcgatacaaggcgtttctttacctgatcaagatgaatcaagaaaaaggattgcagcgcttccgtgtaccaacctatgatgtggatctgttgtggcacactcaccagctgcatcctattacctaccgcaacgacatggtgaagcttcttggaaaagttctggagcatgatgacaccgatgctgatcgatctgaagggaagaaactcgatgttggatttaccgagactactgaacagttcgagagtacctttggtgtaagatactggaaggctggatgtatgtaccgtggcaacgtgccatctcctgtgacatccactcctcagacattcagtgctgaggttggtactgggtcttacatctgcaaagcccagaaagatcttaatgcccttgatgtaacagttgtagagttatatttacaaattgtagacatcaagaatttaccatctgctgttcaaaaagaaaatgtgtatgtacggttcgccaagaatcaatcagatatgttcatcagtgacggcggcaggttggatatctcaacagttacagggaagaacaccggagtttgtttacagtgtgaacctaccggagaactcattcttgcagtaatggttgatcaattatcaaagaaaccagaaccgatagggaaggtttctttcccactgcacgatttgacagggcctgattctaagctctccttcgagaagtggtttgaactgaaagctcatggtgggcatgccgcttcacctcctgttagtcttcgtgttgcagcttctgctactgtcccaagcagcgctcagaaggtgttcaccatggtcaggatggagccattctctctcaagtcatgtcttttgccacattccatcaaggatcagaacacgggcagctggactcgtttcgtaaatgattgtggtaccgagcttatccgtctccagataagagagcacaaggcgaagaatagcatggccgtcgttcgagaattggttggagtattgaagtcaacaaaaaagcaaattcaacttgcagaattcaaggaaaacaagtggaccctaaaagactccaacttgccaataagtcatggcactgatggcagtctactcgatctcaaaggtgacaaccatctgatcaagctttatcggggaaggaaactggaatacgagcgcaaatgttgcagcgctcactctgaggacgtatcagctgttactgctgtaaagttctgtgctgaacatccatatggcaaagccgttgccttgctagacactgaagctcagcttatcatggtgaacgaggattggctcctacttccatggatctccatatcagtcctgtttatggacggcgatggcggtacgaaacttggcggcggtgccatggttcagaaaggtacagtgtttggatccgacactagcatggtgctagagacacagaccgtcggagcagggagcgtggcatccaatctagcacaatgtggcacttgcagcgccgtgttcggtggtgatgataaagaaatggcgaactgcaaggttgagcatgcgagctctggcgcttctcgcacggttgttgcaagtggtgagaatgggcacactgagactgctggctgtggaggcggctgtggtagcaattgtggacccatgatggctgaagaccccaaggccggcaatgccaagtccggaggctgtggttcggggtgtggtggtggctgcggtggcgcgggaggttgtgggaccatggccaacgaaggccaatccaggtccggaggtgttggcaccttgttgagctccaacgccatgggtggtgagggccagcaggcccattcagctggctgtggctccggctgtggtggtggctgcggcagcggcatggtcatcgaaggctccaaggttaacaacgttaacgccatgtccggcggctgtggctctggttgcggtggtggttgcggcagtggcatggtcatcgaaggctccaaggccaacaacgccatgtccggcggctgtggctctggttgtggtggtggttgcggcagtggcatggtcaacgaaggctccaaggccgccaacaccatgtccggcggctgtggctccggttgcggtggtggttgcggtgccctgttcaacgctagcactgctgccggagagggcctgcacaataagtcggctgggtgcggcggcggcgggtgcggctccgggtgcggcggtggcggcggctgtggtagcggcatggctatcgaaggcttcaaggccaaccacgccaagtctggtggctgcggctctggctgcggtggtggtggctgcggcaccctgttcagctccagcgctgcggccagccaaggccagtccagatccggcggctgcggctctggctgcggtggtggaggctgtggcactggcagcatggtcgctgaaggctccaacggcgggaacgccaagtccggcggctgtggcggcggttgcggtggcggaggtggctgcggcggcggaggctgtggcgggggttgcggcgccgtgttcaacgcatgatctcggtggagtggaggcatttgtgcagacatgcagtcgtcgtcgtctactgctagataccacatgctacagcatactgtgtattgctgtgcataatctactaaataaaaggaatgaataaacaatggatggatcggctgcctccgtggcgtttctgcaaacgaaaaatctcggtgttgttgggtgcagggatgaggatgaaaacgatttcaaacggtccgaaacgatatcgtctatttaacggttggttaagaaattacctgattta

SEQ ID NO: 42568 - DNA, 708 bp, Zea Mays
ctgtcgcgaccccgccgtggagttcccatgcacgcgcgccctaatttctgctcgctcggtctcaagcttcggcgcctggccgagctctctggccgtcgtcgagcttccggctcgtgcctatctccctcgtgtgcacgcccatcttccttccatgcgcaagcgaagctccctgctcgccggtgttcctccctctctgctcaccgcgcgcgctgctccctgacgctcctccctgccgcacccaccgtcggtccgtgcgcgcccgctctgctcctccgatgccacggcttccagcgctcggcgtcctgctccctattccctactcgccaaccactgttgtcttgtccacgccagcacgtctccatggtcgcgttcgccaagttcgccaacgttctgttaccagttcgattattgtcgctgctgcgtgcctccatgcatgctcgccgggtgccatttgttgtgcccttgcacccgctcttgtcgcttgtgacaactccggacgtgctacgtccggcgtcattcccttcactgctagtgtgacgtcttttgtctgtagtcgagcgtctgctccatcccgtcgcccgtcacttgcgctcgacacaagggccaaactggaatccttgtcgtgctcgcggatagcgcgtcaaatttagtcgtgggtaagccgattcatatttctgttagcttaattattggtttgatgaatagatt

SEQ ID NO: 42569 - DNA, 1832 bp, Zea Mays
cccgatccagagcattccccagtcctcaccccacgtccccacccttgtcgccctttcgcttccgtctcgtttggacctccatccgcggccgccgccgccgcgctgagtttgggccgggctctgttaatctgggcgactttgattttctctgctcccgctgccacggccgtcaggagtgaagcgatgctggagaaagaccggatatcctacttctacgacggagatgttggcaatgtctactttgggccaaatcaccccatgaagccacatcgtctctgtatgacacatcaccttgttctttcatatggacttcatcaaaagatggagatatatagaccacacaaagcatatccaatagagcttgcccaattccattctgctgattatgtggaattcttgcaccggataactcctgattcccagcacctatatgcaagtgaactaactagatacaatcttggagaagactgtccggtctttgataatttgtttgagttctgccaaatctatgcgggaggaactttagattaaatcataaaatatgtgacattgccattaattgggctggtgggctacatcatgccaaaaagtgtgaggcttcaggcttctgttacattaatgatctagtattaggaattctggagcttctcaagtaccatgccagggttctttatattgacattgatgtccatcatggagatggagttgaagaagccttttatttcactgacagggtaatgactgtgagtttccacaagtatggtgacctgttctttcctggaacaggtgatattaaagatataggagaaagggaaggaaaatattatgccatcaacattccacttaaagatgggatagatgacactagctttactcggctttttaaaacaattattgccaaagttgttgagacatatctgcctggtgctattgttcttcaatgtggggctgattcattggcgagggatcgtttaggctgcttcaatctctctattgaaggtcatgctgaatgtgtaaagtttgtcaagaaattcaatattccccttctggtaactggaggtggtggatacaccaaggagaatgtagcacggtgttgggctgttgaaactggggtccttttagacacagaactcccaaatgagattccaaaaaatgaatatattgagtactttgctccagattatacattgaaagttccaaatttgaacatggacaatttgaacagtaagacctatctcagttcaatcaaagtgcaagtgatggagagtttgcggtacatacagcatgctcctggtgttcaaatgcaagaggttcctcccgatttttatatcccggactttgatgaagatgaattggatcctgatgaacgtgttgaccagcacactcaagacaagcagattcaccgtgatgatgagtactatgaaggtgacaatgacaacgatcacgacgacggcacacgctaatctgcttcttctgaggccctggtgtaaatggaaacctgagattcttcactgttgtgtgtagttcagcagccttgagatgtaatagtttgtcagttgacagcagggatctaatttagcaggtcaaagtggtttagacttttataagggattctgacccctcctgaattacacattgtagtacaagtctgcatatttttaagcatgcaaaaattcaaatttctcagtggtattagtatctcaagaaaatacaaattcctcgctcagtaacattgctgatatgtggtgaatttgattatatctagaaccccaaggcctagtttgagtattctagtattgaccttaatctacatgtattgaactggattggat

SEQ ID NO: 42570 - DNA, 1826 bp, Zea Mays
gaagactatattgttgctagaaccgaagaggaggcgattgcagaagctcatgaaaaatatggaaaatcagttgaaatatatcaagaccctgatgttcttgatacttggttctcaagtgctctgtggcctttcagcacgcttggttggcctgatctttccaaggaggattataagcatttttatccttcaactgttctggagacaggccacgatattttgttcttctgggttgcacgaatggtcatgatgggaattgagttcacaggatcagtaccattttcttatgtctatctacatggtcttatccgggatgctgagggtcgaaaaatgtcgaagacattagggaatgtcattgatcccctagataccatcaaagagtacgggacagatgctttgagatttacactatctttgggcactgcaggccagaaaggttgacgtcaaataaggctttcacaaacaagctgtggaacgcagggaaatttttgttacagaacttgcctgataaaaatgatgtctctgcatgggatgtcttgttgtctaataagttcgactcagaagcatcactccagaaactgccattgccagaatgctgggtggttacaggactacatgaactcatcgataaggtcagcagaagctatgataagtttttcttcggagatgctgctagagaaatatatgattacttctggggggattttgctgattggtatattgaagctagcaaaacacggctttaccactcgagtgacaagatcgctgctgctacagcccagagtgttctggtgtatgtgtttgaaaacatactgaagttattgcatcccttcatgccattcgtcactgaagaattatggcaggcatttccatacagaaaacaagcacttatggttactccctggcctaccactgaccttcctaaagatttgaggtccatcaaacggttccagaatttgcaatcattgataagaggaatcagaaatgttcgagcagaatattctgttgagccagctaaacggatatcagcttctgttgttgctactgcggatgtcctggaatacgtatcaagggagaagcaggtcctagcattactttcaaagcttgacgttcagaacgtacattttactgaatcagcaccaggcgatgcaaaccagtcggttcacattgttgctgatgagggtttggaggcgtatctacctttggctgatatggttgacgtgtctgaagaggttaagcggctctccaagcgcctctccaagatgcagtcggagtatgatgctcttgttgcccgactcaattccccaagttttgttgaaaaggcccctgaagatattgttcgcggagttcgtgaaaaagcgtctgaggcagacgagaagatctctctaactaaaaatcgtctcacttttctgcaatcaaccattaccacttaaatacagtaatccacggggactctaccaggatgccattttgatcgatgacgcaggacaaaactgattgttaatagtttttggttgaaggatatgatagattggcaacgaagttgtgccttgtccagcagaaacacacattctttctagttcatatctgttgtctcttgaaacttaaaacatacattcggctaggcatataatttatattcctgacttatggttttagagcctttcgggatgcccttagttgaggtaaattttgttctgcctctgaagttttgctgatgccattgttagtaatattcatattttgtaaggtgggcgcacgttattagatatgaatgatctgtaaggtcggtgcacatgtattatcaatgactattgtttcgggcgtca

SEQ ID NO: 42571 - DNA, 1302 bp, Zea Mays
aaaaacccttccattcacccgcagctcccatcctctcgctcgccaggagaagcagccgccgttgctgctgccgcgtccacagaatggggggtttcgtgaagactcataagaccaatgcgtatttcaaacgtttccaagtgaaattcaagagaaggcgggctggcaagacagactacagggccaggataaggctgattaaccaagacaaaaacaagtacaacacacccaaatacagatttgttgtgcgatttaccaacaaggacatcactgcccaaatcatatctgctagtatagcgggtgatatggttcttgcttctgcctactcgcatgagttgccacgatatggtcttgaagttggtctgaccaactatgcacctactgcactggccttctgttggctcgccgtgtgctcaagatccgtggtttggatcaggagtacgagggcaatgttgaggccactggtgaggacttctctgttgagccagctgatgagaggaggcctttccgtgctctcttggatgttggccttatcaggactacaacagggaaccgtgtctttggtgccctcaagggagcattggatggaggcctggatattcctcacagcgagaagaggtttgctggattcaagaaggacgacaagcagttggatgctgatacccaccgcaggtacaaccccaagaagctgacatatgagcagaggaaggccagcctcattgaaaggctcaaccaactcaactcctccggtggtgctgatgacgacgatgaggacgacgagtaaagttaattgccatcgaagtagtgctatctcaatccagcgatcagcaattgtgtactgtcttatgcggggacctgtagtactgcaataggcatttttgtttaagttttgcgaggtgaacaaaactgtttctgttagtttcgagcttgagctctcaatgtttactctttacattgaaatgctgccgtttggacatgttttttctgagttctacacctgcttgtcttgcttatgtgacggtgcagtattgtgcctttaatatcaacctaaacattgactggttcataccaagataaataaagaaaagaaaaatacagtgtatagcggtaggagggatatggaaaacgagattgtgttagactgtctccagcaacgtcctctatattcatcctctatatctgtcctttacagtctcctctaaaagatttcatcctctatatctcatttctctccaacaacgttctctaaatcacgttctctatactcaaatacccatattaaagacattttttaattttattttt

SEQ ID NO: 42572 - DNA, 1310 bp, Zea Mays
ctcgtatttctgcatcataatcctactaaactcttcacaagaggacttgttagtagacccaaatataatatcatcaacataaatttggcatataaatagtctttagcaattgttttagtgaagagagtagggttagctttccaactttgaagccattagttgtaacacccctggtgttactgtcactaaaacttgagcataacatcatgagcattggcatttcatgtgttcaacacacctagagtgcattcagtaggccaaaatttcaaacaagttgtattgagatgacattttgtggacaaaaccctagagtagggaactcaaccctagattgggtgtaatagagcaaacaaggtttaaacaaaggaaaacttcaaaacttattaagatgatcatagagtgtcagcttgaatagacttatggggtatccaaaccctagaagtatcaaaaacccgaaacaagaccctaaaaagccctaaacctaaaccctagggggctaagtgcaaaattagtgcacttttggactaaagtgcaaaaaccatgataataaggtgtcttaagtcatatggttcacaattatgaagatttgcaacccaaaccttgagatttggacttacttgcaaaagagccacacttgaactcttttggttaagtctgaatttcagtgtaataggttcaactttggggccttgtaacttccaaacaaaaaggattttgcccaaggtcaccacatcaattttgtagatctattaaaggaaaacaactttgttagaggtactaaaccatggttacataaggaatttagagataatttgatccaaagatgggctgtcagacaagttttaactgaatcaggcacactgttcatcgatcttcagaaagatctcgccggcgataagaacgccactgcggctgggggatgggcctgcggcccgcggtaaaaatcttttgtggcgtggcatcgaactgttgaggtggcgcttgttgacacgaaggcgaagacgccacccttcgctctagccttcgtcaatctcgctacaccaatggaggcaatacgaccggcggggtccacccttcgtcctctacactgcaagacgaaggcatacgacgacgtcgccccgtcccacgtcctcacctgacctagaggcccacgtgggattcagcccattgtaacaggccccgcacggagtcgtgtgttacgggctcgatttgtaatggcttttctgtagtgacagtttgtaaccctcctttatgagaatatttcggggatagtccaggtgcccgagggtacatgcgtccttacatcgaga

SEQ ID NO: 42573 - DNA, 626 bp, Zea Mays
cacttctctctacccttccgtcaagttgatgtggcggcgtattggatatggcagtgcatcgactactcttcgactccatgtctttctctctacctagtcttgtgcctaacaacttcttaggaatcaacattgtaagcaacattacccttctaccttgttgactgccctcacctaatgttttcctttgctatcactttgtgttgttattcttatctccccggccacatgcaatcctcacactactacaccagtaatcactgaacttgacatatatgtgtgtgtggatgattggattttacatgacttgccattgatgaagaaggtataatatctaagaggacctcaccatcttgtaacatgtccattattaggccttgtttgggagaactccgctgtctgattgattcttgaattctgctccttgattctccaatggagtgatttcaatggtttcctaggagggatcgataagaagtgattctctcttgatctccacctgaaaatataatagggagcaggatgaagcaggtttttagcttctagcttctagtacaaatggagaagtgattatatccttatcccgacctgaatcaattgatattttaagtgcttggctggctaggagt

SEQ ID NO: 42574 - DNA, 1686 bp, Zea Mays
ttgtaacaagtttacagtcatcaaggacatggtcaatcagtcgatcctgcttactctccaaacatgagccgatgatattctcgacatggtggtgcaagaagttgttaaacgggtacctaatgatgaaatctgtcaggatttcaataattttttatatgcagattccaatatctaacttactcaaaaaatagatctatagcatacttgattgctcctagttgaatcagtcgtgttttggcagctgcactaccaattgatagtagaacagagatgaactcaacaatctggaaatgaaatagttagtgttaataacaaaaaaatagattttagtgagaatgcaatcgacactggattttggtggatcattctccttcaggcatatacaaagtacaccagagatgttagtttgtcaaagtgcatgaggttgataatgaatcgctgcctatttgaaggatttgatacatttccaactctgctctacatagatggctactcaatgattgatcatctaatggtagcatcacttcaccttgatcttattcatcattagacgcatatccatagaagtagtaatattagctgatgtggcaatgggattgataggttctgcatggtcttccgtaacgaaggagcatccctgtataaaaatcatgttacttctctcatgcccatgaatttaaaataaatttgtacatatactttcataaaggtgtgaaatattcgaattccaaaccaaatacaatagtattccactaaatgaaagtggatcaatcagggacgaagataaaccatatatcatattactattatgtatggaaagtgaatatgagtagttctttaagctcatagaccacaaatcatagtaatcacttcatcaattatgatagaatcctttgtatacaaagcactgcctgacagagctcccataaatttagacaaaaacttatttaggaattttgctatctgtgcaccttcaattcaaacatgtggctgcacacctgcacctacgattttgctaagaaagtgagaatagccagggccccctgatggtgaagcacaacagatcagcaagcactggtggaagatgatgatcgagtttatctttatcatctttcacaattctttattccactgaatgcagcattgaacaaccccctgcataaatttgatatgtcgaaatgatgatggaataacatggtgatgcagatgattggagcgaacttgttcacatagtcatactgatgtacagctagttttttgctattaattatttaaaaatatttctaaaaataatacatggcaaattttccctaaaactaattcgttcggacacgtcattttttcttgagtgatcaaaccatgcagactcattagctattgtaacctacttggatagacaacatgaacagactaaccaagttacacaaaactgaacctaatgtctttgcataaagtaagctaatctatttttaacatttagtttatcagtctcaacctttcaggacatcctacaagatacatggtaactcaattttcgccaacattttcagaccatcctcggaaaggagactgtttagaatacatttcttatagttttatttagttcgttagacataaactattctagaaggctataaggttgttcaacaccacaattgtagccaggtaaaatcactaactgcttca

SEQ ID NO: 42575 - DNA, 3695 bp, Zea Mays
ttctggtacaaccgaacaggcccttagtcgttgaccgtctcgctcgcctccccgtccgctccgctcccgtgctttcccctttgctcgctcgcggacctccgtcccggactccgactcccggcggcgctctcgcgccagcaagctcgaatctgcacgccgccgccgccgccgccgccgccccacgcccacggcgcctaggggtgggcgcttggcttctgagaacatgtaacgggtgttgatacgaaaataggttcctggaatagcgggttcattagcagtttggcacaactttgaagctgcaggggatttcaaatgccctttgtcatcaggtccacggttccactgagccagaggattttttattgtattttcaacttccctgaggatgtttgacagtactcaaaaagctcaatacatggatgggcacagagagaggtttattaggctggatgagtcaagtcctaggtcatctgtaccttctgaagtgggaggcaggagtacattgaggtccagcatgcctgggtttggttatggtccatttaatgcactaaggtctttcttgtctgggggctctggaagactgaagtcacttagacagtcacttacttctggtgctcctaagacagcttttgcggaagatcttaaatcatataagagaactatatttgatccccaggacaaacttcttttccgaatgaactgggttttcttctcgtcttgtctttttgctgttgcagtggacccactattcttcttcctacccatcatcaacgattcaaactgcattggtattgataaaaagttggcagtgacatcaacaataatacgtacggttattgattttgtctaccttatacgcgtgtgtcttcaattccgcactgcttatgttgctccatcttcacgcgtgtttgggactggtgagcttgtgattgatccgatgctaattgcaaagcgatacattaaaagttactttgcaatggactttgttgcattgctaccacttccacagattgttgtatggagatacctccatattccagatggcccagatgtactgactacgaaaactgcactggtttgggttgttttgatccaatacattccaaggttgcttcgaatattccctgtgatcacagatttgaaaaggacagctggtgtttttattgaaactgcttgggctggtgctgcttattatcttctatggtttatgctggctgggcataatgttggtactttatggtactttttaaccatagaacgtgaagatgattgctggcatctatactgtgacgatcccaactttggcttgggatgtaatagcagctacttgtattgcaataatcatcatcatggcagctatgatagttggcttacgaataatagtgcccaagtattcaacatgtgcaatggcggtcaagacaatcctttcaactttggcatttatgagcaagcactggtctctaaaatacttagtccaggaaatttcatctcaaaattatgttattgcttctggtggggattgcaaaatctaagtacacttggtcaagggcttttgacaagcacataccctggagaagtcctgttctctatagcaatatgtgtccttggactaattctttttgctctcctcattggtaacatgcagagctacctacaatctgttgctatacgccttgaagagatgagagttaagaaacgcgatgctgagcagtggatgcatcaccgttcactgccactggacatcagacatagggtgaggaagtatgaacgttatcggtggttggaaaccaggggagtagacgaagaaactttggttcaaactcttccaaaagatcttaggagggatatcaagcggcatctttgtttgggcttagtgaaaagggtgcctttgtttgaaaatatggatgaacgattgttggatgcaatatgtgagcggttaagacctgcactctacacagaaaatgagttcattttgagggaaggtgacccggtggatgagatgcactttattcttcatggttgtttggagagtgtaaccactgatggtggacggagtgggttctttaacaaggttcagctaaaggaagggtcgttctgtggcgatgagttgctcacttgggcattggatcccaagtcagctgctaattttccagtttcgagcaggactgtccaggcactcaccgaggttgaggcgtttgccctatgtgcagaagagctgaaattcgtggccagtcagttcaggaggctgcacagcaggcaagtgcaacacacattccgattctattcccagcagtggaggacttgggcagcctgcttcatccaagcagcatggcgccgctactacaagaggaagatggcagagcagcggcgcaaagaagaagaggcggcaagccggccaagtagtagccaccctagccttggggcgactatctatgcatctcgtttcgctgccaacgccatgcgaggggttcacaggctaagaagcaaggctgtccctaccattgtcaggctaccgaaacccccagaaccagattttggtgtcgatgatgctgactaacgagacaatcacactgtactcgcttgtaattgtactttacctcatctgtagattctgtacaagattcaacgacagctgaagaagatagtgtctgtaaaggtttgtaaccacgcacagacagaccataacggaggtatatcctgcttgacgtctatggaaatgcaaatctacttccttaaaacctgaagtgttttggagccacctccgcgcttccggggtacgggcgtacggcatcagtgtcacctgcggacgagtggcgggatcggatctaaaaaatttatccactggagttgtgggagatgtcgtgtctggtgccctctccctccgtcccgtgctgcactgcgctttcttctttgtgattgcttcgctcgcctcctccaccaccagacaccagcccaaactacctcgccagctccctctgcctccccctccctcctcccgtcgccgcagcacgcagctccgccggttttcacggcttggagcagatctgccacgccaccgccgcgtagaccaacttggtggagggatcccgtccgaatctgattcctattctccagctcgaccgctgtagcgagaggagagagagaaaggagcagtggcgacgaggtctatggcatcgatggcagcgtacctggcctggctcggcgggcggcgcagaagaagtgggtgcacctgctttaccacacggcgctcaacttccaccgccacctcttctaccaggaaatcagttcccccaatcctcccctcttcgcctcccttttgatctcgatctgccttcctgctcgcggacgggactggccttgtgttgtctctcccgcgcaggcgtcagatctcctcgacaagtttgagaccaactgccacgtggtttctttaggggtattcactgaaggcgacagctgatcgtcattcatagattgcaagcaataggggaaagtcacttcatccaaataatggtcattgccttttcttcagaatgctctatttacctatttgtaattactcccctctcatctgacatgtagagtatttgacatattcgttgtattagagagtttgacatgttcgttgtataatatgattttatcgatcttgatatatatttgaatggttgagcgcccgatagggcgctttctattct

SEQ ID NO: 42576 - DNA, 2185 bp, Zea Mays
aaaatattgttttcaaaaattgcttagccctgcctagaggtaaatcttgcggacagagtttgtcctttgcactaatgcctagctcagggtttattctgaggaaggatggctctacctacaaataatattttcatcgtatcatcgggagatctaatgcaaggttccctatgacgttttaatcatcctgaggtacacaaataagtcctaaggatgaaagtacttgaatcaagaattgggctaggaataggtgatgttctgcccaggttgattaaggattatagggaatgtaggcttgataatcgaggactatattaactagccacatgccctggtatgggacagggtaagcctaatcttagcttgaccaataccagaaaggctaccacgcaatggaagtggagagatggcgagagtagcgtgtaccctccgtggcaagagactagacggtggagtaactgtgctctcggttggcgtgaacccagtctggtcttgagatagcagggggcgggttggcatatgcaagggttaagtgctacatatgtcgtgtggttagggatccccagctgggtaaatcgatttggatcgtcgttatatccttcgacaatggagacttgatcactgccctgcaatctaagtcatggatggagtcataatgagcaaaatcatgttgtattgattaatgtgatgaggaaattagactagatgcaaacaaggtctattaatacttaatctagcattaaaatgtcgaaagtaaggactcattttagtaagtgtttctgcaactattaaagtttattcttgctaaaagccttttcttgattctcaaatccaacatatccttgagagtttttttccttagtcgggtaagacttgcgaagtacactccgtactcaggattttcgaacccatgttgttgtaggtgatgaggagtactctaagggttcctgtggctagagggcgtttccagttctgaaggaggactagctaggtttatgtatgagctttggagggtttctaccctcctgcttttgtactatgttatgcactttgagtatatcaggacttgtaataaatgtaactcttcctatgcaataaacttcagttttagaaatgaaaataatgttttataaagtcttccgctcttatctccgaagcgtgtgtgtatcgaatgtgattactgtaatacgcatgtatggtgggagatccttgggatgatgagttcaagttgatgaacttgatagccttgttaagttacacggtacacgtgcatagccatttgaggccgttaatggcaaggattggtgcatgtgggcctggtaacttgggagggctgtcacactacccatcgatccgctttcgactccgcttttgtgtagcacttgtttcccttaaggttagcgcaccagaatgggtaatggcatttctccggcgatgtcgccgccgcgatttggtgggtggcgccgccggtggcggtcgggtgagaccggcttgtgctgggtcatcgatagcgcaatctgcggttcagattagaaggcatccactggtttaggtcagagtagcgtgggtcgtccgattcggatcggacgggcgagggatgaatcagggttcattaaatctgtgcgctcggttctggattgaacggatcggtgcacggacgagatcggcaccgtcggtttcggatccaatggttattaacgcgtaccggttcatccgcggtaggatctaatcctagtcgctggatttagatctgacggccaaaatagcgctacaccccttcgcgagtgtagttttccacataggcccctcggttttcaaggaaacaacccgcaatcctcggcgggatagttctgagtcttaggagttttatacagcagcccctgaacccgttggaaattgatgtgcagtctagacagttaataaaacctataaaaatcatttagaaaatgaatttttaatataaaaacaattcctagaacttgtttaactcatagaaaattcatattaagtccaaattgatccattccagtttctataattttgtaatattattgtttatcaactagagtctctgttttgacatgaaaactatattaaaatttatctcctaattaatcttgtacctagcacatagaacctttggaaattcataacttaaaatctataactccaaaaattaacgattcat

SEQ ID NO: 42577 - DNA, 1085 bp, Zea Mays
ctctctcactccttatcccttctctatccgccagagggaaatacccattgatctcatctcatgccctgttgccgcgcctgctcctccttccccatccgcgcccaccgccgcccctccggcagccccgccacgagcccacccgcaagcttcccgcacggccaccgctgcctgctctcgctccggtggccttccgctccgccttctcgactccgctcgcgtcgaaccctacccgtaatagaataaacatagaaggcactttctgtttgccgtgttccgcaaggaagagagctagttatagatctttccgagtgtacagtttatttggagggaagaaggataaagatgagaatggcgatgaagcgccatcgaaagcagggatttttggaaacatgcaaaatctctatgaaactgttaagaaggcccaaatggttgtccaagttgaggctgtccgggtgcagaaggagcttgcagcgactgagattgatggttattgtgaaggtgaactaatcaaggttacactttctggaaaccagcaacctattagagttgaaatcacagaagctgcaatggagttgggtgctgaaaaactttcggagctggtcaatgatgcatacaaggatgcgcatcaacggagcgtccaggccatgaaagagaggatgtctgacttggcacagagcttaggaatgcctgcgggccttggtgatggtctcaagtgatgctgcctgccattcgggaagcctttctaataatttttttccctcaattttgaatacgagccgtgtgggcacctctcgtagtcacgtagtaagaagtgtactcgtgaccagctgtttcgttcagcgttagctgtgattttgttttgtacaagcagatatatttgcactaaatcgtggtaacgtcgtcctatggaactcggatatcacatgtggtatgctaatctgcaagatataggggatatgcaccgaaaccaatttaaatcgtgtgataaatgatgtacattgtgtgtgtaacaaattaatgaattatgtttttttatacacccttttttttaacgtgaacgtaagggaccagattgtaaaatataa

SEQ ID NO: 42578 - DNA, 1286 bp, Zea Mays
cccttatgacatccgacttgaaaccatgaaatcgacgacgcctttcagctcagcatttcaccgaaaatagggtgagtgctgcgtcgaatcgcgcttcatcttcatccacatcgagaattctccggccatgtactgatttatttccttctgcgcctaatcttcttggatcttggcgtagatgaggatgacgatcgacgacttgttcaagcattttgtcgagcacttggtgaatatcacactgctagcttcgtcttcaccttacgcttgggattcttgacaacacacagaacgatgacgaccttcgattgaaatctggagcgagctggtgaggtgggggtcgagcaggggatgatgggttcgacgactcgacgataaacacgaacacgccgaaacccgatggatgaggagcgagctggcgaggtggggttgagcaggttagcgcgagctcaggcgatgacgaagtcacgagcaagggaggacgggttcaatagctcgacggcaaacacgagcacgcgcgaagctcgatggacgaagagcgagcgcacggatgggctcgggctgggacaagaggacgacaaacgcgcagagcttcaaaatcacgcgcgagagatagaaagacgcgtgaccagagacctaagcatccacgctggcaatttggacgaaagcgaactagtggcgacaactcccgaccaggcaacgatgcatcggcacgagtgtcgcgggatagcagcaccacaacagcaagcgagctgcgaagcgaaattaacggcgggccagagcgaccaatcggcgagatccaatcggcgagatccaaataccacgtgatgggcatcagggacaagcgcgcggcagcaactatgatcgactagcctactgatatagggccaagcgaggtcgacggcattgggggttctgcgacaaggcaacaatggctgacgagttggagcactagcgagtagccgacgtgggtgagcaaagcaggcaggacgccgggcgtcgcggcgagctagaaacggattcggtgcgggagttcgacgcgccgtggggcgagtagagaacttcacgcacacaacagacgacctcgacaggaaactcaacggcggtgatttgggcgagcgcgacataagagaccagagagagagacgcgctgacgagtaagcaggaagccgcgacgaggaagctcgacgcgcagactgggcgagctgggcacgcggcaaaagaagaggagcagcgcgcgtagggagagggaaaaacagggacgcgcaggagagaaaggagctcggaac

SEQ ID NO: 42579 - DNA, 317 bp, Zea Mays
atcacccttgatcacagcaccgtgtcgacgacttgcgatcctcacactcacgcttcgtcgaatgccactccagtactcgttagaagaagagcttcagcagttgattactgaagaaaagaagacccctgtgtgacgtctacctagtactcgatggaaagtctgaagtagaatttatcgccgtgtccatggaagtggagcgacttaatcttggtaagcgaactcgttacttcgggtagttggaatggtaatttgattagctggatttattaatcgtaataatcctcgtgttagcacaggcgcgtggtggtagtgttaaa

SEQ ID NO: 42580 - DNA, 2094 bp, Zea Mays
ctagggttcattctgacggagaaatgagggagagcaaacatggagaggggtgagcccactagcccatatcctgagccacatgagcctgaaagatgcaacatccattccttctgcaagaccttgactacttcagatacaagcacccatggtggattctctgtccttaggaggcttgttgaagagggtctgccccaactggatatgactcataatccaccatggcaagaactggtggctaaagatctccatggaaatgaatggtatttctgtcacatatttcgagggcaaccaaggaggcatctacttatgacagactggagtgtttttgttagctcaaaaagattggtttctggtgacacatttattttcttgagtgtgacggcattgcatgttaaagttgtcttgtacatttacatttgtttcctggctctactgaatttttggatcaaccttctaactgttcttcatctaattgaggtgagaacaaagagctgcgggtcggggtcttgatttgttggatgatatctttttgggttataaagctgaatggccaatggatattggcattacaatagacgcactgaaaatatatgctgaaagtcagattttcaatgtttttactgattgaagtatggagatatctaaattttcttatcaagtatctacaacaagtagtttgctttgctctagctctcataatagatctttataatgtgacattttgctatgtatgtgaacatatgaccctcttgatttgttggatgatatcttatttacttgtgtagtagtgatcttgttttatgcaatcatatttacttaccattttgcatcgtttgaggtgcagatcagtggagtgcacccaaaatagataatttgtttccccaagaagattctttatttgttttaaccaactagaatcgtccatgctgtttttagattcatccatgtttgcatactaaatattacttctaaagaaacatgttacatgcatattttttagcagaaacaaaatacaatagagttgtgaagaaggtatttttgataactgcgcatcgtaactatcttggtggtgaaatcaacttcactgatggatctattaacgtgttggctgcgacacaaatgcattgggaggctgctgaacatagatgcttacaaatttagtgggtaaatgaaacgcgattgcgattgcaattagcagggcacactttaccttgttagtataccaaatgaggagtaaagttattaatagctataattagccacccatgatgtagtcaagaaaaaaataactgaactcttctgcttataatttcaactctattagtagatattgttatcaggtgtttaaaaagaatgtggtcatcttgtgtgacatttgtgttcataaattgttgctctacttataaccttttttccaatgtactcatcagttctacactcgcagccaaaatgtatgttcatacagtgggaactcctgcatacattgctcatgatgttcttctgaagaaggaatacaatggaaaggaattactgacgttacctatacagaggatcaccatccctgagataagaaaccatccatggttcttgaagaacctcctagctgacctaatggatgatagcatgatgacagctggttcacgtggactcaatcaatttctgaatgatgacattgacctcgacgatgacatagaggacctagactcagatgccgatcttgacctggaaagcagtggggagatcatgtatgctatttgacagcattgaatactttgttgtgtcgcaagttaccaagataattagagacaagggggcaggttgctgtgcttacaagtatctgttgcaggtgttgttcatgcctgatgctgatgccccttttttcgtactgttgtgtttggatggtgtaccaccagtgttttacaacagtttggcccttggaattgctactgctaaaacttcgttcctctgagaagaccttttgtttttgcattcccaaccgagggacaacaaagtacttgtattattacattgtgtttgtaacatatgtatttggtgtaggaaaataaagaaactgcattgctcgttcttgttcca

SEQ ID NO: 42581 - DNA, 1168 bp, Zea Mays
ctgtcgcgccttcttctgattttttccaccagcggaggcgtacgtcccggcctgccctcttcccataccggtgctcatctccctgggttgaagccgccgcacagccttcatctccccgcccagcccctctctctggcgagcttgacctggcatcgagctctagcggtcctcctccgctgccaatcgttggaccttgcccctgctgcgacgtcggcggctccccacaccctctcctccctggctcctgagcttcaaccttggagcttgtgccctctctgctcgccggcgacctgcgtcttctccagccaagccatagccaagctcctctccatagccgacgcccttgccctcctgctcgccatggctggccatcggatgccgcacagcaacctcgccgtttccgagcccgaccccgccatggagctcacggcgcctcctgctgctcaaccttgggcgccgtcgctgagctcgccctgctcccttgtgcttcctgctcgccgtctctggccgtctggcgagctggctgtcctacccgtcagggtggcgcgtgctccatatcccatggcgcccggtcgcccctctctgcttgtcttcgccgtcgggccagtctctagctcgctgcgccctcgcctcctttctttgtttatgcttctctcttctccctcatcactggttcactgtgatagcgcaggttgtggtggtacgtccgtagatgtggtttgagccagagtttggtgtgtgcgaccccgagcccgaggaagatcctaggcaccctcgtcggtgcggacgacgattgaatcggagattcccccgtggcggctctcagctctctttctcggttcacggaaaaaaagtgagtcagcggcgcgcgcaagccacggagcaagcgccgactgcccggtcccacctgtcagggtcagcggccgatatgcgcgcacgcgggcggaggagagggtttgggccgcgcagatgacttcgggaatgggccgagctgaaggactttgggcccaggcgcattcactactttgttttttctttttattttattttctccattttttatttcccaattccattttaaattcagatttaaaattcaaatcatgtgccaaattgtcctcacattatattgtgaaattagaagtgccaattttggagatataatttt

SEQ ID NO: 42582 - DNA, 4197 bp, Zea Mays
gttctgcaggcgcagaggcactgacaggaggggcctggtgttgaggttagcttccttccgaattcccaaaccgggtatacgctcatcggttcctcggcgctcgcctcgacctccgactcgaagcggccctcctccctcgccggacgacggcgacggccgtggccgtctaacacatccgtggggaaccgctcccttagttgggcctcctccggccatggtgcacagcgcgtacgatgctgtcgagctggtggctgacgtgccgggccacatcgaggccgtcgcctcccacgctgggaagctcctcgtcgcggtttccgacaccgaaggcttcctctggggctccgactgctccttgcgcatctactccgctccttccccctccgacggcggcggcgagatccggtgggacgggccctacgcgctcgagcggcaggagccgcggttctggcggcgcccgcccttagccatggaggtcagcgccagccgcgacctcctgatctcgctctccgagtggatcgcgctccaccgcctccccgggctcgagaccgtcgctgtcgtctctagcaagacaaagggggccaacgtctttgcttgggacgagcggcggggcttccttgccgtcggtcgacagaagcgactcaccgtcttccgcctcgacagtgggcgagaatttgttgaagtgaaggaatttggagtgccagatattctgaaatcaatggcctggtgtggtgataacatatgtcttggaatcaggcgggaatatatgataataaatagcatgaccggggcactaacagaagtgttttcttctgggaggatcgctcctcctttagttgtgcctctccttactggggaactgatccttggcaaggataacattggggtattcgttgatcaaaatggtaaacttattcaagacggcagaattatttggtcagacacaccagcttctgttgttatacataaaccatatgccgtggcccgcctgccacgacatgtcgagatacgctctcttaggccccccaatgcattggttcagacagttgtgctccgtgatgttcaaaagcttgtccaaactgaccactgtatacttgctgctctatctaactctgttcatggtttgttgcctgttcctattggagctcagatagtgcaattgaccgcttctggagaatttgaggaggcgctagcattgtgtaagctacttccaccagaggattcaaatttacgggcagcaaaggaaagctcaatacacataagatatggacactttttgttcgataacgggagttatgaggaggcaatggaacagttttcagattcacatgtggacattacttacgtgttatctctgtacccatctattgttctgcctcaaacaaatattataggtgatcatgacaagctgctggacatgccagaattagcaagggaatcctccgatgtgacagatgagatggaatcatactctttacagcttcaagaaccagatgataaatctccattggaggtaaagaaaatgagtcacaatgctctagctgcccttgtgaagtatttgcagaagaaaagaagtggcataattgagagagcgacggctgaagtaacagaggaggtggtctctggagctgttcaccacagcttaaaattatctgagccatataagtcaaagaagctgagcaagaaacgagctcagacacatacaagctctattgctagagaaatggcaactgtactggatacttgtctgcttcaagctcttattcttactgggcagtcatcaggggcaatagagttgttgaaaggactcaattattgtgacctgaagatatgcgaagagtttttgaaggaaaggagagaatatatggttttacttgaactctataaaagcaatgaaatgcaccgtgatgctctccaactactcaatcaattagttgaagaatcaaaatctgaaatggagaatacatattttaataaaaaatttaactctcaaatgatacttgaatatctcaggcccctttgtagatctgacccaatgctggttttagagtcttccttgtacgtccttgagcgcaacccatcagaaactattgagctctttttgtctgaaaatgttccagcagatttggtaaattcatatctgaagcagcatgccccaaatttgcagtcaacttacttagagctaatgctctcaatgaatgatactgggatcaaccctaatctgcaaaacgagctggtacaactgtacctttctgaagttctagactggtacaagattctgaaggaagagggaaactggacagagaagacatattccccaacacggaagaagttaatatctacgttggagagcaattcaggttacaatacagacgcacttcttaagcgccttccccaggacgctctttttgaggagcgagctatattgtatgggaaaataaatcaacacctcagagctctctctctctatgttcacaagcttcagatgccagagcgagcagttgcatattgtgaccgtgtttatgaagaaagagaacaacaaccgtccaaatcaaatatctattttaatcttctacagattcatctgaacccaagaaaagctgaaaaggaatttgagcagaaaattattccagttgcatcacaatactctggaatccaaaaggctagtgctactaagcccaaagggggtcgcgtaggtaaaaaggttgtagagattgagggggctgatgacatacgctttagccccagcggaacagatagtggccgaagtgatggtgatggagatgatgtaaatgaccgaggccctataatgttaaatgaagcactggaactgttgagccaacggtgggacaggataaatggtgctcaggctcttaggctgttaccaagagatactaaactccaggatcttgtatcatttcttgagccactattgcgtaactctagtgaacatcggcgcaattatttggttatcaaaaacttgattttgcgggcaaacttgcaggtcaaggaggatctgtataatcggtgtcaagctgttgtgaagattgatggagatagtacgtgttctctttgccataagcgtgttgcaaatagtgcttttgcaatatatccaaatggacaggctttggtgcattttgtctgctttaaagaatcacagcaaattaaggccgtcagaggagcaaactctgtgaaacgtagataatatggccgtgatccaggtacacccttgaacgggacactgacaaatcaatatcgaggtcgggcgaccagctggtcattccagaggaccgaccaggcgcctaatcacgattagggcgacaattaggacgcttaatcggtcctggtcgacctctggtcgtcccctaatcgtcctatatatttctgggcatatgtatatataatatgatatatgtatatataagcaatactgcaataggcattatataagtctgaaagtatgaaattgaaactgagtaacagactgaaaggcaatatagacatatagcactatagcagaactgaaactgaaatatggaatacaaggctacaagcagtaatgcagtacctactacctagagcatatcatcatccaagcaaaaagcagcagcagcttctccaacagattcagattcatcagaatttagacaataggaaagataggaaagggggagaagggggaaccttgagatgaggagctcatctcgtcgctagtgttttggagacgccgccggtgttcttgagctgctgctggtgttctagagccgcagcctatgttctggactcggcagaggagaggaaaagtttcaaggggcggtggcgcattgcctttatactactgtagatgggccgaaaaaatagaagcccagtagcccactagaaaaccctagccgcctggacaaatcctggtcgatttaccatctagtcggacgacctgatactctagtcgagtcatccggctgatcggccactaccaggcgacctgcccgactaatcgcgattagtcggatgacttgaaaacagtgtttgtgtgcaccatatctttcatgattatcatgcactatgtaatttattttacatatgaccctgttaatatagttgtatttataacatacaaatgttgaactaaattaaactattctcgttgacatttttttatgttagtatgtactttatagtgctgcactgctggaagtggct

SEQ ID NO: 42583 - DNA, 4290 bp, Zea Mays
cgtcacgtcaagccggcacgctgcgcacgctccggccccgcggccccggatgtcagagagacttgtccgagacagcatggggcgacggtccgacggacacgcagatccgtttgccgcccctgtcctgtccgcctgcactgcccgattctgccgcctgtccacgaggcgaggggcggtaaaaggctgggtgtgtgcctgtgtggggtgtgggtaggggaggcagagattgctgcgcgcgccccggagcagagcgagtgcttgccagttgccattactgttcggtgcggtgaggtagtagagggataaagaaagaagggactggaaggaaggaaggagtgagggagatgccggcttcgcctcgtatggggaggggataagggaaggccgatggcaatgccgccgtttctccctcttcgcgctagtacgcgttcaaagcaactgattggctgttgatcagcaagatggatgggaaaggattgtttgcggagatagggatgaaggaggaggacattgccacaatgctgtctgggaagaaagtttccgagctggcagaggatgcgtttgatggttccaaggaagaaagacagatctttgagggtgtcttctgcctaacaaacgttgatggtggattgaatgatcattatcatggaggcattggacatactgttcatgcagggaaagtggtgacaagttctagaaaaccatcaagctctgccgacaattacaaggcagcacactgtcgcatagtagagtccttcactgctggcaacttatcaagctatcgtgtctcctgtcttggtgccgatgagcaggctcatggagcaatgcattctcctgatgctgtccgtttcaagcttgcagtgcagtggacgcctcctcgccctgatcgggtgtacactcgtagggtggtgactcgcaggagcgagagggcaagaatttgcagtgcgatggatttggagagcatcgacatttgcaatttcagtcgtcagagggatggtcgtggccatggacagctttggaaccatcttcggatgcatgcacatcttctgatggtggatgccgggtggaagattgaggccaaggaaagagacaacaggagtaaagttgatcatgtttatgtggcgccagacaatgtgacacgcctgtattctcttcccagagcatggaaatgctttggccagtggttgcttatgacaacaccctgcgtcaatggaaatgagtcaattgactacggaaaggagtggtcgaacatgcatgaatttctgtatgatctgaagaacacactgctatgcctacagtatgaggtccaacgtacgaagccagcactatctttcctctaccagtggcagctccttgatcctttcatggctgttgtttgcatcgataagaaggttgcagctcttaaagatggagtggcactgaaagctgttaacagcaccgtgacttgcctcaatcgcagtgagtgtaagatgttggatgccaagaattcaaataggtcacttggggtcaactccacaagtaaatatatgaatccatatctcagctcctgcaaaaaaagtcttctgccgcttctctctgaatctgattatcagcctgataaggaagggaatactatgcctaatgaagaagcttctctattttgtacaaacaagactagcgaagatgaagctgatcggcggtcattgtgtatgtcagaaatgaatgaaataggcataagaagcacagctcatcacatagttatgggtttacatgatgcaacagcttttcatggctcaagccaaacttgttcggggaggaaaagaaaatttccgtgcatcaagtctaaagaggataatcaaactgaagacaagtctgacccattattctttccacccagctattcatccacattaagtcatctggttgaaaatgttcaaataaatgatgttagccctcatggctatgaaaccacggagattccaaacatgggcaatcgtacagatattcttgataagatgtacctaggagagaatttattgtttgcccccgaaactggtaatatgctacttgaaactacagatgatatcaacaatgaacagcatgatgatgcagctgtctctgagccccaatcggcagataatgatggaagtggaccttctggtgcatcatcactaccaccagagaaagatgcatacatgggatctaaagaggattctattaacgactatcatgatccttcagttgtctctgagttccaaattgctaataatgatgcaaaatgtgaaccttctattgcattcttgccagaaaaggataaagatttggaagctaataaaacgagcttggaaggtccagcaaaaacaggccaattgtcatctgaagctagtggcagcactttgatgatctcagagccacaagtattgtttgtgtccccacaagatgggactctgtctttcatgaacaataatacgaacaaccaagagatgtggaggttcctgaatgtttcccctgataccatggataccgaaatgcagatggactctaattcattggtttacgaggcaagcttgattcagggtttcttgtaccttgacaatgagggttctccaatttgttggacagtgatgaacccggaacctcctaggcgcttgatatgtgctactgctctggaaccaaactcaaagctgtcgaaacagtatgttgaaatgaggttggagaatgatgcatcaacgtctgaacacaagaagggaggaaaattgtctgataaggctgcagatatccaagacaatgtcagtagaaaaaaacagaaagcaaacattgcttctttaaataattgcgtaagtatggacaatttaactgtcaatcctattgatcctgtagttctcaatgagggagagcagacaggtacagcaatcactgagcaggttcctgttcctttgaatctagtgcttgagaacaaaaatgacaaggaccaaggtgagcaaagcagtgaaacttcagaacaacttatgtccaaagaaccacaaaaaagggacatcaaaaggcaaaagagaacatggtctcatacatgcaagtttgatgatgatgaccttctgatgacagctgtaatatataagctgacagcacgttacaggaactcttttcatcggaagctcagaaataaattcggtttcaggcgtcttccaacataccactgggagaatgaagataaaggtgacaggaagaagtttcctggagaagcaaggacggtgttgaacaagttacttgaaatgggcattgttgctagagtggatattcttcaatgtcatggtccaggaggcaaaaatgtgttgaaggatgggaacataactgcgagtggcattcaatgccagtgctgtggtaccacattcacaatgtccaagtttaagtgtcatgcaggtctcaggcaagaagtcccatctctgaatcttttcttggatacaggcaaatcttacagtctttgtcagcttcaagcatggtctatagagcagaaggtgaggaaagagcatgcaaaggatacaatgtcccttcaagcagaccaaaacgatgatacctgtggatcatgtggcgatggtggtgaactgatatgctgtgacaattgtcctgctagttaccatcaagcctgcttgtcttgccagtttgcgcaaagaaagagggactccaagaatgccggtgctgctgcccgcccaccccctcgtggatcgagctttttaaacttcccatggatattccagatggcaactggtactgctctagctgcctttgcgacatttgtggtgaagtaatcgattcaaaggagcttgtaacttcccttcctgctttagattgctcacagtgcgaacgccaatatcatcaacacacacacacacgggcagggcagactgctttttaaccaagcctagatcaagatttgaatgacctaaaactttttgaccatgtaaaatgtgtatctgccaaagttccgtgcaatgaggatggatctggtacctggttttgtggaagaaaatgtcacgagatctatatgaccttccgttctcgtgttggagtgcctgatcacatggacgatgatctgtgtttcaccgttcttcgtaacaacggtgataagaaggttcgcacggcagaggagattgctctcatggctgaatgcaacatgaaactcatgatcgccacgagtatcatggaagagtgtttcctgcctattctagatcccaggacagggatagacattattccctccatattgtataactggaggttggttttcttttgtcgttttggccattcgaatccttt

SEQ ID NO: 42584 - DNA, 1355 bp, Zea Mays
atggaggaggaaggccatggcatcgtcattgtcggcggcggcatctgcggcctcgccactgctcttgcccttcaccggaaagggattgctagtgtagtgctggagaagtccgagaccttacgatcagacggagccgcgattggtgttcacgccaacggatggagagccctggagcagcttgctagcttatttctctctaccattatcgcagcttgcttgcagagatcgtgaacaaacttgctgcggcgtttcaggagtcgtggcgtgtggaaggtcacaaaaaagactacccaggcaccgatcgggtgctgatcgggtgtgacggcgggagctcggcggtagccaggtacctcgggctgtcgccgccgaaagccatcccccgcacagtcttgcgtggcttcactgcgtatccgcatgggcatccgttcggggccgagttcctgcggattagaggaggcggggagttcgtcgtcggcaggttgcctgtcacccgcaacctagtccatttcttcgtaaccatgcctaatcctccaacaggaataatgctcgccaccaaagacgtgagcgccacgacgacgaaggatttcatgctggagaagctgcgagattgctgcgctcccgagatcgtccagatggtccaggactcggacccagagtccctcaacgtcgtgaacagcatccggtaccggtctccgtggcaggtcgcgctcgccgccttccacaggggcgccgtcacggtcgccggcgacgccatgcacgccatgggcccgttcatcggccagggcggctcggcggcgctcgaggacgccgtcgtgctcgcccgctcgatgtcacgggccaacgccgccggcggcggtcacggtgccgcggttcgggagtacgtccgggagaggaggcccagggtggcgctgctgtctctcgagagctttgtcgcggggacgctgctgcgcgctaggtcgctggtggggaagcttgcctgcgtggctgtcctggcgctccttggcaccaggtcgcttcggcatgccgacttcgactgcggtcgcctctagtcctcgacctcgaggatgcatttccttagcttgtggatcatggcatattggcttctgtgcgccggacaagaaaattgtgcgacgacaataattgtctccatccttcatcccggatgatgtgatgaaacgatgcatctgtttcttttttttccttttcatttttaacttttcatgttgagcactacgctgaaagcaaatgaacgaccctcattggtcagtttgtttccgagagaaaggagttagctatctctgcaccttacttattctcatctcttattttaaactagtgttgtctatgtatttctg

SEQ ID NO: 42585 - DNA, 2689 bp, Zea Mays
tgcgctgtggtggtggtcgtggagtcaggaggtggaagagtgagggctagggtttccccgcgtcccgtcgccgtcgccgtcgctctgcaaggtggagagggtgctgcactgctgctgccgtcggtggcggttggaggctggagctcgttcgtcgctgtcgcttccccggcattactggttgtcttgaagaagaagatgatggtgggctcttcccgccaccagctgctgcagaggaaggggaagtccgtggctgacaagggcgccgccgccgccgccgccactgtggcggcagagaaggtggtggtcgcggtgagggcagccacgagggagatctccaagacggccatcatctgggcgctcacgcatgtcgtgcagccaggcggaagcatcatacttcttgtcgtcatcccggcacacagctctggcagaaagttctggggctttccgctgttcgctggagactgtgcaagtggccataagtctatgttggatcagaaatgtgatttatcagagttgtgttctcaaatgttgaagaaaattgatgtgtatgacatagacaagataaatgtgaggtataagcttgtttccggctctccttctggtgttgtagctgctgagtgcaagcaagcacaggcaagctgggttgtgctagacaaggatttgaagcatgaggagaagcgttgtgtggaggagcttcagtgcaacattgttgttatgaagcgatctcagcctaaagtccttcgacttaatcttgtgggatctcctgataaagagtctaaagcaacatgtgcagttccacctgtgctagatggttctaccagtaaaattgcaactgatgttaaggaagcacggagttcaattcgaggacctgttgtaaccccaaatagcagcccagacctggagacacctttcggaagtactgaagcgggaacttcctctgtctcgagttcagaccctgggacatctccgttttctgcttctgaaacaaatggttctctgaagaaagaggtgcaacaaacaaaggataaaattcagcattcagatgctaatatttctgattcagacagtgaaacattgagccctccagcaaatttctcacttcagccatggatgtctgatattctacagggaccagcatcgtcaagatcacttggaaaagttccacgaaaaaatcgcactgcaactgcagatgttttgttggaaaagttttccaagctggatctcctgaatgaaattaatgctatgagaagcaggtcagacttaaacttccgaggagatgtcagggatgttgttttgttggcaaggaatgcacctcctggaccacctccgctttgttcaatatgtcagcacaaggcacctgtttttggaaagcctcctcgctggtttagttatgctgaactggaacttgcaactggtggtttctcacaagcaaacttcttagctgaaggtggatttgggtctgttcatcgaggtgtccttcctgatggccaggctattgctgttaagcaacacaagcttgctagttcccagggtgatgttgagttctgctcagaggtggaagttcttagttgtgcacaacatcgaaatgttgtaatgctgataggtttttgcgttgaggacagaaggcgtttattggtttacgagtacatctgcaatagatctttggattcacatctctatggtcataatcgagaaacattggagtggactgcacgacaaaagattgcagttggtgctgctcgtgggctgcggtaccttcacgaggaatgtagggttggctgcataatccatcgtgacatgagaccaaacaacatccttgtcacacatgatttcgaaccactggttggagatttcggcctggcgcgatggcaacccgatggagacatgggcgttgaaacaagagttatcggcacattcggctatctggctcctgaatatgcacagagtgggcaaataacagagaaggctgatgtatactctttcggggttgtgttagtggaacttgtcactgggcggaaggctgttgacattaaccgaccaaagggtcagcagttactaactgaatgggcacgcccattcttggaggagtatgcaattgacgagctcatagacccacgactcggagagcgctactctgaaaatgaggtgtactgcatgctgcacgcggcaaacttgtgcataagacgcgacccacattcaaggcctcgcatgtcccatgttcttcgcattcttgagggtgacatggtcgtggaatctggtggttctgttactggcagtagtgattctgggagcagaagctggaggatgctgaacgaacagcaacattgccaggagtacagtagcccggctcaacaagagtcgcaaagggcaggcgaggggaaacgctcctacagtgccttgagggcctcttgggaccgagacaagcagagtatctccaacagatattagtgccgtctcataatgcagtgcagctgagattgtttagtcctgtattattccttcgccctacctcccggtctcaattttttttggcttgctcttttgtcttcacttcgtagcaatttgtaggccgaaagcttttgctgatacattgccctggtgtatagtagaaatgggtaataggtttacaagtatattgagctgcaagttagaccctctccaacaaggactcgtaaacgcactacaccaa

SEQ ID NO: 42586 - DNA, 626 bp, Zea Mays
gtaaaaaaaaaaaaattggggtcctccgcctcccgcaatgcctcccccttccgcctccgcctcccgcttggcgacccactggatagctgacgccctcgccgacgacgagtccctcgacttctccgtgctgaaggctctgttgggggactcgtcgaagtccctcgcgggagccccggaggccacgcgtgagcgggtcgcgctccggtgcattcaggaggtgtcgtccgtgatagcctctgggggtgatgccgcggccccggcgggggtgcctagggttgatggcgcttggtcatgcgaggatgtgttgtttcggcttatcagagacgttggaagctccggagaattggagaaggatttgcttccacctttaagtcaagacatccaggaatatatatgtaccaagaaatttacactaccagaaacttctttccagttgagttccagcgccgcttaagccccgcgccttgttccccggtttccccgcgacggttgagcccggcttctcggtcctcggccccatccaggtgtatcgtcgccggtgcacggtcccagcttccaactgggctccaggcacccccgaatcccctgcgtccagcacctcatccaaccatcccggtaatggttat

SEQ ID NO: 42587 - DNA, 3062 bp, Zea Mays
ctgtactgggggagacggacgttcgacgcggccgccgagcagacgctgtcgtactggaccttggacgcatggagtatcgaagaggagtctgagatttgttctctgttcgtcagctatggaggagctgaagaacacgagcccacgaggcagcgcagggacaagaagtgccatattggagagatagctgcaaagtcatccgagcctagaatagccggttcaaaacgacgatgaaggcgttatccacgtcggcagaaattctccaagccgcccgatcgtgaatcaatggcattcattgcggtctcgatagcgtgtggaatacgactctcaccccctcgttccgaggagcgaggagcaggccgcctgcgtaatgtcgaagtactcgatcagcagcttctcttctcgacgtggcgcctccgccaccctcctccccgcgcgagtacctctggtctgggctccagcacgctgaattagtgcatcaaggttcatgactcagactgcatatggcactatcaaaacctgtttacacgaaacacggtgttatgaagtcaagttacaaatggagcatgttagcccaaataggaaaagaaagctaaatcatactaatgtgtgctatgcccctttgagcatacctcgtgtcgaagcacgccatgtgcatagagaattgctaaaccagcaaagataattatcaacaggtaccatagtaaatacattgttataatggtgtgcgccagaaaagaaaaaatttattaggtgcggccacaccctctcaacggcgtgtcacttcgcattgtggccactttgatccggatttagttaaaactctaaaagttggtccacgaagagatttggctaatcaaaggcacatcaggctgggatccagtcaattaagaaatatttaacatgcatcctacattatttggttactttatgaccaaggaatacttgatacagagaacgtcttgctctatcagagggtaccagctttaaatcaaaaaccaaatttcagagaaaaaaatacagatgccaatatcaatcttgggcccatctcctgtactgaaatcagcccaaacaacatggttccaagaaattgggtgtgctgtggcgaccgggctttccctacgggctggtcatcatttcgggagcgtcgtggctacctccggtgctgcggccagcgcgactaggccagatcgacccagcgcgatgacggctgtgcgcggcgtcctcggacatcgctccgccagctcaaatctccaagcgctcgagctcggaactcctccaaccggtcatcagctgccagcaatcgacctccatccgcagagcactcaccgaaaggtggctctggatatctcctgctctaacagctccacaaaaattgcattcaacacaggcgacaaacattcgagaacagaggtagtacaaaacatgtactgttgtacatgatatgctagtctataatcaagaacgatagcagacgccttcgcaacacgactcaggatacccgcacataggagctgctacagtgaactacctacgtcaaaagatggtgctggcaggattccgctcgaaaagatccctaggatatagtacgaccatagcataccgatgctaggtagagattcttagaccatttgtccttcacatgtttactagggaaattaattgtcctcagtgtctcttgggtttcatctgtaagtcgcctccttggtacacttaaaacgaaagcagcctgatcacaagtagcaggagctgcggttatccagtaacccctgtcccaccttttatgaattccctcgctgggatacaagaaatccagttcaaccacctggaaagtaaatgccaatagttcaataagaaacgaggttttaaagtcgggcgactagtcgagaagtcggtgcagaggtgatagtcgatctgaacgactcgactttctctactagtcgctcgactagtcacagcagttgagtcaggcgacttattcgggcccatgtataaaaatgtgagcccacccagccatctcaaccctggtaggtaggatgctaatggacaagttttctaccttatttatctatggatatggaatgattcatgacttgatgaggaccaagacaaatgatagagatcttgtgaggcatgcaactactctgtttgcaacatccttccttacattggctaatatgtgcaaacaaagacaagggttgaaaaatctctttgttagtaatgaatggtgtgagagcaaattgaagaacactgaagtaggaaatgcacgtgttgtttgtcactcttgcattttggcaagcagatgaagtaatttctattgttgataagaggtgggatagtcagatggataccaatctgtatagaacaacttttgtttttgaatccaaacaaattctttgaaactagagagaacaatagaagactttctattaagactatattcaatatttaatgatatattgtagaagatggagatagatgaaaatatactaaacaaggtgttttttagtgttccaggcgaaagggtctctaaccgagttggttatgtggtatgagtagcactcctcaggtccgacttcccgtgggagcgaactttcaggctgtggttaaaaaatcccctcgcctgtcccacgccaaagcacaggtctaaggctcagtcgcgctcattctcacatgggctacggtgccgctgtgtaagggtggggcaggggttcgggggttttctcgacctgcgtgaggtcttcttaatataatgtcgtgggggcggtcttatcccccgtaggtcgagttttttagtgttccaacatgtttttagtcttagcatatatagaaagttataataaaaatataatcaccgacttatgttcgactagtcacgactagtctcgactagtctactagtcggtagctgcacgaatcaacttgaaaacattgataagaaatatatcgtacttaacctaagtgtaaaaataaaaaactgaggagggactgatgaagtggaaaaaatgctacctgattagaaaacccagcattatgagacatgacaacagcccacctacttccag

SEQ ID NO: 42588 - DNA, 282 bp, Zea Mays
ggtaattattgcaaggagatttgggttagaaattctttagcaaactgaaaggccatatataggagaacaaattcccttgagagggttggacttgatactacacaaagctaggagaaaaaggtgttcaatctgtttctgtcaggcatgtggagtgcagttttaatgcagtaactgttgatatggtttaatgtttttctcctaactttggagctgttttgtatctgatccaaggagtgtaaggcttgagtccctatggcaaagtgatagagagttagttggtga

SEQ ID NO: 42589 - DNA, 7494 bp, Zea Mays
cacacacaaacccaggagatagcaccccgcgctcgcgctcgcgcccgcgccacgacgcgagagcgcgcgaggcgtggagccctaaatcccggaagcttccgaggccgctcgccgggggcgggagagggagctcgccgccggtgacggagccctcgccgccgtagatctcccgatctgagacgccgcttctcaattccctacaggtttttcggtgccggcgacggagatgactgtggagagccccggggagctaggcttctgaagcgcaccgtggggcacagcttggcggacgacggcccccgacagccaactaggttttccatgggagatgggggtgtcgcgtgcgccgtccgcgcagtcgagggcttccatgccggcgccctcgtgaggagaggaggagcgggagaagcgatgccggataagggggagaaggctcatggacaccaccaccagcagcagcactggaagaaccagcagtcagcgtcagctactgacctggaggagggggagctgctcagtggggaggcggagaccaatgggttgcctgagaggagcatgccacctaagaagtggaggaaggtgctggcagcctccgcagctgctgtggaggtggagcctggggagattgtgagtacgaagcaagcagtgccattgaagaaagcaaggagaaatggggaggttgacaaggtagagctgctgccggagaggcagaggaaggtaaaatcttctgggaagagcaccaggaagtctatcaaggatgacatggagccaggggagattgcaccgccagaaaaaaggcgagatgccaagtcccaacgggctgatgataacagcaggaggccaagttcatctgcccagaaaagctccttgcgggattctgatgaagagcctggtgaaattaagccagagagcagcaccagtggcagtctaaggaagaaccagccaacagagccccacagcattaaccacaagcaccacactgacacctctgaccagtcaggatcaaaaagtcataggaagggtccgaagggagaagggaagagatctgctgccaggcatttgtctgggagaaaccgtgagatatcatcaccaacacgggatcggcgtgatcggcacgagaggagcccaggcatcttgggtcgttttcctcatgagcgctctcgtcatgacaggtatgacaggagcccgagccgcttagagcgttccccacatcgagagcgtgctcgccactacgaaagcagagaccacagcccatatgtttcacctcgacatagagctcgtcagccccatttcagggataacacgccaagtcgtgttgataatttccctcgtgggagagtccagcgtgaggatgtcagagaccgtagcccatttcttcacgacagatcgccttctgaacgttttcggcctactgatactcatgaagcaagcaagaagagcagaagtggcaacaactcagaaaagtcacagcacaaaagcaaatcagcgaagcaatcttcaaagaccaagagtggtagcaatgagaagaatgagaaaatctccaatgaaaagcccactgaaagcagtaagtacactgaactgccaccgccacctccactaccgctgccaccaccgccgcctccaccacctccacctccacctctgccacctgctgtaccgcctcccctgcctccaccaccagaacctgagccaactggagttctagccgaagatatgatagaagacatggatatctgtgacaccccacctcacactagtgcagcacctgaacccacggatccaatttatgatatagggaggtggttttaccttgatcacttcggtatcgagcaaggaccttccaagcttgctgtattgaagaagctggtggaagatggatatcttctttctgaccatttgataaaacatgctgatagcaaccgatgggtgactgtagagaatgcagcttcaccactggtgccatctgatttcccctctttttattcggacacttcaacacagatggttaacccaccagaagcaccaggaaatttgctcgatgaagctctagaggaggcttctaacttggcatcaggttctgaggataaacaaatggtggaagcttctgcagaagatagtgaagaattctatattaatgatagggttgaagcactgatggatggatcaattttggtgcatggccaggagctcgagatcattggagagcttttaggtgcagattttcagcctgctgattggcaaagattgagtcaccctgaagattttactaggttccatgtgcacatcgaaggagacgatgaaatcattggaggcacagaattcttagaaaatagaacaacagatgcttatggccttgtttctgtggacaacttccatcattatgtcgagtctagcgaatggttttctgggagatggtcttgcaaaggtggtgactggaggagaaatgacgaattgggccaagatactccattcaggaaaaaacttgttctcaatgaagggtatcctctatgtcagataccaaaaggtagctatgaggatccacgccggccctgcaaggatgagttgtactaccctgtacgtggtaaaaagcatgacttgccattgtgggcattctcatcgacagaagaagatattgacggtgttaatgacaccactaaaaacactgttgtgcctgggaggccaggtcagaccagacagcctcctagcgaagtgaaggtgatgcttcaagtggttagtataaattatcatgttattaaagaccaatcatctgtcgaaccccgtacaaaacccagaggaactgatcgaccaccgtcgagatcttcacgctcccattcaattggggctgagagaagttctatccatgatggttcgtcgcatttcaggaagcaccatgaccatgattcacaaagttttcacaagtccaagtctgttccaaacattccgaaggaccatgtatgcactgttgatgagctgtcagttaatcggggtgactggtactaccttgatggcactgggcatgatcaaggcccattttcttattccgaattgcaagaattagttaaaaaggacactatcattgaacaaagtagcgtgttccgtaagatcgataacacatggtttccagttcttaaggatttaaaacctggaagctctgttcccagtgcagcaccaagctcaaacttaattgctgcttttacgcacccagaccaatataattttggtgtgaaccaaggatcaagtagcttccatgagttacacccccagttcgcgggttatacacgtggcaaattacatgaactagtcatgaaatatttcaagagcagggaacttactttagctataaatgaggtcttggatccatggatttcagcaaagcaaccaaaaaaagagtttgaagcatacttttctcacaattcagcatctaggaatttcctgccagaagatggtgggtctgcaaaaagggcaagattgctacctgaccagagtgacgaaaatattcatttgtcagaagacattattgctagtcggaaggaggacatctgttttgaagagttatgtgatggagcatcgtctgttgataatgattctgtgaatcccagagcaggaaatgcaagctggggtctactaaatgaccatctgttagcaagaatctttcattttatgagggcagatttgaaatcacttatttcttctgcagctacctgtaagagctggaatgctgctgcgaagtattacagaaacatgtgtagattcattgatctgtcttctgttggtcctctttgcactgattcagtgttttgtgatattatggctggctttgagaagcaaaatattaggactcttattttagctggttgttcgaaccttagttcacatgcccttggcagagtacttgaacaccttccacaaatatcttatgttcatattcaaggttgcagtcatctaggggatctgaaaaataaatttcagcatgtaaaatggatcaggagctcattgaatccagaggggtcatatcggaaaatgaaaaccttgaagcagataggtgatgggaacaactatgcatccaaagttgcaaggaacttcgaccagctagatgattctgatgagcttgatggttattttgctgatatttcaaaaatcgagggtgctagccttttttcatttggacaaggtttctataaacgatcgaaattgcttgatgctagaaagtcctccgcggttttgtcgagggatgcagaaatgaggcgtttgatgcagagacaggcagagaacagttacaggaagatggaagagtttgtcataaacaggctgagagaaattatgaggtgtaacagatttgattttttcattccaaaggtttccaagatcgaaggtaggttgaaaaatgggtattatgctcgccatggttttcgtaccatcaagcatgacatccgtaccatgtgccaagatgcattgagatataaagatggcaatgatttggatgatgtaaagcaaattgttgtctccttcatacaactagcaaagagactagggaacccaaggtacatttctgagagaaacggagcagcagcccaggacagcctggacattagtcaatattcattcgatactaaactcaaaaagaagcaaaacaaaacaagagcaaatttggtggctgctggagcagataattcatctcgcgcatttgaccttgaaatcaaaagaagcctgtctaaattaaagaaaaaggatgtctgctctggtagtgaaacatctgatgatgatggctactctgaaggtgatgaaactgagagtgaaactactgtttctgatactgagagtgactttgatgtaaattctggagcctgggatttaaaaggaaattgcctaaagttaactgaacatggggagtctgtgatcgatgatcgtatattaggtgcccgcatgacaaaggccagccttgttcctccagttactaggaagtatgaagttattgaggagtaccttattgtagcagatgtggaggaagtacaacgaaaaatgagagtttctttacctgatgactattctgagaagttgctttcacagaagaatggcaccgaaaatttggagcttccagaggttaaggattatcaaccccgaaaagtagcaggggatgaaattcttgagcaagaagtatatggcatagatccatatacacacaatctactgagtgacattatgccttctgatcttgagttgtcacctactgacaagcatatctttattgaggagttgcttctgaatgcattgaataagcaagttaggcatttcactggtttgggaaatacccctatgacttacaacattaggcctgtcattgaagaaattcaaaggtctgcggaggatagtggtgacagacgaactttgaagatgtgcttggggatgctaaagtccatgagaaatcgctctgatcagaactttgttgcttatagaaagggtcttggtgttgtttgcaacaaaaaaggtggatttggtgtagatgactttgttgttgaattctttggggaggtctacccttcttggagatggtatgaaaagcaagatggtattaaacatatacaaaataacagtgaagatcaagctcctgagttttacaacattatgttagaaaggccaaagggagaccgacatggatatgacttggtttttgttgatgcgatgcacaaggccaactacgcgagtagaatctgccactcctgcaaccctaactgcgaagcaaaagtgacagcagtggatggtaaataccagattggagtttacacacttcgaccaattgcagaaggcgaggaaatcacttttgattacaattctgtaactgagaagaacatgaagcatcagtctgcctctgtggaagtcaagtatgccgcggcagctatttgaatttttctggtgaaggagcctttgagaaggtattaatggaatttcatggtgtgctcgataggcatagcctactgctacaggcttgtgaaacagactctgtctcccagcaagacttgattgacttgggtagagctggtcttggtacctgtttgcttgctggtttgcctgtatggcttgttgcttacacagctcacctggtacggtttatataccttgagaggcagaagctccctgatgagatcttaaggcacaatgtggatgagaagcgacagttccttatagaaataaacatggattctgagaagaatgatgctgaggttcaggcagagggagtactaaattcaagattacagcaaatagtgcatacacttgacaaggtgagatatgttatgagatgcatatttggagacccaaagaatgctcctcctcctatggtaaggttgtctgggaaaagtttggtctctgccatctggaaaggggacagttcgatagttgctgaacttcttcagtcgatggaacctcatgttgaagaagaggtacttagtgatctgaaggccaaaatctgtgctcatgacccatcagattctgaagatattgagggaggcatccgtaattctctcttgtggctgcgtgatgaattacgaactcttccatgcacttacaagtgccgtcatgatgctgctgcagatttgatccatttgtatgcttatacaaagtgctttttccgagtccgggattacaagacagtaaaatctccaccagttcatatcagtccgcttgacttaggccccaaatatgccgataaactgggaccaggctttcaggagtactgcaagacatacccagaaaattactgcttagcccagcttatctattggtatagccagaattcagaacctgaatctagattgacaagagctagaaaaggttgcatgtcattgcccgatgtctcgtccttctatgtgaagtctctaaaaccattgcaagagcgagtttatgggaacagaactgtgagattcatgttatcacgcatggaaaaacaggcacagagaccatggccaaaggataggatatgggtgttcaagagtgatccgagatactttggcagtccaatgatggatgccgtgttgaataattccccccttgacaaggagatggtgcattggctcaagacgagaccaaacgttttcctaggctagaaaaaaaatgattgtaggcagataagatggtatttggttgtttctcccttttggagattttagtctgcaggattttttttttccaggctcacaccttggctacctgatcacagggagtttagcttatagatagcagggtaacagtcaccaccccccatctgtacattccccagtccctacataccttgcggagatgtatctggttagtaaatgatagatttgtcattgatttaatgtagtgaattttcccataggaatgcccccccccctcttttgtttcatgtaaatgcagaacaatttcaatcttgaattcagtaatgtgttacaggcattttgcatttctatggttcagttgggttgtttcagtcaataaaatggttttaagggctcaata

SEQ ID NO: 42590 - DNA, 2393 bp, Zea Mays
ccttcgccagttcaccccccacagaccacaactgtcgcgtcgccggctcgccgctcgccctatcccccaccgccaccggccacgcttccgtactgagccgctgagggggccagtcaggcgcgccgaccgccgaaactgccatgaagctgacctgcttgtccgccgccgccggcggcggcggcggctaccactcgccagcgagccatctcctggagctggagggggtccgcttcctcctcgactgccccatcgacctctccgctctcgcggccttcgcgccggtgcccctcgccggtgacgcaggaggtctcatccgcgcggtgccgcgctactggttgccagcggccgtgaaagaaggcggcgtggacgccgtgctcgtgtcttccgctacggggatgctcggactccccttcctcaccgggctccccggattcaccaacacgaaggtatatgtgacagaggtagcagcaaggatcggaaagccaatgatggaggagctggtggagatgcatcgtgagtttgtgaggtccgctatggaatcacaatcctgctgggtcctggcttgcacatctgtggcttctcttccagtcttcccgcagggcaatctatatgtctgaaagcttgagataaatccaggaaacgttgaagaatgcatgcacaaagtacagtctgttaaatatggagaggaggtttgcttcaatggcatatttatgctgaaagcttctagttcaggccttgaacttggcaattctacctggacaatacaaagtccaagagctagcattacctacctaccaagttcagtatttgtgtcggctcatgcattagattttgattacagctctctgaaggaaaatgatgtgattttgttttcggatttctcatccttgaatgacacggacgaggataatgagaaactgaatgagcattcaatggatgaaacggactcttctctatgtcgctactcagtgtttagggatgacggcgctgatgcagatgaaagggtgccattcgtgtgcaacaatgatgatatcacagaggagattgagagaatcagctttatatgctcatgtatttttggtgcagtaaaatctggaggctctgttctaataccaattggccgccttggtgttattcttttacttttggagcttatatcagaaatgctacattcttccagcctgaaggtgcccatatttgtgatttctgaaacagcagaagaaatatttgcttttaccaataccttgcctgaatggctatgcaagtcacgtcaagaaaagttattcgctggtgaagcattgtttggccatgtcgagcttttgaaggagggcaaattatttttgttcccgcatctacattcaaagggtttgctcatggaaggagccttgtattgtgctatgtccacactggagccttagactcggcccagctgttcatttgcttcgtcgctggcatgcagacaaacggtgccttcttgttgtggagcaaggaaatggtgctgagttgagtcttaagcctttcatgcccttggcaattcaagtccttgagtgttctttcctttcgggcgtaagggcggggaaaattgatccattactgggagtgctcaaaccgaagtttgttatgcttccagaaggtcttaagtcgcggtgttcaataaagggggtgccatggtcattcttgtattactccaagggcaagaccatcgagctctcaaatttacgtgaagatattgaggtgcatcttgcaactgatgttgccttccgattgcagcctagacaactgaacgaaaccactgcagtggcgagattgagaacaaagctgcttgtaagcaatggacggtaccagctggcctctgcagaaaagcaaccagatcaatcaaagcgtcacttgctacactgtagcactattgaccctggtcgcttgctgtcagctttgcgagagaaggggatggtatgttcatttgctgcagatgatagccccactgctagtgaatcctcagttctggtcactagtcctggagatgctttggtgaggataacgcccgacacgactgttatatactgcgacgacgagagaacatccaatcaaatttatgatgcgcttagcagtgtttgtaaagggatctgactgcatcatgtgtaattgttgttcgttatggggtgtttggtttttagggactaatttttagtactccattttaatctataaattgctaaatgcggaaaataaaacttttatttttcgtacttggtaatttatgaactaaaataaaataggggactaaaaattagcctctagaaaccaaacattcccgaagttgtgcgtgtgcgttaaattgtgaattgccatgtggtggtttagtggttgaaaaaaggttaagttttttcttccag

SEQ ID NO: 42591 - DNA, 3731 bp, Zea Mays
tccacactttgcgttctgccatcgcgcgctccgcctccctccccgcgcccgcagtccccgccgccgcccccgcaggcagccgccccgtagtccccaccgccgagcacagccgccgcgcccgtagttcccgcgccagcaagcccacagtccccgccgcacacgccgcgatgatcctggaaagcggcatgtacgagcaggccggggagctccagatcctgttggagtacatggaccaggggtcgctcgagagccaccgcatcgcgtggcgcgccaggtgctgtcgggcatcgcctacctccaccgccgccgcatcgtctacctccaccgcgacatcaagccctccaacctgctcatcgactccgggcgtcgcgtcaagatcgccgacttcagcgtcagccacatcctgaactagaccatggacccctgcaactcctccgtgggcaccatcgcgtacatgagccccgagcgcatcaacaccgacctcaacgacgggtacgccggcgacatctggagcttcggcctcagcatcctcgagttctacctgggccgcttcctgctgtgcgagaacctggggaagcagggcgactggccgcgctcatgttcgccatctgctactccgactcgtcgcaggcgccgtgcaacgcctcggtgggcttcaagaacttcatcagcctctgcctacagaagaacccagtgaaccgttcgtccgcgatgcggctgctgcagcacccgttcatggcccagccgcagccgcaacccctggccgccccgccgtcatgatggctcgccgtaccctacaaatctacaattcatgcccgatttgattgattgattgcttcccgtcatgatacagctgaagacggcggacagattgatctttggggtggatggatggttggttgcatgattgattagctctgcacttgcgcttttcaatataatgtgggaagtactgaattgcatagaacaattgctccaaaaaactatatttttatggtttataataaagtatcaggacttacctttctttgccattgggaaccttgtgcttccctgggcaagtgctcgcattggtacttaagattctatctatgcatcactttcagcttgaataccttaacaatggtacttctctgagatcattaaatcagtttatgtacttttacatagtaataagccatctgctcaagtgagaatagatgttgtggttggaaaggatcgtctattagacgtttccatgcataagataagtgttgcagctatacaaactggttttggttttgaggtcaagctggacaagggaaacgaagctcaaaatgaatcaatttattagtcaaaacaacatctctattcattgaagattggttctttttaaaattttagatgtcattggttggattgcgatctcctttgcaaaagtatggttcttttttaaatttcagcatactgcttcaatcttgaactacaatttttcatggtctgaaattgcatatggagacttggattttaatgcttaagctgaaattgcatatggggaactttggttttaatgcatttcttgcttcaaccttgagatagcagctgttgtttcccccacttattgttcattctagaattagtagatgactgccttgcaaggatttgaacatatgatagggtgctaaaatgtttgaatgatgctttatggtatgcttgcatttagagaatatagtagaagacctgaagtgggtttacaggactaagaatgttcattgtatctcaatcatgaaatagtaaatatttttcttgtttgcagagatttcaggctatgtcttattcagcagttatgaaaggtagcgactacaatgtgctctttacttaactttctcattaatatctctgccctttggattttttatgcaacattttgattttttatttgaccagctaacaagcaattcactattatgttattattggtacttatctttctcattaatatctcttccctttggattttttatgcatcattctgattttttatttgaccagctaacaagcaattcactattatgttattattggttaaactggacccttcaggtgatttctgtgtagccctaacattaaagctcccagtttatgcaggctgcagctttgaatttgtaatacctttgcagttactattaagttagcatggacaatagaaggtggaaatcatttccttagctcctgttagtgtccatgaacataagttacccatggtctgagatgttacatcctcctgagctattttctcttgttgtgtacttctgttagtgtccctggcactatatcattcatttggagattttcaatcagctgtatagctatgtaaaattggttgcattttaggtgatttgtgggaattaaattgcaatgtaccagaaatcgatcttaatttatgcaatagattatatgggaaaaatcataccatggattggatgtaggctgaaaccagttacttcatctaggctaaaattgttggttctgtacaaaaggtagtctaattaggctttgatatccgaattaaatgtttatcacctacttttagaaaaaagttagtcatcttcacgatccagttgatacatattcacaaatttgtacatgagtaacaggcaacaacttttctcaatttatccagaaaatgacttatttttaggggcctggtgtatatctctatcctattattttattctcagcacattcacattcacaactagctcaacacattcacattctcagataccgatctactggacatcatcaactcagagatcaagtacgcccgaggactcaggactgcgatgaccacgacacgaaagtatactaccattctggcggacttcggctgaacccgaacctgtacgagagcgggaaagtgtgcctgagccttctgaacacctggtggggcaaggggtgcgagaagtggggcaagtcgagctccaccatgctgcaggttctggtctccatccagggcctcgtgctgaatgacaggccatacttcaatgagccaggatacaagaactcggctgaaacgacaggtggtgagaggtgttccttggcttacaatcagacgaccttcgtcagatcatgcaagacgacgctgtattcactccggaagcctccaatgcattttgagacccttgtgttgtggcacttccacgagcatgagcgtgccatcctcgacgcttgcagggcttacatgtctgggacagtcgttgggtcgtctgctgggactgggagcaaccgcagatacgtccatgacaagtgctttgcagaattccacaagtcgctgacgctctacactgaacatctcagggctgagtttgctacaaacagaagacgagtgatggagctagaaacagaagacgagatcgtgcctagcatagcagctagcatgaaatcgtgttgaaggcaaatgccccacagtgttgctctcatcatcagatatttgctgccttagctatttctagcttcattcatgtcaagtgaataatctaattcatgacaattgtacctgtctctatatctaatgaatctgtcctctcttttgaaagtactaagtgtatgcccgtgcgttgctacagaataaacatgttatgatgagatgcagaaacattagttatcgttctatgcttttgttagcatcttctaaaggttaagaatatttacataccttaaaaaatgtatactccgccataaaagcaaac

SEQ ID NO: 42592 - DNA, 782 bp, Zea Mays
atggatttcagtacaaagaagaaagtcccaggatttgacgttgctatctccataaaaccattgaaggttcgcaactggattctgccagaaacgccaggattgataactgattttgttatctctcttgatgaccgttatctctatttgttacattggcttcatggcgatatcagacagtacaacattggggatcctgcaaagccttttttggctgaacaagtatgggttggtggtcttcttcaaaagggtggtgatgttgtctatgtaactgatgatagtcaagaagaacaatataatgtgcctcaagtcaagcgtcatcgacttagaggtggaccgcagatgattcagttgagcttggatggcaagaggatatacgtgacaactcactttttagccgtttgggatgagcggttctctggtgacgatcttgtcaagaagggctcccaaatattgcagatcgatgtcgatactgaggaaggagggctggctatcaacactagtttcttcatagattttggcaccgaacctgatggtccttccctggcccatgagatgagatgggatatccaggcgcgaggactgcacctctgatatatggatctaaggtcaaggattcagcgtcaaagaccgatggagatacccgttgttgtatgtagtgtaattaacatggtagcagtgtttcatctgtattgagactgttgccaatgaaataagacatggtttcatgaggactttagattaatagaagtactcattctaaattttcttattgtcatcggttc

SEQ ID NO: 42593 - DNA, 332 bp, Zea Mays
ccttcgtttttctagatctcacttccggcccggtgctaggtacctctactgccattaggttctcgtcttatcttttgtcctgctgttttagatagttccatttccttggtgaaaagtttgtgtgtgtatttgatttccttcgtttttccagatcttttatattagaattcatttggctgtaatatctcatatgctgaagttgaatgtttatcggtcataatatgagatatgaaaacattgggcagggttgcttttatgtcacatcgtgcgaaccagacaggcttggttcttttctttatttactttcaagaaaaaagataaaaaaagataga

SEQ ID NO: 42594 - DNA, 3672 bp, Zea Mays
tctagaaggcggggctctccttctgcagaaaaagagagagaattaaaaaatattcctctacaaataggtaagtgtaactaaggaaagtaatcctctgatcctatcgctaccaccttcaacccggtgtccttctccttcactcctacttggcactttgacagagacaaaaaccaaacccgcggcgcctgtcgtcgctccttcgttctcgccgctgccgcactcccgacggccaccttaacaagcctctggcggaggaccaaatactctcgcgatcgccgtagcgccaccgcgtcgcccaatccgttgggagccgtcgcgcgatgcaggcggacgagcaggcggaggcgccgcgccgcgccaaggaggccggcaacgacgcctaccgcaagtccttgctcgaggaggccgtggagcactacaccctcggcgcgctccttgaccccagtgacatcgccttcctcaccaatcgcgccgccgcctacctccgcatgggcaagtacgaggagtgcgtgagggactgcgatgaggccgtgaagcgcggcagggagctcagctccggcagcgagctgatcgcgaaggcgctgtctcggaaggcgtcggcgctgctcgagctcgcgtgctgcgccgcagactacgcaccggctatcggcgccctcaagctgtcgctggccgaaaattacagcgaggagacgctcgagaagctcaacgacgcggagagcgtgaggaaggaggttgaggaacaggagcgattggatcaggaggccgccaaccaatgccgcgaggaaggcaatgaattttttaggcagaagaaatacaatgaagcagcaatacaatacacacgagctataaaaatgaacccaaaggatccaagagtaagcatattggttgttaccctgattttccttctcaagtaaaggtaattccagaacactagtaaagtagtactatcttcagtcaaatatagatgattttcaggcaagaaaacaagaagattataagccaactgtcccatgtctaaacatcaagtaaatatgactggaggtggtacccttttttttttttgaaatttctaagatttctgataaattgaattttttcattggtaaaacatcattaatgataactcttattttccatgcaccttggctgtaaaaacattctctggagttgactttttttttcctttggcactccttgttgtagtaatttgtttagtttatgactgatcttacaggcatttagcaacagagctcaatgccacatccatctgggagcctttcctcaaggtcttgaggatgccgagaaatgcattgaactagatccaacttttctgaagggctatgtgcgtaaagctaaagtccagttcctgatggaaagttatgaaaatgctttggcaacttacctagagggtctgaagtgtgacccaaataatatggaggttctggatggcttaagaagatgtgcagcatgtgttaagaggtctaatgcgggtgatgttgagatcgaggatttgaaatatgttgatattgatgaattgaaatatttctcggtacattttatatgaagtagagcaagagaactacatgatgaagagcaggccgaatggccatcgaaagtcaatcgacctctatcctgcatgccatgccatcatgaacaattggctattcagcttgactgaaggtctcgggtctatatctcctttgtttatcctgtccagtcctaccatccctatccttttctcttccattagctctggcagctttctgcacaagtgacctcggtctcaccgtcagtgcatgatgcaggtctgaatctacatcgatattaacaaaatactgccattaacatacagtgttctccatttccttcccccttttgtgcccataccatactgtgtttgtgcttgttcagacaatgctggctgcagcggctgatggtcttgatttcatgtgtcgcaatttaatttagtaaaacattaaatccttgacagcatattcagaattccacaatctagattgatacttaatcctaagcaaaattttaccttttcaagatttaaggttatgattttattgaagtcgaacccatgtgtgcaaggtcatcctctgacagatcatctagatcgccttatgcgtgcatgacttaatttggggacttagggtagtaatatgagaatttcagcggctcggcctttgacaaccttcctatgacaattgacaagagatttatttccttttaaaaaaaacaaaacactggtctttctttaaaggaaactgatgaggatcctcctggaccaatatgtgttactgagacctgagaagttagtacagttatttccacttgaaatatttcggtttagtgtgcttgattgggtatttttgtcagggtggtggtccaaacactgtacaccagcagaggaggagtggggtgatgacttctgagtgtcaatgcaacaccaaggacattgacgagtcatccgccgagaggctgtacgacgcagtgaagtacaccacggacaacatgatgctgatccaggtcccagtgttaggaacaacgaaggaattctggtgattatctgacaaagcgactaggatcagcagaaaacttgcattgatactgaggagccaccactccgtcggcaagtacctagctgctcctctgcaggtgtccaacatctggattgggagcaatgggagtgtcaagctaaggggggtcagtttcactggtcaaggcttcagcactgagcgtgtgagagatgactacaaacgcatgtccaggatcctgatggcgttaattactctctcgggtggggacagaagcaaattgcctccggactacaaagagttcctcctgctcttggaatcggacacccttacaatggaagatgaattcttgattgtaaacaatgctgcactgctgcccataaaaaaccgaattgtcgattatcttgggagtacggacaaaacgaagaagaagaaaaagaagaggatactctctagtcttccctacaaggaagactggctagatactgccaaggcaaatacaaaaatcaaccagtgggttgccaatgttcagaacgagtacagagcgactccacatgatctgctgcggctcaacagaaatgtaagaagccacatgcatcgctacagcgacggtgacgacatcgaggaagttctgtattgcgaatggcccgagctgctcatggtcatgcagaagatgttgcacttggaaggcgagctcgaaggcactgacattcagaacaagtttggctaggcgtcctacttaagctactgttcttcgatcgagttcaggggccgaaagtttatgctggtggagtgatggtcgatgtaagtttgtcgctctcatcatgaaggtaaagctggatcagctttataaaatgtatgctaaaatgtaaagtaaactttaaaccattctatctgagaaggtcttttcttaatacaataccgggagtatgtctcgtcttgcttgtaaatcgtgcctgggtatctggctgtaggtttgtcttgcttgatcttgtgaggatgctgctcgcgttccttggagatcaagcatgcaaacgtctgtaaacaacatccttctcctcttactgaagataaagctggaccagctttataaaagtattatgaaaaatgttgcattaaaactctaaac

SEQ ID NO: 42595 - DNA, 888 bp, Zea Mays
ctctgctcgtatttttgtccgtaccgagctccctcgccttcaatcccctggccgtcgcgcccctcaaatcgcccggccgtgcgcttgccttcaagctcactctccggtgtcgtgcagcgcggctcggctcgacgacatggagagtctcgtcctcgcctcctcctcctactccccttcgcgagctcagcgccctccctagccatgccgagctccttgcatgcagccgcgcgctcctctactcggccttgtccttgtcttcttccctgcgcgacctaccgatgctccctccccagctgcgtttgtagtcgtcgagcatgtcagctgtcgtgggcttgcctcaccggctgtagtctccaatcttcgcctcgacatcgtcgttccttgtactcaacacggggtttgccgttggtctctgctacaacatcggctcgtcgtggcctggtcgagttttcctcagcgttgcgccagtcgtgcaaatcttttcatcgcgtgaggacctcgccatcgtcccacccgctctcgtcgtcgtgaagattattcagcatcgcttggtctcgatggtcagttgatctgcataggtggtggtttggttatgagtggagttcgatagaagcagaaaatgaagtttgtgtgaggctctcctggtgctcgatgaaacgcctcacccacaaaagcatcatcgttttcggaaacctttgcattgattggtacgataattgatcacgtgatgcggagaaccagagctgagtcgatcacaagaggatggaaagcatgagctactccacaaggtgatgttgatggacgaacctgcctgatcaagtgttagtacaaggacgatcgtcaagtggtcgtcgtctaacaaacactaacgtagtgtttataccaggc

SEQ ID NO: 42596 - DNA, 3722 bp, Zea Mays
gcggtttagattctagcctttgaggcagcagtaccgcagcctaaatgccgtcacggcattgttaatgccagactgcacgtaatcaggccttgtaatatccactcctttaattttttttttcatttttttctggtgcgtgaagcatgttgaatcgaggtgaggtttcgttcggttgtatatagatagaacgaagggaattgaggcttaaatctttttctgtttatttttgaatttaatctcatccgatcctttttcaattcacttcttctaaccgaagaagcatgaggtggattcgtgattattgttgtatgtatatctcctgtacaatttgacctgctggctgtgtagtgtgtacacaggaacctcgcaagtcgcattcgcagctgaaggagaaagaggcaccacgccaaaaccaccacagcaagcggataaatatccaatgtcaaaagggttccttttgaacaagcaaccgaaaagatttttcttcgtcgctcgctcaccacccatcccacccccacaggccacaggccacaggccacagacgagacgatccccggtcatcgcctacctccctgtcctctgccgtccttcccttcgccacgtctccaagtatataggaggaggctctccggcaatgcccgctcccccatcatcctaccaatcacggcagccactccccgtcgtcgaccaaaagcactccggtgagctagaaccggcagaagaatagccagcctgccggcgatccgcgcagaccacgccagccgccccacaagtcccagacggcagggattcctaaacataacgcgctattcctattattagccagccgcctctcgattcgcgcggcttaaccgccctcgtgcgcgtgcgcgcgcgcgcgcggtaggaggccacacgttccggaggcgcgcgcccagaccagggccgcccccgcgccatggacgtgctgcggttcgtgcgcgccgccgcggcgccgcagcctgcggtggcgccgccggcgtcggctgcgacggtgccggcgcagcgccagcggctgcgcatgtggccgcgtggcgggggagaccagccgcccccggtcggcgccgcctccacgcgcggcgcggagccgaggagcccgcccgacgaggagcggaaggcggagggggcccagcgggggcagggcaactgggtgctgcagatgctgcgggtgcagccgcggtgggtggatgcggcggacgcggaggccaccggcggcggccaggaaccggacgaggagacggcggctgcggctgcggctggcgctggtggcgtcgaggagtgcgcttcctgcggctgcggggaagacgacgaaggctgcgccgtggggtacggcgacggcgacggcgaggtgttcgaccgcgcgtcgttctcgcggctcctgcggaaggcgtcgctcggggaggctaaagagtattccatgatgtcctacctctgcaacatcgcctacatgatccccagaattcagtgcagctcgtcctcggtgaatgtggaattgctttcggtaaacgctcgtgagcatgtgattgtgccagacacttgtcgtcctcttgttcatgcgtgtattttccagcgtcaatgcaggggcgcgcggggtggtggtatttcctaggaaagcccatgccgaatctggtctattttggatttttactgtctacttctcctttccagtgtgattttccaatagctagtcttggactagtccgagtccatccttgagttctgcttgtcttcgccaattggttaattgccctgaactgtttttctggtctacagaaatatcgtcggagtttcctctgaaccagagtttcttacctttcccaccgcctaactcaggaatccttttgctttcatgcttcccatcccagccaaaatgtcttcggcgatacaatctgcggttcgtgacgtcgtcagtgcaagacaaggccggagttagcaaccctgaccagaagcaggagcgtagcaccaagaaagacgaatctggcgatcaagcatccgaagctgtcgacgacgcggtgccacgacgtgggctagggacgataaaaccgtttggtgcgtaccatgtagtgtcttctgctgcctcttacctgcactcccgggccatgggcgttatgccatttggtcccgggaatggcgtcaaggacgatcatccagcagccgtcacgtcgctcgtgagcggcgcgagcggtgacggattgagcgtggacgaggcttcgttcgtggccacgacgagttcggtgacctccatggtcgcggcgaaggaggagacgcggcaagccgttgcggatgatctcaactcttcgagatcttgcccttgcgagtggttcgtctgtgaggatgatcagaacagcacgatatacttcgtggttcagggctcagaatcaattgcttcttggcaggccaaccttttgttcgaacctgtcaaatttgaggaggtggacgtgctggttcacaggggcatatacgaagccgccaaggggatgtatcaccagatgctaccctacgtgaaggcgcacctgaagagctggggcaaatccgcgcggctgcggttcacggggcactccctcggcgggagcctggcgctgctcgtgaacctgatgctgctggtgcgaggggaggcgcccgcgtcgtcgctgctgcccgtgataacgttcggcgcgccgtgcatcatgtgcggcggcgaccacctgctccgccgcctcgggctgccgcggagccacgtgcagtccgtcacgatgcaccgggacatagtgccccgggtgttctcctgccactaccccgaccatgtcgccaacatcctgaagctcgccaacgggaatttccgcagccacccgtgcctcgcgaaccagaaactcctgtacgcgccgatgggggaggtgctgatcctgcagccggacgagcggctgtccccgcaccaccacctgctcccaccggacagcggcatctaccacctgggcggcggtggcggtggcggtggggcgggaacggcggcgaatgcgggcgaaggctccctgccgcagctccggtccgcgctgtcggccttcttcaactcgccgcacccgctcgagatcctcaaggacggcgccgcgtacgggccccggggctccgtgtaccgggaccacgacgtgaactcgtacctccggtccgtgcgcgccgtggtccgcaaggaggccaggcgcgcgcgggaggccgagcgggagcgctggcgcctgctcctctggtggccgttcggcgtgcacggcgtgtcgtcggcgtcggcggggcggcgcgggggcctcgtggacgccgtcagcgaggctgccaggcgcgcgcatctcttgctggtggtgctgctgcccgcggagctgctcgctctcggcgcgctcctggccgtcattagattcaggtgattagataggctctcacgcgggttcatcaatccgttcgttcgttcgtacgccgtcgacacacacgattcttttgtaccaaacacacacacacacatacacgtctgcaaagcaaatgcgacattgcagctgcgtcgcatgtatgtaaaatgaatgaaatgaaaaaaaaaacacaaactcgaattctttggttccgtccaacggttccctctcgacttcactcactcctcgaactatcaactatattttgagtcccctatgaactatattttgaatcttggaagtctgagtccgtccctgcatagcccccgctaatttgtg

SEQ ID NO: 42597 - DNA, 6796 bp, Zea Mays
cccatccctcctcctgctcatcactgctgctctctggctgctccctctccctccatccccactgctgctctcttgccaaatctgatctagggtttcgttccatctccacgcgccgtcccagtacctatctactctagactactacagtatccaaaaggcaagcttatctgcggagggagtgagctgacgcattcccgtgctggcgagggacagccagacccagacggggagatccgatccgattccgtgctagctgctgcggagtgagtgaggtgacgcgggagcgggatggcggcgccggggcggaggacggcggacgtgtcctcgtcctcgcccgccccctcgccgtccccttccaccggtaggcgcctcctgcgcacgcagaccgtcggcaacctcggcgagtccatcttcgacagcgaggtcgtgccgtcctcgctcgtcgagatcgcacccatcctccgcgtcgccaacgaggtcgaggccaccaacccgcgcgtcgcctacctctgtcgcttctacgctttcgagaaggctcaccgcctcgacccgacatccagtggccgtggtgttcgtcagtttaagaccgcacttctgcagaggcttgagagggaaaatgatcccacgctcaagggaagggtccaccagagcgatgctcgggagatgcagcgcttctaccgcgaatactacaagaagtacatccaggcactgcagcatgctgctgataaggctgaccgagcactgctcactaaagcgtaccagacagctgctgtcttgtttgaggtcttgagggccgttaatgtctcgcagtccgttgaagtcgatcaagcgattttggatacacacaataaggttgaagaaaagaaaaagttgtacgtaccttataacattctcccgcttgatcctgaaagtactggtcaagccattatgcgatatccagagattcaagctgctgtttatgctcttcgcaatactagaggtctgccatggccaaaggaccaagacaagaagcctggcgagaagaatactgggaaagaccttctcgattggcttcaggctatgtttgggtttcagaaagacaacgtgtccaaccaaagggaacatttggtactgttgcttgcaaatgttcatataatgaaagtacccaaggttgaccaacaaccgaagttggatgacaaagctctggatgctgtaatgaagaagctgtttaagaattataagaagtggtgcaagtaccttggccgcaaaagcagcttatggttgccaaccatccagcaggaagtgcagcagcgtaagcttctttatatgggcctctacctgctgatttggggtgaggcggctaacttgagattcatgccagagtgtatttgttacatctaccatcatatggcttttgaactctacggcatgctggctggaaatgtgagcccaatgacgggtgaaaatgttaaaccagcatatggtggtgatgaagaagcctttttgattaaagttgtgactccaatatacaaagttatagagaaggaagctgaaaggagcaagaccatgaaatcaaagcactcccattggagaaactatgatgatctgaatgagtacttttggtcagttgattgtttccggctaggatggcctatgagagctgatgctgactttttcaaaactccaaaagatgcttatctgaatcttttgaatggagtaggttctctcaataatattggagaacagatctgcaggtaatacccattggatgggaaaagttaattttgtggagatacgttcattttggcacatattccgtagtttcgacagaatgtggatcttcttaatattgtccttacaggccatgataattattgcttggaatggtggaacaccaagtgatatttttgatgctggagtatttaagaaggttttgagcatatttattactgctgcaattttgaagttgggtcaagcaatcctagacctcatatttggttggaaagcaagaagaaacatgtcatttgcagtcaagctgcgatatatcttgaagttaatatgtgctgctgcatgggttgtgattttacctgtgacttacgcgtacacttgggagaatcctactggacttgcaagaacaataaaaagttggcttggtgatggtcagaatcagccatctttgtacatattggccatagtgatatatatggcaccaaacatagttgcttctatgctatttcttttcccatttatgagaagattcttagagagttcaaatgttaaggtcataacgatcataatgtggtggtctcagccccggttatttgttggcagagggatgcatgaaggtgcattctccctcttcaagtataccatgttctgggttcttcttttagcaacgaagctgactgtaagcttctatattgagatcaaacctctggtacagccaaccatagatataatgagggaacctatcaggactttccagtggcacgaatttttccctcatggaactaacaatattggtgttgttatatcactgtgggctccaataattctagtatatttcatggacacccaaatttggtatgcactgttctcgacattaattggtggtatctatggggcttatcgtcgtcttggtgagatacggacattaggaatgttgagatctcgctttgaatctttgcccgaggccttcaatgaacgcttgattccttctgatgcaaataagagtaaaggtcttcgtgctgccttttcaagtagacccaaggcttctggtgacgaaagacagaaagagaaaagagctgcaaggtttgctcaaatgtggaatgtcattattacaagtttccgtgaagaagacctcatagacaatagggagatggatctgctactggttccatactgtaaagaccgtgagctcgatatatttcaatggccacctttcttacttgctagcaagatcccaatagcactggatatggcagcagacagtggcggaaaagaccgtgatctgacgaagaggataaaatcagatccatacttttcctttgctatcagagaatgctatgcttcattcaagaacatcatcaatactttagtgtttggtcagcgggagaaagatgtcctagcacagattttcgcagttgtggatcagcatatagaagatgaaactctgataaaggatctcaatatgaggaaccttcctgcactgagcaagaagtttgttgaattacttgaattactgcaaaaaaacaaggaggaagacttgggtcaggtagtcattttgttccaagatatgcttgaggtggtcacaagggatataatggaggaacaggaccagctcggcacactgttggaatctgcacatggtgcaaatagtagaaaacatgaaggaattacaccgctagatcagcaagaccagttgtttgctaaagctattaagttccctgtggatgaatcaattgcatggactgaaaagataaagaggcttcatcttctgttaactgtgaaggagtctgctatggatgttcctactaatcttgatgctaggcggcggatatcattctttgcaaattctttatttatggatatgcccaatgctccaaaagttcggaacatgttggccttctctatcttgactccttattacaaggaagatgttctgttctcattacaaaatctagaagagccaaatgaggatggagtttccattcttttctacttacaaaaaatttacccagatgaatggaaaaatttcctcgaaagggttggctgcaagaatgaagagggactccgtgaagatgaagaactagaagagaagcttcgtctttgggcgtcgtatagggggcagacattaacaagaactgtaagagggatgatgtactatcgaaaagctttggagcttcaggcttttcttgatatggcggaagatgatgatcttatggaaggttacagagcaacagaagtaatgcccgaggactcgcaattaatgactcaatgcaaggctatagctgacatgaagtttacatatgttgtctcatgccaacaatatggaattcagaagcgttctaatgagccttgcgcacatgatattttgagactaatgacggaatatccatcacttcgggtcgcctatattgatgaagttgaagcgcctagccaagatagaaacaagaagattgaaaaggtttactactcagtgttggtgaaggcttctgttacaaaacctgatgagcctggtcagagccttgatcaggtcatctacaagataaagctaccaggtaatgccattttaggtgaaggaaagccagaaaatcagaaccatgcaataatattcaccagaggcgaatgcctccaaactatagatatgaatcaggagcactatatggaggaggctttgaaaatgagaaatctgctgcaagagtttgagaagaaacatggagtgagatatccatcgatacttggagtcagagaacacatatttacgggcagtgtgtcatcccttgcatggttcatgtcaaatcaggaaactagtttcgtaacaattggacaacgagtgcttgccaatccgttgagggttcgttttcattatggtcatcctgatatcttcgatcgccttttccacattacgaggggtggtgtgagtaaagcatccaaaattatcaatctcagtgaggacatatttgcaggattcaattccacattgcgtgaaggcaatgttactcaccacgagtacatgcaagttggcaagggaagggatgtgggtctcaatcaaatatctctgtttgaggcaaagatagcaaatggcaatggcgaacagacgctgagccgtgacatctaccggctgggtcatcgctttgatttcttcagaatgctatcttgctactatacaacaattggtttctacttcagtacaatggtattttggtgacctgagtttttgaactgttcttgtccgttcattggttaacctttcttgcattttctgacttgttcgttgtttcaccttaacacctctgttatttctgcatgcacttagattacagtgtggactgtatatgttttcctctatgggcggttatatcttgtacttagtggacttgatgaagcgctggctactggaaggaggtttgtgcacaatgcacctctccaggttgcgcttgcatcggagtcttttgtgcagcttgggtttttgatggcgctacccatgatgatggaaatcggtttggagagaggattcagaacagcattgagtgacttcatactgatgcagcttcagttggcctcagttttcttcacgttctcattgggaacaaaaactcattactacggaaggacattactccatggaggagctgaatacagagccactggacgtgggtttgtggtgttccatgcgaaatttgctgacaactatcgactctattcccgtagccattttgtcaagggcattgagctgatgattctactagttgtgtatgaaatatttagccagccatatagaggggctgtaacttacatcttcatcaccgtgtccatgtggttcatggtgggcacttggctctttgcaccattcctgttcaatccttctggatttgagtggcagaagattgtggacgactggaccgattggcacaagtggatcagcaatcgtggaggtatcggtgtagcaccagagaaaagctgggagtcatggtgggaaaaggagcaagagccccttcgatactccgggaagcgcggtactgttgttgaaatactgcttgcgctgcgtttctttatctaccagtacggacttgtgtatcatctgaatataacgaagaagataactaaggacaaccagagtgtgctggtttattgcttctcatgggttgtaatttttgtgattttgctcgttatgaagaccgtatcagtgggcaggagaaggttcagtgcagagttccagctagtgttccggttgatcaagggtctgatatttataacatttacagccatcgtggtaatcctaatagcgatccctggcatgacggtgctggacatatttgtttgcatccttgctttcatgcccactggatggggtttgctgctgattgcccaagcgatccggcctgtgatccacaagactgggctctggggctcgatcaaggctcttgcccggggctacgagatcctgatgggacttctcctgttcacgcccatcgccttcctcgcctggttcccgttcgtgtcggaattccagaccaggatgctgttcaaccaggcgttcagcagaggtctgcagatctcccgtatcctgggaggacacaagaaagaccgagggacccggaacaaagaatagggctgggctgctgctgattcaaggtttgtgtgcgccactagtatttatgtgtgaatgggtgggtagcatatggctcgagagtatctcctgaatggagattgattgatcctgaagagtagaagagactcgagtgatgtaagatgctgcaggcttgttgctttgttacctaggcgttaggcagaacagatgttttcaggatctctggcctgttaaccacatcttcccctgttcagagtgaattaattcctaatggaaactgatttgtgaattacttcctaatagaggagtgcttccaaactgatttcatgtgtgtgctgtgatattgtttagcatatagtattttaaatgtagctttgaattttcattctttcgcaacaaaaaatgaataggacaagctggtcaaacttgaaaaaaaaagttaaacgggttataatttgggacggagggagtatgatttgagaacctcatcaaatagtcttgcca

SEQ ID NO: 42598 - DNA, 3149 bp, Zea Mays
cgcacacgccgcgatgatcctggaaagcggcatgtacgagcaggccggggagctccagatcctgttggagtacatggaccaggggtcgctcgagagccaccgcatcgcgtggcgcgccaggtgctgtcgggcatcgcctacctccaccgccgccgcatcgtctacctccaccgcgacatcaagccctccaacctgctcatcgactccgggcgtcgcgtcaagatcgccgacttcagcgtcagccacatcctgaactagaccatggacccctgcaactcctccgtgggcaccatcgcgtacatgagccccgagcgcatcaacaccgacctcaacgacgggtacgccggcgacatctggagcttcggcctcagcatcctcgagttctacctgggccgcttcctgctgtgcgagaacctggggaagcagggcgactggccgcgctcatgttcgccatctgctactccgactcgtcgcaggcgccgtgcaacgcctcgtaataagccatctgctcaagtgagaatagatgttgtggttggaaaggatcgtctattagacgtttccatgcataagataagtgttgcagctatacaaactggttttggttttgaggtcaagctggacaagggaaacgaagctcaaaatgaatcaatttattagtcaaaacaacatctctattcattgaagattggttctttttaaaattttagatgtcattggttggattgcgatctcctttgcaaaagtatggttcttttttaaatttcagcatactgcttcaatcttgaactacaatttttcatggtctgaaattgcatatggagacttggattttaatgcttaagctgaaattgcatatggggaactttggttttaatgcatttcttgcttcaaccttgagatagcagctgttgtttcccccacttattgttcattctagaattagtagatgactgccttgcaaggatttgaacatatgatagggtgctaaaatgtttgaatgatgctttatggtatgcttgcatttagagaatatagtagaagacctgaagtgggtttacaggactaagaatgttcattgtatctcaatcatgaaatagtaaatatttttcttgtttgcagagatttcaggctatgtcttattcagcagttatgaaaggtagcgactacaatgtgctctttacttaactttctcattaatatctctgccctttggattttttatgcaacattttgattttttatttgaccagctaacaagcaattcactattatgttattattggtacttatctttctcattaatatctcttccctttggattttttatgcatcattctgattttttatttgaccagctaacaagcaattcactattatgttattattggttaaactggacccttcaggtgatttctgtgtagccctaacattaaagctcccagtttatgcaggctgcagctttgaatttgtaatacctttgcagttactattaagttagcatggacaatagaaggtggaaatcatttccttagctcctgttagtgtccatgaacataagttacccatggtctgagatgttacatcctcctgagctattttctcttgttgtgtacttctgttagtgtccctggcactatatcattcatttggagattttcaatcagctgtatagctatgtaaaattggttgcattttaggtgatttgtgggaattaaattgcaatgtaccagaaatcgatcttaatttatgcaatagattatatgggaaaaatcataccatggattggatgtaggctgaaaccagttacttcatctaggctaaaattgttggttctgtacaaaaggtagtctaattaggctttgatatccgaattaaatgtttatcacctacttttagaaaaaagttagtcatcttcacgatccagttgatacatattcacaaatttgtacatgagtaacaggcaacaacttttctcaatttatccagaaaatgacttatttttaggggcctggtgtatatctctatcctattattttattctcagcacattcacattcacaactagctcaacacattcacattctcagataccgatctactggacatcatcaactcagagatcaagtacgcccgaggactcaggactgcgatgaccacgacacgaatttgtgatgtcacagagtagggatgatgatgatctatatcaaaaaagactaggttcctcatgttcctcatagtcctctccataaagcactagaaagtatactaccattctggcggacttcggctgaacccgaacctgtacgagagcgggaaagtgtgcctgagccttctgaacacctggtggggcaaggggtgcgagaagtggggcaagtcgagctccaccatgctgcaggttctggtctccatccagggcctcgtgctgaatgacaggccatacttcaatgagccaggatacaagaactcggctgaaacgacaggtggtgagaggtgttccttggcttacaatcagacgaccttcgtcagatcatgcaagacgacgctgtattcactccggaagcctccaatgcattttgagacccttgtgttgtggcacttccacgagcatgagcgtgccatcctcgacgcttgcagggcttacatgtctgggacagtcgttgggtcgtctgctgggactgggagcaaccgcagatacgtccatgacaagtgctttgcagaattccacaagtcgctgacgctctacactgaacatctcagggctgagtttgctacaaacagaagacgagtgatggagctagaaacagaagacgagatcgtgcctagcatagcagctagcatgaaatcgtgttgaaggcaaatgccccacagtgttgctctcatcatcagatatttgctgccttagctatttctagcttcattcatgtcaagtgaataatctaattcatgacaattgtacctgtctctatatctaatgaatctgtcctctcttttgaaagtactaagtgtatgcccgtgcgttgctacagaataaacatgttatgatgagatgcagaaacattagttatcgttctatgcttttgttagcatcttctaaaggttaagaatatttacataccttaaaaaatgtatactccgccataaaagcaaac

SEQ ID NO: 42599 - DNA, 2054 bp, Zea Mays
gcaccatttccaccgtatcactgcacggccgcgcgaaaatgtgcagcgccacaagtgcattccggccccgtgagtaatcgtaacagaggatcgctagctagtgtgctaccctgtacggcgcaggcgcagccatgagcaacagcggcaggtggcggaggaggacgaggtccgtagccccttcgccggccacctcttctccgtcgtctcctggcctccgagaagcgcagccgttccggcttccccagtggaagttctcccaggtcctcggcgaactgccgcccgcggccgaagcccgccgcgacggcgctccccgtccgcaggacgacgacgatgcggacgaaatctcggctatcgagttcgacggccgcggcgagtacttggccggcggcgacaacgccgggcgcgtcatcctcttccggaggaccgacggcgacggcgacgacgcgcggcctcgcgcggagcttgagcgcacggaccgtgccggagcgccgccgccgaggtacagctacgcgacggagttccagagccacgaacgggagttcgacgtgctggacagcttggacatcagcgagaggattaagaaggtgaggtggtgcgcgcggcccaacagctccctgctcatgctcgccgcgaacgaccgcacggtcaagctctggaaggtctccgaacacaaggcggaggcgccgaagaaagggaacggtcggccgagttggggcaccgcggcgctgtcggcagccacgaaactgccgaggggctgttcgtctgcagagcctgacgaacgtcctgaaaaggcagcaggcgatgtcggagacggctactctgcgaaatgccggagagtcttcggccgcgctcacgagttcaacatccactccgtctcgaccaactgtgacggggagacgctggtgtccgcggacgacgtgcggatcaacctgtggcatgcggaggtgacgcgccagtgcttcaacatcgtggacatgaagcccgcggacatggaggacctcgtaggttccaggaccgcgagaaccgccctcagcccagcacatttttcagtgagataatctcctgcatcaccgaccttaagttcacaggcgacggggaacaccttctgactcgcgactacatgaacctcaagctctgggacctgcgcgtggaaacctcacccgtcgcaacgtacaaagtccacgagttccttcgcccaaagctgtcggagctgtacaccgacgactacatcttcgacaggttcggctgctgcgccagcaacgacggggcctacttcgctaccggatcttacagcaaaaccttcagagttttctcccgtgccgctgcgcagacatgcggcgctacgttggaggccagcaccaacccttacaggatacaattacatgctcctacgaagatcccagcgctgcttagcaatttctctctcggagttcatagaaaaggtcaggatggtcatccgaggtcagacggcaaggaacaagtctcgtgcaacatggcgtccaaggtgaagcatctagcatggcacccggcagaaaacttcatcgtttgcgcagccaatagcagcttgtacatgtaccatacataagcacgctcatgttatgtgtgcagagtgcaaatcacagaacagcgttcgtagctaattagattgaagccagaaaagaagatacttttcccatgttagggcttgttcggttattcccaatacacatggattatatgggattggaaaaaattgagaagaagtttgacttgtttgggattcaaaccaatccaatcccgctcaatccacatggattgagagctaaccgaacaagcccttacggttgcatgttgtgaacagggatattgaactgactgtacattgtcaaggatcttggatcttcagcagatcatagaaaggaaaagatactctcgtaacgaacgaaaggatcgcctccctgactgtcctttctgctcctcgatacatccttgcaatattcctgaatttcgaagggttgacctgcaactcagacttgctttgtgcattgattaaacatcatggaagcactgaaagg

SEQ ID NO: 42600 - DNA, 1126 bp, Zea Mays
aaggcggtggcggcgagtccttcgttgtcggagtcagacgaggagcaatccgaatcccactcctttccaagatgtgcctcgcccttcgccttcttgtagttcttcttttcccactttccactcttcttttcctggtcactatcattatcgggacaatttgcgataaaatgaccaatcttaccacatttgaagtaggagcgcttccccttcgtcttgttcttgttggggtcctccttgcgaccctttagcgccgtcttgaaccgcttgatgatgagggccatctcttcatcattaagcccggccgcctcaacttgcgccactgttgggggccttcggcttccgaaggtcctcaaaaacgtaattttgactatgttttccaaaagaaatatgtgaacaggtaccttcgaagtcagattgcgagtatacaagaacatggttaagacgaagcttgattgggacggcgatcacaacgaaggataagacgatcacgaagctacgtgcagaagagcttcggcataacggcagaaagaggaaaccgacttaaagatgaaaagccaaattagacctcgaagaattactatagagttattgataaatgtaaagggcattaatgtaattttgcatgggctgcgacccgtgcctataaataggtgaacagtattcccgtactgttcacgctgactgggcatttacttttgtggcagaacctcccaagttattgggcccacatgcacctgtccttgtctcaaagacctcagacagctatgcatgtgcaccagataacttaacaggatccgtccgattgcccaaggacatcggataaaccacttacaaccagaatcgcgggattaagtaacacaaatcacacacacaacatttttgcagcggaaatcttattaccaaattttacaggttataaaaaaattacattattttatcggagtgattacaaaagtataagtttgaaatatatgctagctcaagtgaccatcctcaataagaagtatagaagaagtacttagacttataagaaggccgagcccaccggcacttaacaccatcaacaacagcacaaagttaaaacctgaaaaacaacagggaataaaaccctgagtatggaattact

SEQ ID NO: 42601 - DNA, 303 bp, Zea Mays
ctccttgattcctaaatccagcatacccttgagagtcttttctttagtcgggtaagtcttgttgagtaattccatactcagggttttattccctgttgtatttcaggttatagttttgtgctgctgttgatggtgttaagtgccggtgggctcggccttcttataagtctaagtaatccttctatacttcttacgaggatggtcacttgagctagcatataattcaaacttaagcttttgtaatcactccgataaaataatgtaaaattttgtaacttgtaaaatttggtaatatgatttccg

SEQ ID NO: 42602 - DNA, 2241 bp, Zea Mays
cgtgcacagggtggacgttctgcccccgacatcctccccttagctccgctccctgaagccgtgatcgaagccgccatcaacgccctccaccccctccgcgcgcggcagcggcagccggcatttccagcccctaaaatcctatttccctctcccacaccaggcgccgcgcccgtctgattccgcccgccagccacgcccgcagatctcgcttcggcgccctgattccgtcgtatgcaaggtcacagccctgccttccatcgtcgcccccatgccacgctccccttccatcctcgctcacttccagccgcccccattcccagttgaaggagtcgtccaggaaccaggaaccccatcaccggatcaggagcagctgtgtcgcgagcatggtcgttgctgagctcccgatgaccgcccgatggtgtcggaccccgcaccgccgtcggcaccgcgctactcggcgtactcgctgccgtcgacccacctccccggagaggacatcctcttctgcatcgacgtcgacctcgaggtccacgccaagatgaagtccgctgccgtagcgtcctcggatccacgtccaccgcgtcgccgcagtccgtaggagctgatggtgccccgacggtggggagcatcgagccatggctcaagtgcaaggatcagcccccgcagcagggcaaggagatcccgcagaccaaggccgaccgggccaagctcgatggcatgtacaagtgcatcctctgcgcctgctgctccacctcctgcccgtcctactggtggaacccagaggagtacctcggcccagccacgctgttccacgccaacaggtgaacagggcttcagcagggacgctggtttagcaatggaggcgatccattccttgtctgcttcaaaatcaagttatccaatggtaaaatatacagactgtggagttagtcctcaggatctacatcatgtattcacaaagtttgctcatcctcaaagtggaggaaaccgagggtttaatggtagtggtcttggccttgccatatgcaagagccatcccggtttctaggattccatgtcgtcccatgagaatataacgaaggaaacaagaagcacattatagaagtagcaagatcacagtacatatcagcatgacattcatgaagccatcccggtttctaggattcttgttttgctctgtccatggcacgccaccaacattcatccctaaaactgacatttttttgcaacataaatcaggtaaacgagagccctggaaataacaggaattaattcaggaaagtacacgagcaagcacccgaggtcaatgagcttacctccattgacaatggagataggaaggaatatcatgaagagaaatgaaagctgattgcaggagagattaaaatcaaagggattgagctacaggagagttgcagtctgtcgttcttttccatggtagtaggcattttcattgggttcatacatttattctctgtcgatgtttacaagaaaatagtatctaaaaacaagatgtctctgttccatgagggtgtgattgagactgaaacgatgggtaccagagtgaaggagtcgaagacagttttagtagagaaagagctcgaactgatcgacgagcctcagattcaagagagccctccagttcgtgcattgttgcatgatgagccatattacttgaagcccatgttttgaaagctgtattggcacttcttctatggagtcactacttatagaaaaagcttgttcctagaggtggtttctcccggcaatgcagaatcttgaagcacgtctaaagtggcttgatgatagttctaaatttcaactccctgtcattaccaggtgccagataggctgctggtcgattccatcctgaacaagttgcgccaaagattacatgaatattgcgtgccgagatctgtcttcagtaatgcgatgccatcctgaacaagttgcagcgacaattaggataggattttcccacgctttttagtcttgtgtattccttttatgctcttcatctttttttctcattatatccaccaattagatagtcatgtagactttcttttaggcgcttttgttttttatactttgtgttaccttgcttttgttttcatactttgtgttaccttacagatgtaaaaacgctcccctcccgtacattgcactatttatgaggaaaggtaaaatagcgtcatttagctttttcagtcgaggaaatgcactaatattttgtcgaat

SEQ ID NO: 42603 - DNA, 3644 bp, Zea Mays
aacaaaattggcccggcccacgacattgggggcaatccaggctcagcccaactactctctcgtcctcttgttccactgtttcccaccccaaaatactccaccaccgcacccactagggtttccgcaccgcattgcagaacctcgccgcctccacccgcaccacaccaccggcgatgtccacagcggcggcgcagggcggcagcgacaagccggcgctccggaggcccgtcttcaccaaggtcgaccagctcaggccgggcaccaacgggcacaccctcaccgtcaaggtcgtcagcgccacccccgtgcctgggcgcgcgcgcccaggcgcacccgccgccgccccatcccgcgcgccgcgcatcgccgagtgcctcgtcggggacgagaccggcgccatcgtcttcaccgcccgcaacgaccaagttgacttgctgaagcccaatgcgacagtgatcttgcgcaatgccaaaatagacatgttcaaaggatcaatgaggcttgcagtggacaagtgggggcggattgaggctgtagagccagccagtttcacggtgaaggaagacaacaacctgtctctaatagagtatgaattggttaatgtggctgagtaactgtccaatccaagcgtttctgccccctttatttcgtgccataagaaggaagtaccatgaatgaacattataaagcctcttgaagcgaagcgagtttatttgctacggtggggtagataaaggtcaaggctgtatggcctgtgttagaactttggataaattaagatgaattgcccttgcatctatgagattgttatccatctttgtactgctcgtgttgctttgatgcaagaaatctgaagcaggaaatgcgtacccagtgctctggacactggcgtctgttgtaattgtgtggctaccccaaaagtgtgcaattaatatctttcgacggggtgtgatttagtactgatttaaactggttttttggtatcaacaatcacaaacggaatgtcgtttggccaagaaaggaaaggaggaccctgtggttggcagtccactaatctgttccctgaatcctaaaaaaagcagtgcttgtgttggcggaggccaggccatgcccccggtttgaggagaggcctcgcaagcatctcaggcgacgcgaggggatcaggggacatgggcggcggcgagcatgaccatgagcccgatgagcctgagcctgccagggacaaggagcacgaacacgatgaggcgtcggtggaggcgctcttcgctgggcagtcgccggcgccgtggtggcggcaggtgacggtgcgttccgtgacggcgagtgtgttcgtgggcgccgtgttcagcttcatgtcgatgaggatggggctgaccatcggcctggtgccgtccttcaacatgtcggcgagcctggtgagcttcttcgtgatcagctcgtggacgcggctgctgggccgctgcggcgtggccacccagcccttcacccgccaggagaacgtggtggtgcagacctgcgtcatcgcctgcgccacgctgtcgctctacggcggcttcacgtccttcctgccggccatgtcgccgcccgtggcgaaatcggccggggccccggggacgggcaacaacgtgtacacgctgcatctcggcaagatgatggcgttcagcttcctcaccggcttcaccagcttgttcatcacgctccccttgaccaaggtctggtgggtggtcaccatctgtcgtctcatctgattccattcatcaacaagctagagaataagaagaagaatgatgatgctgatgtacacgcattgcaatgcaggtcatgatcctggactacaagctgctgttcccatcggggtcggccatagctgggcttgtcaacagcttccacacgccagcgggagcagcaacagcaaaattgcagatagccactctgctgcgatctctaggcgggagcttcagctgggcggtgttccagtggttctacacgggaggcgacggctgcggcttccaggctttccctctcttcggcctcgaggcctacaagaagcgcttctacttcgacttctctccaagcctcgtgggcatcggcatgatctgccctcccatggtcaacttctcgctgctcttgggcgccgtcgtgtcctccgcgatcctctggcccatcctgcagggcaagcgaggggaatggtacgacgccgacgcctcgccatccagcctcagagggctgaacgggtacaaggtgcccatgggcatctccttggtgctcggggactgcctcttccagctggctgccgtcagcatcagggcagcgcggggcttccatcaccgccgtcagcatcagcaggatgaagatgacggtggtcagcagtccctgtcgtacgacgaccggcgcaggatccacaacttccagagcgaggggatgcccacccacgtgtcgctcgcgggctacgcgatcctggcaggcatcgccaccgtgttcctccccggcatcttcccgcagatcaggttctaccacgtggccgtgtgctacgccatggcgcccctcctggcgttctgcagctcctacgcttcgggcctcacggactggtccctcggcaccatctacggcaagctcgccatcttcatcttcggcgcgtgggtcggcgaggcgtctggcggcgcgatcgccggcctcgtggccggcggcgtggtggtggtcgtcatcggcaactcctccgagctcatgcacgacttcaagtcggcgtacctgacgctgacctcgccgctgtccatgttcgccagccaggtgatcggcaccacgctgggctgcatcctcaacccgctcctcttcctgggcttccaggagatggccggcggcgcggaccacctgggggaggccgggtcgctctacgccgcgcccatggccatggcctaccgcggcatcgcggacctgagcgtggaaggcatcaagacgctgcccaggcactccgtcatgctctgcgtaccttgcttcctcgtggcgctgtgcgtggatgccctggcggccgtcgccgcggccaacggctggaggatcaagggctacgtcccaaacatcatggccatggccatccccttctttgtggggccgaccttcgccatagacatgtgcctggggagcctcctagtcatcctgtggaggagaaggaacaagcaggcagcgaacctgctgtcggtcgtggtggcgtctggtttgatctgtggcgatgggctctgggcgctgccgtcttcgctgctggccatcttcaaggtggagccgcctatgtgcatgaagttcctgtccaactaccagactgagcagatgcggaagcacctcatcctagcagcagctgcacgccgaagaacaagttaattgttgtacccttacttgtttgagaacgaggaatgagaatggattgtttagtagctagccacacccacacactcctccttgttttccaagataaaataggcttgatagctcgatctagaatctagatagataaaacagcacacacgtctcttgcttcttgcaagcgtctaaatcaccagattatgctttatgattctacttgtacaaacatttagctcctgctatagtaaaactacacaatagtttatagtcaatgaaaaacatataaaaaggtc

SEQ ID NO: 42604 - DNA, 342 bp, Zea Mays
gaactaactcttagttcaaaagttgttagattatataatctggatagattataatctcaaacaaacaccccctaaattgtgcttgtcttcatcctatcgtccacagtcgaatggacagaccgagcgcctgaatcaatgtttggaaacatttcttcgctgttttgtccatagaacgccgactcgttgggctaaatggttgtctgtagcagaatattggtacaatacaacttttcactcgacattggggcatactccttttgaggtactatatggttatgctcctcgtcattttggtatttctgctgacaaaacggtgtctattccggagctcgatgattggct

SEQ ID NO: 42605 - DNA, 668 bp, Zea Mays
tcggccttcttatagaagtataccccgtctttatcttcttactgaggatggagaccgttcgtcagcaaggttcatggaaggaggaggcctaaaaaggtccaactccccatcaggtccttcatctactgtccccgatggtctggctcccattacaacaacatcggcaggcacgtctgggtgcagtcgagcatacattacatgtacttcctcatgtaaagtattatagtacacttacaggctgtcgagggccgcactaagctctgccacacgagctcgagcttttgcttcgcggtcccaagcgatcgaacgtgagttgacggcccaatcaatggctgaatcttgttctgaaatctcgtactgcaagcggctgacgtcagctgacaattcagctatacgttggctgtcctacgcccatatcctattccgatgacgtagctctgtccggagttgttccaccatggcctccaagtctccgattgggtcattgctgccgcaactactttcctcatgtcctggggctagctgatgacgaggcacgccaacaggtccagtagatttgcgtgcagttttccttgtacgcaccatgtctccataagaggggaagatttattagtataattttaatcatgatgcatgcataacctaataaatacggaatcaaccttcgt

SEQ ID NO: 42606 - DNA, 3661 bp, Zea Mays
gtctgaagagcaggagaaaaccctaataaggttcctgttcaacaacaaagatgtcttcgcatggtcagctaatgatctctatggtgtcaacagggatgttattgaacactcgctcaatgttgacccatcctttaggcccagaaagcagaggcttcggaagatgtctgatgacaaagccgaaggtgctcggaatgaagtgaaaagactcctcagcgctggagtcatcagagaataaaatatccagaatggctagctaacactgttatggtgaagaaagccaatggtaaatggagaatgtgcattgattttactgatctcaacaaggcttgtccgaaagatgaatttccattaccaaggatagattctctcatagacgcagcaggtttgtcagagctcatgagtttactagattgttatttaggctaccataaaatctggatgaagaaagaagacgagccaaaaaccagcttcatcacccccagtggtacatattgttaccttcggatgcctgaggggctcaagaatgctagaggaagcttcagcagaatgacagcaaaggtccttcattctcagataggcagaaacgtgctaacatatgttgatgatatcatagtaaaaagcacaaagcaagaaaatcacattgctgatctgcaggagacattcgctaattttaggcaagctagtctgaagctgaatccggaaaaatgtgtcttcggggtaaagaaggggaaattccttggttgtttggtttcaacaaaagggatcgaagctaatccaaataaaatagaagctatccttcggatggagccgccaagcacaaagaaaggggctcaacggctgacaggaagactggcatctttgaatcgatttatatccagatcgacagagagaaatttaccattctttgaagtgctgaagtcagccgaagtttttcaatggggatcagctcagcaaaaagccttcgaagaactgaaacagtatttgatagatttaacaactctaactccactagcgccaggggctcctctgctgatgtatgtggcagctttgcactcttcagtaagtgcggcgcttgttcaggagaagcttgaagggcaattgaaaaagcaggctccagtatactttgtttctgaagttctcagtttatcaaagaaaaactatacataattggagaaggtgttgtatgttgttttaatggcctccaggaagcttcgacattattttcaagcataccatataattgttccttcatcacagcctttgaaggatattatgagaaacagagaagctactggaaggattggaaagtgggctgcggaactcaatgagttctgcattgattatgtgcatagatcttcgattcagtcctaggcgctagcagatttcatcgccgactggacgccaggggctcaggaagaagaagcaagtaaagatgccgaagcttggacagtattctacgatggttcctgaggaaccttcggggcaggtgcagctgccgttttaattgcaccatccaaagtcagaacatgctacgcagtgaaacttgattttatttgtacaaataatattgctgaatacgaagctttgctttttgggtcttcgaaagttgaaggcaatggggataagaagggcggttctcaaaactgattcccaagttatttctggccatgttgacaaaagttgcaaagcaagagatccaaagcttgagaaatatttggatacagttcgaagacttgaagcttccttcgaagggttttctgtcaagaatattccacgaggagaaaatgaacacgctaatttactagccaagtcagcggcacaggggctgccattaccttcggaagtattctttgaaacaacaaaagcaccttcggttgaccttcttgaaagagcagtgctcaatatatctcctgtttatagcgaagactggagaactgagatcatgtcttttcttcagggcaatttcctttcagatgacgaagcttatcataagagaataacggcaagagcccgtccatatgtaataatagaaggggagttatacaagcatggagtttgttctccattactcaaatgtttatccagagctgaaggtatagagttgatgaaagaaatacatgcaggcctgtgtggatctcacatcggatctaggcctttgttgggtaaagtttttcgtcaaggattctattggccgaaggcagcttcagatgcagcaaagttagtccaaaaatgcgaaggttgtcaaaaatgtgcaagagataaaaaacaaccttcgtctctaacttaattaatacagcccacttggccactgccaagatggggccttgatttgctaggcccacttccaccagcacaagggaatttaagatatgttgtagtggcagtagaatatttttctaaatggattgaggcgaagcctttagccacaataacttcggtcactgttcaaaagtttttctggcaaaatattgtgtgtcgcttcggagtgccgaaggccattaccgtggacaatggaacgcaaatttgatgccgaagctttcagagagttttgtgaacaaattggcacgaagatccattttgcatcagttcggcatcccggagtcaaatggacttatcgaaagagctaatggcattataatgacaggaataatgaagctaatcttcaaccagcccagggggaagtggctggatgaattaataaaagtggtatggagccacaacacaacaatgtcaaggtcaacaggttttacaccattcaaattgatgtttggtgacgaagcaataaccccagaagaagctaaagcgggatcaataagaacagtggcttcggcagaggacgaagctgattattctgtggcaaaagatgctatagaagggatcaggcttcaggctgtggagaatatcaataaatatcaagccgaaacaataaaatggcgtgacagaaaggtttggttaaaaaatattaagccaggacacttggtacttcggagagttgccaacccaaacacagtaggcaagctacagttgaagtgggaagtgtggcagaacctccaagttatcgggcccacatgcacctgtccttgtctcaaagacctcagacggccatgcatgtgcaccagataacttaacaggatccgtccgattgccccaaggacaccggataaaccacttacaaccagaaccgcgggattaagtaacacaaatcacacacaccaatatttttgcagcggaaatcttattaccaaattttacaagttacaaaaattttatattattttatcggagtgattacaaaagtataagtttgaaatatatgctagctcaaatgaccatcctcagtaagaagataaagacgggttatactatataagaaggccgagcccacgtgcacttaacaccatcaaaagcagcacaaagttagaacctgaaaaacaacagggaataaaaccctgagtatggaattactcaacaagacttacccgactaaagaaaagactctcaagggtatgctggatttgggaatcaaggagaggctttagcaagaatcaacttagatacttttgcagaaatagcttactaaagtgagtccttactttcaatattttaacgccagattaaatattaatagactctatttgcatctggtctaatttcaccatct

SEQ ID NO: 42607 - DNA, 3816 bp, Zea Mays
tgcccgtgtgccaggcgaaaaacgtagcctcgcactctcgcaggcggcggcgcatcgagaaacagggctgcggctgttgcttcttccacctctccggccatccggcggtccatcgttccgtgccggcggcctcccctcctacgcccctgccgattcttcaatcttcaccaacgtctgcgcgtagcaggctagcagtcggcacggcttcctcagatctgccggacgacttgctgttcgtcaccgactcaccagcaaccaacgtcagccatcagccggcagcaggggaagctgggcggagggtcattgcggcacggcgtccaggcgtacagaaggcaccagcaacagcccatggcaaacgatgaagccggagtagaagatgccttcacacaggagatcaatcattcgtacgtccctagataccatgtgttgagttggatggaaactgtggaggggatggtggccggtgtggcgtcgcttccgccggtgtatttgatactgaacagagagatatatgatacatgctcctgcttgctcatgatgccggtttggtgccaaagctatcttcttgagacgggatggggatggaagaggctggtgccctacagacctggttatgttgagttgcatgtgttcaagaaataccttggggactatttcgaccataatcgtgaagcttttctttgtgccgagcagaagcctgatccatttggatggattgttgctgaaaagagtgccctgattgctgcagccaaatcgtgcctcaagatggagaaggcacttctcaggtactgtgctagctttctcactcctgacgacaaaaggctgatcctccggatcaaggaccaggcaaagcaaatgatccaatcagagggtgatcaatctttgattgtaactatatgcttggagtgtattgcgaaggaggccgagttaatgtacaattatttgccttgtgattttgacaccaccgaagaagtcgccgtctgcaataaggttcggcggtctgccttgaatcttatgctctacaaaggttctgaatctgctgttgctgctggtgccatgatggtgtgttcctgatactctctccattcattttataggctttattttgactatgcaaaaaccaatattctgctgtaaattctccctatagtattatgttggtagttacaaaatcatagtcagtagcaagtgcttttaattaggaattgttacgtaactcacattttatgggactaatgtctggtcaaagcatgaacttggatagtcaaaccacaccttataaatatgaatatagggagtaattgtgtattttttaatcctctgttatcctgtcaagcttctttaaccaaactgcaaaaacgatgtacttgaagggtatcacaacagaggctaagtccatttttgacttgcttagtcgagaccatgacgtggtcatggaagtttttacttgtgagagtataagggaacatacagcatcagttctgacccagcttgggaaggaatttgcttgcgagactgctactgtgaacagctcatcagcgcggcctatgggggtcagtgatgttagagatctgaactctgaagtatctggttcaatggaagactgtacgagtatggatggagcaaggttttaaagtcggctagtcgactctagtcgcctaagcaccgataaggtgactaatcgcgattagtcgtcgattagctcgattagtcgatcctagtcgactccctagtcgtcctatagtcgtccatctataacaggaccatatatatatatatatatactagattgcaaatctattgacaatattacaatgaaactgtagaatgaatgaatgatcatgttttcactaaaaggtaaagatcacttagacacttaccttggattggagtatacaacagcacactgcaagattagtaggacaacacttctggtatatctccagcagccttactagtgcaaaacgtcatatatctccaacaaagcaagcagaggagggcgtccagcaagcagaggagggcggcggcgcttacagcagcagcaagcagaggagggcggcgctcagagcagcagcaagcagaggagggcggcagcgctcagagcagcagcaagcagaggagggcggcggcgctcacagcagcagcaagcagaggagggcggcgctcagagcagcagcaagcagaggagggcggcagcgctcagagcagcagcaagcagagaagggcggcgacgctcacagcagcagcaagcagaggagggcggcgctcacagcagcagcaagcagaggagggcggcggcgctcagagcagcagcaagcaggggagggcggcggcgctcagagcagttagcagcaagcagatgaagcggtggcgctcaactccagctaggttaaagactgtaacggcattggcacagtttcaggcttttcagcccccctggtgggccggcccaaatagaaaagagcagcctggagcccaaaacaaagcacctagtcgagaacaaccctaatcggacgactaatcgccgactaatcgcgattagtcggacgactaggtttctagtcgccctaatcgcgtcggtggccctaatcggccttgcagcagcgataagtccgactaatcgcgactaatcgcgattagtcggacgactttaaaaccattccgatggagacaatggaaacaatccagttgttggagggggtggctaagaactcgaagaatttaaagttggtggagaaccacgaaaacgagaccagggttgccacgtaagagaagactgcatcagcatcactacttgcctgttttgaaatttaatgtacctttcacggaagccctcactaacattaattgtttgtatgtttcatctcagcttgatgactgaaaataactagggccttgcagggaaaccttcgttgacttctgaggtactgaaggaatccaattcatgatgatgagctacattattcaagtttagcaactattgattgtgtttcccatcatgccttggatgtgtcaaaacttgaacacaccaatttgaagattatcataccctgcttatctatccacatacaaccaaccaaacaaaaatctgctggatcatcccatttgaaaacttgcaaccaaccaaacaagaatttggctcatgcaatccgtccaacctaatgagctaatacatgtaggagcatcattctatgattctatcctaaatccatggatggccctatcccatccaaccttgcctctccaacccatacggccatacaaacttgtgaccattcattgtaattctcatttcattgtcataagtgcgcctcgtttgacactgttgtttctctcgtcatcattggctttgtgtcggacacgttcatgataatttatctgcagcaacggtcaaatttatgaagctacaaggtgcaagttatgagctgctgtaactaaaaggatctctggtttcttttgagcagctgtctgttgtgtcaagttatgtgctacttgtaacactaaagtaccattttaccttatgacatgcagtgcttggttgttctgtcgtagttaaagaccgtgttgcaataagtgctagttctgtatgtttcctgggtttatgttatcaaatggttgcctggtttgcccactaatgtcatgttgctataagtattcctagctgttgagaaatgcgtgcgcgcgtgccgatcgttgtatcattgggtgcaacatcataggtcattgtagccaagggctatgaagaggggagtttcagatagtccaaaaacaccagggtacatagcaaatacgaaggttcttaggaaggaacagaag

SEQ ID NO: 42608 - DNA, 1220 bp, Zea Mays
cttggttgggctggcccaaaacactcaaacggaccgcgctaaattatttcccgaaataaaaatgctcctgcggaattcgtttcaacagagaacagagcgaaatatagtttggacgaatggacgatcgagcgattaattcagccgagagtctaatttgatttcgctcaaaaataattccctatgcgtggttcgaaaataaatcgtcctgagatttgatcggctttgaattttagtcggagaaggcgaatcgtgatattttaaaatcgctgccggagtgggttttcaattcggttcagacataagatatttggccgagtcggataaaattgattagaggacgacatattgagcattccgtttgagagtacggactcggattaaaatagtcggacattgatcgaggttcgaggaattagacttgggctcagatcaaatagtagtcgtcgagagtttgatttaagagcttcagatgagatttataattcgagaatgattttcgagtctgcattcgttccgagagataacgttttaataggctccaaaattggctgtttctcgcgatcgaataactccgacttcggtgagcttccatgaataatcctgataaacagagatagacacaatcgagaaataggaaattttcactgagcattcaagttagggacaaatctcccgacataacacgaaactgacacctggggtgtcacagtaatcacctaacttgtaaaataaaacttggcttaagtatccattattagtaagcttttatgcaaaaaggagtccttgataattgctaagcttttcccttgattctccaaaagctagcatgcccttgagagtcttttccttagtcgggtaagtcttgatgagtaattgcctactcagagttttattccctatgttgttgcaggaaagaatttgatgacttgggctttattagttgcttcttgtggaggtcttgaagcttaggttacttatgtgtatattttatggaaaggtttcacctttccaaatattgtagttaagttatgcactctaaagactatcaggacttgtaataatttcaatcccttttgtggtgtaagacttcagttctggaatgtatagtgtattttgtaaaagtcttccgctctatctccaatgtgtgtatcaaatgtgattactgtaatatgcctgttatgtgggagatccttgggatgatgagttcaagttgatgaact

SEQ ID NO: 42609 - DNA, 2357 bp, Zea Mays
ctggactcgggctcccaccctatttctttgctgcacctgcacctccgcttcccgtccatatcacgctttgatcgcttcttttttctctccatcatttctccccgtttcgtctcgcttcttttctgtcgcctcccgtttcgtctatctccggccggcctttctgctgcaaggaaaccaatattgtttgctggatctttcaaaaagggaaaccgaattcccgagagcgagcagcagggaatctctgctgaatccgtaggctccgaattggagctggaagtgtagtgatttcctgattggggacataaggtggggtttgtccctactccccagtgagctccacgcggtccctgctgttcttccagtcaaaattctgtacccttcggtgctggggtcaaggaactaggcgtgttgtcctgaactcttgattcctgcttcatggaaattgtatatgtttttctctgaattcaaaatcgtccctattctcccaaagctttctgagcgcaggaagaaggatattgtccctctccaaaactataaacatgggttggttgagtaaaatatttaaaggtccagtaaatagagtttcaagaggacactacaacgggaactcccatgaaggctattcagctcagcacactaaatcatatggtgtgcatggcaatgaggacgaagacatggatcatgctattgcattatccttatcagaggaagatcaaaggaagggaaagaccattgataccgggcatcatttagatgaagatgaacagattgcacaggctctgcaagaaaatattggtcataacctagctgaagacgaacagcttgcacgggctctgcaagaaagtatgaatgatggacctcctcgtcagcacattccagttgaagatgttaactcagaaagtactccagcaagcatcttgccctcaaatattttccgcacaagtggcttgagggtttgtgctggatgcagaagtccaattggccgcggtcggtttctcagttgtatggactctgtttggcatcccgagtgcttcaggtgttatgcttgtgatagaccaatatcagagtatgagtttgctgttcatgaaaaccatgcctaccacaggccctgctacaaggagcgtttccatcctaaatgtgatgtttgcagtagctttattcccacagataaaaatggcctcattgaataccgggcccatcctttttggatgcagaagtattgtccttcccatgaaaatgatggtacacctaggtgctgcagttgtgaacgaatggagccaaaggacagtcaatacataacattagatgatggccggagactctgcttggagtgtctgcatactgctattatggagaccaatgaatgccagccactgtacattgatattcaagaattttatgagggtatgaacatgaaagtagagcaacaagttcccttgcttttggttgagcgacaagctttaaatgaagccatggaagcagagaaatctgtgcaccaccttcctgaaacaagaggcctctgcctatctgaggagcagattgtcagaactatattgaaaggaccaattggaccaggcaacagaatcatagatatggtcacaggaccatacaaactcattagacggtgtgaagtgactgcaattcttatactgtacgggctgccaaggctgctaactggctcgattctggctcatgagatgatgcatgcttacctccgacttaaaggataccgaaccctgagtccagaggttgaagaaggcatctgtcaggttctagctcatctttggcttgagtcagaaatcacatcaggttctggtagcatgtcaaccacctcagatgcgtcatcgtcatcttcaacatcttcatcatcgaaaaagggcgcaaagacggaatttgaaaaaagactcggggagttcttcaagtaccaaattgaaacagattcttctgtcgcttatggagatgggtttcgagcaggcatgcgagccattgagcggtacggcttgagaagcacccttgatcatatcaagatgacggggtcttttccatgctgaagctggtttttttttacctcggcttggatatgggtatacatattttttttggagaacttttggttcaggttatacatacgaaaagccgaacttctgtgtcgagaagaggcataaggatttagctatactgtccattgcaggaaaaaaaactgtttcccttttcaattataaaatttcacagtgcagacatgaaggtatgtggtctttagcttggccaaccttgtggaatgctgtcacttgatgcaaaagaaatttcgaatacatatgctttgctgtgcttgaaatgcaatggttggatgctatgct

SEQ ID NO: 42610 - DNA, 1179 bp, Zea Mays
gggatgagagctatgaggaacctttcatccaatgtctatctacccttgtcagcctcaaatccatggaaataaaaggtaccatggtgagcagcctatgttccgaatgtgacaaattgtaccctggtcctcaacatctttgctccattgatattgagtcgactgcagtgccaagatggatgtcatcgcttcgcttcttgtctagcataaacattgaactattagctctgggagcacaggattttcatgtccttgggagcataccatctctacgttgtctcagtatacatgtgaaggaaaccagagatgaaagattggtcattggcaagtgttatccattccggtgcctaactgagatgcaaatcgattatgaatccatggcggtggtgttcgcaccaggaagtatgcaaaacctcaaagaacttcatttagtgttcggggtgaaagagaggaagattaggtctcatgcacaagcaataagagcagcaattttgttcgctaatgcaggccgcatccctgctactgaaggattataaacattctctatcgccttgctaataaactgcatattcccttctctaattggcactgcattctcaaggtcgcatgggtactagtggcaaataagctctctgaagtcatgaattttctgcagataatgtaactgcagtaaatgtctacgcgcgtgtttgtaaaaaagagctcaatatctaccttgtaaattcgccatgttcatactcatacagtagtcttaagcttgtagccgacaaaatatttccctttcttgaccgagaaggcgtgattgaatacttttccgtgatgtttgtgatacactggtggcactggtggtctgggtttcaccaaaaatgcagattgcagaggccagaggagaggattcgaaagttcagtacctggcgtctagtgaagcacgctcccggcgccccgtggtgcgcagcgcaaagtcggcgggacactcgctcttcggcggcggcggcggcggcggcacaaaggaggtgcgaacgattttttttttttttttgataggaggtgcgaattgcgattgatatctgtaagactgaaacgaagcccgagcctgactgtccgacgaatcgagaaaaactaatacgtaagatttaatgaaccaaaactatgaagttaatggcccaacattagagtctcccg

SEQ ID NO: 42611 - DNA, 2037 bp, Zea Mays
agcaatgaacatacaacattttggtggataagttcttaggataacatggagaacttcaaccctttcggtgagaatggagagtagggtacagggtcaccatagaatgttctgggctcttcagtactcctgtactaacaacggtaatccaattgcatcggttattaaattagttggtacgcattggtgccagcttcactataccttggttttattacattgatcatttgggttgggcagggtacatacctaacagctgccctgcccttagtgacgcaagagaaaatgattgcttgagggtccaactttagggagcttcaatgtgagttttgtggaatgttcgctagcacacagggttctgagatagtatgttatttgcttcaaagttttgctgctgattagacatatggagcttcttctttggacgggatagagtgtattttgtagtcaccctatgcttacaattgtcttcggtccatcacattgaattgtcgttcaagattctgccaggataaacagtggccctgcattttttaactataataataatgttggtagggataccaatggtgctcctctgttaatggtgcttattgccatattgtcatattggaggaagggcttattgtcatattgaaggaagggcttgaagctcaatggaagtgataatagattctgcaaatgctcctcaataggttccagttagtcatctggtattcatagttcatggcattagacagaggctggagaaagctaatcttgttgatgttgtcaattttccatcgtgtaaccgtgttcaagggcatattatcaggcggggtcgagatcggcattgtctccactgtcatatcgtcgagcaaagactggtccaggagcgcagaaacatgcttcaagaaaaaggtttatggctagcaacatcttgttcgattacttcctgtgatgttttaatccataaaatacagataggggttacactgttcagtttggttacttcgattttgggactgcttgcgatcttctgtagtgtttattcttgttcgattacttcgattctaggactgtgattttagttcgattacttcgattctgggattaccaaaatacagataggggttacactgtttacttcgattctaggactgccaaatgtctctactgtttgaaggcggtgtttattcttgtttattatttactagatgtctctgtatgcttgattatgcaagtagattattcaggtagtacatacatttttagttgtatttattcttgtttctattcggtgcttcattcaagtctgcaactttccaatgtctctgtgtgcttgatagcatattatcctatattcttgcgcaagaatctttttggacgcacaagtagttctatagagtttactacatcctttgatgttttaatccatgaaatacaaacttgtatctatctgttttggactgcgttccagagaaagaaatgtagtttagttatgtggttttacagacctatatctatttgtgtaatgcatttgcctgtatatgtgcagcttatgtccataattcttcaagtctgcatatgactgcatcattcttcagccttctagactccttccacttctgccccctcggatacaaggacttcccagacttaggtaacacaacctcttctcttctttcaacatgttgtcatgtggtgctcgagttatggtacaactggagttgggtgaaagcgacatggagccttgaagtggagagttgagctcatgaagcaggacaagagagccaaggtgttgtgccttcatggcttctgcacgagtgagagttttttgaagagtagatcaacaactggcactcttccactcgttatggatatgggtatgagaatccaatcttatgatgaccagttacttcatttagctgctgacttagctcagaggttgttgcccacatttgacactcctacaggttcatcaccttttctattattataatcttcctggaatgacttggttatatcttgcatcagaaatttgattccattttttcattt

SEQ ID NO: 42612 - DNA, 1616 bp, Zea Mays
tccccacccctcgtcacctcgtcctcagcaccccaagtccccaagaccccaaccaacatttgccgaacggatcccgcccgagcccgagagctcgcgaagcccaggcccagccagacccacgaagcgatgcaacggagatagtgagatcgcgtgaagccgccgatgacctccgccgtcctcgccggccgggatgaggtccaccacggacacccgcaccaccgccactggggcggcgcccgcgcccccctcatgcccaagccatcctccaatcctaaccctaggcgctaccgcccgggaccaaaccctatcgtcagtggctcgccgccggcgccgcgggccggttcggctgtcgcggctgagcccttgccgtcgcccttaaggcacgtgaaattcaggccgtcggaactgacacccgccgaggcccgtcatctccgcgagcggctcaccggcgagcttggccgcgtccgcgctttcgtctcccgcatcgactcgtggcaggacgggcgtcgccggggcccggagcccgagccggagcctcccgcgcgccgctcttccccgccgccggcgctggtggaggcgatgcggaggcgatgtgcggatatcctgacgcggctgcggagatcgaagaaaagcgtgtggttcaattcccccgtcgacgtggagggcctcaagctgcacgactaccgcgccatcattcggagccccatggatctcggcaccgtcaagcaaaacctcaccgctggccggtacccctcgcacgaggcgttcgctggcgacgtccggctgaccttcaacaacgcgctgcggtacaaccctcccgaccaccacgtgcacagatgccatcgatgcgacaattgttccggatgatgatgacagggtcgaggttgctgtcaatccgtctgtggtggttgaaattggagagtcggagactgacgttccagagaagaatgaagtggaggctgagatgggtgacgagtatgtggatatcggtgatgagatgctgacgatgaattaccagtcggtggagatccagagggattccctggccgccagcagctcaagcggaccaggaagtggctcgtcttcatcaactggtacggtggagcaaataaagttgtcaccacaaatgctgggttatggatttagtagctcgttaattcattaaaactccttgcagattcggacttggaccctgaatctgatggggataatgcaagcgccccgcactaggtggttgctcttttatctgactgtagtaggattagggacgtgtaggtgacccatttggcgagtcattttgaaggattagggacgtgcaaattgggggtcatgtaagtctttgttgtcatgtgtgttcgtttgtgtatgtgggtgcagcttaggttgtcggtacttagtgaattggtagatgcttgtgtagattgggagactgctgtaaagaagggaatataatctggaacaaagtggaaaagtagcaatgccttggcatttcatgtctgttgctttcttttgtaggagtatatgtttattactgctgtagccgatctattgtgcacatatgctttatcaatgttcattggatattgcaaactacatcaaaaagagtttgctggagt

SEQ ID NO: 42613 - DNA, 353 bp, Zea Mays
aaaaattttgagcatttttgaacttaccatttgttttctaaaaatccataaccaacatttttaaccacttcaaattccctaaaatttcttactttccttaaaaatcacaaacttatttttcctaaattctagagaaaataacaaacctaggaaaattagtttcacaattttagcatttttctacatttttctacatatttctaaagctctgctggaaaaagaaaaggaaaaggttgaaacagtgatgggccggtttcagcccagcggcccagttccagggaggaaaagcgcccgcgcgtgcccacgccctgacggttttgcagaacgacccccgcgtttttgtcaaacagcaa

SEQ ID NO: 42614 - DNA, 2205 bp, Zea Mays
cttccatctcccactcatgaattgcttgatctggaaggggacggcttcgtctgtcaatttgagagcactgaccagagaggaaggggaagcagaggggcggagggaagagcagaccagcacatccggagagggaagcagagcagcgcacctggagaggagcggagggaagcagagcaggcacttgggtggaggcggaatagcagtggagaacgcgtgagagaagaagcggcgacactgaagggggtcgggatttggagtttaacaaagccacaccaggcagtccacgttgcatctcagtatggccaaacagcattcttgcatcacatcatctcaaagtacggtgcagattttgatgctttggacattgatgggaggagcgctttgcactgggctgcctacaaaggaaatgcagatacaatcagattactgctatttatggatgctaatcaagtaaggcaagacaaaaatggttgtacccctttacattgggctgccataagaggaaatttggaggtttgcacagttcttgtacatactggtactaaggaagagctcacactaaaggatagtggtgggttaactcctgtgcaactggcagcagaaaaaggtcatcgacatctttccaatgtcctttctaatgctacaaaagtaagctttgaagataagtttttccctggaaaatcaaggaaaattggatatgcccctttcttgtttgcttatcttgtcatctgcctcatcctgttcctaaactcaattgtatttgcacctaatttttctaggatcactgctactgctggtctttggtcttgggctgctgtatcacttttctttgcatcacaagtaatgttctacagagttagcagaaaaaatcctggctacatcaaggcaaattccaagcgaattgacccaaaggagccacttatggaaattgatcttaccaattcctctacttggacaggcaattggtctcagctatgccctacttgcaagataattcgacctatgcgctccaaacattgtccaacttgtaagcattgtgttgagcagttcgaccatcactgcccatggatatcaaactgtgttggaaagcgaaataagtgggacttttttgtgtttctttggatggggatagctacatcctttcttggtgctgctgttggattccacagacttcagacagagcctgttatactctcatcttcagaatcgtggatacattttatggtgacaaagcatcctggtgctgtactgttcatgtttcttgatgtctttttgttaactggagctcttattctgactggagcacaagcagtacagatagcacggaacatcacaactaatgaggcagcaaatcgatctcgttacacatatcttcgagggcctgatgggcgtttcagaaatccttacagtcgaggttgccagaggaactgcactgattttcttatcagtggatacagcaatgacgaggaggtcgcatggccaacacttcaacaaacagtacagtgaagatagatgcactggttcatgaaacaaaagtgttattgacagatttaatgcccaagatccctggaaagcttatgctttagcgctccgaatatttcagtttgttcagacactggattgacaatggtgtgaagagcgacctggggtcacattctgagtggcacccttttattataagggtctttagtaagtgctgtcggtcatggaattgtttgatactgtagattgttcgcatgcgtgggtgtgcagcagtatgttttcttttctccggctacatgttttgctaggacaagtcatctattcatgttatcgagatgagtgctgatagtgatagatggtgaatgctggttttctgatctccggtgtagtaagttgaattcacaatcttactccattcacgaaatatacacgggacaactgagcaagtataactgtagagcaaccccagcagaaacacttgaatcagggtccctgctactattagtttgagggtctgatacttttttttgctctcttccaacagtagctcttaaatcagagccctcaaattctagtttctgagaatgaagtcattctattctgcatctgctaaacagaacagagccactctatttgttgtttagtttgaatagtagaataaagtggagttgctctgttttttgtttggttaaagagccatataagtgcagagggaggagagtg

SEQ ID NO: 42615 - DNA, 4539 bp, Zea Mays
gtccgccgtagtgatgccgcgcgatgaaggccgcgcgggggagacgctgggaaagccgcacctccgcgcccccatcaatcccgcccaccaccaagcttgccgcctaccaaacccgccagctccgcgcgagatccgccacagttatgccgcgcgagggagatggcgggatagccgctaggcagatccgcttgctcgcgagggagaggaaggaaggccgctccgggctaagcagatgcaagtgcttgtcaagaacaaccggccatgcccggggttgccagggaagcccgtccacggtgtcgcaccattccccgcctcgaattcggggtctccaagcccggacgccatcagcacactccgtcagcgatttggaaaccgcgcagatccagaccatcaacgcctagggtggaggggattcttgcatgccgcgcagatccaggccattccccgcctagtacatggacaaacctccaatagtgtaccatcagagtttgtgaagtggagggatgtcgtcgttctctgcagcaagccagtgccatcatcgattaggagctttgaactcatgtacaattagtatagtgtctacggtgcaggtccatcgtttgaactccataagatttatcttcctggcaacccacgagtacatgggtgtatccttcttaatataatgagaatggagttttttgcgaatagctcaagcagaggaaatgctgaattttttcatgaccttcacgaagaggtaatggccactgcttctagaggacatggtttattgatccggttgcagcagttagaggcagaattttcaatggttgaaaaggctattgtatctcagacggggcactcaaattacccacatgatgatggattattcttcagatttgatgttgctgctggtgctggagcctcaaaaagaacctgtgaagctggttgctactgttcaacagttcagaattaaaatagttgttactgtacaactgcattattgcaccccttcttgtcgtagcctctacatgaggtgagcccttcttgtcgtagcctctacatgagatcgaagctaactgcctggggagcacaaaagcgaatgaatcatgctaataacaggttgtattttggcagttctcatctggacttccacctagaccaactgcatgacatgtagaataccaaaattataaccaggttgatagatttcagaagtatgctaataacagggaagttattcaaaatataagtaaaaacaagaagcaagactgcttgagcattactgtccataaatggattacattttggatacacaatgaaagcactgctaaccatttaagtattttttgtgcattgatagtattacctttataccagcatatatgagagataatttgggcagtgtaacaccaccgaatgttttttgtattaagattaacacctcaggcatgccatactttgacttcataccaaacacatccataatcttttagtattgacaacataataagaccacatgactgagaaagattgaagttaagctctgcaaccattatttatccatttactgcatcaaaataatggagaaaattcggttcaatgtaccactaggggaactcaaatgtgataaatggtctatgagaaatattttggctcaaatcatatctattatacacctatacaaattttgaatatgcgactgttgtactaatgtgatgttttacgtgcattgtccaaaactgctgtaatgtgatgatttactatgaagcctagctgctattattcccttgttagtagtaatgcatacctcatcatactaattttcattccagacttccagttagacatgtatcatatgcatgcttgtatgagggacacatttcttggtcagttttttcagaaacatgagaggattagtttcttctttaattgtgtacacttggattgcatcttagcaattttatgtctcagtgatagttttcctaataataaaatcaatacaattcatagacaatgctacttgctttgtctgttagaggtgacattcaaattatttcatgttcactggtccaacagatttgggaagcttcagggtattggttatgtaatgtgatgttttactatgaagcctagatgttgttttcagaaacatgatagtttttttttcagaaatacttgttttttagtttgtccaaaactgctgtaatgtgatgttttactatgaaatgtaatgtgatgcatcaaaagaaaattagtatgatgaggtatgcaatactgttgtgatttctgctccattttctccaatttcttcttgttcattgtccaaaactgctggatactggtttaagcatgtgttatcttgatgttctggtgctagggacatgttaaatcattgaatattaagaccgacccgccatatttgctttcggtgagcgacgcgtgcctgtccacggccacgatccgggtctccccgcccaagtagcagagcgacttatcggtcgggcgcgggacgatccggcccccgaagctgcacatcaggcggagctggccccttcgcctcgcccccatccacctccccaattggtatgaacacgatctcagccgcaaacctcgtcgattataatatttgtatcggggcctaatgtagtcgagtcgcatatcctttcaaacaactgatgacaatcgtaaaggattttgctatgttgaatttgtttcagctgaagctgctgcaaaggtaattttgtgtttttgtttattcttttgtattttatcattttgagattcccgtccccgcaggagtgtgattttttttctccgttcttgccaattcctgtactaattactacatagcttctggtcctcgacgttttttgtcttctgcacttcactgtcgcaggaactactaatttctgttatgtttgagagcaagcaagtccatttcatttcgctcaattggttccaattttctttgatgcttggttccctgctaatctaatctaatccatccatctatccttggttcgattaggttctcgttcttcagtgcacgatatcaatccactaaggtgctgggtgcagttaatttcccaaactatatttgggggtgttcagcaaaaactgcgtcaactgcgcccgtgcgggtgagggatcactagaggctggactcgcgctagagatggtcaaggcaaaagcaagggtctgatatgatattgacattcccttagttcctttgcgttactgcgatggtgtgaatggggacgcttcgagtgctcagtattctgaataatttgcaacagtttgataaactgctcagtactctgaattggaattcattgttttcattgcattttcctacattttgctgcccatttaattcaatgtgagtaggagtatcacatttgcatatcttcttcctaccataaagcttaacaagttcggcttgccttcttgcctaaaattgagttacagtatactttcgacagcgcaccttgaatacttgtatgctgtgttctttgtcatctgaactttgtgtgaactgttgtagctatgagcctggaccggcttttgaggaggtcaaagaataagccatgcttgatatatcaccaacagactcgacagaattttggttaattcagtggcctaaagaccaggtaccatttgattctttttgcataaaattcagatgacaaagaacatataaagagaaaaacgatgacaaaattgaggtagggaatggactatctctcaaaactgaggtagggaatggcctatctctcaaaattgagggactaaagaagtaaagagtaaagaaatacttgtgccctttattttatttttttgttataataggttttattgtactgctactttttccgtgtaaaagaacttttgttttggatacttctcttttcatgtaggcatatatcagtatatcaatctatgtttcatttactcttagttctttcttccttttgaccagcagctcttgtctttgtagtctgagctagaatatctatccttcatgtacgttaaccccactggttttgctggagtaagaaaaagagttgaagacttgtacaaggcccatgaacaagaattgcaagattacgatactataacaccacatctgcttgatgtagtgttgtgctagcatgctctggatccgagataggcagcttggacttcatggaggcgtcgtgggacgagcccgtcgccttgcactttgggattgagtttcacggagggagacaacccctttgccgcatggagaagcttacgaaggcaaggcaacaactcagcggatgtcgttgcacagcaggcagacacccgtggtgcagatatcgcccttcatcttctctgccttgggcatcgccgtctccatcggcgtcttcgtcctcggcatggcatggtgagtcacagtgtgcctccacaccctgtgtcgccaaatctgcacggcgttggaggctccagtggtgtcctccatggaagagacataggtcaaagggccatacttcatagctatttccccctcgatgtttcaagtgaaaggtgagagca

SEQ ID NO: 42616 - DNA, 292 bp, Zea Mays
agtggaaccatacaaaaatatgcccccaccaactattgcttttcagacacgaaccatacgtttcagttttcacacaatcgaaggaaatagtaccccgaacaaaaaataagctatccaaaagcttccccttttccacagattaataattagatagcataacataaatgtccccaccaactattgctttctggctctaccgctttagcagtgcagcctcctataggtcagttccatctccatcaataataaattaactaaacaactctaagtatatagtatagaagaactgaaa

SEQ ID NO: 42617 - DNA, 3825 bp, Zea Mays
tccacactttgcgttctgccatcgcgcgctccgcctccctccccgcgcccgcagtccccgccgccgcccccgcaggcagccgccccgtagtccccaccgccgagcacagccgccgcgcccgtagttcccgcgccagcaagcccacagtccccgccgcacacgccgcgatgatcctggaaagcggcatgtacgagcaggccggggagctccagatcctgttggagtacatggaccaggggtcgctcgagagccaccgcatcgcgtggcgcgccaggtgctgtcgggcatcgcctacctccaccgccgccgcatcgtctacctccaccgcgacatcaagccctccaacctgctcatcgactccgggcgtcgcgtcaagatcgccgacttcagcgtcagccacatcctgaactagaccatggacccctgcaactcctccgtgggcaccatcgcgtacatgagccccgagcgcatcaacaccgacctcaacgacgggtacgccggcgacatctggagcttcggcctcagcatcctcgagttctacctgggccgcttcctgctgtgcgagaacctggggaagcagggcgactggccgcgctcatgttcgccatctgctactccgactcgtcgcaggcgccgtgcaacgcctcggtgggcttcaagaacttcatcagcctctgcctacagaagaacccagtgaaccgttcgtccgcgatgcggctgctgcagcacccgttcatggcccagccgcagccgcaacccctggccgccccgccgtcatgatggctcgccgtaccctacaaatctacaattcatgcccgatttgattgattgattgcttcccgtcatgatacagctgaagacggcggacagattgatctttggggtggatggatggttggttgcatgattgattagctctgcacttgcgcttttcaatataatgtgggaagtactgaattgcatagaacaattgctccaaaaaactatatttttatggtttataataaagtatcaggacttacctttctttgccattgggaaccttgtgcttccctgggcaagtgctcgcattggtacttaagattctatctatgcatcactttcagcttgaataccttaacaatggtacttctctgagatcattaaatcagtttatgtacttttacatagtaataagccatctgctcaagtgagaatagatgttgtggttggaaaggatcgtctattagacgtttccatgcataagataagtgttgcagctatacaaactggttttggttttgaggtcaagctggacaagggaaacgaagctcaaaatgaatcaatttattagtcaaaacaacatctctattcattgaagattggttctttttaaaattttagatgtcattggttggattgcgatctcctttgcaaaagtatggttcttttttaaatttcagcatactgcttcaatcttgaactacaatttttcatggtctgaaattgcatatggagacttggattttaatgcttaagctgaaattgcatatggggaactttggttttaatgcatttcttgcttcaaccttgagatagcagctgttgtttcccccacttattgttcattctagaattagtagatgactgccttgcaaggatttgaacatatgatagggtgctaaaatgtttgaatgatgctttatggtatgcttgcatttagagaatatagtagaagacctgaagtgggtttacaggactaagaatgttcattgtatctcaatcatgaaatagtaaatatttttcttgtttgcagagatttcaggctatgtcttattcagcagttatgaaaggtagcgactacaatgtgctctttacttaactttctcattaatatctctgccctttggattttttatgcaacattttgattttttatttgaccagctaacaagcaattcactattatgttattattggtacttatctttctcattaatatctcttccctttggattttttatgcatcattctgattttttatttgaccagctaacaagcaattcactattatgttattattggttaaactggacccttcaggtgatttctgtgtagccctaacattaaagctcccagtttatgcaggctgcagctttgaatttgtaatacctttgcagttactattaagttagcatggacaatagaaggtggaaatcatttccttagctcctgttagtgtccatgaacataagttacccatggtctgagatgttacatcctcctgagctattttctcttgttgtgtacttctgttagtgtccctggcactatatcattcatttggagattttcaatcagctgtatagctatgtaaaattggttgcattttaggtgatttgtgggaattaaattgcaatgtaccagaaatcgatcttaatttatgcaatagattatatgggaaaaatcataccatggattggatgtaggctgaaaccagttacttcatctaggctaaaattgttggttctgtacaaaaggtagtctaattaggctttgatatccgaattaaatgtttatcacctacttttagaaaaaagttagtcatcttcacgatccagttgatacatattcacaaatttgtacatgagtaacaggcaacaacttttctcaatttatccagaaaatgacttatttttaggggcctggtgtatatctctatcctattattttattctcagcacattcacattcacaactagctcaacacattcacattctcagataccgatctactggacatcatcaactcagagatcaagtacgcccgaggactcaggactgcgatgaccacgacacgaatttgtgatgtcacagagtagggatgatgatgatctatatcaaaaaagactaggttcctcatgttcctcatagtcctctccataaagcactagaaagtatactaccattctggcggacttcggctgaacccgaacctgtacgagagcgggaaagtgtgcctgagccttctgaacacctggtggggcaaggggtgcgagaagtggggcaagtcgagctccaccatgctgcaggttctggtctccatccagggcctcgtgctgaatgacaggccatacttcaatgagccaggatacaagaactcggctgaaacgacaggtggtgagaggtgttccttggcttacaatcagacgaccttcgtcagatcatgcaagacgacgctgtattcactccggaagcctccaatgcattttgagacccttgtgttgtggcacttccacgagcatgagcgtgccatcctcgacgcttgcagggcttacatgtctgggacagtcgttgggtcgtctgctgggactgggagcaaccgcagatacgtccatgacaagtgctttgcagaattccacaagtcgctgacgctctacactgaacatctcagggctgagtttgctacaaacagaagacgagtgatggagctagaaacagaagacgagatcgtgcctagcatagcagctagcatgaaatcgtgttgaaggcaaatgccccacagtgttgctctcatcatcagatatttgctgccttagctatttctagcttcattcatgtcaagtgaataatctaattcatgacaattgtacctgtctctatatctaatgaatctgtcctctcttttgaaagtactaagtgtatgcccgtgcgttgctacagaataaacatgttatgatgagatgcagaaacattagttatcgttctatgcttttgttagcatcttctaaaggttaagaatatttacataccttaaaaaatgtatactccgccataaaagcaaac

SEQ ID NO: 42618 - DNA, 2435 bp, Zea Mays
cctccctcccgtctcccgaaacctcgtccgccggttcccgtcgccatggtggtggtagtgtccacctccctatgctccttcctgcccgcgcacccgttcagcctcgcgcgccctcgccgtccccacccaacgaacccgaccgccaaacccctctcccgtaccctctccatccgctgcatcgccacaaccgcggcgggacccccgccgctcccaccgccgaagctggtccgctgcccagctctcgaccgccaggcggcgcgcgcaagccgactccgctttgcgcgcaagctcctcaccctcctcctctccaagccgcgccatttcctcccgctccgcgtgctcaaccgctgccgccgcttcctcggcctcccgcgccgcggccgcccgctcatccccatggtcctccgctacccgaccctcttccgcctcttccaggcccacacctccctcccgctctccccgtccctctccaccctcgcggtcgcgctcactcccgccgccgaggcgctcgccgccgatcttgcggcgctccgcgccaccggcacaggcgcaggcgcgctcgccgccaagatccaccgccttctcctcatgaccccgcgccgaaacattccggtgtccccgttcgagccactggatgagggcgctagtctggagatgttggagcggcgggcgtgtgctgtggtgcgggaggtgctggccatgacggtggagaagcggacgctggtggatcacctcacgcacttcaggaaagaccttggcttgccaaaccggctgcgcgccatgctggtgcgacatccagagctgttttatgtcagtgtgaagggggtgcgtcactcagtgttccttgtggaggcgtttgatgatgatgggaggctcctagtggaggatgagatgctggttgggagggataggctggaggagcttgttcgggagggaaagcggatgaggcgtgctcggaagaaaggtgttctcacgttcgatggtgacagtgatgaggatgaagatgatgatgcagcagaagaggaaggttcattaaaggtggatgatgaatttggggacttgtttgaggatggtgtcattggggaggactgggaggaggtaggcgatggaggtggaagtgatgcatatgaagagtacgatgctgaatcaggtgacatggaggagttttgggtcaagaaggctgtggctcaaggactggttggcaatggtaatgagcaggatgtttggtgagtgcatcagcttgtgggactgctcaggaagttaacgaagattgagaattcctcaagtgtgcttttctcagcaatgcacataaaccagtaagcatcagtacatatccgggtatcttggacctcttggtcccatttgccgcctgtctgttggtacttgcaagcagcttgcgtgcaggcattcacacggttttgcagggcaatcaccatcgtcatgcattgcaagcacacaaaacaaattctacttacaagttacaagcaaagcaagactactcgtgtcttgtgctactccagcattctttgtcagcacacgctgctgcacccatctacaatacgtacgttgtacgtgcatctttcttctacaatcacaagcccaagaatcacagctccagctgagggttcaccgtgtaatggaaacagaacgtggaggtggaatctaatgacctgactgactgtctgaccaaccaacaaaaaccccgcacagcaaaacaagcaagcaagcaaagagacggacgaacaccagcaccaccactacactcggcggcctaccgtgtgtcggcgccgagggacccgtccttctggagcttcaggctcaggttgctgaaccgctgccgcgagtactgccgggaggccttcctccagtcagtgccggccttcatcatcgccgcgaactcgtcgtagcctatcttcccgtcctgacagaagaaaaaaaaaatgacaccttgttgttaggtcggctacttttaattactcgaaaatcacaatcacatcgcgtgacacgcccctcacgcccgccttatcctatccttccaacactgttctcagtcccagacgctggctattctataacaatgcaggtttattgcagtcaactactatgcattagtcaaataaattaagtccctgcctggcaactagcagcatctggaccttgaccgggtcatgcgaccatggactaaggcatacggagtacttcaaaaaaaaaccccagaaactaccgttcaagtgtataagtggattgtctaccttcccccaacagattaaacttttatgttaaactggttggttatcagtgcgtccactctaacgtgatatcaaagcaaagctagagatccgcaatcgataatacgagtttgttgcttagcatttctaagaacaaagtacactagcgttttaccaacacaagtgttgtacaggctaaaccttttt

SEQ ID NO: 42619 - DNA, 451 bp, Zea Mays
gccgcaaatcggagcttcgcgcgcatcttgctcgctactcgcccagctctctattcgccgtcgaatcacctactcgctgtccgcgccgtcgaaattccctcgccgtgcgctcttgcgtcggctgccgctgattctgccattgaactttcgtgctctccaacgctccagctcgttgttgttgccaagtccgaatatcatagctcattctcgtagccgtgagttcttccctgtgcacgcgcgagctcctctgcttggtccgtcgtcattctccagctccttaccgcactcggctgttcgtcgtcatcgctcggtcgcgcgacaggctgactgcgtgtcatgtgtcacacatcctaggccctcgtccacgcgtcgttcgtcttcgcactgtgtgcgacagtatcgtctttttccctgtcctgtgctcgcgcggtttcctgctcgccagcgtgcc

SEQ ID NO: 42620 - DNA, 428 bp, Zea Mays
tcgattggatctactgttctcgaagaacaggcggcgcgacggccttcacagtggcctccgctgcttattgtgtggaacaccagagccgaccacgcatgtgagtcgtcgatgtctcgtcgtgctcacaccggcctccagcctgcagctgcagcagggctagatcagagtctacgtcggagaaatcaaagggttctggtagctgctaaagtggaaccgcgtgatatactggatggcagctatgggctgtgaaccagtcatgaagataaggacgtgcgcgaaagagagtgaaaactggatctctctctcccctcgctccccgtgcggcactgcatgccacggataagcagctacttcatccaaccgacgtaagaaaagatccggtcaaagtgcatgaggtgcatacatgcaatggccattttgcatgtgcg

SEQ ID NO: 42621 - DNA, 2539 bp, Zea Mays
aaccctaccctgccttttgttcttccgttccatcgccaccagcctgcgcggaaccccccaccctcacgactgggccggccgtcgctaacgccttcggtgccccttcgccggcgacgagcaccaccagtcatcatgtcatcatatcctgttctaaacaaccgaccaatcgatcagtggagagttactgatctgaaggatgagctccgtaaaaggaagcttcctgttaaaggtttgaaagaggaactcgtcaagagactctctgactccattcagagtgaaagagaagctgacgaagctgatgaggatgtgggagtgaatgtggatgatcagttgcctgatgccaatgctattgaggaaaatacagttactgttacagaagttcatcaggaaactgtggttgatgtcactcatcaagttgaagttcctacaaccgaagttggtcaagaatccataatttctcccactagaggcccccccagtgttgatgttgaagaggcctcaacaaccaaaggaaaagtacctgaatcagttgctcgaggaaatttgacatttgaagaagtgcaagtgcatactaaaagtactaatgagcctcttcatgagaagaccacagatgttgacaccaatgatgcagtcgatgtgaattcagacttgatccctgctgaagtcaagtttggtgctacagaagcaagcaaaattgaagaacaggattttcccccagcgcctgtagatgacttaacttcagattctactggtcctttgggtactgatgttgtcacagctgcaacttcaggtgctggccctatggatactgatgttttcatagctacaacatcagatgctggtcctatggatactgatgttgtcacagctgcaccagttagcgacgaaggggagaaactggcacccaaggatgcttcgggtaacaaggtgtcaatgcatgatgaagagcagaataattctgataccatgaacgaggactgcaagcccatcatatcacaatcaaataatcaggtacccgagaactagagattcagccgaagatggtcgaaccatcatccggcattactccattaggtggagatttgcagccattggatgatgacaaagagctggttaagaaccagacatctttggaagacatagattccacagataatgtggactcatacaagaaagatagtcctgaaggtggatctccagagaaattaaatctagacaggagttcaggtgatgaatcaatggaggaggatactgtggaaattaaacaagatgagtccaatatgaaatctgatgatctcggaggaaagaatgagtttaactcagaagatgtgaaagaggtgatcctccctgattctgttgttgaggcttccaaggaggctatggctgaagaaaagtcagcagcttcaacagaaaagaggaaacttgaagctgaagaaggtgttgcaagcactgaaccaatcaagcgacaacgtcggtggactgcagatattgccaaagtttcagggagacaagcattgagtcaaactggtcctgaaactcctaaggaaagttttcagcctgctttcaaacgatcttttgggaggtctgattcaacagccagtgtagattctcctaaggagcggattggagtttcttggtaaaactggatctgtacaagacttctggatggaccatatcaagactcattgctatgttacattttcttcggtggatgaagctgtggctactagggatgctgtttacaacctacagtggcccccaaacaatggcaataagttggttgccgagtttgttgatcctcaggaagtgaagctcaaggtcgaccctcctcccccgccagctgctcctgttagcccagctgctgccacaagggcacctcctgttcaacatactcagacaaatcaaagtgtgccacgccaggctgctgcaccaaaggaggaactgccacctccacctccccctccccttgctaagccccctatggctgacctgacgcctttaggaagagagaggcttccacccactccaaaaaagccggagcctcctgtcgtgacacttgacgatctctttaagaagacacagtcctctccgaggatctattatcttcctttatcagaagaggaggtggcagccaagctcgccgcacagggcaaaggaaaaaagggataggaggtgttagcttccattttcggctagcttggagtttgttgcggaacatggcgtgcggtggtcacagcagctgacacgtgctactgctgtggcgaaagagttgtagccttgtagggctgttctgtggaaaaaggacactagtgtaggagcagcagcttgtatttcctaatgagattgttagttttgattgggtctccgagtagagtgtgtgctgaagttatttgatctacatgaagtgttgaggtacttagtttaatttatgctgccaggtactgtaaaactgaaagatactggttctagttttgagtctatggagaatactgttacaccgtctcttattttagtcttcgccttggttgctgaccgtgaa

SEQ ID NO: 42622 - DNA, 2388 bp, Zea Mays
ccggttactgcccgcgccgccctggctagaatcttccgtctctttcgctaactgtttggatcattttacgtggagattgcatgccatcaccttccttgaagtgaaaaatatatgggctgatcttggcatttcatgggaggttttgaagatgatgaaccaccctcaaaacgcgcaagagcatcctcagtagaatctgcaagtttaccagactgtttcttgttttcaaaatctgccaatcctttgggaagtacaatggctagacctttgccttcccaagggaaagaagctatggttggttccaagggtgttattaagaaggaggaatttgttaggataatcagcaaaactctgtatagtcttggatatgagaaaagtggagcagttctggaagaggaatcagggattactttacataaccctatggtgaatcttttcagagagcaggtgattgatgggaattgggataatgcggttgttaccttgaataagattggccttcaagatgtaaacatcatgaaatctgcggcatttttgatattggagcagaaattctttgaacttctaagaaatgacaatgtcatgggcgctatgaagactttacgacgtgagatcacaccccttggtgtgaatagaaaaagagtgcatgaactgtcgacttgtatgatttcttgttctccacagcagttgttccttgggttttcaaaacttggcattgattcttctagttcaaggtttaagcttctagaggaattgcaaaaggtgctccctccaactgttatggtgccagagaggaggttagaaaatttagttgagcaagcacttactgtacaaagagatgcttgctacttccataattctgttgatgggttgtcactttacattgatcatcattgcgggaaagatcagctaccatctcgcacgttacaggttttgcatgcacatcatgatgaagtgtggtttgtccaattttcaaacaatgggaagtatttagcctcagcgtcaaatgataaatctgcaattatatgggaggttaatgaagatggagagctattactgaggcatacattgagtggtcatcaaaagtcagtgatgatggttgcatggagttcagatgattgccagctcctcacatgtgggcaggaggaagccatcagacgctgggatgttaaatctggcaaatgtcttcatgtttatgaacatcctggcattggtttgagatcatgtgcttggtttcgagatggaaagcaaatattgtctggtctagctgatcaaaccttttgcatttgggatttagatggtaaggaagtagattgctggaaagggcagagatcggcaacaacatctgattttgctgtagcaaaagatggaaatcttataataagcttgagtagggacaatgcaattcttctatttgatagggagacaaaacatgagagaataattgaagagggtagtacaattacttcattttctctatcagaagatggtgatttcctgcttgtaaatcttgtaagtgaagagattcatttgtggaacataagaaatgatcctgttcgagtcaaccgatacaatggccataagcacagccggtttgtgataaggtcttgttttggcggatctgagcaggcgttcattgctagtgggagtgaagattcacaggtatgatggttgccttgtgatccacctaggtctacatatggcatagagccactggtgatctcattgagactctcgctggtcactcgggcacagtcaactgcgtaagttggaatcctgtgaatccccacatgctcgcatcagcgagcgacgatcacacagttcgtatatggggggcaaaggtcagtcttaagcgcaaggatgttgggagcagcaattgcaacagtaacgggttccaccactcgaatggaaatgcacatggcaatggtttcgctcaccagtgcaacgggaacagcaccaaatgatttgccaaggcaatgtacccccatggatggttgactggcatctgtaaatccccctttacttccctcctagaacaagagtcgccgccgaaatagtaaaagaaaagaaaagcaaaaaagaaagctgcagcacaaagtgtgggcaacctgctgggtttcgtgcgccatctttcccttgttctatcatgacagccatcacatttatttcttaattcaagatgggatggaattatgatattactttgcgtctttgatatcttgatttatcctccctgattgattgtaacttcattttgatggtggtgatggttaactctgattgctgtctaaacaaccggacggaacttatcataaatttaagtaaaatcagtcatctagttcaagggatcaagtggtttgtttgattgccatattattccctataagaaaa

SEQ ID NO: 42623 - DNA, 2483 bp, Zea Mays
atagtagggtttggactatacaattctcgtgtctcgccctcccccgacgcgccgtctagggtttcacagccgcaccccgatccactagagctatggagttcgacgaatacgagtacctggagaaggcggtggagccggctcccccgccggccaatggttccggctccggcgagaaggaccgcggctcgcgtcgccgcgagggcgacgagggccgcatatcgaagcgctcccgctcgggggaggaccgcgagcggggccggcaccgcagcgttcgggaacaccgggatcgggataaggatgacgggaaggagaaggagaggagccgcgatagccgcgggaaggacagagacagggaagggagagaacgggagaaggagaggggggacaggcaccggcccagagagagggaggtggaacgggagcggaggagcctgagccgttcggagcggcgccgtatcgaggaagaggagatggtgagggagctggagatggagcgcgagcgcagcgagcgacaccactatcgcgaccgtgacgtcaggcgtaggaaagatgacggggcagagccagaagttgatccagaaagggaccagaggactgtatttgctttccagctatctctgaaggcagacgaaagagatgtttatgagttcttctcaagggctgggaaggttcgtgatgttcgtcttatcatggaccgaaactcaagacgttctaaaggagttgggattacacactgaaattttatagtttgctctacatgctgggattatcggcaatttacaagcaataaagggggcacccaagaaccaagttcgaaacctctacaatttttgatcaaaatgcctgaagttttctgtgaaaaattgaaatgtcttaacatatgatgccccacttattgttcttcttttcttttttacaggaagacatcttttcttggacgcttcgatgtttgtactaaacatatatctaaatttgcaggtacattgagttttacgatgttatgtctgttccaatggcaattgctttgtctggtcaaccgctgcttggacaagcagtgatggttaagccatctgaggctgaaaagaacttagttcagtcaaatgcgacatcaggtggtgcggcttcaggtggagcaagaaagttgtatgttggcaatcttcactcaaatattactgaagaccaattaagacaggtatttgaaccatttgggcaagtggagcttgtacagcttcctctagatgcaatgactggactgtgcaaaggttatggctttattcagtttgcccggcttgaagatgcaaaagctgcacagagtttgaatgggcagcttgatattgccggcagagttattaaggtttcagctgttactgatcatgtgggagtgcaagctagtggagctactactggagatctagatgatgatgaaggtggaggcttggcgctaaatgcaagctccagagctgctctaatgctcaaattggacaggagtggtacagcaaccagcttaactggtggtattggtgctgctggagtggctgtaccagctacttcagttattggggcagcaggagctgcttctcttctgtcaccaacagtttctgctgttggatcagttcctggggcacctgtgcttcctattaccgctcagaatgtgatcatgtccacacctacagaattcttgttgcttaaaaacatgtttgacccatcattggagacggatcctgattttgacttggatattagagatgatgtccaagatgaatgttccaagtttggtgcagtgaagcatatttttgttgacaaaaatactgcaggcttcgtgtatctgcagttcgatagtgtaactgcagcagggaaggcccaacaagcacttcatggaagatggttcgccggaaagatgattacagcgacatttatgtccgatcaggaatacagtactaagttcccaaacttgtgagcatatgcggggaagagttggtcagacccgcatagttcgttcggagagtttgctagtgctgtatcgttggatggtagactagacgaacaccttattgattgtatgacaggatagtttcagttgcagcgctggtcgtgcgtacaatgtttgatgtactttatttacggcatcacacacagtgaccatcccttattttgtccaccgaatgaaatgccctatgatctccaggcacgttggcatatggtttatttatgtacgatctgttggcactggtacgtatttgtatactaagcaaaagcgttacataatcacaatggtacctttattagtcccctgtcgtgggatatgcggccgcattttggccagctttccaatgtgttccattttatttttgttctcatgatgtttcgacatgttttcatcagtttttcctttcaccaaggtcactatttcattccgtttcattttcatttactccactgatactgtatctagttattttatttggtttatcaagaaattataa

SEQ ID NO: 42624 - DNA, 500 bp, Zea Mays
tctgcattatctactgcaagagaaccatgagggctaccaatacaggtccagcttccaccatattcgaacccacacactagggaataaactaatagacaatatggtctccaagaatacttacctgaagaaacaattagatatcctgactcctgagcacattcaactttcataatcctttcgaccaaccagactcaacaaagaggcgatgcagagggatggtagctcttcatgaaggggaatgagaaagggacgtgagagctaacagggagaagaccgtggaagtggaacattgcaacagatgagatgttcttcatcatatagcgacatatccaatcaaggattccaaaacactctgaggaaacactcgaagcttttctctagtaagcaagtaggtaccattattactttgatgatcggagtaacttccatttagtcgacttcttgaatcaccccattttccatcagatctcctattttcgttgtactcatccttgtcatcc

SEQ ID NO: 42625 - DNA, 372 bp, Zea Mays
cctcgcccaggcacaacgcagccgcacaggcacaccgcacacagccgccaccgcaagtcgccattgctcactgctctgctcagcgctccatgtcgtgcccccaaattccgtgactcatcttccttctctctatcgggctgcgtgtgcagaccacggacggacgcactgcccccaatccactggtttttgctgttcggagtgggcgctcgttttttcatttttcaatattcgcttgttatattgtaaacttgtgatcaacttgttatattgtgaacttgtgatctgtgggattaatttgttatattgtgaacttgtgatctgtgtgatccattattatattgtgaacttgtgatgttgtgaattgtgaacatg

SEQ ID NO: 42626 - DNA, 523 bp, Zea Mays
gcaaccctttaagtctgacaaggcatattagagagcattttactcacaattccatatgacaacagacccatctcccttaacaagccttattctccaaccataggtattccactttggtacaacactccaaagctgaaactactcagaattgaagttgtggtgttccaaattatagcagaaacagccaaacacttggtctcagcttaactgaacagccctcactatttctgacagaggactttgcagctccattctctctccatctttacataacaacaggaccatctccttgcatgaaacttgtccatctatatctgttctccaactttgctatagaaactatagtctaaaaccactcatatttatcacaaaacagctccaaattaagcatcatatactgaaattcaggtttcagagactgaacccaaagcagttggaaccagcctgacagtccaattttgagccacttttactcctttttctgtgtagcaccaaaccaaactcacttaaagaaatttgttct

SEQ ID NO: 42627 - DNA, 7358 bp, Zea Mays
gatgcctatggtatagaaggcttgcacatgttggaatgagcacactcaagaaagttttaaaagaaagacatggttagagggactaaaggatgttgcatttgaaaaggacaagccttgtagtgcatgttaagctggaaagcaagttgctaacacacatcctacaaaagcttttatgtcaacatcaaggccactagagttgcttcatatgtatctatttggaccaacaacttatgctagtgctggtggcaacctctattgtctggttattgttgatgacttttcaagatacacttgggtgttctttcttcatgataagtctgagattgcatcaatattcaagaagtttgccaagaaggcacaaaatgaatttgactgcaagatcaagaagataagaagtgacaatggtaagaaatttgataacaccaacattcatgagtactgtgatgaaattgggatcaagcatgaagtttctgcaacataccaacctcaacagaatggagttgttgaaagaaagaacatgaccttgatcactcttgcaagaacaatgattgatgagtataacacaccatagaggttttgggatgaagctgtcaacactgcatgctacacataaaacaggttatttcctcaccggctacttgagaggactccctatgaactgctaaatgggaaaaagccagacgtctccttctttcgggtgtttggatgcaaatgttacatctacaagaaacgccatcacctagggaagttccaaagacgttgtgatattggtttcttacttggttattcatcaaaatccaaagcatatcgagtattcaatcatgccactggcgtggtagaagaaacatatgatgtggagtttgatgagactaatggctcctaaggagcacctgaaaatcttgatgatgtaggtgatgagccacttagggaagctatgaagaacatgccaattggagccatcaaaccaaaagaagatgaagaagaggtgcaaaatatcgacatgccttattcatcaaatgtaccgcatgatgatgaaaaagatgagaggcatgcaaatgaagatacatttgtctcatgaacaagcaagggtacaagttgaagatgttgatgctccaagatcttcttcccaagtggttgacaagaggaactcatcgctactccaagcacatccataagatctaatcattgggagtccatcacaaggggttatcactcgttctcaaagacatgcttcatttattgaacatcactcttttgtttcttgtgttgagcctgcatgtatagatgaggcgctacaggatccggactgggtgaatgtcatgcatgaagaattaaacaacttcactcgaaattaagtttggaccctagagaagcctccacaagatgcaagggtcattggaataaaatgtgtgttctgaaacaaacaagatgatcaaggtgtgattgtgcggaacaaggtaagacttgttgaaaagggattctctcaagttgaaggcttagattttggagagacctttgcaccagttgctcgactttaagccattcgtatcctacttgcatatgcatcttgctatgacataaagctttatcaaatgtatgtaaaaagtgcatttttaaatggcttcataaatgaacttgtatatgttgagcaaccactcgggtttgaagaccctagatatcctaatcatgcttacaggttgtccaaggcgctatatgggctaaagcaatctccaagggcttggtatgagcgtcttcgcgacttcctcatcaagaagggcttcaagatcgggaccgtcgacacaactctattcacaaagaaacataacagtgatattttcatttgtcaagtttatgttgatgatataatctttggctcgacaaatgattatcattgtaaggaatttggtgagttgatgtcgaagaagttcgagatgtcaatgattggtgagctaacatacttcctcgactttcaagtcaagcaaatgaaagatgggaacttcctctcacaagagaagtacaccaaagacttgctgaaaagattcaatatggagaagtgcaaaccaatcaagacgcccatgcctactaatggacatatcgacctagatgaggaaggtaacccgtttgatcaaactatctaccgttccatgattggtagtttattgtatcttaccgcatctaggcccgatatcatgtttagtgtttgtatgtgtgctcgatttcaagtaaatcataagaaagctcatcttcgtgttgttaaaagaattcttatgtatcttaagcacaccccaagcgttggcctttggtatcccaaaggagctacttttgatttaattggctattccgattctgattatgccggttgcaaaattgatagaaaaaatacatccagaggatgccacttgcttaggagatcactagtttcatggacctctaaaaagcaaaatagtgttgccttgtcaaccaccgaagcggaatacattgccgcgggtgcttgttgcacacaaattctttatatgaaacaaactcttctagactatggtgtagtcctagaaaaggtacctttgttgtgtgatgatgagagtgctgttaaaattgctaataatcaagtacaacactctcgcaccaagcacattgatatccgtcatcacttccttagagaacatgttgctaaaggagatattattttagaaggagtaagatcggaagatcaattagcggatattttcacaaagcctttagacaaaacccgcttttgtatgttgaggaatgagctaaatattcttgatctcataaattttacttaatctcaaaatggtgatgtcaagcttgcattgcatatttaaatttcttgtattgcatctagggcttgtctaacctagttaagataacagccaacaaagcgagtgaaaaagcttaactcgggctcaaacttgacaagtcctagcatttaagttttttggtacttaaaattttattcactatgcagttgttggttcttgagatatgcatgtggtactgcacttagggggagtattcaaaactcaattcattcatgaaacgtctagtgcaaaaccgaaatgcaaatctcaccatttgactattttctctaaaaactatctagcctatggcaaaatattttgaaaaatatgagagaatatgtgagggtaccaatacctgtcccaacaagtgttcttttgtgtgcttataggttgggatttggtttggttcaaaatttcctagaaaatttcaaaattccctctgtctgggctcaccggacagtccggtgtgcaccggacactgcactttgcaatgtctggtgtactggctgggcgcacacagatctacttctgtgctgccctatccggtggttcaccggacagctactgtgcgctgtccggtgtgcaccggacaagaactgtagactgtccggtgtgcacatgatcggttttttaaaaaatctttccttgcccgagctaatgcccaggcctctttttcacccgctgctctctgtctgtctgtgctctgggcaatttccatgctcttctctctccggtagcgatcgccggcagttggctccggcgagcatctctctggtctgtacttgtctgcctcttctcagctggtgagatctccctcctctcttcctctattattctctttagtgaggaagcttcacaccccttttgattcaatcttcaaatctatgaaaacttgtgcaatctgtgtgtgcaaatgtgtcctatgtcctctagtagtgatcccttgcaggtagtgatctccctagggagggtttcatccactcaaatagccatttcacactcgttccaaaatcctcgcgcaccaagtgctcggtgaaatgcccaaaccagctaaaattgctcatatcaaccccagctttttctatcactctcatgacacatccagtaacttcctcgccaaaatccacatctatccaatatcccagacactgggtattccactgtttcccatttatagcgatcatttctgagccgagtgccacaaattcattatcttcgcaaaatttcaaaccaagcacacacctcactcatatttactcatatatacctagatgtgaagtatcgactcaattccatgtcatttcatgcctcttttgaaatttcaaacctcctatggcacaattcaacgttccaacatcgttctcgcgtcgtttgaccgttatttctccaaatcacccagtttttgtgtcctaactctctgtgtatgtatttattcacatttcatatacttatgagtatgtgactaatacatgctcacctcttctgtcatttcggtgatcttgcctgcccgcgtgcccgtcttctgtcctgcatagatcttctatctcccgtgaggtttccggtcaggtcaggatggtgcagatgaagaacgtctcatcgtcaggggaggagacgacgaggatcctcctcgcccttcaagtaggtcaaaggaaagacaatttaccttgagcagcaggagggcaggaagaagcgacgtatgggcagagctgctcgtgcaacacttgcagcggcagtagcagcagagcagactgagcggggaggccagctctagatttcctcaaatcagatagcctatcgagtttgtctccttgcatctcgccctttctccactgctccctccacacatttcgccattgtctctactccacctcccacttcaccagctcctgtcgctccagagccatccattacttccgttgtacccatcacttccaccactctagcttccactgttcccctcccgctctcgtttccgctttgcccattccaccacctcgctttagtgagcgtgacgagactgaggtgcgaacgctggctgctaatctgtgtctgcttgatcttcagcgtgctactgctgcctgggaacgtcggttcagacacgtatctgtggagtcttggttgccagctcagagggaccctgcggctgcaccactctttagtaccaggattcaggagtccttcacggcatagttgacagctcaaattgctttgcgagcgcactgacttttggatctacgtgcttttctgttagtcgctggtgccgactaagagggtcaccttacttatctaccaggtctgctttcacttctgaccatgagtggcagatatattgaggagtgggtcagagtgttctatgccatcgtttggattgaccctgaccatcagtggatgaggttccgttttgagcgagaggatgtcactctgcatgccagtcagattcgacagctctttggatttctagagtcgtcgactaggctccacagcctgtgctacgacactttggatcctccgtgtcgccctcacggcggagttgcacctgttacagctcatttcgcagtcctgttcagaccgcctttcacagatgggtcacgccactctcctaccaacttcactcctgcagcgaagtttctatatgagctgatgagacatacactcctacccaggatgggatacagagaggccaccactcacattcagctatggctacttggtgctttgatctcacattcagagttcgatgtcgttgatttccttatttgtgagatcgaggacacaatgttggatggttttggtgctcgccgtcagctgccatatgctcattacctatgtcacatctttgcgcatttgatcaggcctcctcagttccagggcaccctcgaggcctctcgccttcagttcgacttctatcgtccagcccctgaggacctagtactagtgccagatctagtggccgatatcagggctgaggatgaggctttcagatagtttgagacctagggtgctgttgccgattcttcttccgacaatgatgaggacttggggattttgccatcgcctcctgtgccacctcactcacatgatcacgaggcgggtagttccagtgttgctcctgctgcccctccagctattgaccctgctctagccgctatccttcagtcacttacgcagcagcaggctcatctggcagcagagcaggctcgacaggcagctatccagcagcagatgtccgaacggatgctctccatgtttcagactatctaggaccgtcaggacaccctttagcagcagctcttggcagatagggcagagcaccaggccttcatgacgcatatcctttagcacaccggtgttcagctcccaccagtgtagtctgctcctcctccagctcttcaggctgctgtcgttccggctctttaggcaggacccccactcccctcgtttggtcattctatctctccgctcaggtcggtcactttggatttctcgtcaccggtcgttggacctgtcagctctcagccgccagtgccaccagcgcctactgttaccactgctgtcgtggtggtgtccatgactgcaccagctccggtggatcctgcatcgcagcctatgttagagttagtaccagctccaacttctactgtagatcctggattcaagactgactccaatcctcaacttgcgtttgtgcttctgcctcgaccgtgacatgatgcgccctcgcctcctccttcctcttctagtttgtaggttcaggtaacccttttggtgttttacaccaaaggggagagatatgagttgtgagagctaagggagttagggagttagttgagagtgctttttgatattttgatgtaatatatttgcttgatactctctgtactagctccacttttgtatgacgcttaactcacaaactctatgatatgctctcgttgcttgtcattgactatgtgtgtattatgttttcacctaagatgttttcacgagtcgttcagttcttattcatggatttcattgcattcttataagaacaagaaacttacgttgtgtatgcgcctatacttactattcttgtacacgactctttctgtctaaatttttgagtataagtaaccatcttatctattgacaaaaaacaaacaaactactctcacactcttgtagggttgtcatcaatcaccaaaaaggggggagattgaaagcatctaggcccttggttggttttagtgattaatgacaacataatattatgtgactaacatgtgttttgcagagcaaatggtaagttaggtcgcattacaggaagttgtactacaacggtgaaaaaaatcccaaagatgagaacttgaagcgacgactgaaacgacgaatcaaaagatgaagatcttcatattctgagtgtcgaaggagttgcagatactcaatatagaattaggtcttctattttattttagccgtactataaagaggggttctggatgagtagtttgaccaagagaattctagtgtagtgttggtgcatattcacactcacatcta

SEQ ID NO: 42628 - DNA, 291 bp, Zea Mays
accaacatacccttgagagtcttttctttagttgggtaagtcttgttgagtaattatgtactcagggttttattccctgttgtttttcaggtcataactttgtgctgctgttgatggtgttaagtgtcggtgggctcggccttcttataagactaagtaactcttctatacttcttattgaggatggtcacttgagctagcatatatttcaaacttataaataatttataacatttcaaagtttatttctttgaatccctattgtaattactccgataaacataaagtaaa

SEQ ID NO: 42629 - DNA, 3384 bp, Zea Mays
accatggccccgcaacgcagtcctatgattcccgccttaattatatgctcgccgcaaccactaccaccaccgatactgaaaacaaagagcagctgcaaataaatcgataagccgtctcacaccttgagcctgcaacaagctagcattgctgcatgccagcatccacgtagcatctgagcttcatggttcagattcagatagcagcggtgaagcggatgaaggggcgggccccgctgtcagtggtggtggcaatcatcggcgggctggctctagcgggcgtcatcttcaccgacgacctccgctcactcactgagatcatggagaagaaggggaaagcgaaggagcacaagaggacgacgtctctacatgccgggacgacgacgaggaagatgccgctaacgccgccgccgcagccggcgaaggcagcgttcgacccgagccggtgcagcgtgacggaggggtactgggcgtacaacaggtccaaggagctgctttacacggaccaaacatgcccgttcatcgacaggcaggtctcttgccagaggaacggcaggccggacagcgactacctgcgctgggattggcacctagacgactgcagtctcccaaggttcgacccggtggcgttgctggagacgctgcgggggaagcggatgatgttcgttggcgactcgctgcagatggggcagtggctctccatggtctgcctcgtcaactccgccgtgccctacaccgcgcggtccatggagcgcagcaccaccctgtccgtcttcaccgccacggagtacaacgcgacgatcgagttctactgggcgccgtacctggtggaggccaactccgaccgcaacatccggctgggggccgacggccgcgtgctccacgtcgacgccgtcgagctgcacgctaggcactggaagggcgtggacatcctcgtcttcgacagctacgtgtggtggatgaccggcagcaggatcaaatcagtgtgggggtcgttcggggacgacgggtacgaggagctggacgcctgggtcgcgttccggcttggactcaagacatgggccaactgggtggacgccaacatcgatcccaacgccacaagggtcttcttcatgtcgatctccaccacgcacatgaggagcgaggactggggccgggagggcggcatccggtgctacaacgagacgttgcccgtcacgcggaaggggtactggggcagcggcgcggaccggcggatgatggaggtgatgtccgacgtggtgggccggatgcgggtgcccgtgacgctgctcaacgtcacgcagctgacggagcaccgcgtcgacgcccacgtctccgtgtacaccgagaccggcggcgagctgctcaccgacgcgcagagggccgacccgcagacgtacacggactgcatccactggtgcgtgcccggcgtgccggacacgtggaaccagatcctctacgcgcacttgtagcagcaggttcggtcacagtcacagccgcgagaacgaacaacggggacacgtaccgaaatccagctgggaataattttagcggtaggtcgtcgtccggccgagttcaattcagagatgatagatccagttcaaatcatcgctcggacagaaaatgcctgagcttgtactgctctgctttgtcacacaggcagagcgcgtcacgcacgcttgctcacacacatacaatacacacggacacaccttttcctaaagacgtacagatacgatcgaggcactacacagacacgtacgctggtgacacgtaacaatagcacgtgctgccgcgccgggccgggattcgatatatatggccggccggtgggcacgcggcaggtacgccacacctaccagtcgttcgttcgtccctatcctccagttcattactgttacaccgcgatggcgacagcgacgtcgttgccgttgaccgtgccgttcgccgcgccgtgcccgtcgccgttgaccaccgccagcttgtctccggtgcggtcggtggcggcggagtcgtgggaggagatgaagcggccggaggggtcgttggaggccttccactgctccacccactcgatggccgcgggcgtgctgcaggcgatgctcgggccccacggcaccgtctccctcgccgagtcctgcatgcagggtaccaccgtgttcacggactcagcagcacgccgcgcgtactgaataattggctaccacgggtgcagtgcaacaacacacgcatcgttgtaggctggctggaagctgaatcaatcacctgagggaagagcctctcgaatatcatccggtagtagtaggcctccttgttgacgggcgtgttgtacgggaacatctgggcggcgctgttcatcatctcatccgtcacctggacatgggggggaacgtcagcgctggttagctaacttcgacgacgaccatcaacctgctgttcggtgaaggctttgagtccatcgatccagttgtagcccactccgtcactgaactgttctttctgcctgtacagaatatgctgcggaggatgcatggcacagaggcgtcagttcaggcttgaaaacacacagacacagaggtaaacgaccagccttctctgaagatgtccttacctcgggcaggtaagggtgctcctcgtcgtcgaacgccttcctcaggacccacttctcgatgcgacccaggttcttgtctaccattttccattcggggtccatgcccatcgcgacgtcgacgaactccttgtcgaggaacggcacgcggacctccaggccccacgccgacgtcgccttgttggcgcgcaggcagtcgtactggtgcagggccttcaccttgcggcaggtctccctgtggagctcctccctgttgggggcgaagtggaagtagaggtagccgcccaggagctcgtcggagccctccccggacagcaccatcttcacgcccagcgacttgatcttgcgagccatcaggaacatgggcgtgctggcccggatcgtcgtcacgtcgtacgtctcgtcgtggtagatcacctcctcgatcgcgtcgatgccgtcctatggatgatggcccatttttgtaatttgtttgccactcgtcagcctacgtcacgatctcgccaaaagcgagcgcgcgcgcgaatgatttacttgcctgtacggtgaaatggaactcgtgatgggtggttccgaggtagtcagcgacctctcgtgcggccttcaggtcaggggagccctgaaacgtacgtgccgtcagcgtcccgtcccgcgcgcgattctatccgagacaaataagacacgcgcaccaccagtgccaaaaaaaacgaaacaaaacctcgaggccgacgacgaaggagtggagctctgtgccgaactttccggcggcgtcggtcttg

SEQ ID NO: 42630 - DNA, 1811 bp, Zea Mays
attctaaactctactgccgtacagtctatgcaacgcctgaagagcacggcgctgcccggagaaggatgcgtgtaaggtgtaactatcgcctactgcagctcaggttgtttctgatagtcttctcttctgccgtccatccggcctgcgcgctcgctctcctgctcttctgcgccaactgggcgaccgccgacgccaacgccgacgacctacgccaggtgctgggatttttgtcggttccttcggcagctttcgtcgcgtccttcgccggcgacgagcactcaccaggtccgctcctgaagaagactgggatattttgcatacacagaggatcatctgtaagttaaatcttctgaaatctggatccaacatttgtaccatactggtgaatatccttgctttacttttgagtcatgtttgaattaacctttctttccccaccatgcaatagttccgtttgatgaactcacgggaatggtgatgctcattttctaaaggaccggtcccctttttgtttaatttccaaaggtaccatgattactaaataatgatttattagaaattaatgactgatggggtcaagatgtgtgaaactgttaagagcttgagatctgctgattgaccacacccaaaagggaaaatgaaggtgtagaggacattcagttttctccagttctccagttcctggatagcaatggcaaatgagtttcctgatgaagttcttaagtctgttttcccattgctggatggtaaagatctagtattctgcatgcttgtatgccgtcaatggcatgaaatcgcaagggatgattacttctggaaatgcatttgctcacggaagtggccgtccatttgcaaacagcccccttctggcgcaaactacaaaaagctttacttaaccttctctaagccacgggagatgcagaacctccctgtgccaaggcttacattcgaggatattgttttctacattgatatgtggctcgaaggatcgctcatcttttctcaagcagtttcaggccgcactctccgagcaggcctacagggcgctccccctcctggcattccagatatacttgcagcacatttgagttcccaagactgcatcttgatgctggaagtagagcccaagttggcagttcccatggggccagccatcactgtatctgtccttgccaaccgcaaggattcaaacaagatggcttgcatcataaacaagtcaacgtttgattacatcgatagtaatgcagcgcgggctctggcttatgagtatcttaggttttcgcccagacaccctttcacatccgacatccgggcatggatgtcgttacttttcctgtgcaaaggggcgaacaccattgaggtgtttggtatcgagctagatttctgtgacgccgcgaagtcagagaaagaaatcttgtggctcctagacatgcttgattggaaatagaagctccttatcccctttggggtttgacacatgtaaagcctgttcatggttagtcgttcctttcctgttggaccatgtacgctactactccctccgtttctttttagttgtcgctggatagttcaattttgcactattcagcgacaactaaaatgaaacggagggagtactgaactacataatctcctgagaaaatgtaataaatgtcacctgctactccatgtgctaacaaggcgaggttattttgtacttctttttcccttgaaagtgttgctcatctttacgtagcattcggtgatgagtttctttacgatgtcattttttgttgcagactatgctgttgttcgtcataagttttgtgtat

SEQ ID NO: 42631 - DNA, 1272 bp, Zea Mays
ataccttggaaatgggacagggtaagctttgcctcgggcaaactaaggccagaataagataacacgaaatgggcgtggagcggtggcgggagtagcgtgtaccctccgtggaaagaggttggacggtggtgtatctgtgctctcggtttgcgtgaacctgatctggtcttaagaaccctggggtcgagttgacatatgcaagggttaagtgctacatatgtcgtgtggttagagatcctcagctgagtaaatcgattcggatcgccgttatatccccggagagtggagacttgatcactaacctacaacctaagtcaggatgtgaacttcatgaataaaaatgatgttgtattgatgagatgatgaaatttgactagaggctaacagagtctattaatatttaatctggtgttaaaatgttgaaaataaggactcactttagtaagctatttctgcaaaagtatctaagtttgaaatatatgttagctcaagtgaccatcctcaataagaagataaagacggggtatacttatataagaaggccgagcccaccggcacttaacacgatcacagcagcacaaaagttatatcctgaaaaaacaacagggaataaaaccctgagtatggaaattactcagcaagacttacccgactaaagaaaagactctcaagggtatgctggataaataggaatcaaggagagactttagcaagaatcaacttagatacttttgcagaaatagcttactaaagtgagtccttattttcaacattttaacaccagattaaatattaatagactctgtttgcctctagtctaatttcatcatctcatcaatacaacatcatttttattcatgaagttcacatcctgacttaggttgttggttagtgatcaagtctccactctccggggatataacggcgatccgaatcgattaactcagctgaggatctctaaccacacgacatatgtagcacttaacccttgcatatgtcaactcgaccccagcgttcttaagaccagatcaggttcacgcaaaccgagagcacaaatacaccaccgtccagcctcttgccacggagggtacaccctactcccgccaccgctccacgcccatttcgtgttatcttattctggccttagtttgcccgaggcaaagcttactctgtcccatttccaaggtatgcggctagctaagatagtacttgcgctagcaggcctacatacacatccaatccttaatcaacctgggtagaacatcacctgtt

SEQ ID NO: 42632 - DNA, 2425 bp, Zea Mays
catgctctcattttgcctagcaatagccaaaaaaaatttcgttcgtgtgcacgccgattttcaaagaaaataaaaaagcgagggtaaggaaactcagattaggttatatttggataatctagtattaacttcaactatcaacgcatgtgaattgaggtcatacagcgtaaagattctccgctccccggccgcaaatcccccactggccagtggccaccaccaccgcctcgattcgccacgtttggttctgctgaggtcgggatttggtgtgccgagctattccttgctcaattggatctcctccgcgcgattcgattcgattcgattcggttcggttcgttccaatcggggttttgctacttccgctgccaccggtgtgctccgagctgctcaagctgcgcgccggatacctggctgctcgatctgattcggtctccaacaccagccccctccgcggccgccgctccccgctgaccccggcgccatttcgacccgcgcggccgatccttggatggttccgatcaatcgggaccaagagacccaaggcttcatcagctcacccggcccccggcggcggtcgatccatggccggggagaaagcgccgcgcgcgttccccatcgaggagcttccaggccacctcatcggggaggtcctgacctcgggcgggctcgcggccgccgacctcgccaggctcgaggccacctgccgcgcgctcaggccgctcgccgaatacgccgcgtccaagctctgcgccgcgcgggcggcgttcgcggctatggggcccgccgcgcgtggggggctgctagagaggtgcgggggaagctggaagaaggtgctcaggttcctgcagtccgtcgagcagtcgtcaggcacggtcgagaccacatcgggcagcatgcaagtagccacaggaagatatcacacacttttggtccatgactcttctgtctattcttgtgggtccagcttgtgtggtgtgctaggtcatggcccagatactacacagtgtgcggcattcagtcgggtttccttcccatcactttcttgtgttataaacatctctgcttcacacaaccatgctgcttttgttttggaatctggggaggttttcacctgtggtgataactcatcattatgctgtggtcatggcgaagtgggaagaactatatttcgaccaatgcaagtagaagcgcttaaagggattccctgcaagcaggttgctactggtctaagttttactgtgattcttactagggatggacaagtatatacttgtggaagtaatacgcatggccaacttggtcatggtgacaccatagacagggccactccaaagcttattgaattgtttgaaggctccactccggtggtgcagattgcagccggtgcaagctacacgtttgctgtaacagatgatggaacagttcattcctttgggtcttgtactaatttctgccttggacatggggatcagcatgatgaacttcttccacgtgcaatccaatcatttaagtggagaaacattcatgtagtccgtgtttctgctggagatgagcatgccgtggctcttgatgcactaggatatgtttatacatggggcaaaggatactgtggagccttaggccatggtgatgagaatgataaaactagcccagaattgatcagcagcttgaagggccaagttgctgtgcaggtatgtgcaaggaagagaaagacatttgttctcacggacaagggctcagttgttgcatttggatggatgggctttgggagcttagggtttcccgaccgaggaccgttggacaaagtaatgaggccccgcgctcttgagagcctgcaggatcactacgtctcccaaataagcaccggactgtaccacactgttgcagtgacaagtaagggcattgtgttcgggtttggggacaatgagagagcccaacttgggcaggagtacattcgtgggtgcttaaaacctactgagataatgttccaaaagagcatggaagacataccgattgcggcgcctagtggttgacttgaatgccatcattttggacactgttgcctacatgtgttgtatttatatcggaattcttgtcggcaagtgtattttatacttcgtgctttgtgagtaatctgggtgaacgggggaaagacggaagtggttggaattggaggacagtgttgtgtagccaaagaagcatatagtttagtaacgtgtaatgtatcgaataattcaacccaccatttttcttctgtacaaaatttattggtgtgtttgtatttttttctctcttgtccccttcatgttttcttggttctgtgctagcaactgttgagtaaatagcgtttgctcccctggaacttgttatattagtgcctaatcttgctagtttctatcgccttcaacaatgtcaattcgtc

SEQ ID NO: 42633 - DNA, 1642 bp, Zea Mays
ttattttttattttattttatctgtttcgtgatgggctgatggcgggtcaaggttgaagccatcaaggcaacgtacgcctaggagtggagacgacgagagtggaggagggctgctgatgggcggaggagacgaccggagagcggcggcgctccagcgatcctcgtcgccatggagcgtgggcgagcggtggcgggcgcacgccgggatggtcctcgtcatgctcgcctacagcggttaccacgtcctcgccaagtccgtcctcaacgtgggcatgaaccaggtcgtcttctgcgtctaccgcgacctcctcgcgctcctcgtcgtcgcccccgtcgccttcctccgcgagagaagggttaggcctcccgtgacgcctcagctcctcgcttccttcgctctgcttggcttcactgggctgtatgggaacccgctcctctgcctcgtcggcctccgctacacaaacgcctcctacgccgcggctttccagccctccataccagtgctcacgtttctcttggctgccattgtcggctacagtgttgaagcgatcagcgtcttcaccaaggacggcatcctcaaagtcaccggcacggccgtgtgcgtctccggcgccattctgatggccctgtaccgaggcccatccttgatcgcccttcttagaagcatgcccaccgcatggacgagcgctccctaccaccctgctacccccgactggttcacaccagccgtgcccgtgctcgagcagggtgtagaagcatggcagcttggcgtcctgtgcctcataggaaactgcctcttggtggctgtctatctagtcgtgcaggctccagtgatgataaagtatcctgcgagcttatccgtgacagcttactcctattttttcgccacaacctttatggtgctaactggagtatgcgcgactagtggcttacacgagtgggcactgacaaaagccgaggtcatagctgttctgtatgctggaattgtcgcatcctgtctgagctactcgatcatgacatgggcgaacaaagttcttggaccttctctggtcgccctctacaatccactgcaaccagccttttccaccgccctctcaactgttttccttggcgacccagtttacctcggaagcgttattgggggagtctctataattgctggtctctatctggtcatctgggctcgctacaatcaagggcagcgggcgcctacggatggttgtttggaccctcttattattgtggataatccaagaatccacaagacacaagaaagtcccttcgtgtagatcctgaaaaaaatgtgtggattatccacacatttgtataggtggtcttaaaagacagtatacttctatttgttaaacttcacatatgcattcaaataaacaagtggtcaaagattgtagtgaacctaggctctaattagaattgtatgttttgtagaacatttttataggctattcacctatctctagccatctagatcctatcagtcaccctgtaaaaatccatatagtccttcaatcgttggaaacagataaggatccattttgacataaggaagatgctgaggaaactttggtacgtgaagttctctatctcaacaccattggttcactaatgtgcctcctaaattgca

SEQ ID NO: 42634 - DNA, 1461 bp, Zea Mays
cgcggctagggtttaaggattttcttctccgctcccccggcccccattcgcacccagcacagctacagacggtctctatggccaagaaaggggcgaagagaaagcagcagccgccgccggcggctcccaccgcgaagaaggggagcaaggctgtgcccccaccgaaggctgcgaagagagcgcccaagaagcaggagcttctcgagtcctccgacgattctgatacggagcagcagctcctggaggaggcctcccacctcgacgtcccctctgattccgacgccgaagagctctctgggtcggacgctgaggctgacgagctctcgggctcggatgccgattccgacggaagctcgagcagcggcgacgacgtggaggatgaggaggaggaggaggaaggtgatggaagtgatgatgaccccctggcggacgacttcctcgctggtagcgacgaaggaagcgagggtggtgactctggactggagtcagacgagtctgatgacctcgaggcaaaatcacgagcaattgatgagcagaaaatcaaggcggaagaagatgcagaggaggaacttcaaaccaacataagatcagaatctgatgagttcagattacccacggcagaggagctggaggaagaggcacacagaccacctaacctaccaaatctcaaaaggaggatttcagaaattgttcgagtgctctcaaacttcagcaagctgaggcagaaagatgttccacgaaaagattatatcgaacaactgaaaactgatatcatttcatactatggatataatgattttctagttgaagcattaattgagatgttcccagctgttgagcttgttgagttactggaagcctttgagaaaaggccgcccgagtgcttgcggacgaatacactaaagacccggaggagggatcttgctgctgctcttataccaagaggatttaatttggacccgataggaaaatggtcaaaggtaggattagttgtctatgactccaccatttcagctggtgctactactgaatatatggctggtcattacatgaaacaaggtgcaagttcgtttttaccagtgatggcacttgctccacaggagaaggaacgaattgttgatatggcggctgctccaggtggtaagactacttacattggcgctcttatgaagaataccggaatcatctatgcaaatgagttcaatgagaaaaggttgcatggacttttgggaaatatccatcgcatgggtgtgacaaataccatagtttgtaactatgatggtaaagagctacccaaagttcttgggatgaattcggttgacagagtattgcttgatgctccctgcacaggaactgggaccatttggaaggatctacaaattaaaacatcaaaggacattgaagacatcaggagctgcgcctttgtccaaaagagatcagttgcttaaccagtcgggttgg

SEQ ID NO: 42635 - DNA, 589 bp, Zea Mays
gccgtaaatgagtctgcttgctattgtataccggggaaaaagtctccaattgtacaaatacaggctccattattctataagtattcacaggtatttttccataccgtccacaatgggcacaatgatataccttagtttatagcacatccataatttactcatgtgtacattacaacaatggactatgtgagtcccagttctaggccacaccgccacatacctgacattttatttggatatcgctggtatgctttatattgtacttttgactctggtttgcataaggtttatgatgtctatggtctttctgacctgcattctcttgaccatcatcacctaattttgctccacatgaatcagtgtaggtcatgcccaccaataatttctacccgatgttgctccacattattctgatatggagcatgattagcagctttgtgattaagcattgacatgcttcggtcataaatatgcctctatttgatggcattcttcgagcctcgatccccaaacttacttcatttggagccatcgtgtcttcgctctgaattggcctattagaatgtggcgagtctcctccaactcctag

SEQ ID NO: 42636 - DNA, 2247 bp, Zea Mays
cacgcccgctcatctcaaagatctcagccgccgtcgtctccgtcgctccgccgcacctccccccatcaccgcctctctaaaaccctaatccctagccgccatggcggctgttgcggcggccacctcgcacctcctacgccaccaccgcaacccccaccttctcctcctccgcgcagcgatctcatcctcccgtgctttgccccagcagccggagctgtcccccgacccgaccgccggcacccccgacctcgccggcgcggccccactccctccaaaccccagcacggggagccccttctacacccagaactggcgcaacccagccgccgccaacccgccctcctcgcttctgcccaccgtcgtcgccggcagccccttcggggcgcagcacttcatggccgccttctacgatgcacccgacgtcacggggctcaaggagacgttcgccaagtatatggcggagcagcggtgggaagacatgaagcatctgttcgaccactgggtgcgctccctcgacgccgccacggggaagcccaaccaccccgacgtcgacctcttcaatcactacctccgcgccaacctcatgaccagggccctgccgcacgagatgctcgatctcgctgaccacatgctcgagttcgagctccaacccaacgctgcatcgtacaacctcgtgctcaagagcatggtcgccagccaggagaccgagggcgccgagaagctcattgaacggatgctgcaaacaggaacatttccagacgatgaatcctacaatttggttgtaggcctgcttatcagacagaacctcgtcgattcatctctgaagtatttggatctgatgcttaaatcgggctacacgttatcactaactgttttcacagattatatccgagcatgtatgagatctgggaggttggacacgttgacatcaattatagagaaatgcaagacaactgataagaacaaagtcttgtgtccggaatggacttggtgcattgacatagcagatgctgcatttgaagctaacaacagcaaattagctctttttgctttggaatatcttgcaagatggattgctcgtggtgagaatgttaaacctcctgttcagctgtcagttaatgaaggtcttgtaatatcagctctgagtgctgctggcagaacttataatactgacctcttgaatgctgcttggtcgctattacggaaatccctgcgccagaaaagggcacccaccccagagacatatcttgccaagatctatgctcattcatcaattggccagcttcaaagggcttttggtacattgcgtgaatttgaaaatgcctatgggaactctgaggacattgatttagagctcttctcaccatttacttctttgcatcctcttgttgttgcttgctgcaaagatggctttagcacattggattcggtgtatggtcagttggagaatctgatacatgctgatccaccgtacaaatctcttgctgctctcaactgtgttgtattggggtgtgcaaacatttgggatattaatcgagcttatgaaacttttgtggctattaaggaaaaatttgacctcactccagacattcattcatacaatgctcttctgtgtgcatttgggaagttgaaacagacaggagaagcatgtaatgtgttccagcatgtattaactcttggtgttaagccaaatgcaacgacatactccttgcttgtcgatgcccatcttgcaaacaaagatccaaaagctgctcttgccataattgatgagatggttgatgctggcttcactccttccaaggataccctcaggaaggttcgaagacggtgctctcgtgaatcagacttcgacagtgacgagaaagtccagtccctggcaaagcagttcaactaccgaatgggtggtgagaaccgtagagagatgctttatagcatagaatacaatcctgtgtactgaaacagtaattgctactgagtttgctagccattgggagagcacagacattgcagcttgtaaattacttggatgtaccaggattcttaagcaaattttcagtttctcgatcatcatttgtgctcgcagggttcgttttaggacttgctaataagatgacactttgagtctgtttggttgtcaggaccagcatatcctggtcaaagcccagatgcaggctgggcatagcctgcatgcattcgtgcaaatcaaaacaactctacttgtttggttgtttgtccacaattaaccag

SEQ ID NO: 42637 - DNA, 1991 bp, Zea Mays
gaccgcggttgcgagaatatctcttctgcgattacacactgatggctctgctccttggctccaggtgctagccgaggccacaagcgcgttgttccataccgacgcagagaataagtggaagggcgtgtggatcgagattgacagcggtggagacgacggctagagcgagaggagcagcgccgtggccagcgaggggagcacagtcacggccgccgcgtctgcgggctccacagccacgtcgaggagatgctgttgggctccgtgggtgggttgtgctgctggtggtaaggggccgaggtgggcggaggtgataattctgtggtttttgcagatgcaagctgggccagcgacggagaacgacattcgtgccgccatcggcgacaactccggcatgagcaaagcgatacgatagctgttgaagcaggagggcgacttgcggcatgcaggcaatggtggtgccctggatccgtatgtttatatggcacttgaatttgttaagcagctaggagaggctttgcattcagtcaattccaaatcaactagccacaatttggaattaatttatgttattccggctccaagaatgcaaaagctcaataattaggactttggacccaaagatctcatgcatctggctgacactgtagatgggttttctcttatgacatacgacttctcaggacctcaggatcctggtcccagtgcacctctaaagtggatacatcattctttagcagcagttctttcagcaaaagattcctctcatagcaattcacattcacggatgatattccttggcatcaacttttatggttatgattttctactatctggaggtgctactcccaaattgtgtgttccttctccggggaaaccatgaatcctttaatatggtttcgagaaggagataatgactaaatacaaagatcaaggcccttaactttatcgaaagttttaaagatgttttggggaccttcctctagcggcaataatagcaggatgtgtgtacactgcacgtggaggtgtcttcactagttccatgatgggtctttctccgaataaagatcaagacattggattgctttggggtcctgatatcactcagcaatttctgaggacaaataatttgaaggcgaattgatcatgtggaggcctggaagtgtaatggtggtttaccgagggagcatttacaaaaggcctctaaaatctcaagctctaaatggtgcctcatcatcggttaaaggcgaatttggtgcattgttcatcccaaatgcctcgaatgccgttgagaatgatattcaagggatatatttgtctgcaaaacatgcaactgtgtccctattgaatgtgtagaatattaagcacatgaatgaggaagggttggagttcaattagataatgatgagctaggtcctcattttgtggattggtgggaacgggtattttaccaatggatgttgacttgctgcctcaaataatccttggttataatataccatacagagttctttcgactggaatgcgttcgacccttaccaatgcagagctgactagccaaagttagtgaggaaccttccatgccattttgctctagggagaaaccagaactatcaagtttagcagcagtaatataataaggagcatgttgtaactgccccagcgttggtgtggacagcagtaatatattgctcatcgattgcaaataattttattctaatttttcatcacatcaccaagaggtatggacacaactttgcctttttctatttcctcttattgttatgaggatagcaatatcaatatataaatataacctcgacaaaacacatctgattactgtctcatgcctgaaaaatcactctataaagtgtaacatctgattactgtctcatgcaacaatgaatgaaattagaaggcttgaaaggtaacaataagttttgactcagagtgaacaaaaatattttatcaatacaattcgccattatatcttc

SEQ ID NO: 42638 - DNA, 2027 bp, Zea Mays
gacgtctccaaaacactagcgacgagatgagctcctcatctcaaggggcagtacaagtccactttggtttgcccagtctgtgggaaggtttcagtgacttttgacccgttcatgtatctttccttgcccttacaatttgcctcaacccggagcgtgactgccgtggtgttttcttgtgatggtagtgttccaccaacaccattcactgtgaatgtaccaaaacaaggtttgacgattgtgtgtccttaaacattttggttgaatttatctacagatacggaatcataagatctaccgttttattgatgatccagtgcttcagctgtctacaataagtgatgatgatcatctggcagtttataagctcccaaagttggaaaagagggtgaattacattcagtttgtgcatcgtcatgaagatctggaccatggaaacaataacagcttgacatcttggaaaccgtacggtgttcctcttcttgcacaaatttctcgcaatgaaattgtcacgggttttgatatccatgagttggtccataaaatgcttgtgcccgtgctaaggaatccggactctctgcatttggctgttcaaagttctgtttccacaagaactcatagttatcataccgacagcagcaaatgtcagcttctgttggttgatgatagcaacacagtcattgaaaaatcaaatgatgctatcaggatcccacaatcttcacttgcaactgtattttttatcaactggcccaaggcagatctgaaaaagatagacactcatcatttagagtaccttccagaggtgtttatgtatgctccgcctgcgaagagaacccgtggtgaagctctgtcactctatgcatgcttggatgctttcttgagagaagaacctcttgtacctgaagacatgtggtactgtccaaggtgcaaggagcaaagacaagctagcaaaaagttggatttgtggagacttcctgaagtactagtcatacatctaaagagattttcatttagtaggtcaacaaaacaaaaactagaaacttttgttaattttccaatacatgacttggatttgacaaattacattgccaataagaagacttcagagcgccagatctatgagctgtatgctgtgagcaatcattatggcaacatggcaagtggacattatactgcacacattaagcttgtggatgagaatcggtggtacaacttcgatgatagccatgttgcttccattgatgaagatgaggtgaagactgctgcagcttatgtgctattctatagaagggtcagagaacaagacatagcaaggggaactagtaatggatctcagttatatgcaaaaagaagtcacggatatagccatagtcattgccaggagtatatggcttgctggaaaaaatgctcatcacgtgcagtcaatgcaccgttgtccagttgtcacagaagatatttcgtgcagtgctggtacaagatgggaattttgtatgaggtgagttgaaggagtaattgactctttatgataactgggtagcttcaacaggaacgccggggcttggtggcattttgttcgtctgttttcttctagaagagaaacaaggggaggcaagaaaacatttaggaaacaccttttcgttaatttgattttttatttccatttttagatttagctagtctgtacactgttgttggaaatgggtccgctgttgttggtcgatgcttgtggtggccaataatactacacccaactataccaggctctgcaatggcgaatcatggtgcacattatggtgctctgttgcgggaagaattgtagctgatgttgtacttatatactggcaaaaaggccccagaaatgtaaaaatgtatcgatatgctgacatcttaaaccctattttggattcgtgctctttcctatggatgaaggtgtgcgccatttaggggttgtttgtttgaagaatcaatccattctaggtaggtgattatcacgagaccatttcataaatttggtgaaatgaattcatttt

SEQ ID NO: 42639 - DNA, 1070 bp, Zea Mays
gctggtaccgcgcgcggcacggcagtactccttggtcagcacccagtcgccaggcccttccttccaacgcaagagagctaggcggcgtgttccgtgccttgccttcccaagcaagcaagcaagctttcataatgtagtattgtagtagtttcattcaattcacgagtcacgacgttcacgagtcacgccagcatcaaagccgtgcgtgagtaggccgatctcttggatgatggaggaggaccagcagatagtcgctggcgtggacgccgcggcccgaggcggcggcggcctgggccgcgcgggagccgtctttctcaccgcgacctgcgccgcagccacctacagcgcggcggcggcaggggacgtcccgtccgtggcgttcgtggtcgccagctacggcgcgctcctgcttctgctgcgctccctgcgcgcctacgagctggcgccgccggaggcggctgcacgcagggaagcgctcaggcgcagggtctgggcgctctgcacgctactcagcgtgatgttcgcgtggaaggttgcgagcgtcgtcgcgacgccgtggccggtcgctgtcggcgtctgggccgcggcggccgtcacatctgccgctgggttcgttctgctgttccgccagcagcagcgtcgccaatgaacgagtgatcggtggatgtgtgttccgtctgtaacttgtaagctccaagagcctcaaatagttacaggcatgggatgggatcgatgcctggcctggttgctagctgctgtacgtatcatctcaaactttctgatggtgatacgcaattcgatcaagtgcctgatcgacgagctttgttttattatttttggcaggttagattgcccgtgcaatgcatgcatgcacgatgatgatgttgtgcatatgttattgaaggttttccgtgtgctggtgctggtgctggcctggtgatacggaggaagaaatgctttcaatctactgtacccggccgtttttcgtgaacttatttctatccgttttaagttcatcactgtgctcatcggttatcatcgagaaaatccaggcaccagttggctcctaa

SEQ ID NO: 42640 - DNA, 477 bp, Zea Mays
caaaatattagttatcccaaggtttggggtgttttctcttcagggttatttttctaggatttttataagttttccttgttttcatgaaataaaaggtactgcatttcttttgtactaacagagggtctattaaaattttccagtgaactatgttcattaagtgagctagcaaaaaggtggttgccccctggtttttatcttaaatccactttttctatttttcttaactttggtccaaaataagtttaaatggtaaacccttccttaaattggtgtagtgaggggtgtactatttttaaacagattagggagtggttaagtacttctctgatttttcttaaccctagcctaacagtgtagctatttttccctattttatttagcttttggttagaatactatttaattcaaaactttaaaatcttctgtaatacatagggtgttttgtatttttcccaagtagttcatattatttag

SEQ ID NO: 42641 - DNA, 2664 bp, Zea Mays
atgccgagtgataaagcaaaagctccaaagaagaagggcgaagaggatcctggaatcccgccagctccctgtgaaggagaaattagccatgagccacatagacaacggtcactcaatgggtggcaaaaggttctaaaccctgaattggtcaaagggccatggtccaaagaagaagacgaaatcatagttcagatggtaaacaaatacgggccaaagaaatggtcggccatcgctcaagctttgcctggacgcataggaaagcaatgccgggagcggtggcacaatcatcttaacccagccataaacaaggaggcatggacgcaagaagaggagattactcttattcatgctcataggatgtatggaaataaatgggccgaacttacgaaatttttacctggaaggacggacaatgcaattaaaaatcactggaacagttcagtgaagaaaaaggtcgattcgtacatatcttctggtttactttcacaagtcccatgcctctctctgattgaatgtcctgcacaatgtgactctttatcggctatggaccaacaaaacaacggaggtactgattgcaatgaccagaacactagcgtggtcttaagctctgatttacaagtaaatgtggatgccaacaagaaagaagcacatgactctcactcgtccttgtgtcaaggggtatgctatccttccacagagactgtaggatctgttttgcctgatgacctggagatggatatggatgaaggatcaggaaactctatttttgcagacgatcaaactctttgtagcacatcaaatcaagaacaatctatggtgccatttgttgttgcacaggaaatgcctgtctctgtgctatcaagtgtttctagcgctgagcagaaacggcacttaatctctgatgccaaaagcttgaaatccgaactttggaaagatgtttgtttgcaaactcttattacaggagatacagatgaccctgatgcttcttcaagattaaataacccagattcttctaaaatggacaccaattttttgaaagaggcctacccattacacacaccaaatccatccagtgtgattgaaactgtatatgaaccgatggcgttggtgacaatctctcccccttttatatgttcagatggtttgtctttcgcacccgaaaatagatctaagccaggagaaatgtcagactgtgaagcagagatggtcacatgctcaaacaatttttttggtaatgccgagcaatctgctaaacttgccagcagtgatgacaggccagaggctttcacaatgactgagagcactacaaactgtgggggtgaacaattgacagatgccaaagaacctgtggccagtacagcaaaagaacggttatcgaaagacatcgagactatgccagataaaaagaagggtgagggggctctattctatgaacctcctcgattccctggtttggatgtcccgtttatcagttgcgatcttgtaacttctgctgatctgcaagaatttagtccccttggaattaggcagtggatgcggtcgaccatgaatgtcccaactcctttaagattatggggctctccaacacatgatgaaagcccagatgcactaaaaactgctgctgaaagcttcccatgcacaagttcaataatgaaaaaaagacagagaagtctattgtcccctactccagatgaaagaattgagaagaaatctgggattgcaaagggggtgacggacatctcctatatgataacggccacatgttccatgaatgcaaccaatgatgaagacattgttactgaatcagctgtgtgtgctaagcaaccttctttgaaacatctagacaagaagcttgagttctctgacattaacaaggaaaactctgatggagcatctgaacaggccaaagatgcacaaaacacacaactcgtggatgagcaacattcctcaccaaatgttgtgaatcctaacactgatctacaagacaatataattggctgataccccaggtatcaaaagaggactcgaatctccatctgcatggaagtctccttggtatatcgatatgcacatgcactttcagggttttgtcagcccagcagacagaacttatgacgcgttaggattagtgaatcgtttaagcaagcacagtgctgctgctgcagtggaggcctgtgagatgctagcaagtggcaacacgacttctgataaggaaaacaaggataatacggatggcaaggaactagtgacaagaaaatcacagattaagatcatggccgaggcgcgagtcctggatttcgacgaatctcccgcacctgcaagaacagcagataagaaacttggcagctgtcaccggagatctgttagctcacccattcttccttcccccaaccttagaagtttccgataggtacaccatatatggcatcatcgtacattacccacctgcatgtattggtgaactctattgttattatgtctccttagagcgcgttgttgaaactattggagcgtttcctttctttcgttactctattgttattactattattatgtctctcagcccggaaacaggcatcagtaccagtgaactgttgaaactaccctaatcattcaaattaaattattatattgcccgatgcatgtagcttcttgtgacaacaa

SEQ ID NO: 42642 - DNA, 901 bp, Zea Mays
cgtggagcaacgaaaaaaaaatctgtgcgcgtcgggctcgcgcgctaaatctttttctagcttgccgcgacgcccggcgtcctacctgctttgctcacccgcgtcggctattcgctggtgcttcaacccgtcagttgtgttgtcctatccgcgtcagcacgcgaccgtggtcgtgttcgtcgagttcgccaacactctgttgccgattcgactatcgtcgctgttatgtgcctcgttgcgtgctcgacgagtgttgtcagttgtacctcagcactcgtgcttgccgctggctcgcgttaacgctcgtgcgtctgctcgttatcactgcgtcgcactcgctcttcgtccatcgggtttcacgcgtgctcgcgtttgtcgtcgagccgttgaacccgttttaccttgctcgacctcgtctttgcccttctggtgaccgtcgtcagtttggtgctagactacgctccattatctagtcgcactggctgtggaccttgttggttctttccgtgtcagaccagcaagctccgccaccgtcactcaattgctcgccccgcgtgtgctcgtaaattttcttggtcgtgtctgctgagctgaccaacgctccagctcgctgttatcgctaagtcccacgcaactgtgttgttctctcgtcgtcatcgttcattcctatttttcccgccatatgtcgcctcatcatgacgcgtgtcgtcgtctttaatcccaatagctcttacgatatgcgcctcgtcatgctttgcctcctcgtgatcagccccatctgggtcatgtgggcggaagatctcaacacctgtcagatgttcgacgacaagcctaaaccaggatttatcaacattctcacaagtattgagtcacgtttgatgctggtaagctagatttattt

SEQ ID NO: 42643 - DNA, 2064 bp, Zea Mays
gtacgtcagcgtccgtttcctcgaggctcgaccagtcgagcttgagaaaaatcaaagctcccacctacctcgagacccaggacgcgtggagagcggtgccaaaccaccatggcgatcctgctcctcttgctcttcgttttgtcctcagcttcagctgatgagtacggggaagagctgctgcagcgcgcgtggggggagcgggattggatggtgagcgtgcggcggcgcatccacgcgcatccggagctcgcgttccgggagcaccgcaccgcagccctcgtccgcgaggagctcgagcacctcggccttcccgcccgcgccgtcgccggaacgggcgtcgtcgctgatgtaggttccggggcgccccccttcgtggcgctccgcgccgacatggacgcgctcccgctccaggaattagtggagtgggagcataagagcaaggtggacggagtgatgcacgcctgcgggcacgatgtccacacagcgatgcttctgggagcagcaaagttactcagccagcgtaaggatcagctcaagggaacagtgagactcctttttcaacctgccgaggaaagtggtgcaggtgcatctcatatgataagagaaggggttctggacggtgttgaagccatatttgcaatgcatgttgattatcgtataccaactggtgtaatagcagctcacccaggacctacacaagcggctgtatgtttcttcgaagcaaaaattgaaggtaaaagtgggatggctgaaaccccacacttaaatgtggatcctgttgtcgtcacatcattggccatcctgtccctgcagcagcttatttctagagaagatgatcctcttcacagccaagtggtctcggttacctatgtgaaagctggaaaagcccttgatgctacccctaaccttgttgaatttggaggtactttgaggagcctcaccactgaaggcctttactgtctgcaaagaagggttaaagaggtagtagaaggccaggctgtagtacatagacgcaagggagctgttgagataaatagtaatgactacccaatatactctgctgttgtgaacgatgagaagctgcatcaccatgtagaggatgttggcagacgcttgcttggtctggacatggtgaagcctgtagagaagatcatggcacgcgaagactttgctttgtaccagcagctaattcccggtgttggcatcgaaattaaaaacaagaaagctgactccgtcactcagctcaccacccttatttcttcgttgatgaggatgtcgttccattcggtgctgctttgcataatgcagttgcagaactttatctctctcaggcttccgctctgtacgaaggaggggacttgcagtcgcgttgacgatcttgagttgaaaagatggttgaaatgtggtagaagggcaggcggctgtgcataggtgcaagggagctgtcgaaataaaggttgaggactacccggtgtaccctgccgttgtgaacgacgagaagctgcatcgacatgtagaggatgtcggcagaggcttgcttggcccgggcaaggtgagaccaggggaaaagatcatggccggcgaagacttcgctttctaccagcagcttgttcccggcgttatgtttggcatcggcattagaaacgaggaagctggttctgttcactcggctcacaacccctatttcttcgtcgatgaggacgtcattcctgttggggctgctttgcatgctgccattgcagaactgtacttcactgacggccccctctttcgacaaagaagactagtggtttctcgttcgtgcgtattttgtctggatcagtccgaacagatggcttcagctggccaatcagatctgaacatctggtccaccatgctgatcagccgcgctccgcggccagtatcaacctccaactatttttccctctgtaaccagaaacactacacatgtttctcaaccctacagtggtctagctattttattctctctttaaacagaaacactgcaaggttcctaaccttatagtgggatttagagcaacttcaccggatcgcttattatat

SEQ ID NO: 42644 - DNA, 1981 bp, Zea Mays
ttaagaaaagcaccagtggcatcgagcgcatcgcgcactcgtgctcgggctcggctccgtccgcgactccgccccacccctttccgtcagcggccgcaaccaccacaccaccacccaatggaggccggggaaatcggcggggcccttgtcttcatcctcgccgccgccgccgccgtcgcggccgccgtgtccgtcggcgcggtcgacttcagccgcccgctcaccgcgggggcgccgttcgacttccaggcggcggtgtcctggctcatcggcatcctcgacggcacgtcctcggcagcggcggacgtggacggggcgtgggtggcggtgcgggccggggtgatcgcgccggtgctgcaggtggcggtgtgggcgtgcatggtgatgtcggtgatgctggtggtggaggccgtgtacaacagcgtcatcagcctcggcgtcaaggccattgggtggaggcctgagtggaggttcaagtggaagcccctcgacagcgccgacgaggagaaggggaccgcccacttccctatggtcctggttcagatacccatgtacaacgagctggaggtgtacaagctgtcaatagcggcagcatgtgagctgcagtggccaaaggacaggatagtaattcaagtgttggacgattctactgacccctttatcaagaatttggtggagcttgaatgtgagcactgggtgaacaaaggtgtcaatattaagtatgccacaagaaccagccgcaagggattcaaggcaggagctctgaagaaaggaatggaatgtgactatgcatggcaaagcgaatacattgctatatttgatgctgatttccaacctgaaccagattttctgctccaaactgtcccattccttctgcacaatccagaagttgcacttgttcaagctcggtggtccttcgtgaatgacacgacaagcctgctgacaagggtacaaaagatgttttacgactaccacttcaaagttgaacaagaagcaggatcagcgacctttgccttcttcagtttcaacggaactgctggagtgtggcgtacaggagccataagagatgcaggaggttggaaggaccgaactacagttgaagacatggacttggcggttcgagcaacactaaagggctggaaattcgtatatgttggagacgttagagtcaagagtgaactgccgtccacttacaaggcctactgtcggcagcaattccggtggtctagtggtggtgcaaacttattccgtaagatggcaaaggatgttttgtttgccaagcgccgacggctgcctgtattctctacaatgtcatcatccccatctcagtcacaatcccggagctttacctaccagtgtggggtgttgcctatattcccatggtgcttaccgtggtcacagctataagacatccaaaaaatctacacatactgccattttggattttgtttgagagtgtgatgacattgcatcggatgagggctgcgatgactggactgctggagctagaaggattcaaccagtggattgtgacaaagaaggtggggaatgatctcgaggacactgaagttcctttgcttcagaaaacccggaaaaggctgagagacagagtcaatctccccgagattggattttcggtgtttctcttcctctgtgcatcatacaacctggtgttccatgggaaaacaagctactacttatatatgtaccttcaggggttagcatttctgttactagggtttaacttcactggcaattgttcttgctaccaatgatagcatgtcaaagctgtacgaattgctgattgatattcattttctggtcatgcgttcgtaatgtttcaaatggtttagatcttagatgcatagaaagatggcattcattattctgcacgcttgcagcgattcagatcttgtaatacaatactgtcttaacaaagctcaaaggaagggaatatggaagtcgcaattttcagaaagtg

SEQ ID NO: 42645 - DNA, 421 bp, Zea Mays
cgagcgccggcatggcgatacagaagctggagacgtcggcgttcagcagctccacgcgacgacgcaccacaggaaggaaaaaatgagttaagtagctgcttccgagcgcgacgaggaggatgctattcggcgagtgtagcttgaggatggggctgagcgtggcgccacaaagtggctgctggcgcgatgacttctagtcgagggagacgagtcggagccggggacctagagcatggcgacacttgttggtaggaggagctagggccgagcgatctgaaggtgagagccaagaacaggaagaacgagcgttgagcagcatccgtgaagagtgaagacctgcacgtcgggacaggggagatgagggcgctggagcaacagaggtgcgatggctgagcagctttgctagcgcgataggctgaga

SEQ ID NO: 42646 - DNA, 4162 bp, Zea Mays
atatatgccttcgttcctcgatcgtcagccgccgccagttcctttgccggttcgcgcaccacgcaacgcaagtgctcttcccttcttctctctcggttctcgccttctcggccctcctcctctattcttccctctcgtccacggccacaggctagccggccttgagcgcctgtgacggcgcaggttctggggttgcaacacgcccctccgcccttccggcgcatctgctgaattccactctcctcttgcccgccggcgtcgcctcttttctttgctatcgtcggcctcggaccccaaagacgacaacagcaggagggcagcgcacctgtgaaagcggcgcctctcttgccgttaaatttccgcgtcgcctggcttctcttccgcactctgctttcaagcccctctgccatgaccgtgcccaccaaagacgacagccaaagcggcacggtggccgacacagtgccattaccgacataccgttcgttagcagcgccggtgaggaagcctgtcgacaagttcgcgctcctcccggccttcctcaaggttagagggcttgtgaaggagcacatcgactcatttaactactttgtcaacaaaggaatcaagaagatcgttgaggcaaacaaccgaattgaagcgcgcaacgatccatccatttaccttaggtaccttggtgtgcatgttggcatgccctcggtacatgtagagtataacattgaaaatatcacaccacatttttgccgccttactgaccgcacttactctgctcccataaaagttcatatcgaatacactgtcggaaagcagcatgaagtgagaagaaagaataactttatcattggctacatgcctattatgctaagaagccatgcctgtattctgtatgaaaaggatgaagctgaactagcaaaatatggtgagtgccctcttgatcctggcggctactttgttgtcaaaggaacagagaaggtcattctaattcaagaacagctagcaaagaatcgtattattgttgacactgatagcaaaggaagggtgatcgcatctgttaccagtagcacgcatgcaataaaaagcaagacggtgatttttatggataaggggaagatttatttacagctgaatcagttcaacaagccaattcctattatagtggtgatgaaagcgatgggaatggaaagtgatcaggagactgtacaaatggttggcagggacccaagatacggagatctcttatttccatctattcaggaatgtgcttcagagagaatatatacacgccagcgagccctgcagtacatggatgagaaggtgacgtatcctggtgccacaaatcagaaggaaggtcggtcatactcaatcctccgtgatgtgtttattgcccatgtgccggttaaaaatgggaacctacgaccaaagtgtatatacactgccttaatgttaaggcgcatgatggacgcaatcgtaaattctgacacctttgatgataagttgataatgcaagattccattacctttggtctggaaagggctatttccacaggaaattgggatattaaacgttttaggatgcataggaaaggtgtatctcaggttctttcgaggctatcctacatggcatctttaggctatatgacgcggataacaccccaatttgagaagactcgtaaaacaagtggtccacgtgctttgcagcctagtcagtggggtatgctctgcccatgtgatactcctgaaggagaagcttgtggattgacaaaaaatttagctttgctttctcatgtcacaacagaccaagaggaaggcccactgatatatctgtgttatagtctaggcgtggaggatttattgtctctctcatctgaagaaattcatacgccgggttcatttctggtcatgttcaatggattaatactggggaaacacaaagatcctcagaggcttgttattgatttgaggaatttacgtcgatctaatgtaattggagagtttgtaagcatttttattaatgagaaacagcattgcgttcacattgcctctgatggtggccgtgtttgtcgcccacttataattgctgatatggggatatcaaggatcgatgagactcacatggaaaaactgaggcatggaacttgtggttttgatgatttcctgcgtgatgggttgattgaatatcttgatgttaatgaagaaaacaatgcactgattgcattgtatgagcacatggatcaagatgatgttgaaagaagcagcatcacacacattgaaatagagccattgagtatcttaggggttgtatctggacttattccatatccacaccataaccaatctccacgtaatacttaccagtgtgcaatgggtaagcaagcgatgggaaatattgcatataatcagttgttcagagcagattcactactgtacttactagtgtatgcacaacggccactgctaacgacgaaaactattgagttggtggggtatgataaacttggcgctgggcagaacgccactgttgctgtcatgggatatagtggttatgatattgaagatgcaattgtgatgaacaagtcatcccttgatcgaggatttggccgttgcatagcattgaaaaagtacacagttttaaaggataactatggagatggtgtatccgatatgattgttgaaccccaaagagataatggtgttttgattaaacagaatatgagagcgttggatgaagatggaattgccggacctggtcaaattattcgcaatcatgatatctatgtaaacaagcgaactcccaaaaacacttcaaaaggtattggtagggcattgagagaaagtgactacaaggactcacctgccttgtacaaaggtgttgatggtgagactactgtggtagatcgtgtaatgctgtgctcagatacaaatgataagttatccattaagtgtattattcgtcacactagaaggccagaggttggtgacaaattcagtagcagacatgggcagaaaggtgtctgtggtacgattgttcagcaagaagacttccccttctctgagagaggaatctgtcctgatttaatcatgaatccacatggtttcccaagtcgtatgacaataggtaaaatgattgaacttcttggtggaaaggctggtgtttcttgtggacggtttcactatggcagtgcatttggtgagccaagtggtaatgctgacaaggttgcagacataagctctactctaatcaagcatggtttcagctataatggaaaagatttcttgtactcaggcattcttggtcagcctcttgaggcatacatcttcatgggaccaatctactatcagaaactaaagcacatggttcttgataagatgcatgctcgagctagtggaccgcgggtgttactgacgaggcaaccaactgaggggcgaagccgtgatggaggcttgcgtcttggtgagatggaacgtgattgtctaattgcatatggcgcgagcatgctaatatttgaacgtctactgttatcaagtgatccttatcaagtccaggtttgcagaaaatgtggcttgttaggctactacaatcacaaactgaagacttcatactgttcaatgtgcaagaatggggaaaacatggccaagatgaggctgccatacgcttgcaagcttctattccaggagttgcatgcaatgaatgtagtaccacgcttgaagttaaccgaagtatgacagatgctgggactgtacaatgagagagatgctggattcgaaatgtgtttagagctatatgataaattaaagccctctttgataggggcatagggcttttttttttttgttaactggttcgagagaaaccacgtttaggtgtgtggtttcagccgtctagctagtctcttcgcgggcttctcttctcccgcggaggtatacaagctatcgccgggcaattgttgtatatatagttttttcccgatgtcatatatgaaggaatctggacctctttgtttagatgatcgctgaacgccctgcagggctagattacgatctttgaatgctgaatcattggcatgtgccattattattctagagtcactcgataacccaccctctatccagataattgcactgacgccccctttgataattacattctaatgatagtaatttgtgc

SEQ ID NO: 42647 - DNA, 2353 bp, Zea Mays
ttagcattgtgtttcttttataaggtaatgggggatcgatcaggcaacattagatggtgggatgttacaagtggcctttcttcttcttttagcactcacagggaaggcatcaggaggataaagttttctcctgttgttcatggtgatcgaagcagagggcgcatcgctgtgcttttctatgataatacattttcgatatttgacttggatagtccagatcccttggcaaatgcccttcttcagccgcagtctcctggtacccttgtcttggagcttgattggttgtcaacccgaacaaggaaggatgaaccacttatgttatgcattgccggagctgatagtagcttccgactgattgaggttaacattgatgctaagggcagttctatttcgaagccagtagctacgaaagagaggtttaggccaatgccattttgtttgccagtattatttccaacggcccatgctttggctttgcgaatgatacttcaacttggggtgaagccttcttggtttgaatgcaatagtagtgataaattaactggggacagctttaaggtagcaccaacatttggagatcttcgtagttacatgattgagacaacactccctcctattggtgacgccgttgtggctgaattgctccttaaagtgttggaaccatacagaaaggagggttgcattcttgatgatggaagagccagcctatattcagctatagtgaacaagggagcttgtgcaagatttgcatttgctgctgcgatttttggtgatttccaagaagcacttttctggctacagctgcctcaagctcttcgccacttcctgggtaaatccacaagtagatcaagagagaagatctcacaatcaagtttacatcctgattctgaacaaagctccagatttaatcggatagcttcaagagagagatctgcttctgaaaaaagttcaatctttgtgcagaattatgggcaattaagctcaatggcatttaatcaagagcaactatggttcaatgcaagtgaaaggataccttggcatgacaagctcgatggtgaagatgctttgcaaaagcatgttcatgagcttgtctctctcgggaacttagaggctgcggtttcattgttactttcaacgccacctgaaggatcaaatttttacccaaatgcattaagagcagttgtgctgtcatctgcagtctcacaatccttgcatgaacttgcagtgaaggttgttgcagccaatatggttagaacggacaaatcgctatctggcacacatcttctatgtgctgttggaagatatcaggaagcatgttcacagcttcaagatgctgggtgttggaatgatgcagctactttggccgcaagccatttgcatggatctgactacgcaagggtgctgcagaggtgggccgattatgttcttcgtggtgagcacaatatgtggagagctcttatcctatacgttgctgctggagcactgccagaggctttggatacacttcgcaagagccagcgcccagataccgcagccatgttcttgctagcttgccacgagacctactcacaagccttatcagaatcagagcccgaggacgacacttccgtgttagcactgacgccgacgccggagcagacggagaagctccggttcccttccaagaatgtggccgacgaggacctgatcgcagtcagtgaggtcttcgggcagtaccagcagaagctggttcatctctgcatggacgccgaaccgacgtctgactgaatcgcacgccttgtcgcatggcagactgatgcgggcgtggattctccgtttttgaagcttattattatcaacaggttgcaaattccttccaagtttctgcgaagctttttgttctgtctgttggtaggtaccagacgtccagacatgacatcgggactgctgatgtggcagaatctgatggcaggaggcaggaacagacatgcagtgctgtatcgtaggtgccaatggttggcactgtttatacatacgtaagcatttgtatttggtacaagctatgttttttttttctttggtgcgcaaagagcgagtgcgcagcgaacttctcttgtggccgagatgagatgagaacagatgccatcgaggcagcagcagacgatatacttacacctgtacacccatgacagtttttgtctgaagattggttattatatgcttatctgcaaatgcatcgcttcaggccctggagacatcgctgtcactggatccatcgtcattgccgatccgtgcagacattgttttggaggtccgaaagctacgttcttgtcgcattcaagccctccatgattatggatgatggataatgata

SEQ ID NO: 42648 - DNA, 1716 bp, Zea Mays
ttatgtatgtagatgatattctactgtctaactgtgataagaaactgctgctagaaacaaagaggtttctttccttgaagtttgacaagaaagacatgggagaagcttcctacgtattaagaatggcaattcacagagacaaacaaaggtatattaagacttccacagaaaacatacataaaaaatatatactaaagaggtaccatatgcacaagtggtaccatatacttcagctatcggaaacattatttatgctcaaatttgtactcgctctgacttagcatttatagccgggatgtttgacagatatcaagttaatctagacaaagagtactgaaaaacaattaagaaggctctcagatgtttacaaggaacaaatggcctcatacttacaaatagaaaatctaattcccttgagatagttgtgtattcagacgccgactagataggttgtgttgatacgtttaaatccacttttagatatatcttcacacttattggggtttgtttcttgggagagttaaaaatatacagttgttgcgtcatcgacaatgcacgctaagtttacgacaatgtatgagacaactgggcaaacgttgtggataaagaaatttgtacccagattaagagttgtggataacacgaaaaggccactaaaaatatattgtgacaatgagctagtactattttacttctacaataagtcaagtggattgtaaagtacattgacatcaatattatgttgttaaggagaagatcaaggatcaaagtattaaagttgaacatattagaatccatcagatgctagcagattcgctcacaaaagaccttccactcaacgtgtttagagagtgcatatctggcatggtattgaaggaaagactatgattctagatcaaggggctataagacaaccatctcacaagatcgaaaaaaattacccaaccttgaggtagagggacatgttatagtcaataagtttggtggcacataattgatctccgtaatatattgggtttgatgtgtaaaaggatggaacatagaaagttaaagaacataaaagatgagaacaaaggggagaatgttggatatgtccttgagagcaaggggctgagctaggatctcgcccacgcgccctgtttggagacacaaacttcccatggtaatgagacctctggttcataggtgcaaactgggggctaacttggaagcaaatgctcctgccaaccctagccgccacaatagaaaggatctgatctcctactagcgcccgagtgaccgaaaattgtgcagcctctctatgacgcccgtagaccctgacattttacgccactggccaccggcgcacctccttaaggtcccaacatgcaaagaggggaaatgaatcaggaggggagagactcaactctcagagtcatctaagacctcgtttgctactgcaacgagtcaccacctcagcactaaagatatggtttccctatctaccttctatattcgctctcactagtgtaataacttgtgtatcttttactctatacacaagaactaggacatgttctagagggattggttagttcctagagaaaaagaggccgacaaattcatcaagatccactagtggaactgctccactataaattctagatctagattctagtaaaattgtcccaaacatagtagaggcacatgatgaattagatattaaagcactaataa

SEQ ID NO: 42649 - DNA, 338 bp, Zea Mays
gtgtgtcctaaagaatccgaagagtccattcaagcacaagatcaaccatcttcttccatgcaagcatctccaccaacccaagataaggatcaagctcaagaggatggaaatgaagatcaagaagatgagccacctcaagaggaggacaatgatcaagggggagaagccaataatcaagacaaggaagacgatgagggtccaagaccgccacacccaagagtccaccaagcgatacaaagagatcaccccgtgaactccatcctcggggatattcataagggggtaaccactcgatcgcgtgtcactcatttttgtgaacattactcctttgtgtcttc

SEQ ID NO: 42650 - DNA, 1874 bp, Zea Mays
agaatttttctatggacacacgaagagtccgcaaaaaataatcaactcgttttttttctttctccgctcctccgagtgaccgagtccaaggcttcgttctgctctccggctctcccgcatccaccccgtctcatccccaatccgaccacctcatccctcgcctccatggccctacccctcgcgtcaccggcgggggcatgagccggtgactgctcacgcggcctcgtctgtctgcgcacgcgcgcggggtcggcgagtgagcattgcggcggtccgcgatcgcccgtgggggagcatggcgtcggcggcggggtcggccggcggggccggcgcggggtctggcgggctgaagacctacttcaagacccccgaggggcggcacaagctgcagtatgagaagacgcactcccccgccgtcgtgcactacagccacagcggcaagaccgtctcccagatgacagtggcatatttgaaggagaagccagcaggccagggttccacgccttcaacaccaagtgctggtagtgggatgcggtctgcagctgcaagacttctcggcactgggaatgggagccgggcacttagcttcgggagcaatggtaccagcagggctgtctcaggaagcagccgcatgggtggaggaattggtgtgtcgactagtgcaagtggatcgcaaggcatggcaaactatgatggaaagggcgcgtacatcatatttaatactgcagatacactcttcatcagtgatctcaactcacatgacaaagatccaataaagtccatccacttcagtagctcaaacccgctttgccatgcatttgacccagaggccaaggatgggcacgatctgcttgttggggtgttctcaggagatgtctattcaatgtcactgaggcagcagctgcaagatcctggaaagaagcccgtttcatatcagcattttgttaatagagacaaagataaagacaaagatccaagtcaaggtggcgctgccagcagtcggagcacttgtgttgcatgggttccagagcgtgaaggaatttttgttgttagtcatgctgatgggaatctgtacgtgtatgacaaagtgagcccttaatgctcatggaactttgtatgaagtaaccatactttgttaaatttactttgctgataagttttcttttctacattcagtgcaaggatggaaatactgattggacatttccaactgtaaaggatcaaagtcaggtgctgatttcacatgcaaagtcgagtaaagcaatccaattgcaaggtggcacatctgtcaaggtgcaatcaatgacatttccttttcaccggatggtgcttacttggcaactgttgggcgtgatggccatttaagagtatttgactttgctaaagaacaactaatatttggtgggaaaagttactacggtgcactgttgtgttgctcttggagtgcggatggcaaatatttgttatcaggtggtgaagatgatcttgtgcaagtatggagcatggatgatagaaagatagttgcatggggtgaagggcataattcatgggttagtgcagtttcttttgatccgtattggtccccaccaaattctgatgaaacggaagaaaatgtcatgtatcgctttgggtcaattggacaggatacccaactgcttctctgggatctggcattggaagagattgctgtccctctacgccatccgtctggtggctcaccgacattcagtagtggaagcccatctgcacagtgggataatgcgtgccctccagccggtgttctacagccttctccacggatgcgagatgtgccaaagctctcacctctcgttgcacaccgggtacatgtagatcccctatccggcctggaattc

SEQ ID NO: 42651 - DNA, 356 bp, Zea Mays
cacgcatcgcagattcgtagtacacaactctaaggtatcataattcctagattccaaatctgagacggatgttgatgttgactataacagcttgtactcaaagcagggctttctacagggtcaaaggtcagttggaaaacatacctctgcatcaggccttatgtccagacgagccattgctggtgcgcgcggcgcggggcgaggatggcatcccacattggatgatgcgacaggcagggcggtacatggcggagtaccaggcgtcggctaaggggaaactcacattcagccatcgggttcggggagctcccagctgcgaggttttgaggtacatcgccattgtatgttttctacaa

SEQ ID NO: 42652 - DNA, 429 bp, Zea Mays
tttaattcgagtttggcacggtggtgtgccgtattggccgtacgccggtgatgctacgtcgtggggcgcaagcgcaccgtcgctcgaccaccgccgggttggttgatgaacacaggtcgtcggattcggatctaatgacatggtttagatctgcatacccctttggcttgggcgccactcgaccgttgatcacttgtgctatgatcgggattagattggcgatagcgtttatgatgggatgatgtggaccgttggatccaccttaggcggtcaagattagatcgttggggtgctgttcggttatattggatccgggccatcagatcttgatctaagggtgggcactacgtaccggttcggggaaggactcgatataatccgtgctgaccgcttttgatcgggcggccgtgatcaaactgtacccattca

SEQ ID NO: 42653 - DNA, 532 bp, Zea Mays
gtatagcgggagatcttcgcaagttcacacagcttcgtggtaactaattttgatggcgatccacgttatttagcgctatgtttgtttcttttgtgtgtttttgtgtgcaatcgtggagggagatttgatgctgaagccgaagccagcgcgatgcttcttggttgttcgatgaaatggtcgagttgagtattagtaaactatattagctacctctgttagcagagccattagatggattggctaagtacgttgatttgatcatcttgtttgccgtataaccatagtggcggtgttagatattggttaaactgcttcatatatacggggtatggtttagtaaatattgtgaagaataaaattggtataccaagtgattagccgattactcctgttgttatgggtcgtattaatatatttaagtagtgaagtgatatcttgccatactagtcgtcgtattttgtatttgttacccgggtacctgtcatatgtacgtgtttgttgttacccaaaatggttaaattagaatcatcag

SEQ ID NO: 42654 - DNA, 2994 bp, Zea Mays
cgcggttctccgccgtccgtttcgtggctccggagatccggcctcatccgccccgccccgcccgcctcccggcctcgtcgtctcctcgtccccccactcccgtctcgtccgctttctttaatcaatcctccgcgccccacaaccccaagcaactcccactaatcgtcccctttccttccctttcccggcgggggcaacaatggtcggtgacggcgatcggtttgctgcatcggcggttcctgcggcgccgtgcaggtttctcggtcacctgtgagctcgatttgaccgcccccacctggcgtcgtgctggttccgttctgggtattcttggcgctggtctgggctctggggcgatcgggacacacctccgctctgcttatcgagggtcgaggcacccgacgatcttctccggaaaagcgccctactcttcataccatcaggtagggccatatctgaacaacttctgagtacagtgagtgtcctgataaacagatatgtaactatgatgctgtttttgtgatttggacttgcattatttttctgaaagttcctgaaagatatgtttagaaaatgtgcatagttctgtgacggtggatggtggattggtggtcatggaagggacagtaatcagaatagctagtgagtcaaaacgaggcaatgagcaaacagactctttgacagaggaatggagtttgagtctgaagatgctgcaagggatttctacagcacatatgcaagaagtgcaggttttcggattcggatcagcaggtatactcgctcccgacgtgataattcagttatttctcgtcgaattgtgtgttcaaaagagggatttcatgaaacccgtgcttgtgatggcctccatcctgaacaaaaacaacaagaacgggcaggtactagagttggttgcaaggcaatgatattaattaaaaagtttagtcctggcaagtgggtggtaaccaaattcataaagaaccataatcatggaccagttccaccaagaaaacttgattccagactagtagaccaggactgtgatccaatggagaagccacattctattgaggtggaccctgttgaggagccatttgagggcatggaatttgaatcggaagaagctgcaaaattgttctatgtaaactatgcaaggctaaatggttttcgtgcacgtattagtagatattgtcgttcaaggcgtgataattcaattatttctcgccagattgtgtgttctaaggaaggcttccgtgaagttcggaccaagaaagtgttgacagatgaaggaaaaacaaagcgcccaagaatgataactagagttggttgcaaagctatgattgtagtgaaaaagatgaactctggaaagtggatggtttcgaaatttgagaaggagcataatcattcgctgtcatattctaaaatggtccctagtacctcaaacattacttctggagaaattgtcgatttagctgcaaagggtgcacatcctagtgaagtaaaaaatgaaggatacagtgcaggaacccaatgtaatcctgcagattccctcactatactttataacaacttatgccaggaggccataaaatttgcaaaagaaggttcagtcacagaagaaatttaccatgtggcagtttctgccttaaaagaggctgcagaaaaggttgctgaagtcaaaaggagtcgtccaacattgtcacattgtggtttcgttagagaaagcaaacatgatgtcttacaggagaaaagtatgagtgctttgcaatgttcaaatcaggttgaactgacaagaacatctcctgggtccaggcctcttcaagattctgcatcaaatcttctgctgataccaaccgacattttgactgattcaaggttatatagcggtgtcgatactgctcctctaacaggaggtttccccacaaatggtaaatatgctatgagagtgaaagtacacatgcatcagaaagttcttttatgcattttaagaacacaaagaaaacctcttcagaaaaatctcagaacacttgttttaatcaactcatccatggaaaggagcaaggtatccatggatcttctaaagataccatggttgctattcctgcgatacctcttgcactgtgcatgcctgtgacgcagagcttacctggatcttctacagaaggaccatatagattgttggctgcacctattgaagcagttccaatttcatactgccctgcagaacccataagacagacacaaaaaggtatttgtgctttaggtccatttggaggtgttctgtctgaactgaagaaccaaggaacagtccccaaatctatagttcatgctacagctcttgcttgtggtgctcgtgctgttcctcttgaagatgcagcttcgcttattagtgccattgaatccaaaatcagatctggaggggccataatagcgaaacttccttcaaacaacctagcacctctagttcctccagccattgctatgtcatcttctagtgaagatgacgaggagcatgaccacagtgagccctcgcaatgatcgatgtcgatcgcaacgttaatcatcagagctccaacgcgatgaagcttcagagggagctatcggagttcgaaactgaagctggcaactgacctggtctgaagacgaaagaaaatgatcatactgattgctaacatacgcgaagtgaaggactgaagttgttctaaagatcaaagcttccctgaaaggtggcagatctattctatgatttgagacattttttaaaagattggattaggattgtagtcacttgtttctgttgagtttatattgtaatcagattaactcaagttaatacctccagtggagaattgtagaaaggagtaaccatgctatgtacatgtcttctgcataaaagaaaggcgatagagtttaaaatccagctgtgctaaacatgatgttcataacctgaggcacccgtgtaaaactactagcgcctaccacattgggattggggtacag

SEQ ID NO: 42655 - DNA, 2181 bp, Zea Mays
agccaacaccctaggaagcattcctgcatctaaaaatctctcatggtgaactcatgtgcacctgcagcatttcttcactcttctgcatcctggcaagctttacttgtcttttttatttctgtgactgcagttggtgccgcagatgctggaggccaagatgctggtggccaaggtccgtgtcctcatttctcctgtggtgatcttggcaacatatccaaacctttccgtaggccaggcgacccagaagagtgcggtgtaaaagcatacgagctggtctgtagcaacggcaaggctacaattcgcatcaacacggggacatattttgtcaccagcatcaactataccaatcgttccttctgggttgtggacgccaatttggatatgcacagcagctgccctcttcctcgttgggatcagtttccttacacttctgagggattgttctggagaagtgatatcatacaagtggtaaagaagggattttctgttggattcccaaaggacgaatatgattatagctaccataatacttcttggatattcaagacatgcctaaataattttaccaggtacttccacgagcaattgtctagcggaggcatcgttggtataactcgtgctttcttttggagtgatgtatttcttctcaagtgcgcagagagttacaatgccacaactgttattttagatttcgatgtgatatccgtagtgactggtgttaaaatcacaacgttacttgtactgttcaggtttgtgttcacagcactagcagtacagatgttccttgcccacaagtactggaaaacaacgatagcaattgacgctgtcgagaaattcctccacatgcaacaaatgcttggtcctactaggtttgcctacactgacatcactgcgatcactggccatttcagagacaagttgggtcaaggaggatacggctccgtatacaagggtgcactactctcaggcaatatgcatgttgccgtcaagatgctgggcaactcgaactgcaatggggacgagttcatcagtgaggtctccaccatcggtaggattcaccacatcaatgtggttcgccttgtgggcttctgtgcagaggaaatgagaagggcactggtctatgagtacatgcccaatggttctcttgacaagtacatattctcggccgaaagaagtttttcttgggatatgctcaacgagattgctttgggcattgcaaggggaatcaactacctgcatctagggtgcgacatgcagatccttcactttgacatcaagccacacaacattcttttggacagcaattttgtcccaaaagtttctgactttggccttgccaagttgtacccgagagacaagagctttgtgccagcaagcgccatgcggggaactattgggagggcgaaggaacgcagaccaaaatgcagccaactcaagccgagcatactacccagcctgggtttatgaccgcctagcggaacaagacgctggcgagatttctgttgcggcagacatgcatgagttggagaggaaactgtgcatcgttgggctacgttgcattcaaatgaagccgcaggatcgtccgaccatgagcgaggttatagagatgctcgagtgtggcactcatggcctgggcctgcaaatgccttctaggccattcttctgtgatgatgatgatcctaatatgcctgcagcagattcttaccatttctcatcggagcttactgcaatatctgaggaagatggttgaagaaataatacatgtctttatgcattcagatgaagccacatgatcgtccaatgatgagtcaagtcgtagggatgcttcagtgatcatatggttcatacagattcttaccatttctcctcagacctgaatgcaattgtaacacccgggtttcggggcaccaagacccaggcgcgaacataatcaccaggtgtgctgggaccaagtctcacacatatgatgaatcatggcacatgatcgaatgtcacatatttactatataataggagttctatacaaaataattaattaattacattataaggagacaacggtccagcaacccaaagttgactgggagacgacggcctagacctctcacgaacacatcaaagcatccttcatgtgcctcatcctgcggtacctgctcttgacgtgtggggggtgtgagacag

SEQ ID NO: 42656 - DNA, 2281 bp, Zea Mays
cgggctttgagatttccagtttagggttttgctttatgctggttcatttgtctacggacaatggactagttgctgcactgtttctgtgattcaccatgggaagcagtggagcagatacaccgtctaaggagcagcagccacctgctacctcaggtgctgcaataccacctgtttatccagattggtctagcttccaggcatatcccccaatcccaccacatggattcttcccctcacctgtggcatcaagtccacagggtcatcctttcatgtggggagctcaagctatgattccaccttatggaacaccgccaccatatgtcatgtacccccctggagtatatgcccacccatctatgcccccgggtgcacatccatttactccttatgccattacttctccaaatggcaatgctgatgctactggaactactgttgcagctggtaatactgatggcaagccctctgaaggcaaagataaaagtccaacaaagcgatccaaaggaagtttgggcagcttgaacatgcttactggaaagaatcccagtgaacatggtaagtcctcaggtgcatcgggtaatggagtcacttctcaaaggtatttttgctgtaaccttaaacaccttatattcttgtgtgcatccgtctttaagtatatcagtgaatgagttgctgtttctctttgtagtggcgaaagtggcagtgacagttcaagcgaagggagtgaaggaaattctcacaatgattcacatcacaaggaaagtggacaggaacacgatggggatgttcgaagttcccggaatggtgtatcacgtttgcaatctgagggaaaattgaaccaagctatggcaatcttgcccataccatcaagtggcccagcaactgatccaactacaaacctaaatattgggatggactattgggccaacacagcaagctctgctcctgcaattcatggcaaagcgacgtcaacaacagttccaggggctgtggtcccagcagagcagtggacacaggatgaacatgaactcaaaaagcaaagaagaaagcagtccaatagggagtctgcacgtagatctaggttacgtaaacaggctgaatgtgaggaattggctcaacgtgctgatgttttaaagcaggaaaatgcttcacttagagatgaagtaaaccgtatcagaaaagagtacgaggaacttctatcaaggaataactcactaaaggaaaaacttgaaggcaaacaacacaaaactgatgaggcaggacttaacaacaagctgcaacattctggtgatgacagccagaaaaaaggaaactaatgctatcatgcaatgcttgcctacattggtcctaactagattattgggaggtgcaattgtagtatgcacattaactccttactttattgcagttaattgttaccaggttgtgataatgttgatgccaaccttttgtgtgggtgtttcctgtttcagatctatcttggcttatcttttagaagccaagatgtgactgaagctataggctgtgacccaattcactatatctgttagaaatagtggataaagtcaaactttcaaatttgaagtgctgactaatattgttatgtatacctggcaaaagactggtttccttttaattcagtctggttgaacattttgctgggctttcactactgcctagtttatgtacattgttgttcatatcggttgttcctagttattttttgtaataattaacaaatagatgagggacactgtctcaacctctgcaccaatatatatatggacacacacacacacacacacctcttttttgcgtctattttctgttttacttcaaagtttgcaggtttgtttcagccctgtttgattgtgagccttggcgctggcggtattttttttaagtttaaatgatccacctgctgtaggtaagtttggttaaaagacattcctatttttctgtttagtgacactgatattagtaatccttttttttcatccatctatttaagtgtcagcagaatcgtttgttaaacttgctttcctgaacttgctcttgattctggtaagtttttgggctcctggcactttacttttatgatcttattttgatttgctttttacaggaaaatggttctggactatgtcttagatgggaagcatagttcattagtatgtctgccttacaggttcttaagcagggatcgtggaagaacctgtgttgggaggtggtagagaagatgtgccaatgattggtttttggtcaatgtcttctctggtgc

SEQ ID NO: 42657 - DNA, 848 bp, Zea Mays
gtccttggcgtgcgttgctccagctcccgcgcgcacccaccgccctgctcgacgtcacttgcgccctggtttcagctcgcccagtacggtgctcctccctagcgcgtcgcgttcttccctgtccctcccatggcgctcggcggtcctcacctctgctccgactgcgcgccgccgttctccctgcgcgcagccacgtgctccaccgtgccatgctccgtagagctcgcctagcccctagctccgtacatgtgcgcgctgtgcgcgcaaccgagctcctccctgcgtgtgctgcgcccagccaaggttttcccctgcgcgcgccctcaaatcgtcgtgtgcccagcttgccggtcaagctgctccctcgcgctcgaatccggtcattaatgctcagccatgtgttttttccccagctcaggcacttgagtcgccgtccttgacgttcgttgatgcgcggcttgcctcggcctaggtcgtcgtttttcacccagcagctcgtcgtgagaccgggtgtcgagcttctttcttcccaacaaacgccggacctaccctgctcctgtgttcgccatcaaccttagctcgtcagtcacgctcgccagatattcgatcgaggacttcagcgaagggctgttatcgttcgtgcaaatatcgaatcaaattgcgatgtggtaagctaatttgttatttttgctactggttcgataattgggttaaataaatttattaggtatgttagttctcttatcaatagcacccgagcgttgcaattgtatttaatgattgtcaaaatatctcctcatatataatgtgtggttatatacatgaatgggggtagacgcagtgtgcgg

SEQ ID NO: 42658 - DNA, 1826 bp, Zea Mays
tttatagaacggattttgaaataagaagtgagatatatagaatataaggggcacagtcatcaaaaacaaattcgttcgaaaaaacggaaaaagcacgaatcttaccgcaacacagaacagaccgcactttctctggcagaccgtgttctcccgctccgatccgccagagcaaaccctagccaatggacgccgccgccgttcacaagcgcaagcgacctgaagaggccgacccaagcgcgggggagctcgacctctccgccgccgacgccgtcgagactccgagatcgcgctccacgccgagaccgaccgcctccgcctccttgccggcgcgcctgagctcttccccgacctcgtccccatcggcctcgcctcttccctcgcctcccttctcacccacgacaatgtcgatctcgcagctgccgccgcatcactcctcgccgacctcaccgactccgaggacccctccgacctcgccgctgtccaggccctcgccgacgcgctcgtcgacgccaacgcgctcgacctcctcgtccacaatctctcccgcttttccgagaccgaccccgatgaggccgaggccgtgcacaacaccctcgccgtcctcgagaacctcctcgacctccgccccaacctcgccgacaaagtctgcggcggaaccaagcttctacgatggctcctctcgcgcgtcaaggcacgcgagttcgacgccaacaagcagtacgcctccgaaatcctcgcgatactcctgcagaacagccccgccaatcagaagcgcctcggccagatcaacggagtcgacgccctgcttcaggcggttgccatgtacaaatcaagggacccaaagacgtctgacgaggaggagatgctcgagaacctcttcgactgtctctgctgcgtgctcatgccccctcgattttgccatgaccaagttcccgcctgcgtgcgaacgatttgttgatgtgcttggccttaagactgcttttgcggccttcatgggcaagattcccgtgaacaagaaaaacaagaaagagagttaccaggaggagctagaagagcgtatcatttcacttattgcttcattgtttggctcacgaaggatgaggctactaggaaaatttgttgagaatgaatgtgaaaagatagaccgccttatggagttatacacaaggtattcagacagagtgaaagaagagactgaaagacttgatagtcttgatttggaagatttagagatggacgatgatgagcggtataaccgaaaactcgaagctgggctttacacactgcagttaattgcgcttattctgggacacatctggcactctgggaattcccagatgagagcaagagtagaattacttcttaagcagaacaaacttacaaagcaagatgtgaagagcatacttgaggagtaccatgacaacattggagatttggatggacctgaagagaaggaaagagcacaagtgcggaccaaggaaattattgacgcgttgtgatgtgcatgggcctagggtagttggttgtggagcaagacagaggctggtagatattttgagtatgttgagtgaatttatatccgcagtcagcaaagctgtgtaacttactaggttgtagatgatggatgtcagaaacaagggtgcattaattagttctgttgtattctatttttgtgtaaacttgctagttactatttgtcgttatatgctttgggaaggaatttgtaacacctcaaaaacttaacttgggaatttagtaaaattctccaaagaaaataagagaatgaaatatgaaaatagaaaataaaatagaaaaggaagtaagaa

SEQ ID NO: 42659 - DNA, 3199 bp, Zea Mays
caccgggtggaagtggaaatggctttcaatagctagcgggtcggggcggttgggttcacaatgcgggttagggcgggtcgggctgggttaccctgggcacctcgggtcgctctctgctgttcgctcccagctcccgcagaaagagaaagacaacgccgccgctcgccgccgtcgttccccggcgacctcctccaacgaagtccgttgatccagatatggatcacttggacgaacatgacagtgatgacatgaatgtaggggtagcttcagatggcccctccagactcagaaagaagaggtccaaggtttgggacgactacaagcccatcattgtagatggagcaattcagagcgcggaatgtcgctactgtcatattcacatgagttgcagaggtgctgatggtcaatccaatgggacaagccatttgtggcgacaccagaaaatttgccgagcaaaagatgggatttttccaaacccacttcaacaggacgcatacttgccatatgtggtgaatgaagtagacccgctggaccaaattcttccagattcacttgatgagattaatttagtgactcaaagtgagaatagcaaattcaggtcaaaggtttggaaggattttataccattctatgttcgagggagagtccagggtgctgactgtgttcattgccacaagcgattcagtgcagataaaggtagaagccatttgaaccggcacactcaaacttgtccggcacggagtggaaatagcctaaatcaccagaaaggtgtgttgtaccagtctagtctaccgagttctaaatctagctttcaagatgagctttcaccagcattgacaaatggcaaagttcagattgcagaatatgctagtaagttcctcaaagacagccgaggcgatgcaagccttgtggaacatcatgttctagctttaccagcaatggatgatatgaatccctcagagcagaatacttcatcagctcaggctgctactgatataaccaggaaacctgaccaagaagcatcttatcatgagttaactagaatgattatttcacatggctatcccttgtcgattgtcgagcatgaagaaatgagaaggtttgcaaagatcctaaaccccacatttaacatggcttcaagcattgatatagaagagtattcaactcttttgtttcagaaagaaaagtctgagcttaaggaaagaattgcacttttgtcccatcgggtttccttgtcagcaagtgtttgggttcctcatggagctgaagcctcagtaaagtatctctgtttggcagtgcattttgtagattcaaactggaaacttcaaaggaaaaccatcaaatttggtgtgttctggtcctcatctactagtttggaaaggatgatacagtttaaggaggcctgtgtgctagattctgatattggaccatttaatgtcatacaggaagctataagagattggaatcttgatcagaagcatttcagcttgacatctggtagtgaaattagaaatgacgaggggacctcaaaactgatggacttgctcatccaaaggaaatgccttcctattagaggcaagctatacaatatcgcttgtgtgaatgatgtgcttaacggcattgtctcaaaaggtcaaccggtgctttatcatgttggtaacatactagagaaatttattcaggcacaaatgtcctcatctctgactcgacagcaacttctagaagttgttgcacatatgggattgaagtgcccacaggaagaagctaaatggtggcacataatttactttaggcttgaagttcttctgcatttcaagaaggcatttccctcggaagacttgttatctgcagaagataacaaaacttttgagtctgtttgcaggatactcagggctttttatcgcgctgttgaagtgatttgtggtcctgtttgccccacagcaaatatgtacttcaatgaactgtggaaagttagaactgttttgcaagaagaagcatcaactgatcgtgctgcacttgctaacatggttttggagatgctggaagcattcaatgagtattggaaaaattcatatgtgtggctgtcaatacctgttgttcttgatcccagattcaaaattacttttattgagttccgtttaaagcgagcttttggtaccaatgcagaaaaacatgtatctgccattcgtgatacaataagggagctgtttcatgaatattgtggactttcagataacttgggtgccgatacatcaactcgtgaagctcatgatgttgagttgtatggatttgacagtgattcattggaagattgggatgagcatcttaatgcacagacaaggaaccaacaattgacagaacttgacaactatctagaagatggtcttgtcccaaggaaggatgattttgatatcctgaactggtggatgagtaattgtacaaagtatccaaccctttcagttatggcacgcgatgtcctggcgattccagcttctgccgataattttgaggctgcgttaagtggtgaggcaaatgtgatacataagcaatggagtacattaagtatcaaaacaattgaggctcttgtatgtacccgagattggggtaaatagaatgaagtttacaagcagttcataaccatagtgcttctaacccgggaatacaggatgatacagaaagagtacaccagccatttattgtgcagtatatcagacatctcgcagccaactgtgccaatgacgtgctgctgctttagcctgattgagaattcttgtacaacgtctctagaaagccatttgatgactgatgttctgttcatgttatcctggcgtgctggatgtgctgtgcccccttcaaaagctgaattttggggcaaccaccagtgctcaaatttgatctacgggtcctgtggctgacatcaccatgaaatgattgctggcttcaaatcacatttaggacaatgtggttggttaaacgttgcattaatcttgagtagcatatcaatactgcaaaagagcggaagaattagaatacctttcgctcaaggtctatattcatataggaatgtaaatattactgtcaccagtaagacatcttacaccttccttctgttcaaatcaatagatgcccattccgctggcaaacttttttctcactgaactctaaagtctcaacgtacccggcctgcctgtgattgtgg

SEQ ID NO: 42660 - DNA, 1867 bp, Zea Mays
atggggaagctctcctccgtgggcagcaacttcatggcgtccgctggcagccgcagcaccagcgacggccaccaagaacttccgtccggacagcgtcctcggcgaaggagggttcgggagagtctacaaagggtgggtggatgagaagaccatggcgccgaccaggaacggcaccgacatggttgttgcggtcaagaagctcaactcagagagcatgcaggggtttgaggaatggcagctacagatgcagttcaatttctgctcatacatcactaatgcagagagcttaaaagaagcacaaaagattttgaaggttctcctgaccactgcacccgttatgtatatgatcgtcgacggcgtttctagctcctggtaagggagggaggcaggcagggtcgttcccacgtcagagcaaaactcttgcaccaagcctccaactccaagccaccatgtggccgaatttgattgctttttacgctacatggtggttgactagtcgtgacactagcctgctcatgcaagtctctaatttctttggtccttattttacagcttctgtttccaaattcccacaccgtgtatcttttctgcttagcttcaagatagatatatcccttcgctggaggtagccatttgacagtgccaagttggattcaggtacatcaagtttgatacatttactcctgcagctgagcgggggctcccggtcacaagggtcattagtcgcatgacgctgcaacagatccttgctcgagcagttgggtatgacgctatattgaatggaagccatgtagtcaattttacagatgatggcagtaaggttactgccatattggaggacgatagaatatttgaactgccatattggaggacggtagaatatttgaaggtgaggaagacactattcgggcactcagatgccacctattcaggttacacctgctacactggaattgcagattttgtgccgcctgatatcgatacggttggtgagagtgcaaatgagtacacagatgatgaggatgcaagctggaaagtccgtagggcatcatcaaagtgcctatctgcaattatagtgtctcgtcctgaaatgttggtgaagatgtttctagaggcttgtccaaagttaattgaacgatttcgggaaagagaagagaatgtaaagatggatatatttaacaccttcattgagctgttacgccaaactggtaatgttacgaaaggacaaggcgacatcgatgagtccagccctcgctggttgctgaagcaagaggtccaaaagttgtcaagtctatcaacaggcagttacgtgaaaaatcaatcaagacaaaggttgggacattttcagtactgaaggagcttgtggttgtattaccagactgtcttgctgatcattttggatcacttgttcctgggattgagaaggctttgaatgacaagtcttctacctccaacctgaagattgaagcacttgtattaacaaggcttgttatggcttcacattcgccatctgtgtttcatccatacatcaagtggatgaatatgcctgatcttctggaagttatagatttcaaggacacttttcttgatgccaaccatgttcagcaaagttttccagactaccaggagatgtacgaggatgcaagacaagtggcgactgatgctgtcggcagtatcggaactgtggcgtcgttctgtgtagagaaaagagtggtcgcagcgtacagggacaagtgtgaggctctaaggaaacagggcatccgaatgagaattttttctgcgtactggaattctggttctgatttcagcgtacaggcatgcatcagcagagcccacagacctgcattgacatgacaagagtccctcg

SEQ ID NO: 42661 - DNA, 1159 bp, Zea Mays
ggtgcgtgcctacggcgcgtggcatcgtgtgacttgggcaactgacactcctccccgcgacgccgcgccgcctgcccggctgccatccgaatcccatgtcgtcgctgctcctcctccaggccctggctccagccatgaccgtcccccgccaccatttcctcatctcccctctccgcctcgcctctgcagccacagttccgttcgctcgacgcttctccaacgccgcttccagcaacaagccggagccactcctctcggaaccggatctggagtcaggtctgtatcttgtgtcaacgccaattgggaaccttgaagatatcaccttaagggcactgcgtgtcctaaaatgtgctaatgtgatactatctgaagacacaaggcattcaggaaagctacttcagcattacaacatcaagacacctcttcttagcttccataagttcaacgaacgggagagagagcccactatcttaaggaggcttcatgaaggtgaagcagttgcactgataagtgatgctgggacgccaggtattagtgaccctggcatggaactggctagactatgtgcaactgagaaaatccctgtcattcccattcctgggccatctgctgcaattgctgctctttctgcatcgggtttgccatcaaatgaattcacatttgttgggtttttaccaaagcatgctcggtcaagaagagataggcttgagatatctgctcgtgaagctgctacacaaatattctatgttcctccccatggcattcagcagtttcttgttgatgctgcttcatcttttggcgattccaggcattgtgtggtcgcaagggagataacaaaaatacatgaagagttttggcgtggaactttaggtgaagcaaatgaagcttttgcaactcgacaaccaaagggagaaataacagtgctcatagaggggaagttaatttcagatgacgaaattccatcagaggatttccttgagcatgaactaagagaattgacggcaaagggatatactctttctgcggcggtgaaattggtcactgaagccacatcagcaaagaagaaagatgtttatgcactcgcattgaggttgtttggaaaataagtaaaatggaatttttggtcgcatctgctcatgcataacctcatgcagtacaa

SEQ ID NO: 42662 - DNA, 1347 bp, Zea Mays
acttcctcctgacctttttgagtctcttcttccacccggcggcagcgggcagcgcaggcgagcagaccaagtcgcctgcagagtgcagactgcagatacagtccgtgctctgacggagcaacaggagaagcagagcgagccgaggcggagtcgacagcttggtgccttatcatggaggaagcggggaggggctgcggcttgctcaaggtggttgtgacgcacggccggaacctagccgtccgggatttcacgtccagcgacccctacgtcatcgtccacgttgccgacaagaccacaaaaacaaaagttatcaacagttgcctcaatccagtttggaatgaagagatgacattctccatgaaagaaccagtaggaataatcaaatttgtaagtttctatgccgacgaattctactctcgtcaaaaaagcaggattcaggacctgtttggatcagtacactaactgtccatgaatatggatcaatacactagcattgacaatctgaaatctgtggtgaattttcttgttcctttttctcagttttcggtctctctgaattcaatacattaactgtccatggactgaaatctagatctctaaacttgccaaattaatacactgcctatgttatgtgtttgcttacgtgaccaacatggacaccgatcagtgggctcaatattgtgatagcaattgttctcacagcgatcgaaggaaatgtttgcagttaaagtgaaaaaataatagtatgacacttctattacttaacaatattaagcccacggatctgtttcctgaacagaacgaccatcacctttggcaggaggtgttcgactgggaccggttcaagtacgacgacaagatgggccaggctttcctggacctgcagcctgtggcggcggcaaccaagctgcggagggcgctgcggctcacagctggcgagaccaacctgcggaaagtgaacccggacgccgacaactgtctgctctcagatagcttcgtgacgtacgccaacggggaggtcgcgatagatgctaggctgcggctgcgtgaggtcgagtccggcgagctgttcgtcactataaagtggattgaacctgacagcgccaacactggaaagcaagcggatcactagctagcgatgcattttgcttgcagcactgcaaatatgtaatatgacctgatgtgggctgatttatgaggattttttttaaatcgtatatttttattatcaattacaatgtagaaggtgttgtatgagaatttgagatgcatcatgtcggtcatccagtgcccgacgtgtcacctattagcagcggctatcctataacaacgcatgttttagacatt

SEQ ID NO: 42663 - DNA, 254 bp, Zea Mays
cggctttgggacccccctgtctcgaaacgccgacagtcggctcgcccgaggccttggcttcgctcagaagcaaccctgactaaatcgccacaccaactgatcgagttgcaggagcatttaatgcaaaggtggcctgacacctttatcctgacacgcgcccccccggcagagccgacgtgaccgtcgtcactccaccgctccactgaccagtctgacagaaggacagcgctgcctgcgccactccgactgcggtg

SEQ ID NO: 42664 - DNA, 1904 bp, Zea Mays
gctcagctccgccgtgcgcaaatgtggttccgtcgccaagccaccgtctcgatcttgctgtgcaggctgttgtgttgtctctgtcggtctgctcgccgtggcatagtcgtggaacttcctcggcgccgcgcgcgtcagattgttgggtcgcgtcctgctcggctctcatgccgttgattttggctccggtgcgggctcttctctggtgctcgtcggcttcgccgtcgttgtcgtgaccgcgagtcctattgtttccctgcgccggtctctgcctgtgctcgagccataccattggtaccctcaccgtggaactgttcgtcaccatgctcgacaagctctagtcgtgcgcacgaattttcttcgcttggccttaattctcatcgcgtcgtcaattccgttggttagcgtcgttcgtcgtcgcgtcgtgtgtgctcgtcctcgccaagatctggccctacgagctccacacgtcttggctgcgctcgccgtgtcctccgtaaatattttcgcctagctgcgcggacctcgccgttgttttggtcgtcgatgccatgcaaccacccacgcgtggttgtcctcacggacaccgcttcacaccatcaccctgtctttaccatccgtagtgtcgtcatcgaaatgtcttagctgcaacaccagcgccctcgaccatgcccaaagctctatattggatttgtcagcgtgctactcgtccgctggctactcatcatcgactctcggcaccacaagcttattttcccttgtgcacatctccccagaccttgtctcatcacgcgtatgtgttatcgatctcatcgttgtttcgtgcatcctcaagaaatacaaagcgtcgggtgaagacgaagctagcagcgtgatgttcaccaagtgcgcaacaaaaagctcgaacaagtcgtcaatcgtcatcctcgtctacgccaagcccccaagccgtgaagacactctggtgctggccacacatcactagctcgacaaaaaggaatcccatagatattcgatcaagaatggaaactatatgcctcgctcgccagacgtgtataatcaacggcgtcaaccggaaccgtcgtcgtgcttgcgactatcgcgtcgaatcagtcagggtaagttgattcgtatccccgttaactaggtctataaataaattaaatagaattgttggtcacaataaatgttattaatttagcatgcgtatattgtgatgattgatttagataaataggtaaatcaagtaattaagatacatagtttaaagagttaataaaaagctaggaataaaaatagatattctagtgttattatgtcaatttgattaatgaatgtagtcgatgccctgctgtgatatccatggtgcttaatacttggttttaagtgtttcatcctttttagtgtagattatctatattatactcgttatacttgtgctcatacatgtgcatcgtgcatctcatgaggtacgataaataatcacgtgatgcgaaagacaatccaagtcgaccccaagcacgggctaatccacaggatgaagctgatggaccaacctgaagatggttaaatcaagcaagtgcacggtcgagggatactcgtcaagcggacatcgcctaacaaacactaacctagtgttattcaggcaagccccgatgcatttgccacctccttgtgttttaaaatctttatcaccttgtttgatgcattaggtgataggagttgcgtgctaaaccgttgatgcattcccttccttgaaaattgattacccttccttgatacccgttttgaaaagaatttttgatgcttagccttgctttagtaaacaaaaatgttttgtttttaaacaaaagtgatgcttgagtgggtgggattgttttcaaaaataaaacttgatggtagat

SEQ ID NO: 42665 - DNA, 715 bp, Zea Mays
ttatgtggcagaacctcccaaggtatcgggcccacatgcacctgtccttgtcccaaagacctcagacggccatgcatgtgcaccagataacttaacaggataaaccacttacaaccagaaccgcgggattaagtaaacacaaatcacacacatcaacattttttttgcagcggaaatcttattaccaaattttacaggttacaaaaaaaatttcattatattcatcggagtgattacaaaagtataagtttgaaatatatgccagctcaagtgaccatcctcaataagaagtatagaagagttacttagacttataagaaggccgagcccaccggcacttaacaccatcatcagcagcacaaaactatgaccagaaaaacaacagggaataaaaccctgagtacggaattactcagcaagactaacccgactaaagaaaagactctcaagggtatgctggatttaggaatcaaggagatgcttttagcgagaatcaacttaaatacttttgcagaaatagcttactaaagtgagtccttactttcaacattttaatgctagattaagtattaatagaccttgtttgcatctagtctaatttcaccatctcatcaatacaacatcatttttattcatgaagttcacatcctgacttaggttgtaggtcagtgaccaagtctccactgtccggggatataacggcgatccgaatcga

SEQ ID NO: 42666 - DNA, 1450 bp, Zea Mays
ccttactcagcatggaacaggttctctgtcctcataactccaaccaaacaacggcagctagcgagctcccgcggtcccgccgccgccccctggtcctccaaaaaacggctgaaccctaaaccctccctagctcccgccgcctcgcttaaccgcgcccatggccgccgccgctcgcgccgccctcccgcggccccacctctctcttttttcgtcctcccaccgcagcccccatctgtccctcacgccctcctccgcccctcgcctgcgcagcggcgctgccacctcccctgcgctgcagcagcaccaccaggtcaccacgcgcctgggcgacgtgatcgaggcgcagcagttcgaccgggacgcgctgaacgagatcttcgaggtggcgcgggagatggaggccgtggagaggggttcccacggcgcccccagccgcgtcctcgaggggtacctcatggccacgcttttctacgagccctccacgcgcacgcgcctctccttcgaggctgctatgcggaggctcggcggggaggtcgtcaccaccgagaatgcgcgcgagttctcttccgccgccaagggggagacactcgaagataccataagaaccgttgagggttattccgatattattgtactgagacattttgaaagtggagctgcaaggaaagcagcagatactgcaaatattcctgttattaatgcaggtgatggaccagggcaacatccaacccaggctttgttggatgtgtacacaataaagagagaaattggcacactagatggaattaaacttggtttggttggtgaccttgctaatgggaggacagttcgttctctggcttacttgattgctaagtaccagaacattaagatatactttgtatctcctgatgttgttaaaatgaaggatgatatcaagaactacttaaattccaaaggtgttgaatgggaagaaagttcagatttgttggaggtggcatccaagtgtgatgttatttatcaaacacgtattcaaaaagaaagatttggtgagaggattgacctttatgaagctgctcgtggcaagtacatcgtggataaaaaggtcttagatgtgctgccaaaacatgctgtcatcatgcatccccttccaaggcttgatgaggtcaaggacagttaccacaggatgaggcgcatgaaggaaaagactagctaatccctaatgatttaggctacgattatgaacatgtactaaggtcataaatgtatttttatccgtgttgcatctcgtgcctataaataggtgatcagtacccctgtattgttcacgctagattgtaattgctctcgcgtcaacaccttcgaacaagccgaagatatcaatgtaatataaattctgttagtgttcatgtatatatcatgaaatacatatatgaaggaatgaattacatatattatctctatgtattct

SEQ ID NO: 42667 - DNA, 1525 bp, Zea Mays
cactacacatcccaaatcccccaaccctaactaatccgccgtcacccctcccggatcgccagcaggcctcatcccttccacagttccacggctacgccgccgtcgtcggctcatccctcctccccctcccgcccgcagttccaggtggtgcacccctcgaccccatcagactcgatctgtcgtttcctggctcccttaggtcccctcttcgccaccactccgccgcatgctccccaaatccgccgctctatgggtgcatcaggtctcgctgccagttccaatggagggaataaatgggcaaaggcggccaacgaggaagctacgatgacggtggtggctgtggagtcagatgagcctaggacagaatcgccgttggagcggggaacaatcatctacaacctcctcgtcacgctcccctttccctccggcctgatctcgcgcctccgccgtgcattcctcctctgccgcttcaccaccgacctggtctctagatcctccctccacatgctccaactcctggtacaagagtgcctgaggtccgctatcgacctgagctccgctcaggtcgccgctaccactgataatcggcctccagcccactgctttacttttggcgacgagtcgacgactgggcaactaccgctgcccaagttggaggtgtccatcctgcgacctctggtttggtctgggatggagcacccatctgtatttgatagattcaactatgatcgcgcatatgctccgctttgtaaacacgtagaccaccaatcctacattccagggtttcaagttgaccaaacagagtggatacagtcatgctcaaagttggcaagctgtgtcaacaagcaggccccatctgctactcgcttcatgggcatgcaacaaagccttggtattcagccgacgcagcttgggaaggatgcacctgcagcaggagttgcacgtagagttagtgcttaatgaaagatgatcgaggttgagtctgttgcagctgctgattaacaagagattcgagaagtagtgaagaagtgattctgtgctgaggatgattatgcagcagaaaaacttgatattgagctgagtggaagttacctgttaccaccacgttattctaagggtgcattgttctgccagctgtaggaataggaatcataaaagcatatggaggaactacgtataggctacaaagaagcataagaagcatgtttatagcagaagcaaagtgttctgatgattttgttttttcaattgtgttttctgttattggttcagtatgcacatatattgacatgatttatggcatgacatctgccatctttgttatatttatgacatcgttcttgattgatgtgtgcagacatgaatgatggatcttttttaacatcctgaccatcattatcgtattttgtatatcatttatgggttcacagatatgaaatgacaggtttcttatttttgagatctgaaccatgtgttgccttttggttgttacataataaatggtcctgtcgatgtgctttacgtt

SEQ ID NO: 42668 - DNA, 2151 bp, Zea Mays
catgcaggaattttaatagtataatttggagagcttgggcgccaccaaagtgcaaattcttcagttggcttgctgttcaaaatagagtttggacagcagacaggttggcaagaaggggatggcctcataatccgcgttgtgtcctatgcgcctcatgcccagaatctggactacatctttttgctgaatgttgcttcaccagacatatttgggctgatttgagtatttgggctgcaattacggagatccatcattcttcttggcaacctgtagattcggtgcaccaatggtggtcgaatcttgcaacatccgcagtgagaagcgtgaagggattgcgaaccctcatcatcctcgtgtcttggacaatttggtgtgagagaaactcgcgaatctttgagcacaaagagaagaccgtgacacagactatagcgatgattaaggagcaaatccgcctgtggattctaggaggagcaaaacacttagcaaggctggtgtaggttttggggaaggggaggggttggttttgggacatttgtgtcaccatacttaatgtctccttccctagtgtgatgtacttgtatattttagccctcgctggctctcaccctctttttaatataacaggcaattctcttgccagttttcaaaaaaatgtaggcgtccacaaaagcttttggtgcacggttctgccgaggatccccgtcataaacgcccgccatcggatcggacccatacgcgatatcagcaccgtccgtcatgcaaggttgccgaggccgccatcaacgtcatcctcccgcaatccccgccgactgccttgcctgcccttccatcctcctccccacccctccttccatcctcgcccgcgcgctccgcacgcattccatccatgctagcctacagcaacagacgcccatccctgtcgtcgcgctcgcctccctcctctttgttgcctccgcgtcggcctccaccccgctcttcgacgcgtttgccgccgactcagatttctggtgcactctcttctctacggcgcgagcaagggcggcgcttgccatggcatcgacgggaaccaggcgttcctaccgctcttcttcctcccgtgtcgtcagaggaagccgcgaacagcacgcaggaatcaggcggtcttgaggacgaggagctataggtgcaggatgcagttgccagtggttccaagaggagcaaagactccgccgccgccgccacacgcagagccaatgttagctcaccctctgtggttcactcacaccctgccatcctccttgctcccgcgcagcagattctagaggttaagcaagcaggatgggcccgcgacccctgtgtggccttctctactccaagtgtctcgacgtcgagcgactctggatctatcgtcaacgaccttgagagcatcggggtaacacaaatggaggatagaatgtgattgatcattattctttctggaatgacttacctcatcaagcacggtagcaagtcttccacccgcaaaccctcacgccatcgacgcagctgtctttggtctctcgtgcttccctttgagagatcgggctctcatcattttgtttgttgctacctgaggacacatcgttttgtttgttgctacctgctaacatatcaactagcacgattttgagcctatctaaatgcccttctgtttatggctgtcaaggtttatggctgttcaggttcttattgattttggtctgagtttcacattgacaattcctgaggacaaagcagtggacctatatgttctagagagagctttgatttccatgcattcgtcctgtggggaagtgatggagaaaatccttgcggtgtatagaaaggcttcaaagcaatggtgttccacccagaacaagctggctcaagtgaggcaacgggtcaggaagcgcaccatggtcggatgaacgaagaagaaaaaattgtggcatggaatggatgtatgttattagattaaaataacaaaatttatgtatggatagaatcacagatggattctgaaacattttctcataacaatataacacacatatgtatataagttatcgtgttattatatggttccgttgcaacgcacgggcactcacctagtatatatatatagacttattgtcatccatttgaatatgaaaa

SEQ ID NO: 42669 - DNA, 1459 bp, Zea Mays
agtgactagtttataccgtgaaggaaagttgtattcaagatacaacttagtgtgtttctattataatttcatattcatagcatcacatgagcattcatgtatatgtattgttatgtatagaaaacgaagaagttgccccgcaagctgaaatttcacctgtcgagaacaacttctatttgatatctgtgggacaaaccctgagcctcctacaacacaaggcaagccccggtgcatttacccctttccttgttgtttaaaactctttatcacttgagatgatgcattaggtgataggagttgtgtgctaaacaattgttgcattcccttccttgaaactgattaccattccttgatacctgctttacttaaaagttttctgatgcttagctctgctttagaaaacaaaatgttttgttttaaacaaaaatgatgcttcacatgggatgggaagtttccaaagaaaagacttgatggtgaatctatcatggctgtgatgggttcaacatctgaaaagatgtacctctgtcaggtaccaaattttgggttgtaaatgataaagacaagactgggcgggtcacttgcacgagaatgaagtctcagtgtagtgtctccgtctgagtcgattaaggaccgtgtcgatgtaggcttgctgatcgaggaccttttaactggccacatgtctcgtcatggtatgctttgcctcggttgtaccaataccagaaaggccaccacgcaataggagtggagagatggagagtagtgtgtactctctgtggcaaaaggctggacggtggtgtatttgtgctctcggttggcgtgaactcgttctggtcttgagaaacccggtggcgagttgacatatgcaagggttaagtgctacatatgtcgtgtggttggagatccccagctgggtattaatcgattcggatcgttgttacttcttggacatgaagacttggtcactgtcctacacgtagcaatccagtaaagtgaagggttgataaaagacggctagcataggctaagtacctgaactacgatagaaagaactctagatacaagtaatgacttaacctgataataaaactggatttttaaggatccactgttagtaatcatttctgtaaacagagtctttgattcttgatcagctttacattgaatccgacaagccagcatatccttgagaagtctttttcctttgtcgggtaagacttgcgaaagtacactatgtactaagggttttcgaacccatgttgttgtaagtgattgagagcacctagaggggggtgaataggtgatcctgtaaaaacttaaaacttatagccacaaaacttgattaagtattagcacgatagaatcaagtggctaagaaccgagctcttgtgaaacacaatagtcacaaagaaaacaagcataagagacacgatgatttatcccgtggttcggccaagtataa

SEQ ID NO: 42670 - DNA, 2930 bp, Zea Mays
cgcggacgctcccgtccccatcgcgacccgtgcgccgggtccacgctgaaccctttcaccggggcggcgaaagatatcagccgcgacgccgacgggctcgagcgccggtgagcgctcgcgcacccgggccaataaactggcaccggctcctcctctcgcgtcgcagagcctagcctcgggatgacgtggcgtaccacaacaccaccacacctcactcagccctgcgggtctccgaccaaccatttctagaagcctccaaaccctagcgcaggaggaagaggagttaggaggagctccagggatggcgaaggcgaggaagcagaagggtgacggtgccagtacgggaggaggcgccaccgtgctccaccagaagctctgcctctccatcgacatggagaaccagctgatctacgggtacactgagataaaagttctagctgaaaacaacagatttgctctacatgctgacaatatgacgattcagagcatttgatggatggtgcaactgttgagtttgactattcccctcattggaaaaatgaaagtgatcaaccgaattggtcttcagtatcatgtttgaagactgctgctgatgctgcatgttcaatgtatactttgtctctaaatcgagaagctacaccaaatcttattgtgtcatctgagagatcagtcaagtcaatgactgaacagcagttagatgaaaacagtgaaaagcatgaagaaaatagtggaaggcttgaagaacatggtggaaatcctgttcaaacttcctatgatcaaattgttaatggctgcagtggaagagggaatagaaaattctgcagtggaagaaggaaaggaaaaggaaaatgataaggaaaaagaagaggaaaatggaaatgagaagagcaaggaaactggaaatgagactgaatatgaaaaggtgaagaacataaaactggttcacatagattatattttggagaaggctgaaactggcgttcagttcgttggcaatgtcatgcgtagcagtagtcagacaaggcgggcacactgttggtttccttgtgttgatagtgccacagaacgctgtccatttgacctagaatttacagttagcatggatttcattgctgtcagcaatggtgacttgctttaccaggtctctagtaaggaagatccttcaaaaaaacttatgtgtataaattgaacactccagttagtccacagtggatatccttggttgttggcccacttgaagttcttcctgacagaatcacagaaatgacataaatgtctcacacatatgtttattccctgctttggcaaagcttcagaacactattgcatttttccacaatgcatacagctgttatgaagactatctttctgcaccatttcccttaggtttatacaatcacatttttcttccatctgaaatgacaatattaccagcaagcttaggagcctccacatgcatcctcagttctgatatcttgcatgatgagaaagttatatagatcagggctttgtaaacctgtcatcctttggataggagtgcatgaaaatctgcaatccatgtgtctgaatcatgacctgctattacttttactttatcttcctaagcattaaccttgcttctttgtatccccttaactggtggcttgataacactttgtattatgcattaaccttgcttctttgtatccccttaattagtggctcttggtaatgctttgtacacctgcattacattatagtcaagtattatgtttcataccttgcagtctgcactaacttgtaaaatagttcagataattggcacaagaacgaaactggcttatgcccttgcaaagcaatggtttggaatatacacaagtgcagaggagtccagtgacggctaactgctcagtatgtgaatctgatgttagtggtgcaactgctttgagctctactgctgcttcaagtgatttatatggaactcaagcaatcggttcatatgggaaagttcgttcattgaaagctgtagctgttttcaaatgttggagaagcagatgggaccagactcatttcggaagattttgcaggtgatagtggctccaagtcgtgcataaaatctaggcatgagcttcctagcctctcttctcaagcaaattgatcggttcttgcaatttgacaactttatgcctggttataatggggtcttgactgtcagctgcattcgtacccttgtacgaatagcaaagaaggtgccatcttttgtatgccttgatcacatttttgaattggttgcccctttccgcaacatggacaaaccatggaaagttcgaattgaagctagcaggattcttattgatcttgagttacaccataaaggactcgatgcagctcttttgttgttcttgaaatatgtggacgaagaaaagtctttgcgaggttggattgctagagtactttttgatggttttgtatgctttgctatcttttgacatggaagctgttgaaggagcgacaaagttggctgttcatgtcttgcgtatatgtcaaacaagtattgttcctcacgccaatgatcaaataaattttggcaaccctaactctagttggtcttcttcatctgcttgctggcacaaaggcatacaataacatatttcttcgtcatcaagtgttctgcatattgcaagttgctgctggaaggttagtgagtttgttattgcatatgtattcattattttgtttcgttgattacttgttattgcattgacatctgtactacataaagcaccagttttcacggttcaaatttccaccgtcgtcgtgctctcccgcatttaaatggtaaaaacgctatttttttcacaaatggggattcaaaccatgattgttggctctaaacccacttaggcaacaatgttttattttatactctatacttaagcgtaaatggaaac

SEQ ID NO: 42671 - DNA, 1013 bp, Zea Mays
gttggagtacacacggcgatatctattgcacaacctacttcctagatacaggaagatggtgataaccacactgggaatcatgatggaaaagctacatatgtatcaagatatgtgaagactgtccgcctcaaacaagaggagtattttggtggagcgaagtttatgaagacttttgtgtgtgtgttttgaactgcagggcatggaggtactgctggtaacaagttctggatgtcattaggtctaccattgatagctactgtgaactgtgctggtaacactggagccaagaacctctacatcatttctgtgaagggaatcaagggcgccttaacaggcgtccttctgcctgtgttggtgaccatggagaatggaaagcctaaccttaggaagaagaagcaagacaaatataaggatgctgaacctagtgcaatagatctttttaaggagatgcattgcagcaaaaagaaaggttttagcaaaaatgttcagaaagctattgttgatatggaagaaatggtggcaacatcagttcaagatggacaacaaccgaaatatcctacagaagttgtttatagtgtgcaactgggctccagtgtgttcttatgcaatcttggtctttagtccgtctccaagaaaagctcaacatcaatagtttttataaaggttcaacaacttcaggatcgactggaggccaagaagcaagaaaaagatggactttgggaagaagtgtaaaccttaaatgctcaggcagtcatctcaggagaccattgatagtatgaagaggtcgaccgaagaaaataacaatctccttagtcaactgttaagcttcaatagaggccaagtgcctccatctcaagtctacttgaccactataggatctgcagccttatggttgctatagtagctagttacaatagctctggatttgaatttataggattattttcaattaagcttaatgtttaattccttgagttgaagttataggattttctttggatcttatgtaaaag

SEQ ID NO: 42672 - DNA, 2241 bp, Zea Mays
ctcaggagctcacttgctcccactatgacattgtatatgtaccagacacttgcatatactaattgttttcttttaaatgcactttacttaattatactgacatatgtcattggagctgtgatgcctcatccatccctaaagatgtatagaattcatcgcttggatcaataagtgttgtttaacaggcagaaatgggtgcttaggatcttaccactgtttatttaaaatttagatagataaagagcactgaagattgttagttaattaggaccgacgctttgaatcattagaccaaggaatatgaatgcgcaaattcaaacgtactacaccttttttgtgctttctttttaggacaggagtaattgtccatcgtaacgggggtagaaagtgcagaacgctcattgttctctttttcgttgtctaaaacgttgagtttctgatctgtataagactacaagttgctcagagggccttttctggaaccatttccctcgaactgattttaattgtttccttcttttccttatccacaataccaaactatgttacataaaaactaaatgatacgctgactgctcagaataaaaaaagtggtgctacgatcctccgtctgacttatgatcgcttctcttttcttcagccacttttcttttttgttgtctagaaaacaaaaatatattgttagtgaccagattgtaatagaaaatattgtctgctttattttctcgtcattagataaattatatacccttaaattgcttttgccattgattctagcatatgtcattaactaatgtttttaccacctttttctagaacgcttgtttgtctttgtcactttctgcaaccttggttctgatgttgcttgtcattcatttctcagcgtcgggcttgtaacttgtgtttcgtttgcttggtccatttattttggttgtctgtagggaagagacgacgacatggatgtagattccattctttgtgtgagcactaccgccatatagttgacaacgatgaccgacactgtagattccattctttgtgtgtacaccaaggtatcggtgtctacgttgatctggcgatgcgcttttcacggttactgcgaccgtgatgggcatctaggtgctcaaaccattagttggactgaggaacacggagcagcagcaacaatatcgtaaggagagtgcagaagttggacaaatggtatgccatatcttcagttctcttatgatgcttcagcgctacatcttcagttttctcggctaaaaagagatcatagtcaatagtatacctatgtgtgaaagcgctatgctatttgcttgtttgctgggagaaagaaaagatagatgaaggtaattatacaatttctaatacattgttcagcttttgttatttctgccatatgatacacactggtcatgaggacatgtcgattgtagttcactggtattgtttttttaaaggaagcggcaaaagacttgcctcttcattgtattagattaggaaaaataagataatccacaggaccgaaacacacaccggaagagaaaaaaaaacaaaatcaaaatacaaaaaaagttcactggtattgtaagctttgcagataagagcacaactttttccctcttttctaaaagggaagctcatgttcatttcagcaattcagcttcaaccatttggcattcatgtaatatttcacaggagttaaagtgcacatacctaatcaagtctgtgggtctccaattctgaaatagaaagataatttatgttctcatctttctgaaatgaacaagatgactggcttctgggttaaggttttttatagagcaccatgacttatcagttttgtgaacaaccctaacttatgtggtcctgacaccacaaaaccttgtcctgatgctcctcccttttctccacctcctccatacaaccctacaaccccgatgcaatcaccaggaagtagctcttccactactggagcaattgctggtggagtggttgctggcgcagccttgctatttgctgttcctgctatcagttttgcctattggcggcacaggaaaccacaagagcattttttcaatgtatatggcttcaaagttagtctttgattattatctttcttgcaacataagggcaaacaacgtttatatgtagcaaacaaatacagtttgcaaacgttttaggaacatgtttttacaataaagatatacttatagtttcaccaatggatggccaaaaaat

SEQ ID NO: 42673 - DNA, 481 bp, Zea Mays
cgcatccgcagtttggtttaatcatgcagcaaaggttgcctcggcacgtcgccatgtctgtctgctcgtagcagagatgggtatagttcatgtttgcaaaagtgaatcttcacattcaagctgcagtacaggaaacaacaatatacggaaggatggtatatgctttcgcctagaagcaggctttttaaatggacttttagaggctggtgccagtgccacagaaagttcaggtttttccaattgtcaactaggaaatgacgtctcttcagaataacaacaattggtattctggaaaagatgttccttccatcaagtggtccatggcatgcgaataacgagtttgtttctgctgctctcaaaaagttaccggaaaatgaacatagcaggcaattgcacagtgctaccaatgatgtgttatccaagcttcacgtggtgatgcgtgcagtagataatcttcacttgaaacacatgcagttagcag

SEQ ID NO: 42674 - DNA, 1881 bp, Zea Mays
gacttttatccttcggactgtgctaaggcccccgcaaaccgccgccacggcgaggtcgtgccgccgccatgtacgcctcgcgctcccgccactttctcctcagcgttcgaaccgccaaccatggcatcctcctccgcagcccgacctcctacgtgtcccctaccgggtgcggcgtcagcgcgcagcggcactacaaccaccagcagcgggaggacgagtgggaggagtccaaggcggtgaaggtgacggtctggtgggacttccagaggtgccgcctccctcgccgcgccagcccgcgccacctctccccgcgcgtcacggaagcgctgcggtgcgccggcatccgagggcccgtcgagatcaccgccttcggcgacgtcagccacatcccgctcaccgagcaggaggcgctcgctgacaccggcgtcatcttgtcgcacgtcccttccaatggttgtggccgatcattcatgtctgatcttatctcttggattgctcagaaccctcctccatctcatttcttccttctatcgggggataaagacttcacaaacatcctgcatcgtcttaggatgagcaattataacgtattgctttcttgccctgattctggctccaagatgttacgcagtgcagcaacttatttgtggacatgggaggatctagctacaggggtggatctcaaacccaaatatttaaatcatccacctgatggtttatccaattcttggtatggtcaatacagtgaacctggtcgtgactttctcctgaaaccaaagaaccccatggctttaccaaggaaaaccaaggaacctaaggttcccagattcgctgtcgttggaattaagagagtgctgtggttttatcctcaagggatcagtgtttcggaactaagaaaagagcttaaaaggattaatgtgtatattgatgcaagtgcatttggcttcaaagatttctctgcttttctcctctccatgtctgatgttgtgaaatttatagatcctctaccagatgatggaggtcctgctgtggttggggttttcaagagatctgaggattctgctcaaagtcacattcaagaaaaatgccacaaggaaggtgagagtgaggagccatcaccacgtccaaaaaagagaactcttcaagtggaagtcccatcatccccaccagatgagtcatctagagacaacaggaaagcacctgggtctactcaacgaccggagccaccttccatacatgtggaagctgatgttactcggactgtggaagttccatcaccaccgtctgattcaccatgtatggaccaaaggaatgatgtagctgttgatcctgttatgcaaacagaacgaccagtcaacttgatggaagctgataaggcgaatgctgctggtggtccttcctcgtcaggggggcaaggtaatatcagcaagaaaaggggtttcttggaacgcatatcatctttatggaatggccaaaaggattaggtttcatgtcatctcttctaaagcatcaatgaataagtagaatagataatgtagaatagtcgttcagaggtgtagtgactacagcacaggaacaagatgagtgttcatctgaatatatgcttagcaaagcgagaattggtatggaaagatcattgtgtttcttttcttttttgttttttgggtgaggaagaggagtttattattcatgtatgctaatcaaggtttaacatatgctgtaaaaagaggattgtattcatttactactcagtgtacgtaaaaccttgttttcataaggatagatgctaatgcagcgagatgttctcatctgatcagaaattttgctggtgccagaaaaccaatctatatgttgtgtttctttttacatagattttccgta

SEQ ID NO: 42675 - DNA, 1719 bp, Zea Mays
aagatgaatgtttaactggaactagcgagtgtgataaaatgttccttatcggcggaaggggcagatatttttcggttctgtgacggctttccgagtttggtggattgtgtcgagagagtcagagagggacaccaaagccggctacggccagtccccagtcagcctagcttcgctcgctgttcgttcgtcctgatagcttgaaaccgccatggccatggggctccccggccaccgctgctgccgccttcccgctctcgggtcggtcactccactctgtcccgccctcgctcgcaggcccctcccgcggacctcggatctccgctactcctccctcgaagcccaaggtcctgcgcatgttccttgaggagaggcaactgcacggcgatttcgtcaccaagatctctgacatggtctggaggaggaatggcggcaatgttgatgcggttgaggcgaccacagaccaaggcaatgctgtagatgttgctcagcctgaagacgtgcgggaagatgttgtggacgacggaatgttgagactagcggcaaccagaggttgggtgcccggtgacagcagccctcctttgagcaagaggctttcagctaaggattggcagaatgagagagacaaaaggaaggagctgaatcttttgaaatatgaagcactcaaggatgaattgctgctcttgaccacagggattggagcagcatgtagtttatactgtctcctggttttctctctcgagctgaagttttaacaagtgctttaagtattctgaaacttgttgctccatgtggaatagctgcttgtatcttcaacttctgtgtcaacatgctgataacctatcaaagcaagatattccacaagtttttctaaagaagaaagtgaagaaaattggcattacaagtgaagatttgaagaatacaatagagaagacattgggtggtggaagagtagctctttcatccccaaggcttgtgattcctgccgtgatttttggattgtcagctttatcagaccacttcaaaaatagttttttcagttttgaggttcttccagggatgatgggtttcctcgcatacaaggctgcagctttggttcaggtctacagagataacgaggatctccgcttgatacttcctgaggaagaggatgctgacagtgaaagcacttgatgcatacaaattagagattatgttaacctgttgataaaaacagaacggtctgatttactgagtcatgcttcagttctgaaaaaaaatctcttaaggatatcctaaaattcgtttgcttgaacagcctagtgccaggagtccaggacagctcactactattaaaatgagatgtaaaattacctgataatgtcataatttttcacaaaccaaacaacttcaactcgtcatagcaaggcttctgattgttaacccagacaagagagtttttttttactattatgatactcataagaagtggcttctctacaatagtatcaatagattggaattctctataatgatatttgtaagcgaggaacttctccaaaacggtatttcaccaatacttattgtattttcttattttcttttctaccatctaaaacgagcacaattcctatagttttattggtgcacactcaagataattgctcctgtatgcctcgcaaagatggaggtgcttattacaatagacgtgcttaggtcctgatgctagtggccaacggcgag

SEQ ID NO: 42676 - DNA, 1764 bp, Zea Mays
cgccgccatttagcgtgcccccggtcgtctgctccgcgccctaggtttctctcttcgtttcctcctcatcgaatcggagcttcgcatagtgtccctcgtcgccgccggcgccggcgccggcagccatgtccatgctccttatacagaaacaacccctccctctctccgttcgtccccgcacgactctccgccagtgccgtctccccacgactcgattctccgccgccgccgccgactcggctagccgcgctgcccccttcgccgtcgaggactacctcgtcgccgcatgccacctaaccccggcgcaggcgctcaaggcctccaaggtgctctcgcacctcaagtcaccctcccgacccgacgccgtgctagccttcctctcgggcctcggtctctccgacgccgacatcgccgccgccgtcgcctacgaccccaagcttctctgctccgaggtcgagcgcacgctggccccgcgtctcgcggagctccgggatctcggcctctctccgtctcagatcgcccgcctcgcactcgtcgaccccgcgcgcttccgccgccccaccgtcgtctccaagctgcagtattatgtccccctcttcggttccttcgagaacctgctccaggctctcaggaacaacgcctaccttctcagctcggacctcgagcgcgttgtgaagcccaacgtcgcgttcctggtggagtgcgggctagatgcttgtgatattgccaagctgtccatacccgtccctaggttgatcaccaccaacccagaacgcgtccgggcaatggtggagcgagctgaagctgtcggtgtgcctcgtggcactgggatgtttaggcacgcactgctggctgttgcattcctcagcgaggaaaagatcaaagctaaggcagagtttttgaagacaacatttcggtggtcggatgctgaggtgggcgttgcggtttccaagctgccattggtgctcaagcactccaaggacaggctgcgccgcatgtcagagttcctgatcaccaaggttgggttggagccagagtacattgctcacaggcctgctctgcttacatatagcttggaacgccgcctcatgccccgacactatgttgtgaattacctgaaggaaaatggattgttggagcaggaccggagctactatactgctgtccagatgagtgagagtgccttcatggataagttcatatgcccctacaaggaagctgcaccaagcctcgccctagattatgctgctgcttgcagaggagaggtgcccactaccttcttggcaaatgtttaacccttcagtgtaaagcaatgttttgacacttagcagtgagctggggaaaactggaagccattttgaaccaaagacgattcagaaataagactgtctgggagattaatccactctggacttcacaaaagcacttgttatcggaaaggctctttcggtgaaattctgaaagcaaattggcgaggaacacccattgctgtcaaacgcattcttccatccttatctgatgacaggctggtgatgcgcaggccaatgcagaaagtgttcactctgaagacgccccaacttgttcatacagtagtgtactttcagttattttgtttttgttattggtttgtatgaatgctgtagttggtttcatgtttggatatgcttgtatgattattaatctggaaatggtacaaacaattcagatgaacatttttagtgtacgaaaatatggtttaatttgtttatatgcctatatatttga

SEQ ID NO: 42677 - DNA, 3096 bp, Zea Mays
tctcatgacttcactccgcactaatgttgagctcgagggtgaagcaggggagccttcttaccgtcgtttagttctccgtctggtttctcatgtcatcaggctatacagctcttcacttgttactgaaagtgaggttttccttaatatgcttgtaaaagttacccgtcaggacttaccattatggcatcagatacttgtccttgaaattttaaggggtttttgtgttgaagcctgcactctgcgcttgctgtttcagacatttgacttgaatcctgtgaataccaatgtcgtggagaacatagttagagcacttgctttggttgtagcttcaattcaggcttcagattcaagcgaagaaactctagccgctgttggtgggatgttcagtagtaaagctaaagggatcgagtggagtatggaccatgatgcatcaaatgctgctgttttggttgctagtgaagcacatactatcactctggcccttgaaggtctcttaggcgtagttttcactattgccactttgactgatgaagctctagatgttggtgagcttgaatcacctaaatgtgaatcaaatagtatggaatgtagtggacagttggcccttctttgtatggctttggtcaattcaacatggttaaccatccttgactctttgtcatttattttgacgaggtcacagggggaagctataatattagagatattgaaaggataccaagcattcactcaggcttgtggagttctccgtgccatagagcccttaaactctttcctagcatcactttgcaagtttacaatcaataatccaaatgaaggagagaagaaaagcatcttgcagtctcctggatcaaagaggtcagaaacttcaatggatcagcgtgatagtattattctcacactaaaaaatgttcaggcactaagaacactttttaatgttgcacatcgattacacaatgtccttggtccttcttgggttctggtattggagacactttcagcacttgatagagctattcattctccacatgcttcaactcaggaagtatcagcttctgtttcaaaactttcaagagatacatcgggacagtacagtgatttccatattctctcttctttaaattctcagttgtttgaaagttcagccttgatgaacatagctgcggtgaagtcacttctgtctgcattgcaccaattgtcaagtcagcacatatctggaagctctcaattgtctgtccagcagattgggagcatttcattttcagtggagcgcatgacaacgattcttgccaataatctgcatcgagttgaaccgatatgggatcaaattgctgctcatcatcttgagcttgcaaattgctctaacccacaattatgtaatatggcactgaactcattggatcaatcaatttgtttggtagcgggttctgaaaaatttcagggcatcagcgcagcacctcatcagtttccagaaagccatttttatctccattgatgatcctctattcctccaacaagaacgttgatgtacaaatgggtgcattaaagattcttttgcatgttcttgagagacatggagaaaagttatcatatagctggcccagcattcttcatatgttaaggatggttactgatgcatcagaaaaagacctcatctccttaggctttcagagcattcgtgtaataatgaatgaaggactggcaacaatccctgtacaatgccttgatgaatgcattttggtaactggagcatatggtactcagaaaactgatataaacataagtttaacatcagttggacttttgtggactgctactgattttattgtgaagggattagtcagcaagcctattgagcaagctagtcacatgaatgatgatgttcaatcatgtgaaatgactgaagaggcaaacagcaagcaagttcctccaaaactagttgattatagtatacttttcttttcagttttctctgtcctccagaaattgggttcagatgatcgtcctgaggttcgaaattcagctgttaggactctcttccagactctcagcatccatggccaaaagctttctaaaagtatgtgggaggattgtctttggttatatgttttccctatgttagagcatgtttcccacttggcatctacctcatctcgagatgagtggcaagggaaggaacttggaactcgggctggcaaagctgttcatatgcttatccatcacagtcgaaatacagcacaaaagcaatgggatgaaaccattgttcttgtacttggtggtattgcacggcttttgcgttcttttttctcttacctccaacaactgagaaaattttcttctggttgggtgcttttactcagttttataaaaaatagcatcttaaacggtagcaaggaggttgctattgctgccatcaattgcttgcagacgtttgtcggcgcaaactgtccaaagggcaatttggaatcctcgtatgttaaatctgttcttgatatttatgaacttgttcttcaaacttcatctaattttaagaatgactccactgataaagtgaagcaagaggttctccgtggtcttggtgatctttatgtccaagcacaatctctgtttactggtgacatgtatctaaggcttatggcaattatgcatctgatgatcaagactaccttgaatcctactgattatgatagtgaactgggtagtattcctgctgtacaacgaggtatattggaaatcattcctatgctacgcccaacagttgtattgtctcccatgtggacacatctgcttcttgagctgctatgctatcttaatgggcacgaaggccccctccagaaaaataatgaacaaacgcccgatcataattctcaagcactggtagacggtgcaaagcatgctcttgttgaaagaagcaatctcaatggcgggggtacaaaactggatatggtgggatctggttggggcattctatttgtagaaaaacttgtaccaatcattgccaaccttttcttggaggctccaccaaatgaaaggtttagtgtctctcctgaagtcattcaaggtcttggaaggtatttgctttttatgatttatatc

SEQ ID NO: 42678 - DNA, 2874 bp, Zea Mays
ccaaccccagattcttctggccacgcacccgaaatccacacctcacaaaccacgcagcggaggcgacccacaaaaaacacgcgcggcaggaggaaggcgaggaagcatccccttgttcaattgaccccaccaccgcccgctgctgcttcgtttctagctcgagagagtttagtgggttgcttgattccgaagctccgagctcgtgggattgaattgagcccccccaagatcagaattggagcagcgggttttggtttcctgcttggtgccgctgattggagtacgcttcttttgtggtggttgagaggctgctcggcttccgccgaccatgtccgtgccggcgatagccgtgtacaccagcccgcccggcgccgtctacgcgccgccggagctcgagtccagctcgcgcggctcggcgccgtgcgcggccgcggcgtccccgtcagcgccgagctcccaccgccacgcggccgtcgcgggcggcttgtcctgcctattttcgtccccgtccgcggccccgcgggcaacggcgcacgaggagctcggcgcgctctggcacgacagatccgatgagccgccctccgtcgccgggggcttcggcggcgggggctactcgtacccccagtcgtcgccgtcgccgctcaagctgcgggaccacctccaccgcagcccggtgtctctgttccacacccctgcctcctccccggcgtccaggagcccctcggtttcctggctcgctggccgtgagcgcgagcgcctcttctctagcttcgtgcgcaacgcgcttggctcctgcattgactacgcaccggtcaccagcttcccgctgggtgtgcgccccgcggccactggtgtcgacgccgcggagctggccttcgagcttgacgaaaacctctctgaggcggagccgtcctgcgaacctgatgctcatgaactcctcgccggcgcccaggctcgccaccacatcttccgcgacgagcttgtcgtcaaggccttcaaggaggccgagcgggcacaccgtggccagaagcgggctagtggtgatccatacttgcagcattgtgtggagactgcggttcatctggccaatattggtgcaaacgcaaccgttgtgtctgctggccttctccatgacacaattgatgattcgttcatggactatgatcatatcttcaggatgtttggtgctggtgtggccgatcttgttgaaggggtttcgaagttaagccatttgagcaaacttgctcgggacaacaatactgcaagtaggactgttgaagctgatcgcctgcatacaatgtttcttgcaatggctgatgcacgagctgttcttataaagttagcagatcgtctgcacaacatgaatacgatagaagctttgcctttggttaaacaacaaaggtttgctaaagagactatggaaatatttgtgccattggccaaccgattaggaattgctagctggaaagaccacttggagaatatttgcttcaaacacttgaacccagaggagcacaaggagctttcctctaaacttctgatgtcttttgatgaagcacttcttacatctacgcttcataacttggataaaagccttagagatgaaggcatttcatatcacagtctttctggaaggcacaagagtttgtacagtatatactccaagatgataaagaagaacttaacaatggacgatgtccatgacatccatggtctacggcttgtggttgaaacagaggaagattgttatcgagcacttgacatagtgcacaagctgtggccccgagttaccggaagatttaaagactatatttgtcatccgaagttgaatgggtatcggtcgctgcacactgtcatcatgtgtgagggtgtccatccatttgaaatccagatccgaacaaaggaaatgcacctacaggctgaatatggattcgcagcgcactggaggtacaaagaaggtggctgcaggcattcctttgtgctccaaatggtggaatgggcgaggtgggtgctcacatggcaatgcgagacattgagcaaagagcgtccctcgtctttgagcagttctgttggcataaggccaccatgcccttttcccctgcattcggaagattgctcctactcttacagccgacagtgcaactatgaaggccctatatttgtcatcatgcttgaacatgacaagatgtctgtccaagagctcccagccaactcgactgtagttgatctaatggagcgagtcggggccaacagtccgagatggagcccttgcagcttcccactgaaagaggagctgcgaccgagggttaaccacaagcccataagcgacccaaataggaagctcagcatgggcgacgtggtggagctgacgcctgcgctccctgacaagtcgctgtccgagtaccgggaggagatccagcgcatgtatgagcggggagggtttgcgctcgccaccacccctagaagctgacaccatcgtcgccatgttaacctgctgctgtacaatacacctgtaaatacgaactaatccttgcagcagagaaatcccagatgaacaaaccccccaactgaattggctaatggtgcggggtttgatccaggacgctgctgtgtgtaacgctttttacaagttgaaatgtggccaagttcctccgaagattcatgagaaacatgaagtacttgtgtccttgtacgcttttggtttggtttcaatgtttcatttggactggatcaagtccgacctcttccgcgctctaatcaggacgcgacaactgtgttgattgtggcttctcttccacaccatgtaaataagcaggaaaatatgaaccaacgttatcgtaccttctcgtccacatatatctaactaaatactcc

SEQ ID NO: 42679 - DNA, 431 bp, Zea Mays
aaggcaagaagtggctcgccttgacaaggctttgtatgacaagaaaggcaaagccaaacaaatccaagcttttcaggataacaccactgtgagagtgaacaagcccgtggagggagaaaccatgatttgtaggctatgcctcaaggaaggccacaagtcttaccaatacaaggcgatgaccggggataagcaaaaaacaaaagctcaagcaaaagccaacaagaaaaatctccaacacctacatcaacaaggtggataaaaggctgctacaccgtatttgatcaagaataaaaagaacggaaaggtgatagcaatcaaggcaaacaagcaagccaacaaaggaaagggggccaaacacatctgtgtgccaaaggagattatctcaaccatgaagagcaccaagaaggtttggatcccaagagggaagtgag

SEQ ID NO: 42680 - DNA, 2485 bp, Zea Mays
gctaaccgcggaccgaactttgaccttccgcgcaatccgccgcttctattctatcgtcgccgacgagcgacgacttcctccttccacagttccacttcctcttcctcctgcccggcgcgctcccacctcctctcacaatcacaagccacacccatggcgacgacggcccatccggcgctccccttgctcatcgtcctagcatgtgccggcgccgccagcgggttctacctccccggcgtcgcccccgccgacttccgcaagaacgacttgctcgccgtgaaggtgaaccagctgagctccatcaagacgcagctgccatactcctactactccctccccttctgcaggccggacaccatcgtcaacagcgccgagaacctcggccaggtcctccgcggcgaccgaatcgagaactcaccctacgtgatcgcgtgcaaggttgttctgaccgagcagggagcaaaggacatcatggagaaaatccacgacgagtaccgtgtaaacatgattcttgacaacctccctatggtcgtcccgattgagagattggatagagacgcgcctccattctatcagcaaggtgtgcacgtgggtgtcaagggccactacgctgggagtaatgaattcaagtatttcatccacaaccactactcatttctcgtgaagtataacaaggatgcacaaacagatctcgctaggattgtggcctttgaggttaaaccgttcagtcttaaacatgaattcgatggtgattggaaggggaatgcaactcgacttaaaacctgtaatacacaatctgagcatctaatagtgaactccgatgggcctgaagaagtaaaggcaaacaaagagatcattttcacctatgatgttaactttgaggaaagcagtatccagtggtcatcccgctgggacacctacctccgcacgcctgacgatcattggttttccatcgtgaattctctgaccacggtcctcttcctgtctgtgatggttgccatgatcatgctccgaactctgtaccgcgatatttccaagtacaaccagctagaggaccaggaggaggcccaagaggagtctggatggaagcttctccatggcgatgtgttcaggcctcctgccaatgccgacctgctgtgcgtgtacgtgggcacaggtgtacaattctttgggatgctgctggtcaccttgctgattgccatcctggggctcctgtcaccttcaaaccgtggagggttcatgacagccatgatcctgctctgggtcttcatgggcctgcttgcagggtactccattgcacgtcttcacaagatgttcggggggctggaatgggagaaggtcgccatcaagacggtcttggtattccctggagtcgtcttcgtgatattctttgccctgaacaggctcctctggggcgtgaaatcatctggggctgtgccattcaccaccatgttggcactggttttcctgtggctcggaatctcaatgccactcatcttcgtcggcagctaccttgggtttaggaagcctgccatacagggcccagtgaggacaaacaagatcccacgcctgataccgcagcagccatggtatatgaacccagccgtctcggtgttggtcggaggtatcctaccctttggtgcagtgttcatggagctcttcttcatcctgacaacgatctggatgcaccagttctactacatcttcgggttcctgttcctcgtctttgtgatcctgatagtgacctgcgccgagatcaccatcgtgctttgctatttccagctgtgcagtgaggactaccagtggtggtggaggtcctacctgacacccggctcgtcggctctgtacctcttcctgtatgcagcattctatttcttcacgaaactgcagatcacgaaggcggtctccggcgtgctctacttcggctacatgctcatcgcggcttatgccttctttgtactcaccggcaccattggcttttatgcctgcttctggttcaccaggcttatatactcttcggtgaagattgactaggaagctagaatgccatcgtttcatggtcggcaagagaaatcagaggtcaatgttgtgaaagaatacatgaaatgatgaaaatgtagcatggtttatgcacaaaagtaaggtgtccatagggtatctattcgtctgataattcagttacacttttgcgttcagtaaaacttgaggtatgtgcgctcattattatcacgcagtatacagaattgagatggtacttctagcctgaaatgctgagcatttcatgttgacatgttgtactccttctctttcatacaaaagatgagtcgtcatttggggcaggggcatgaccacagtctacaaaagataatactttcactatgttttctatgaggaagtaatatttcaattaaaagactgtacgatattgtaatattttttcatcataagtctagtaaaaatgattgtggtgtcattctatgtatta

SEQ ID NO: 42681 - DNA, 375 bp, Zea Mays
cagggtggcacagatccgggactgttgcacgcacgacacgacgacgagaacctaggatgtgcgacacacgacacgcagtcagcctgtcgcacgaccgagcgatgacgacgaacagagagcttcaggcgcggccaacagatagcttgcgcgcagggacttcacggcgcacggtgctgggcgcgtaaggagcaggacgcacaccggcgagctgagcgacggcaggaagctcaacgcatgcaccagagagctggaacactgcagaccacgacgctggaggaacctcatggtgcgcaaacaccagagaactcgacggcgacgcatgctcaaggagacacgcgcggtcagggagctcgaccggcggtctgcagccgagcg

SEQ ID NO: 42682 - DNA, 1977 bp, Zea Mays
aaatgtcgtctactcatctatcttcaaggatgtcgtggctcggaacctccgttgaacatcaccgacgagcattttctggacggtcttcttagcgctgatttccgctatatgtcgtgccggagtcgctatgagttcgccgtctaccacaagacttcgtcgcacaagccgtccccctacctcatcgctaacctccggaagcatgaagcgctccagaagcgatgcggccctggaacggccgcgcacaagaaggcagtccggcggctcgactccggtgagggcgtcgtcgacgatgacgatggctgccgctacctcgtctacatcagctaccgtggcctcggcaaccgcatgctcggcattacgtcggccttcctctatgcggtgctcaccgagcgcgtcctcctcgtcgacggcggcaaggacactggcgcgctcttctgcgagccctttccaggaacgacgtggctgctaccgcaagccggctggttctccttctccccgctaagtagactccaaggctacgagggcggctccaaggagaacctcggggacatgctgcagagcggcggcatcaccgtgtccgccgacgggaacgtgtcgtggtcggcgccgcggccgccactgtacctgtacctccacctctccggctcctacggatttcacgacaagctcttcttctgcgacgcgcaccagagactcctcggcgaggtgccgtggctgttcatgtggacggataactacatcgtgccggggctcttcctcacgccagcgttcagcgacgagctcgaggccatgttcccggagaaggagtccgtgttctaccacctcggacggtacctcttccacccgacgaaccgcgtctggcacgccataaagagctactaccacgccaaccttgccgacgtcgaccagcgcgtcggcgtccagatcagggtgttccagaagaagcagccgccacggttcgtgctggagcagatcctgtcgtgcctccgcgacgtgaagctcctctcggggacgaagacggacgcggcaggcggcggcaacggcacgtcgtcctcgttctcgcgcgccgtcctggtgacgtcgctgagctcgtggtactacgaccggatcagggacgagtacggcggcaggatctccggcggcgtgcaccagccgagccacgaggggcggcagcggtggcgcgacgcggcgcacgacatgagggcgctgagcgagatttacctgctgagcatgtgcgacgtgctcgtcaccagcggctactccacgttcgggtacgtcgcgcaggggctcgctgggctgcgtccctgggtcatgcccagggcgccgatgtgggctgccgactggagggaggagctggacccgcgagacatgccgtgccggcgggcagactccgtcgagccgtgcttccacgcaccgtcggcctaccgctgcgcggcggggagggacgtggacctgggcaaggtgtcgccatacatcagacgctgcgtcgacgttaagtacggcataaatcttgtcaatgaaagcagcggacagtggtaacatttgtctaacaaaaatggctacatcatagcgcttagttgcaaaaagattctcaaaatttaagcactggtattttccaaaacaggagtcgacaggtgattcaaatgtcaggaatccaaagttctttgagacattgcttgtgatggattaggcaagaatttaatagctacatcattccaatttctaacaaaccagcatctgttgatgcagtgaaatctcagaagcaaacatatgacagtatcgtgcctggaaaattgttacagaatggctaaaaataagccagttaacagcagttctttgtccactaaaaagaaaggataactcagttattcaaggtattatggaacaagagatgtaccaagcaacccagctgcattgagctataataaatagtgtgaaaaaactgaaaccccaggaatttcgatattgatatcccaa

SEQ ID NO: 42683 - DNA, 1844 bp, Zea Mays
ttcggccgagcagacccgtggcctcactcccccgcgcgttagggttccgctctcatccttcgtgcctgctcaccgccgccacttccagctaggccgtcgtcgccgcgccccaccagctgttattcacggaatcgtcttctggtactattcgttcccccttctgacttgcttcttaactacactacctgtcatccagtagccctgttcgtcgtcgacactccagttcgaataagccaggaagcctatggagatcatcatctcccaaccattgatgttaaggctgcacatttagtaaagcagctagcaagtgatgaaagtgtagagtgatctgtggacattatcattagggttcctttaatattaccatatcgaaagggcgtcaagtgcgatctccgcattcttcatgtatcctgtgaggagcaccagtatggtgttgtaccacaattccaagctgaaagaaaaaaagactacgatgcggatggataccatccacacccacagaccacagtggcttgctttgcttaccagagcatgacaccagaagagagcgagagcctgacgatggcgccgaggtcggcgaaggcggcggacgagaatccggtccaggtgagagggcatccgccgaagaagacgaaggcgagctggccgaacacggggatccacatggcgacgaccatggagcccatgacgccggcgaggccgaggcggaggtggacggcggcgagccaggacagggcgaggtggaggccgaggttgagcatggcgaggtacgtgatgatcatgttcttgatctgcgcctgcaggtacatctgcagcgggaaggcccagacgaaggagaagagcacggggatgtaccagagcgccacggtccccgccaccgccgagatgtccgggtcctgccccagcgccaccagcagcggctccgtgaacaggtacacggggagctgcaccacggcgcacgccgacaggatgatccacgaccgctgcagctgcatgcagatgcatatcgcgcccggccggacgccgacgacgcggacttgttggaacagagccgtcgtcgaccagtcgacgcctgggtgcctggccattttcttcgccgaagaagggaaaaagaagccgccgccaagaccaagagggaagaagaggaagcagcagccaagagagcaattggaacatgactgttgggatcggcacgagatgtcgtcgaggcggcggcaagctttattgattccaatgttttttttttctatctagcttgtccggcacgagttggtggctgactttattcgggctctgaaccgagagcacggatcgatcttttgaatcgaatgctgctggcgggggcgggccgcctggagctcgacgaacgaagggcaagacgacatcgactacaaaatggtccccgatcgtgttgtgcagcgtgttgctcgtgatcactatacttgcatgcatctttgaatttgaatcatgcatgcgtgcatgtccgtatatagatccacaacatgggctgtactttttttgaaaaaaattgtttcgtctttctcttttttgcgaacgataattgtcggcacgtttttttttcgttcggaggccggtgttagagagtacacatgtgaactgtctgtccacttctctctccgttagcttaatcttgtgttctaacgagagagagagtacgtgtgtgtgcgtgtatggagggagttatgcgaacaagaatcaagaacgaatggattgatagaaagacacgtacgtaccaggatgccgttgctgaacctcatgaggacggtggagacgagcgcgtaggcggcgagctcggtggcgccgatgtggccgatgaaggcctg

SEQ ID NO: 42684 - DNA, 1585 bp, Zea Mays
acagggccaatctatgggcggagcatggtggcaccagcaggtgcagaaaggagtggcggtggcggcgcgaatgcaggtggtgctgagagattgattgtcgatgcggcttgtcagcttgctgcccacgatcatgatgttcatgtcttcacatcacatcatgataaaaaacgttgctttgaggagactctttctggtttgtttccggttactgtacatggggatttcctgcctcgccatgtgttctaccgctttcatgctgtttgtgcttatcttcgctgcatttttgttgcgctctgtgtgctactcagatggcccttctttgatgtcatattggtagaccaggtttctgttgtgattccactacttaaactaatggcatcatcgaagataatattttactgtcatttccctgatctgttacttgcacaacatactactatgcttcggaggttatatcgcaagccaattgacatgattgaggaaagcactactggtatggctgatttgattcttgtcaatagcaagttcactgcagcaacttttgcaaggaccttttctggtttacatgctagaggaatcgagcctggtgttctttatccagctgtctctgttgagcagtttcacgaaccccatgcttataagttgaatttcctatcaatcaaccggtttgagaggaaaaagaatcttgatcttgccatttcagcatttgctttgctccgttctgctgcttggactctacctggtgatgctctacaagaagcaacattaacagtggcaggtggctatgataagcgtctcaaggaaaatgttgaataccttgaggaactcaaaagactcgcattgacggaaggggtttctggacaggttaattttgttacatcttgctcaacatctgaaagaaacgagcttctctccaactgcctctgcgttttatacactccaaaggatgaacatttcggtattgtacctcttgaagccatggccgcccataagccggtaattgcctgcaatagtggtggcccagtggaaacagttgtgaatgaagtaacagggtttctgtgtgatccctctcccgcagaattctccaaagccatgctgaaacttgtgaatgatcatgatcttgctgtcagattgggtgaacaagcacgtgaccatgtggtgcaaaaattctcgaccaagacatttggtgatctcctcaacagctacgtcttgaacatctaccatgagaggatggaatgatctataatattgggtcagccatgccatatgaaaacaatttgttcaatacaaggttttttttgcacctttacgtctaatctgattttgatggacacacataatgacaatgacattccattgaatccctttggcatactgtagtcactctatgatctgtatattgttttcaattataacatcaaatttggcttggtccatcctagaatctgaatggagctggagtagagatggcaatggggacccgatttcctgcggggaattcttctgttagagcaacttcaaaagaacgtgtaaactaaccccaaaacagatattagtcaagaatagtgatttttttactccaaca

SEQ ID NO: 42685 - DNA, 3891 bp, Zea Mays
tcttgctgtgcggcagccgtcccataaccggagttcggaggcggtgtcgtgggttcgcggcgcctgggttcagggttttggccggcgcctctctcgccagcgagcacgggtcgggatggagtccttgtcgtcgggcggcgagctggcgcggcgccagagtagcggcggcggcagcagcggatggggtagcttcagtggcgacgccgacccgttcgatatccccgcgaagggtgcccctctcgagcggctcaggaagtggcggcaagcagcacttgtgctgaatgcatcaaggcgctttaggtacactcttgatttgaaaaaggaggaacaaaaggaggagatcaggagaaaaatccgtgcacaggcacatgttataagggccgcttttcgtttcaaagaggctggccgaatccatgtacagtccgaagaaacaaaagtaccatgtgctgatggtgcacttggcttcggaatcaaagaagaccagattacagcactgacaagggatcacaactactctggtctgcagcaatatggaggggtttctggtgtagcacatatgctaaaaaccgatacacagaaggggattagtggagatgactcagatttgctggcaaggaaaaatgcatttggatcaaacacatatcctcgtaagaaaggaagaagctttttggctttcgtatgggatgcttgtaaagacttgacgctaatcatcctcatggttgctgctgctgtttcactggccttgggcataacaacagagggcataaaagaaggctggtatgatggagcgagcattgcctttgctgttcttctagttgtatttgttacagctatcagtgactacaagcaatcactgcaattccaaaatcttaatgaagaaaaacagaacattcgtttggaggttgttagaggcggaaggcgaatcacggtatcaatatatgatttggttgtcggtgatgttgtccctctcaaaattggtgaccaggtccccacagatggtatccttatcagtggtcactccctttccatagatgaatcaagcatgactggagaaagtaaaattgtacacaaagatcagaaatcaccatttctaatgtcaggttgcaaagttgccgatggatatggaacaatgctggtaactgctgttggaattaacactgaatgggggttgctaatggcaagcatatctgaagattcgggtgaagagacaccacttcaggttcgtttgaatggtgtcgctacttttattggaatggttggactttctgttgcccttgcagttcttgttgtacttttggccaggtacttcactgggcatacttataatcctgatggatctgtgcaatatgtgaaagggaatatgggtgtaggccagacgattcgtggaatagttaaaatattcacagtggctgtcaccattgtggtcgtggctgttccagaaggacttccattagctgtcacacttacgcttgctttctcaatgcgcaaaatgatgaaagacaaggctctggtgaggaggctttctgcatgcgaaacgatgggttctgccacaacaatctgcagtgacaagactggcaccttgacgttaaatcagatgactgttgttgaggcatattttggtggaaagaagatggactcacctgataatgctcagatgttatctgctgatgtcacatcgctgattgttgaaggaattgcacagaacacttctggaagcatatttgagcccgagggtggtcaagaaccagaggtgactggatcacctacagaaaaggctatcctgtcttggggactaaagctgggtatgaaattcagtgaaacaagatcgaagtcatctattcttcatgtatttcctttcaactcagagaaaaagcgaggcggggttgcggtgtacctggctggctctgaggtccatatacactggaaaggagcagctgaaattattttggattcatgcacaagctgggttgacactggtggttcgaagcattcaatgactcctgaaaaagttgccgaattcaagaaattcattgaagatatggctgctgctagcctccgctgtgttgcgtttgcctatagaactcatgagatggatgatgttccagacgaagatcggagagaagagtggcaacttcctgaagataacctgattatgcttggaattgtgggaataaaggatccctgccgtccaggagttcgagattctgttcgtttatgtcaggcagctggcattaaggtgcgcatggttactggtgataatcttcaaactgcaagagccattgccctggagtgcgggatacttgatgatcccaatgtgtcagagcctgtcatcattgaagggaaaacattccgggcgctgtcagacttggaaagggaggatgctgctgaaaaaatctcagtgatggggaggtcttcaccaaatgataaacttttacttgttaaggcactgagggcaagaggtcacgttgttgctgttactggagatggcacaaatgatgccccagcactgcatgagatattggtctatcaatggggattcagggaactgaagttgctaaggagagttctgatattattatcttggatgacaattttgcctcggtcgtgagggttgtcaggtggggccgatcggtgtatgcaaacatacaaaagtttatacagttccaactaacagtcaacgtcgcagctctgataatcaatgtagttgctgccgtcagttccggaaacgtgccattgaatgctgttcagttgttgtgggttaacctaattatggacactttgggtgcccttgcattggcgacagaaccacctacaaaccatcttatggagagacccccagtagggagaagggagccattggtaacaaatatcatgtggagaaacttgattatcatggctacgtttcaagtttcagtcctccttagtctcaacttcaaggggataagcctcctgcagttgaaaaatgatgatccagcacatgcagataaagtgaaaaataccttcatattcaacacatttgttctctgccaggtgttcaacgaattcaattcacgtaaaccagatgagctgaatatattcaagggcatttcagggaaccatctttttattggcatcatagtaataacagttatactccaggcgcttatcgttgagttcctcggcaagtttgcctcaacagttaggctaagttggcagctgtggttggtatcgataggtcttgctttcttcagctggccactggcattcgtgggaaagcttattcctattcctaaacgtccattaggagaattctttgcgtgctgctgtaactgtaaggggagcaaacaaggccctgatgacgcaacctctaatggtaaggaagacaacaagcttgagccatgagatatcgcaaggtttggtggctggcaacgatggccttctgctgtttcttgccagggtttgacgtgttggatttgtaattgcccctgattgcgattgtatatatatatacacacacgggttgctcctaggatctgttatacgggcaacatcaatttcataatcatagagattttcctcttagtcttcatttaccgagttcattgcgaatatgattaaacttgtcttgtctgaatctgaatctataacgagagttgggctatggtacccttctggagctgaccatgagtaggatgtcctgagatcttggacatcctgtgatgaaagtctgggaagattttagggccggttttaggttggcttcaaagcttgagctgacctcaattgtctattaaggagagtagcatttacgagtctagtgatgaatttatttggtctataaactggttagaagacaatctgtaatttgtagtctcctgacatccaatagaattcaggagtggtgtaccgact

SEQ ID NO: 42686 - DNA, 500 bp, Zea Mays
gttaatttgcatgcctcgtacatagtctctcaccatctattcactataatatacataattcgtgtgacaaacattatcaatatcgcacaaactattttaaagagtcaatatataatttttaataaggagcacaagggctatggacattcagagcaaagcagatcaaagcacgcagagcgcatgcaccctgagcatcatcgcaatcgaattgtggttcctactttttttatgcaccatacctaaaaatagaaggcatgcactctgtcaacaatcaatggcagtatattataataaaagaactctaaaagtctcatcagacgaaatgctttacgaactatatgtaaacgaggagatggagggaatgatgtgagtgtcaaaaccttgacccaacttcaaaattgcagcagtaataaatatgctcaaaaccttcttaaatactcgagcataaaaaatatcacttggtgctccaccattccaagcaataatatcaaggcctatat

SEQ ID NO: 42687 - DNA, 1856 bp, Zea Mays
tcaaaatgcaacgctccccacagaaactaagcaaagaaatagcgccaacaagttaaataatgccccctttgcacgtccccggtagtagtactcctcgcaagttctatcacctggtgctgttccatgtgcacccgttctggatccaagtcctgtacttccttttgatctccgttttgggtttcttgatgctgagagtcctgcccatgaagtccagctccgtgcctaggccctcggctctggacctactcttcacgtcggtgtcggcgacgacagtctccagcatgatcgccgtcgagatggaatccttctctaacgcgcagctcctcctcatgaccctccttatgctcctcgggggcgaggtgttcacaagcatgcttggtctccacttcacctgcaccaagctcagaaacaagagagaaacacctcataataatctccatggtaatagcttagagcagagtcgtcgtcgtcaccgtcccatggagatggaagcccaggccgccgccgtccaaatggagcttgcagggttcaacaaggacggccatggcgatttcgcatccatggctaggttgctaatgtttatcgtgctgggctacatcttggtcgtgcacatcgccggctacgcgctcattctaatctaccttagcgtggtcggcagcgcgagagcagtgcttgttaggaagaggatcagcctgagcaccttctccgtcttcacggtcgtctcgtcgttcgcaaactgtggcttcgtgccaaccaacgaggggatggtgtccttcaagtccttcccgggcatgctcctcctggtcatgccacacatcctgctcgggaacacgctcttccccatcttcctcaggctctccattacggcgctcgagagggtcacaaggtggcgagacctctgcgagctgctgagagacagaggacccggcggcgggccagctgcggctgccgccgccgccgctataggctacgaccacctgctcccgggaccgcgcacatggttccttgctctcaccgtggcggtgttcctggcggtgcagctggtgctctactgcgccatggagtggggctccggtggccttggagggctcaacgcgttccagaagctcgttgcagcggtcttcatgtccgtcaactccaggcactccggcgagatggtcgtcgacctcgccaccgtctcctccgccgtcgtcgtgctgtatgtgctcatgatgtatctaccgccttacactacatttttaccggtagcagtggaagacgaccagcagcagcaaaatgaggcacaaccccacgacaatagcacgagcaagagcagcacaagtattagcatctggcacaatctgctcatgtcgccgctctcgtgcctaaccatcttcatcgtcgtcatctgcatcaccgagaggcggcagattgctcgtgacccaatcaacttcagcgtcctcaacatcgtcgtcgaggtcatcagtgcgtatggcaacgtgggattcagcaccgggtacagctgcagcaggcaggctcaagaagttcagcatgcttgggggtcaggcatggaggctgaactgaaccgaagtactatttcgaaactcgctcgatcaacctgatctccaggactccaagactagtacttgaattctcagtctattcagacggaaccggatcatatgacaaatccatctgcgaggagtttggctgcattctgtaaagtcggtaggggcaaggggttgttcatatcctttttatttaaaaataaaaaatagttttatatctcgacttttgaaaattatattttgaggtgtctgtcacccaggggacggcagggagttaaatgtaatttttaataaataggttctcgtcgc

SEQ ID NO: 42688 - DNA, 854 bp, Zea Mays
ggtttagaaagttagctaggtttcactgctcgtgcctcgagcaccacggcggcggcggcagcgggactgttctggccgacgacggcatcgatgacgacgagccttcaacgggccaagcgcaggcactggcgtcgcaccaaacttggattctgagcggtggaagaaatggtggctaacgacgcctcgggggtatagggctctgcaagctaggaagctcttgtttatttttttcttgtgttatttgtcattgtattaccatgttttgtctgatggttaaagaaccgcctttatgctatggtgaatttatttaaccttgcagcgccttaatcagttgatctctagccaattatataatctgcctagattatataatccatttgccatagattcatttgcaggagtgttaaaacagctcgttgttttgggatttgccgcctcaagtttcatctagctacctccaacaaacccttcaatctccatggctacatcgatatcaactcaatatactaacgaggaggaaattaaaaggaagagaaagaagcgaaagagagttgttgtattagcctagtgtacaataaagaccaagcaaatggagagggtgctaaaacagcagctgaaagttcaaaggaaatgggaaaagagaatgatatcggaggcaaggatgctccatattctgtatcttcctcgagtagtttaaaaagacaaagatcagatgattcatttaactctatatggtgtgataagtttgacatgtatctgcattgaaagatgatggtccaaagctaccctcttccgccgaagttctcgccacattacaagaggttgagggacttgatgaagacacagaacttgag

SEQ ID NO: 42689 - DNA, 1639 bp, Zea Mays
cgcgcaggcgccgccatgggcattggagtcgttacgaggtcgaagaggaggagattggacgaggaacagcgcctcgccgacaggatcagcagcctccccgacgacgtcctcggtgaaatcgtgtccctccttcccaccagagccggcgcccgcacgcaggtgctctcctcccgctggcgccacatctggcgctccgctcctctcaacatggacctccatcccgacggccctgaatggcggcacatgcccgtcgagcagatcaggcgcgtgctctcggcgcacccgggccccggacgccgcctctcggtccccagcagattcggctacctccactggatggacggctggcttcggtccgcagccgccctagggcctagacaacctccaggtgctcgaactgaactcacacagccgtcgtcctcatcactggtcggccttgcccacgcggccgcttctgccgccatcggtgcaccgcttctcgtccaccctccgcgtcgcctgcttccgcggcttcgggtttccgaccagtgccaaggcccaaggccctcccctcagccagtccgcctgccgcgtctccagcagctgactctctcgggcgtcaccatctccgagggctccctgcatgccatgctcgctggcgcccctgccctgcggagcctgctcctgctcgacagcaacgggtttgcccgactgcagatagcgtcctgtagcatagaaaacatcggcgtgcgttcccggtgcagaggtgctaagctacaacacctcgttctggaggacacgccgtctctgaagagattgctactgttcgaaggaaccaatcacatggatatctcggtggtctccgcgccaagattggatgtttttgggaaactctgtgacgacgccaccaaacttaagtatagcagcgccacgacggatcttcagggatcacccactgttagcgtgctgcacagtgtgaagcttctagctttgtctagtgtgaggatttcgttgcatgcgctgattgacttgctcaagtgcgttccccacctggagaagctgtacatcgaggcatcaagtgtttgtgtgagaaatggatcgtatcataaataccggaagcacatcggcaccctatgcgtccgtctgaggagggtcgtgctaggagggtacctaggcagcaagccacacgtcaacgtagccaaattcttcgtatcgatcgcgagagcgctggagtcgatgaggctcgagtcatgggtaattataagcaaagcctggttggcgagacagcataggctgcatgctcaacagcaggaagagggcgtcgtctagggctgcacggttcgagttcgtagctcataaagcaaaaatattcaccggttcatcacttgatgatctgcgtgctgagcaggtgcatgatctgtcgacggccgacccccttttcaaatgtggttttaggtctctggtctgatatttggttttgatttgacctttaattgcattgtgttatctctctttcctagagacactgtgattttatcaacccgggaatttggtgctattatatcactatcgaaatccgggcctttgccgagtgtcagcggttttgctgagtgctttttatcgggcactcgacaaagaatactttaccaagagccgcact

SEQ ID NO: 42690 - DNA, 922 bp, Zea Mays
atcccagcccaaacccctcaggactgatttgggcctcaggcagcccgcagccggtcagtccttccttttcctgttcgcgtccacgatcctgccgccgccgccgctcgcacctccacgatcctgcccagcgccgtgcgcctccacccccgccccgtccgccgcccgcctggtccatccccgtcccgtctggccggcgttgccaccccgggtcccgcgcgcgtggagccccggcctctaccagccgcacgtcgcaaccgacgaggacgcgcgcgcctgcagctcctgcccggtcccggctggccggccgccggcactccggctgcccctcagcggctcagcccctgagcttgtctgcttgaatgcttcagtgcgggtgcagcacagcggcagtgccccctactgtgtatcgagcaggcataccctgttaaaaatcctggttccactactagtcaggccatggctgcagcagaggcatgggtgcggcaggagaaagttaggaagtttgaggagttcgtggaccagcggttgaaacccgacctcaccaatgccatcgcacagcgtaacaaggtgtttgagcagcagaagaccttcttggatttgaagaggaacattgaaaatttggagaggaatggtgttaccagcatgcggtccatggtcaatcttggctcagaggtgtacatgcaagcagaagtaccagatacaaggcatatttttgtggatatcggtctaggttttcatgtggaatttacttggcaagaagctttacagttcatatctgtaagagaggcaaggttgactaggaggggtgagcgtcaaatatattgaaaataagagtatttacaaaatgttaacagagcaatctatattacaacctaatttatgtcaattggttacaccaatgcctaatggttggaattttttc

SEQ ID NO: 42691 - DNA, 2296 bp, Zea Mays
gttatttctaactattaagtgttaattatctaatgtatttaatgaagtaacacagttagacttgcctaaagaggccagtgaagcttcactggctgcatagagaagtacttttttattatcatgtaaatgcatggttctttggaaccatttggcctatctgattaattattactataaccgggaatgggggcccgaggctataacccggactcctcgccctcgtacctcgttgctggcgaagagcgtcatcaatggcgagtggaggttcactacacagccgccggatcttggagcatcattcgcggtcttggcgcgtctacgcaactgtatcctaagggcgtcgaagaggagagacggtacgccggtggcgacaaggtacgatagatttgaactggagtgtggaggtatcgtcggccagtgccatcagcgatgggtggaggtttccgtcgagtcgaggaaggagcgcttcgtgtaaaggtagcactgcttgctcacgttaatcatccctatgcctacatctatgttttggttttgctgacctgcatgaatacaaccacttgttttggtccttggtatgttttctatgttttggtttttctaatctgcattggaaggcatgttgttggtaagcattgtcgatgctctggtagaatatatcttgagttacaaatgcgagcttcagttttcacgcaacttcatgaaagcttagctttatagcgcagttcagtgttaattatttaattttgtaggcaataaaaatgcatttcttatcctttatggtagacatttctgtcctttgctactatctaactgaatagctgaaatacaatgttttcattggtcgattaatattctatccacttgaatcacaatcactcccataaagaaaatttcttttccgtaattgaagttaatgaacaatacaaccagggaattgttttgcatccattgcatgtcatttttaggtaccaaagtaaacaagctctggacagattcagtttcagtttcagtgatcctgtttgcaacatccaagcatcctgtaatcacctgtatagcagttacacctgttcatgtacatgcttttaacaataaatcaacaacttacatgatagctttattgtagatgttgtttgtttattgttattatcttatcggaagtgccgtcaaggaagatgacgatggtggtagggatcgacgatagcgagcacaacttctacacgctgaagtgggcgcactgcagcacttcttcccgccgaccaagctgcaacactactgccttgttgtcgtcaccgccaagccctctgtcgcctccattgttcgccctgccaacctagggactgattctggactttcaacttaatgcttctctacctgttgtcatactgaagctactgctcctggaagagcatcaccaacatatccctgatggccctctctgcttcatgctccaagcacttggatgttcaccttgaaatataattattaatagggactgtccaaatacttcagctaagcaaaatagcgacctccataaaaaagcaacctgtaactatctctgaaaattttgaaaaaaactgatggtaactgataagctgctgctagcaactaccgtcgcctatttgttttgtttcagaaagttaaggtgcatgaacctctgatatagcatttgacacactgtactttacacatcacccaggaggaactcttgtgtgggtgtgggtgtgggcagggctagaaggaagaaccatgcatgctactacattcatataatctttttcagaggtttaagatatcaacactaatctgactttgattgtctgaaagaatttatcatgctgctgcttactgttttcggtagggggtcaatgcttactttagctgtgcaataattcctcaatattaaaccgagtttgatcaagtaccttgaagctacaagtagcagtgatttgacaggtttactactgcctgaaacatgattggagggcacattgtggcggctacgagagaccgattttcctgtgtggtggtgacaacgacaccgtggagccaagtcaatgtcggcaagctgatttttcagattggaacctatggttctttttaaagatcgaatatgttctagcatctttaaaagatttgtcagaatgtaaacatttgttttgaggtcatttaagcctcaaacaaaatttcttggacttatttcgttggagggaacgagacatctcgagatctaaatgtgtatagaacatatattttttatgggtatcaaatataattgtgtgtaaagcacgtacatagt

SEQ ID NO: 42692 - DNA, 373 bp, Zea Mays
aaggaccgccgtggtgtggcctgcgcgtctgctagattttggacctcgggtttccactccgagcgatcgtcgcagctcgttggtggcgtgtgccttgttgattcgggcgaagatcaccggattcgcgtgtaatttctcgccggtgtcatgcgcaaccaccgtgcaatggcgctgtgtggtcagcgacgtctatgccccgaattgtgataaggatctccttaatcgtttcgtgttcgcctattccatgtgtagagccctgtggatttgattagaggtcgtcggggggctcgctggtgggcgcgccgccatgggcgtggtgtgcgcggccgagcttggctgctggaggccgggggcgaaagagtaggagaaggga

SEQ ID NO: 42693 - DNA, 481 bp, Zea Mays
ttaagtgaatatatcccattagagctaaagcaaacctctatcactccttcctggctaggattaactttgagtgagattgagaggcctttagtgcattgcattgagagttgcatcttatagcataatagttgttgtggcttggaattatgttgttacattagtgattgccatcatctagatagcttgaaacttgtgggatcatcaagcaccataaggttattgtgtggttactccgattgaagggttatggggggctctatgctcattcccttgggaggctcgcaaagtgttatttcagtggaatcatctaggctcgggaaagtttcttatgatccactagttccactctagtgcccatgttgttgggccaaggttgtgtgctcgttgtgatctaatagaatccgcttcaataggaaataagttgtcgagcaaccgaactttcagataaattattgtatcatttgcccgcacttgtttgatc

SEQ ID NO: 42694 - DNA, 703 bp, Zea Mays
caagacgttcctgccagaggatgactagctcatccattcgtgccaccacgtcgcgagcggcttcgcttctcggctaatgaagtaggagctcggtgtgttgtctgccatgctcggggttcatcttgatgtcgaaccagggcatgttcgtttccatcctaatccatattgattggagggattgggtagatttaaatccctacgggaacgacatgccaccgccgaccaagtgaagcacaactacagctacaatgcctcgacgtgcaacaataagctcattgtcgtatgttccctgctcgaccctgtgtttggatggaccagtactagtgaattgttatggaaaaattagtcagttaaatattgaccaactagaagttagcccttgcctatttatatctatcatggtttcattaccacaacaagtaaatttgttggttagaaaaggtttagcgggttgttgtcctgttggctttgctctagtgagcctaagaaaaataaggtttaggttagtttagagagaattcctgtgtccaatatagtgttgatgtcttcgttactttttgagtgttacaaagtgcggcgcttggctctcatgcttgtgtgggaagtgtacaaactaagttcatctgcctctgctgtttagcccacgtccctttatatatcttggggaatgagcatccattgttacatgaagattttgatggag

SEQ ID NO: 42695 - DNA, 911 bp, Zea Mays
gtatggcagcagtgcgtcgacagtctatggatttgggtgttttattaaataggcgggatgcgaggagccgaacaatcacttgaacatggtcgacggcgaggcctgccgggagagaatatcggcacacgacgcggcacgacgaactagcaagctgagctacggcgagcgatgtcgacaacaaggccggggcgacatagactcgaggctgctgcacgcacagcgcgacgacgaacgacgatacttggcaagatcgacgacgtgatgggaattcgggccaagcgagccgagaggacacgctggcgagcagaaaataggacacgagctgcgctgaatccaaacactgcgagataggtaggaccgagcgcgcagggaacaccgcgacttgcgatggcgagcagagcgcagggcgctccggccaggcgagcaggaaacggctgggaacagggaggggctcgcagagaagaagggaacgcgatgctgggagcaggggcctcggctgggaggacctcgactggcggccatggacggagggaaactcgacgcggccaaacttgaggaataggagggaggggcagagcgcgtgccggagctggagaaggagaccgcaatccgtacgccggcgagcagggggaggaagaaactccggccaggcgggcgtcgcgagcagagggagcttgggcgccgagctaggaccaagcgccggccatggcgacgagcaccgagcagaggggccagggcacttagcgcgcggcagacagagcagagcagggaggaagctggagacgcggccgtgggcgaaaccgagcggggcaagaaggggcgccatggctggacgcgccaggggagcttcacgagcgagatcggagcagggagagaagaaaagcaagcgccgagcagagaatgagccggac

SEQ ID NO: 42696 - DNA, 1605 bp, Zea Mays
ctctcgctgtctacgcccaccaacggatccgctctcccatggaaggaaactctccaccgcgtccatggaagccgcccggatctgcgtgcgcaccatctctctcgcccccgacccgtctctctcgctgcccagccacgttcgctctccaccgcgcagatcctcgcttcgcaatcaacgctcccttgacttaccagttaccacaccaacccaaccccgactctccatggaaggcgcgacgaccgagacccagctctccatggaaggcgtcaacatgccctcgtccccgctcgcccacgcatgcgcgcgcccacgtggctgggcagctcccgcaccctagcctgtgccttcgccacgccctcgcccacgccaacccctgcctctctcccgccgcgtccgcgttccggatctgtcgcctcccgccgcgccctgcctccctctcccaaccttgccagcaggaccaccgtcggcgatgcctccctcctgtcgcaccttacctcctcatcccgacctctccaccacgcccatgtccccattgtcgctcgtgctgggcccgtgccagactcatccacgccgctgatgtagagcgtgcgctaggcgagggggtgagtgcgtgaccgagatagaggctgcgacaacctccccggccaccttgccatctccatcgtcctcggggccaatgctggtagaggcactttggttcctggatgacctacaaggaatgggagatggtgggtaagcgtggggtgtagatccttccaggctcagatcgatttcttcgttcgctggtgaaagtgaaggttgtttgcccctcataatgttccatgaaaccgaacaacagtcaaactgagcattccttaatgcatttggatcaattgttctcaatgcgcctgttggaatcaagagttattacctcagcttattcttagagttgtcacatattgccatgcccttcataagagttgagtgtcctacttccgggtgcccatgattggaaggtctcttgggttgattttctcagggactacacaatcactaggctggaaattagcttatacttgcatgagctcaccttgtcatttgtggaagcattcactgtctcctgataagggtgagcttcacatctttagaacagacacgttgaaggaaatgagtatccgagtaccaagaacgaaagaagagcttttggatataaatggcctctacaagtaatgcagctactctgccttttttgaatgaattatgtatgctgccatccttttgttttcaaaaagggcttggtcccggtttgttcctttctttgttttttctcgaacgtttcttgtcgcggtctcatggtggttgctataactcaatctccagttcacagtagggttgaacaaagtataaggggcaggttgactcttctcacttgaaacgaaaattgcaggggctatgttgtgtaatggtaatatagtgtcacatcaaaccattgtccctgactcagttcatgctattcatgtgtgacatgtgtccagactttagagatcagatactatatgtggcttgtgtttttggctggtcacatcccctcttttctttttctgatcatatcattgcatttatgtg

SEQ ID NO: 42697 - DNA, 1858 bp, Zea Mays
gctcctccctctatccacttgcaacggtcgagaggaagcggaggtccatatcgctcattcccgcccgtcccgcaaccaccaccgcggccgcggtgccatggcatccgccgccggcgccgccttgtgcccatgctctttctccaccgtactctcctcctccccctcaactcccttccgtcccgcaaggacgacgcctcgcccttctctccgcccgctgccgcgccgcgccaggctaccgctgcggccgggccactcggtactgaggtgcctcccgaaatgcgactcggggaagccggacggaggaggagatgctgggttatcgggtcggaaggcggcccggccagcgggtcagggaggacccaggcggcccgcacagttcggcgcgtcgtcgtgcggactcgcattcacgacggtggcgggggtgataatgctccaggcatcgcagcaggcgcttgccgccacgcagttcgctggcctgcagcctgcggacgtgctgggggatctcggggacgtcagtacaggttttgcttcagctttcctgttgatcttcttttctgagctaggggacagaacgttcttcattgcggcactgttagcagctagaagttctggagctgtcatttttctaggcacatttggagctcttgcggtaatgaccattatatctgtagttcttggtcgagcattccactatgttgatggcatcattccgttcagctttggtggtactgatttcccagttgatgacattgctgcggcatgtctcttggtttattatggggttactacattacttgatgcagcctcaggtgatgatgaaaagatcaatgaggagcaagaggaggctgagttagcagtatcgaaattttctggaaatggtgcgggggtcatgtctgctgctggtactattgctagcacattcgtattggtttttgttgctgaatggggtgataaatcatttttctccacaattgcactagcagcagcttcatcccctctgggtgtcattgcgggatcactagctggtcatgccattgcaacattggtaagataatcatagtaacaggttgagagttgacagattaacatacttgagcaattagcataatattattgcaatggagttcagacaatttttttagcattcaccattggtttgttcgttggtctgtttttggctcagtatttttttctcgcgcaagtcttctctacttgttgtgcattaggaagtttggggttctgcactgacttggctccattggagtattcgtcataaaagaatttctgtcgtggattgagtacaaggagcaaatgtgtcattgcgtaccaatcaattgcagttcttggtggctctttgctgggaacattcctgtctgaaaagattatagcatacattggagggagcctattcttggcctttgctgcgattaccatagttgagatagtgacttgaaaagggagttccagcttccacaattcataaaaagaacttcattgttcgtatgggacgtcctaggcttgcgtagagtgttttgtttctggtgatgagaatttctgcttctttatccaagaacaatgtttttgtcatcatcatgatttgtagtggaaacactgatagtcaggttggtcggaagatgggactgggagcaaaactatgaattccatgtagcttttgaacttcctcttacattatttacaagtatatgaatcagccttttcgtatttatggggaagacttccctggtttatgtcttccctagactttattcacactagttcaaccctttttatatgaatctaagtgttagattggaagccctaaccctaactagagttgggatgttgtattaataagtag

SEQ ID NO: 42698 - DNA, 620 bp, Zea Mays
gcaaactagttcaattctgcacttatatatttactttggtttgtgttggcatcaatcaccaaaagggggagattgaaagggaaatagggtcaaaccttttcctaaatgattttggtggttgaattgcccaacacaaataattgaactaactagtttgctctagattaaaagttctacaggtgccaaaggttcaacacaaaccaatcaaaggtccaagattgggttcaaaagaaaggagcaaaagaaaaccgacggctaccctggtctggcgcaccggactgtctggtgtgccaccggacagtgtccggtgcaccagggtggatcatctccaactcgctaccttcgggtttctggaaatgtcactctgttataattcaccggactgtccggtgtagcaccggactgtctggtgtgccagcggtgcaacgtctacagcgcaacggtcgactccaacggaaacctgtaaaagcgctacagtgcgcggatagtgcgcgcagagtcagagcatgtgccagaaggcgcaccgaacagtgaacagtacttgtccggtgcaccaccggactgtccgatggccccacctgtcagagctccaacggtcgaaccctaacggttgggtgacg

SEQ ID NO: 42699 - DNA, 2084 bp, Zea Mays
tgattgaagaactgcactgtattcacatacagttttttgtggatggactgtctaaagtgaggggtgttaacttgggaggatggttggtcattgaagggtggattaagccatcactttttgacgggattccaaatggggatatgctcgatgggacacaggtgcagatccgctcagtggtattaaacaagtatgttagtgcggccaatggtggtggctcaaatgtgacagtggaccgtgatgtggcctcaacgtgggagacattctggctttggagggtttcagataatgaatttcagcttcggtgccttggaggtcaatttttgacatcaaacagtgaagatggtttgatcttggctacttcaaagcatccattgtccactgaaactttctccattgaaaggaatgctagaagggttcatatcagacttctgaatggaggctatgtgcaagcgacaaacgatcatctgcttatttccacttatcaattccaaccaggatgggataataatttagcgacatttgaattggtgatcgttgccaataacttgcatggggactaccagcttgccaatggttatggccctgacaaggcgaagatggtcttagaagtatgtctttggcactcactttctttggaatttgctggacaaatcctctttactttatgcataacatcccttgactcttttgctttttaaggagcacagaagaagtttcattacagcaaaggactttgatttcctgtctcgccacggaattaatactgtgagaattcctgtcggatggtggataacacaagatccttatccaccttctccatttgttggagggtctttggcagccctggacctagcattttcatgggcacagtatgccgtgcctccaaactcttctttgcagtatttaatatccctgacctttcctgatgctatatttacttctgttggattagatcttatggtttgaaatgtataatcgatcttcatgctgctcctggttctcaaaatggaatggaacatagtgcgagcagggatggttctgtggcctggccctctcctgaatatatctcacaaacattggaagtcattgacttcctggcgacaaggtatggaggccatccttcccttttgggtattgagcttctgaacgaaccttctgcagctacagttactttagatgttcttgtgtcctactatatgaggggataccaaattgtgcgaaaccattcgtcaactgcatatgttattctctgtcaaagaattgggaatgcagacccaattgaactgtttcaagctggtattggtctttcaaatgtcgtagttgatttacactactacaacttgttcaatccatactttgccaccatgaattccagtcagaatattgattttatttacaagatgagagcaccacagttacaagaccttaagggcatgaatgggcctcttgtcttcattggtgaatgggttaatgaatgggacgtgcaaaatgcatctcagtatgagtatcagaagtttggcagtgctcagttggatgtttatgccaacgctacctttgggtggtcgtactggacacttaagaatgacatgatccattgggacttcgagtggaatattaagaataagtacctattattcagtggttcatccatgctgaagacaccaagcttcctgctgctgctagcgttaggatggggaattcacctgatcatcatgccaagataacctggattctaggaactaagctgattggaagtgtggatgtacacatagactactcaaatccgaattatagttgaggcaaaattggtgcatatatctttcttatataaagtcatgtagttgctcctaggtttctccagtttttttatgaaaaaaaaagaaatcctggattactcgaacatctcgtagcacaccttcgtaatgcaatatgttactcagctgacgaaatgttcaggtgtgtacagcgtgccatttgatatttttacttttgaagatgttgaggtatcatttgttcaggatggagacagtagcactggacctcatgccatctccagcaagccatgtaaatggccgtgcaaaata

SEQ ID NO: 42700 - DNA, 540 bp, Zea Mays
gtccgccgccggtggtggacattctcattcatatgcacatgcagatgatgatgagcaggtagcccgcccggcggtggcggtggcggtggacgcgtacgtgtgcggcgcctcgaaccgcgacggcacaaaaaaaaatgttgttggtttggcagttctagttctagctagctccggccggccgcgactggaacacatgcgatgtcgtgtaggtgcagtgcaggcagctggtgattagcgcgttgaagacggaagccaaggacagcgacaggacagacgttcctgtcaagggtataatgcaaaagcacatgaggataccgcaaaaggcagcggtctctccagcctccagcgaagagaggcggcagactttggctaaagcgtcaatctaatggggaacagggcgacgatgctctaccgtcgtctctccgatccgtgtcatctcgatctgagttcgttcgttgtatcaacaatgcccaacaactggtattattagtggacagcacatgtatatatagaacctgcgcaggccggagctggttcgtg

SEQ ID NO: 42701 - DNA, 1436 bp, Zea Mays
gccgtgaaaactacgcagagcagtaaaataaccgcagttaccagctgacctccctcaattcctcggccatccgtacgtctccgccttcggggctttcttcttggtctcgttccttggctggacaaaacacctgtggcagcggccgcgctgcttgcctcgccttgctctcggttcgtggggcatggcggcttcgccggcttgtgctccggggctcatctccggccccaccctccctcccctgcccgttgccttccgctgctactgggcccaaaagccctcctccgcgtcgacctcctccaggcgcccgtgccgcaggcggttcgttcccgttgcagctgcctccacccgcacctcctctgcggctgctcggggcctcgacgccgacgacttccgccacccgctggacaagcagaacactctgctgctgagagcaattcccgggctcaacgacgtgggcaaagctttgctaggacccgtctcggagcaagttatggtactccagaacattggaacatcagttctcgtctccccgaaccagcttccagatctccaccaactgctggttgaggctgcgaagctcttgaacaccgaagctcctgacttgtacataaggcagaatcctgttccaaatgcctacaccttagcaatcaacggcaaaaaaccattcattgtcgttcacacaagccttgtggagctgcttactccaagggaattgcaggctgttttggctcatgagctgggtcacctcaagtgcgatcatggtgtttggctcacttttgccaatatactcacaatgggagcatacactgtccctggttttggcatggttgctggcttcctggaagagcagctatacagatggctacgagctgcagagctgacttgtgacagggcagctcttcttgtggtgcaagatccgaagtcatctctgttctgatgaaattggccggaggatgcccatctcttgccgacaagctaaatgtggatgccttcctggagcaagctcgttcgtacgacaaggctgcatcgaacccagttgggtggtacatccggaatgcacaaaccagagagctttcacaccctttgcctgtgatgcgagccagagagatcgatgagtggtcaagaagccaggagtacaagaccgtaatgcaaaaaatgtttcagatggggctgaacagagtatagttagtggcgacacatacgaagaggactgtagagtctgtagcttgtgtatggaagggaatgtctgtatatggagaaggctggtgtttctggaaaaaaaacagatacaaacatagacatattgtatatatttgcagttgaatttagtctccttgtatatgatatatttttttcttttttgttactgtgtaatactgtaactagaatgaataaaagtttgtttgagtttgccggataactggaaagatcggcat

SEQ ID NO: 42702 - DNA, 634 bp, Zea Mays
attcgcctaaaccggagttcgccagttgtccctgcttgccggtgtgctgctgctctagtttggatctcgcccaagtcgctggcatggttgtccggtgtttggcccgcgccgattcgcgttctctcatatcgccatcgtcgtgttgtcgctggtgatagcttcgcgtgcgcgtcaaactcccgcgtcgagtctttttcctgctcgctgcgcgccatctcagctcgctcgaccttaatttcgtcgcgtcgtcgaccttgtcgttcgctgtcgagtctcgctatccatcgcgaagtcccctgctgtcagcctccgcacctgtcctatgccgtcgtagccggtttgcctccatctcgtggtggtgttgcactgccgtcgagtcccgatatcgatctggttgtcgtcgaagtgaagctcagtttaacgctcgccaagggttcgatcaaagattttattcgaagactgtcgacgttctcgcaagctttaagtcagatttaatggacggtacgataattaatcgcgcgatgcggaagacaagccaagtcgaccccaagcgcgggctactccgcatggtgaagctgaaggacgaacgcatggatggatgacctgacaagtgccaagacaaagaatggtcgtc

SEQ ID NO: 42703 - DNA, 2129 bp, Zea Mays
ctaacgtcaaaggacacaagactgtttgggtacctaagaacaaggcctaaacttgttttgtaggtttatgtatccggtggttcaagttaggtaatcgatagcgtgtgcataaaccacatgactggggagaaaatattgttctcctatgagaaaaatgaagatccccaacgagctatcacattcggggatggaaatcaaggtttggtcaaaggtttgggtaaaattgccatatcccctgaccattctatttccgatgtttttcttgtagatccattagattacaatttgctttatgtttctcaattatgcaaaatgggctacaactgtctatttactcatataggtgttattgtctttagaagaagtgatgattcaatagcatttaaaggagtgttagatggtcagctatatttagttgattttaatgatagcaaagttgaactggacacttgtttaattgctaagactaatatgggttggctctggcatcaccgacttgcccatgttgggatgaagaatcttcacaatcttctaaagggagagcacattttaggactaacaaatgcttattttgagaaaaacatgatttgtagtgcatgccaagcagggaagcaagttggagtccatcatccacacaaaacataatgacgatggacatgccactcgagttgctccacatggatctattcgccccgatcgcttacataagcatcgacgggagtaagtactgtctagttattgtggatgattattctcgcttcacttgggtgttctttttgcaggaaaaatcacaaacccaagacactttaaaaggattcttgagacaacctcaaaatgagttcggattgaggatcaaaaagattagaagcgataatgggacggagttcaagaactctcaaatcaaaggatttcttgaggaggatggcatcaagcatgagttctctacttgaaagggaaatgtgcccttgggccatttctataagtgttttggtgattagatgcccaacacatactgatttagttctcttgtgctaaatggatgagaagtgcaaatcgaagaaaaaggtatgtatccggccttagtatattgttttgagtactaacatatgcattgaggtgacaggaaacattgccgagaagaaatgatttgaattggagaagagttggctaagtcagccaaaccagcacagtctgtggtgcaccagactgtccggtggtgcactgggcaatgttcggtgccccaggctggcccggcgacgaactggccgctctcgggaatcggtggggcgacgtggctaaaaatcaccggactgtccggtgagtcttcaacgacgaactcgtcgctctcgggaaaaggagagagcaccgcagatataattcaccggactgtccggtgagtcagagccgctcgagccaacggtcggcagagaaatcaatgggcgacatgtggccctagtcaacggtcggttgggcacaccggactgtccggtgtgcaccggactgtgtccagtgcgccaacgggaccaccggcccaacggtcggatgcactagataaggaaggagatcgagcaccagactactacaggacctgtccagtggtgcaccggactgtccggtgcgccactcgacagaaggcaagaattgccttccaagttgatctccaacggctcctagctgccttggggctacaaaagggacccataggcgcatggagcaggactccaagcttgcaagaaacatcctaagatgcctagactctgcaatcacgcaatcggatcatcgttcttgagatttgagcatcgtttgagttgtaaactccctgtgtcgtgtttgtgtgctcacttcttcacttgtgtgcgtgtgtttgctgcgattcgagtcttgtgtgtgttgctttccctctcttactattgtgcttctttgtgatctatattgtaagggcgagaggctccaacttatggagattcctcgcaaacgggagaagaacactaaacaaaaagaccgtggtattcaagttgatcattggatcacttgaaaggggttgagagcaacccttgtccatcgggacgccacaacgtggaagtaggcaagtgttatacttggccaaaccacgggataaaataccgtgt

SEQ ID NO: 42704 - DNA, 1086 bp, Zea Mays
tagcaatatatggagtataaactgtgataaactgtcatgtgtgaactgcatcattgggaaattgggctgcaatggattttctgcaggtacactaacctcgaaaacgtatgtgtagttgacgactagcaaaataccgtgagagctatacgtatgccaccgatatagaacgctattgccacattatgttggcaaaatcagtgaggacgcataggacgagcatgcatcctgattgttgcatcgtgtttgtcacctatacacccaagatgtttctcttatctttattccagtaacctttgattgtagataatgtggtgtaatgctgaattatgaacttcgatgaaataggtgtccttcattctttaggtgacctcttagggtgctttatatgtttgctcttgtacttgatgtgccaatagagggttagtgacttgtttgcctaaatcgaaaattaggccatgttcttatttggtgaactgagacccaaatttgaatttaccattatccctccataactaaactcatgcaaatgaaggtttagataatctctttattggacctacgatgtactcggacttcaaacaaggatcttgagtctgtgttcagttaacttgtaacccccttagtggttgtgtttccatcctagatcctacccttgcttagttgataggttgaggtctctattgtgtttggcctctccttgcgaattatcttatcgctttgtcaacccaacctaggaaagacatgtccaatcatttttctagaatttgatgcctctggtttccctatacctatcgaaggcataccaacttaatccttgaccttgtaatctctaggatgggcatagaaatatgcttggggctgaattaacagtctcccatcgtactcctttcattaattttaggttatggccacgccttgttcatttcatcgggacataatctatttggctctctacttgtatccattcttacaggtggagtatctccttgtatattgtcacccttgttcaattcatttgtatcgcgcgagatttcttattggttacgtctggtaatggcattatggctaaaacctgtggtgccgtga

SEQ ID NO: 42705 - DNA, 1379 bp, Zea Mays
tcgtcccgatgccatatggatttctctatcgacacagttcgcaataatcaactcgtttctctccgattgctcctccgagtccgagactccgttctctcccgcatccaccgccgtctcatccccaatccgagcaacgcctcccctcgcctccaaaaccctacccctcctgtcaccggcgggggcatgaaccggtgatcgcttacctggtctcgtctgtctgcgcacgcgcgaggtcagtgagtgagcattgcggtggtccgatcgcccgcggggggccatggcgtctgtggcgggatcgggcggcggggcaagcgcgggggccggtgggttgaagacttacttcaagacccccgaggggcggcacaagctgcagtacgagaagacgcactcccccgccgtcgtgcactacaaccacaacggcaagaccgtcgcccagatgacggtggcatatttgaaggagaagccagcaggccagggttccacgccttcaacaccaagtgctggtagtgggatgcggtctgcagctgcgagactgcttggcactgggaatggtagccggacacttagcttcgggagcaatggtaccagcagggctgtctcaggaagcagccgcatgggtggaggtattggtgtgtcaactagtgcaagtggatcgcaaggcatggcgaactacgatggaaagggctcatacatcatattcaatactgcggatacgctcttcatcagtgatctcaactcacatgacaaagatccaataaagtccatccacttcagcagctcaaacccgctttgccatgcatttgacccagaggccaaggatggacatgatctgctcattggggtgttctcaggagatgtctattcaatgtcactgaggcatcagttgcaagatcctggaaagaagcctgtttcataccagcattttgttaataaagacaaagacaaagataaagatccaagtcaaggtggcgctgccagcagtcagtgcacctgtgttgcatgggttccggagcgtgaaggaatttttgttgttagtcatgctgatgggaatctgtatgtgtatgacaaattcaaggatggaaatactgattggacatttccaactgttaaggatcaaagccaggtgctaatttcacatgcaaagtcgaggcaatccaattgcaaggtggcacatctgtcaaggtgcaatcaatggcatttccttttcaccggatggtgcttacttggcaactgttgggcgagatggttatttaagagtatttgacttcacgaaagaacaactaatatttggtgggaaaagttactatggtgcactgttgtgttgctcttggaggttgtatacatttttaacttgtgtagtcctgatgactgatgagtaa

SEQ ID NO: 42706 - DNA, 593 bp, Zea Mays
ggacaaagtccgcctgcaacgagccgttgctgacacagtctcgaatgaaatggaagcgaatgtcgatgtgctttcttcgatcgtgcagtactgggttcttggcgagggctagcgcagacttattgtcgatgtagaggagtggcgcgacgacctttgtgttcagcaagtctgcaagcaggcgtgacaactatactccttgacacgccgcggtggcgctggtgatgtattccgcctcacacgacgatatcgcgaccacgcgctgcttctgggaccgccagctgactaggctctagccaaggaagaagattgcaccagaggagctcttcctgtcatcaccgtctccggcgtgatcggcatcactgtacccgatcaactccaatgttcctttcccgtggcgataaacacacccttgggtcatcgttctggcaatgtacctcatcaaatgcttgacgacgcttcagtgctcagtcgtgggctcctccatgaaccgtattacatagccaactgcaaacgcaatgtcaggacacgtgtgaactaagtacctcaaactcctgacgatgttgtggtacaaggtcttgtccactagtggattt

SEQ ID NO: 42707 - DNA, 2317 bp, Zea Mays
aatcctattttctcttaattcgccacaaacccaaattccacgtcgtttcttcatctccaatcccatcttcatcttcctcctagcgccgggccctctccatcttccgctcccccctactcgcgctcggcacgcaggcggcagcggcggcgctcaggttcggtctctcagcgacggcgtcagcggcttcccctcccgcccctcgatagttgcctcgcgccctcgactccggccctccgcacacctgccggtgaccctgcgtgcccccctctctctcctcccgcctccggtggatcgtcaacggcgcccgcccctgcggctgcgccgcgcctggcctgagggcagcgggagccagcagccgctgttccaccaaggcggtcgcgcctctttgggagcgcttatgccagccgtcctctcagcacttcagcgcgctgaagcgtgcgactgatttcaaccctggatctcgaggatgcgactctagtcactctacactgcaacaggttgtaggaatcctactgttttgattaaatcactaccgcatcatcaaatatggaagttgatgatgacgtggaggaggatgacatagattttaaccctttccttagggaaggatctccgtctgagacctcatcaagccttacctcagaagcagaatgcgaggaacatagttctgaaaatcaaccaagtaaccatacatatcagcagaatactgtagttaatgaaaatacaagtgacagtgcacttcctcaaaatagattgtcgtctcaagatgctgttaacgaaatgtttccagaagaaacgtctacccaggttaatattgagaatgatggtcacttgaatggattggaaaaagacgttttagcaagcgaagctgcttgctctccaacagtgcaagaccctcatcatctatctctcgaaattagtgaggaagatgcaatttgcaaacggacaagggcaagatactcactagcaaactattcactcgaggaattggagacctttctccaggaatctgatgatgatagtggtctgcaaaatgttgatgaagaagaggaataccgcaagtttcttgctgctgtcctgtctggtgtaggcaatgacacacaaacattccagggggatgaaaatcaagatgaagatgataatgatgcagactttgagctcgagattgaggaggctctagaaagtgatggtgatgaaaatgttgagaactatcacaacacaaatcctagaaaagagaaagatgtccgtaggcctcagactaggcagaggcggccattaactgggatgtctggggctggtagtgatcaccaggaatccaataaaactcatttaagaccaattgtgccatatattccgtctgcattggtgactcctgcgcatgcttttggatggcaatatgctaaccagaatgcctttttcccttcatccttggtttcactaacacgtccacctttagcatgtggatttacttatcagcaactcgggcaattgcatgtgttgatatatgagcatgttcagctccttatccaaacattttccctatgtgttcttgattcatctaaacaagatgtggctaataatgtcaaaaagatgatagttgagttggttggtgctcgtgatcaagcattggccaggagctctcctcaacggcatatcttctttgaaacccaacatctctcatctagttttgtttcttctgataatttggaacgccaatggattccgttaatcaagagtcctattatatccgtccttgatgttgcaccgcttgagttggtcctcgactatttaagtgacgtctttacagctgtcgtgaagtatagaaaaagtcatgtggatggtactgctgacaaaacccgcaggaaagagcccctgtttccttcagcagcgattaacagttgcaaacaagtgaataatgtttctcaagatagatcaaatggtgtgcctacagcatcacctccatctgggcagttgcagcagaagaaatcgttggctgctaccctgcttgagaatattaaaaaggatacaattgctcttgttcctgctgacattgcaagattagcacagagattcttttcacttttcaattttgcactctttcctcataagtcacctccttcacctatggccaatagggttcttttcactgatgcagaggacagattattagctctaggaattctggaatataataatgactgggcagcaatacaaaagcgctttcttccttgtaaatcaaagcatcagaaattttttgagagtaatgaaagacatgaaatgctatcaagggcgccgagcccccgactagtcggaccgc

SEQ ID NO: 42708 - DNA, 2400 bp, Zea Mays
gccgtgtgagcttcccccggcccgaacggcagtcccccgcattcccctaacgttcaatcgcgtaccgtcgctcgccgtattcccctgccgcgcacagttcactcgcgcacctctcgccccctcgctctacgacgactagtgggccgccggcgctggcgccgccttacgccaggtgccgaggtcttcgttgatctcttcgccggcgacgagcacccaccagctgggaaaaaatctatagccaaacataataatggctatgattgatgaacctctctacccgattgctgtactgattgatgaactgaaaaatgaagatattcagttgcgccttaactccatcaaaaagctttctacaattgcccgggcattgggtgaagaaagaacaaggaaagagctgattccattccttagtgaaaacaacgatgatgaagatgaggtgcttcttgcaatggcagaagagttgggcgtttttattccttatgttggaggagtagagcatgcacatgttttgcttccaccactggaaacattgtgtactgtggaggagacctgcgtcagagacaaggctgtggaatcactttgtcagataggagcacagatgaaggaaaatgatattgtggactggtttgcccatgtcgtaaagaggttggcggtaggtgagtggtttacagctcgagtttcttcatgtggcctttttcatatcgcctatcctagtgcacctgaacaactgaaggcagaactgaggacaatttatggccagttatgtcaagacgacatgcctatggtacggagagctgctgcatccaatcttgggaagttcgctgcaacagtggaacaaagtcatttgaagacagaaatcatgtcaatgtttgatgatctaactcaagatgaccaagattcagtgcgactattggcagttgagggttgtgctgctcttgggaagttgttggagccccaagattgtgcagcacatattctcccagttattgtaaatttctctcaggataaatcttggcgtgtgcgctatatggtggcaaatcaactgtatgaactatgtgaagctgttggtactgaacccacaaggggtgatctggtgtcagcgtatgttcgccttctctgtgacaatgaggctgaagtgcggattgcagctgctggaaaagttacaaaattctgcaaaatattaaacccacaaattgcaattgaacatattcttccgtgtatcaaggaattatcatcagattcatctcagcatgttcgttcagctttggcatcggttattatgggaatggctcctgtattgggaaaggacgccactcttgaacaactgcttcccatttttctttctttgctgaaggatgagttccctgatgttcgactcaacattataagcaaacttgatcaagttaaccaggttattggaattgacttgttgtcgcaatcacttctgccagccattgtagagctctctgaagataggcactggagagttcggcttgccataattgagtacatacctttgttggccagccagttaggtgttggtttttttgatgacaagttaggggcactttgcatgcagtggttggaagataaggttttctcgatcagagatgctggtgccaataatttaaagcgtttgacagaggaatttggccctgagtgggcgatgcaacatataattcctcaggttttggagaagataaacaacccacattatctgtatcggatgaccactttgcaagctatttctttgctagctcctgtcatgggtcctgatatcacatgccaacagttgctccctgtcgtcattgcttcttcaaaggacagggttccgaacatgaaattcaatgttgctaaagtcctgcaatcacttgtaccaatccttgaccaatctgttgtggagaagacagtgaaaccatgcctagttgagctcagtgaggacccagatgtagatgtaagatactacgcacaccaagcccttcgggcgtgtgaccaaatggtgatatctagttgactagcctgtccaggaattagcaaatgagatacatattggtctattctttttgaacattttaaagtgttatgtagtcttaaaaattattgtaccaccaatgaagttgatgcatctttttattaattatgtgttttttgatttaggtttagtttagtttttggatttaatcaaccatgggaagtaggtgcacacatgatatttgtgtgattgacctgtgcatgtcttgtgctgttggtaggtcactagtgtaagcacattattttatagtctgctttgcttagcgttgtgcgcggaaactgtatgcgttgcttgttcagacatgaagttgtgcgcagaaattgtatgcttgtgaatttgttttacatgatccaagtgctagggctcat

SEQ ID NO: 42709 - DNA, 1644 bp, Zea Mays
ccgcgacccgtccgcgtccgcgttgccattctcgccggcatcgtcgcgcccccaccccatacgagccgcccccgcgacgctgaccccactgccgtccagcaggatctctcccttcccccgccccacgcctagcaggatctctcccttccctcgcgcgtccgagacgacatggacgaaggtgggaggctcccaacgcatccccgccgacctcaacgccgacggtcctttcctaacccgcagcccccggccacagtctctctcttccggtccagtgggggctgctagcttccaggaatattggagatgtgccttcaacactctagggctcgattgcctccagataagcaacttgctgcagaaaaaagttttgccttgtattgcaagccagttgaattgtacaatattatccagaggcgagctattaaaaatccaccttttgttcaaagatcccttctatataagatacaggcaaggagaaaaaagaggctccaaccgcgcctcctcaagttacttcgcagcaatgccttcaaggcgaagcccgcgctcatcaccctcatcggcgcctgcgcggccatgggcgccaatgccgaagtcaccgcctccatcacgtgcctccgcgatgcaatcgctagcgatgactgggcagcgaggaaggccgcggcggaggcgcttgctgcattggccctagagcacacggatcttctcacgacctacaaatcctcttgcgtcaccttcttcgaggccagaaggtttgacaaggtcaaggttgtgcaagagtcgatgaaccagatgattgaggcggggaaggagatcccaggtgctgaagaggacgagtgctcctcgctctgccaccagcgtcccagtcacaacgaagatcttctcttacagggagtgcaagtgatgggcgatatccagctgcttcgctgggctcaaactcagttcctttagcaacaaggaagagcatattatctgtaagcagatcatctctgtctgacgtgtctaccagtgtaattttctggaccttctccagtctattgtgtagttgcaaaagaatatgtgaattaccagtcagtggagattgagagggattccccggctagaagctcaagcggattaggaagtggctcatcttcatccagtgtaaccagaggatgacaagcctactacaagagttggtcctaagttataaaataagcctaactttttttacagagtacacaaatgtcaggttttcctgtttgggctagcaccacaaatggaaacaaaaaattggactcagcccatcgtgaagatatgaaggaagagcactgtcccattattctgtttttcgaccatgtttctagcatgaacatgccagcatggtgccatcaacaacttccctgttagctcacggtacaccatgctccagcctgtcccctggttatcactgtggtgctgattgtgttcccaagatgcactgaaatagagcaagatcaaatgaggatgaagttactgtgtagagatttttgttccccctttgtagcagcacccatggatttttatttgcacagaattactctcttttactggttcattcaataattcaatttgttgcttggaaaccactgtataataaatacaaatgctatggtatgattttgtgaa

SEQ ID NO: 42710 - DNA, 1096 bp, Zea Mays
tgcatgccaaatttgcttcctcttgtagacgctggcttcaaacaaagaaaacggtataggatatgcattggcaaggaaatttctggaggctggtgataacgttataatctgctcgagatcagctcaaaaggtagaatctgtggtcggtgacttgaaggaggagtacggagagcaacatgtgtggggaactgtctgtgatgttagaaatggaaaggatgtaaaggcacttgtggagtttgcacgtgacaaacttaagcatattgatatatggatcaacaatgctggatcaaatgcatatacatacaaaccactagtggagacctctgatgaggctctcatggaaatcatcaccactaacacccttggattgatgatatgttgtcgtgaggcaataaatatgatgaggaaccaacctcgaggtggtcacatattcaaccttgatggtgctggttctgatggaaggccaactccaagatttgctgcatatggtgcaacaaagagaagtgttgtgcatcttacgaagtcacttcaggctgaattgcagatgaatgaagtgaataatgtgatggtgcacaatctatcgcctggcatggtcacaacagatcttcttatgtctggtgcaactacaaaacaagcaaaaattttcatcaatatattagctgaacctcctgatgtgactaccttgttccaaacgtcagagaaatccctaccaagcaatccatgaagccaacctacattcgtttcctcacaggcttgaaggcctactcaagaattttttctagacttgcttttggtgctaggagaaacaagtatgttactgaagattagttatgctgccagcttccaactgaagagattaggaacaattcttttcattaagcgtcacttacttttctcataagatgggatgtattacagatgtcatctcatgagaacagtgatatactcttctgtacagtagtagcaatttttttagtaaatgcataggaaaactgtgcatcaatatatcaagaagaatatagaaataaggtctaaaatagaccacaacatgataaccacctcacctcacgaatatacaaaagagtccatctaaaaa

SEQ ID NO: 42711 - DNA, 3068 bp, Zea Mays
gagcgcaacgcgaaaagccgaaaacccaaatcgagtttcctgccggcctgtccaatttctgtctaactcccagtcccagacccagacccagagaagatcagaagaagggggaagacagctcgtgcttcgacaggcgtcagccctagcgcagcttcccggcgacggcgatgagcctgggagctgaggtgatcgagctctccagcgacgaagacgaggagcctgtgcccagcactaccgctctcatccaccacgccccctcctcccctcccgacgtcaagccgcacctgctcgccgacgtcgatgtgaagccgctgcttcttctcccgccgccgctccaccccccgggctacggcgcgctcgtgcccgtgaagaccgaggagcccgtgcccgtggccaccgtctcgtcaccgcccagggcgctcccgccgccgcgcctctgccgccagttctggaagtccggcgactacgtcgtcgcgcgccgcaaccccgatgtggccggccccggtgggcggaaccggttgcggataaaccccaagtttctgcactccaatgcgacttcccacaagtgggcttttggcgccattgccgagctccttgacaatgcaatcgatgaggtgaacaatggggcaacatttgtccgtgttaataaatttaaaaacccacgagatgggaacccctcattgttggttcaagatgatggaggggggatggatcctgaggcactgagacgttgcatgagcttcggattttcagataaacagtctgatgctttcattgggcaatatggcaatggtttcaagactagtacgatgcggcttggagcagatgtgattgtttttacacaaaaccaaaataactgggtgccaactagaagtatcggccttctttcttacacatttttgatggaaacaggttgcgatgatgtgctggtgccaacggtagactatcagtatgatctaacaacaacttcatatgttcagatgttgcgtcatgatcagaagctcttctcttctaatttggcaatccttctcaaatggtcccctttttctactgaagctgagttgcttaaacaatttgatgatatgggagatcatggaacaaagataattgtattcaacctctggttcaatgatgatggggatatggagcttgatttcaactctgacaaaaaggatatcctcattactggggcccacaagaaggtgaaaacaaacagtttggacaagattgctgcacagaactacgtctcaactcggcttcgctattctcttagagcatatgcatctatcttgtatcttcatgtacctgatactttcagaattatcctgcggggatgtgatgtggaaccacataatgtagttaatgatttgatgtatcgggagtgcgtgttgtataaaccacaaattgctggacttacagagtcatcggtaatcacaaccattgggtttgttaaaggtgcaccagatatagatgtacaagggtttaatgtatatcacaaaaaccgtctaatattgcccttctggaaagttgcaaacaactcatacgggaaaggacgaggagttgttggcattctggaggccaactttatcaaacctacccatgacaagcaggattttgagaagtcagtcctttatcaaagacttgagttccgcttgaaagaaatgacttacgaatactgaactgtgcatcattatattaaggagaataagaatggtctaaggtagaccaaagtacaagctgccctagaaggcaggaagaggggggacacaaggaaacaccaaaactaaatagaagagagagacggggggcaccagttccaacaacattcaaattaaggccacagctgcctaagatcctttgcacccgccattctccaaagcttaacatcatcttgaattgttcttgttatgaggaatgcattaatgccataaacgaattcattcctgaactaattctttttgcagggaccttcattgccatcgtgttggatatgacaacaaaaaattacctaaagcaacccgtgctattaatcgtgccaatcatatgaacggtggcagttccccaacaagtgctccacctcggttgcttgcagttgatattccaacaagcagctctagtatacctagattatcagcctctgcagcaagagaaaagatcagtagtctcgattctcttcccaagagcatgattggattgaagaggaagtttaatcctttcggtgctgtggcggccagtgctgatcaggatggactacatcatatggataaaatagatgtttctcaacgaagacggtttaatgaatacaaaactttgaccctggagaatgacaagttgcgaaatgaatgcttacaatacgagggatcagagaaacaacttgtcctgaaggaacaaaagctccgatctgaaattgctgaggtggaaaagaagtatcaggaattgttgggagagctcagatcattggatgtgaagaaagagaaacaatgaactctccacttcagcgcctgttgtacaattaattgctcttttttctttcctgacctgtgaagatgatgactggattacttcccgagacgtgcagggaactggtcccttggacaaatgttatctaccgattaccattcgcttggtagtttcgttggatagctgtagaggtgtaatttcgtttcactaatcttcctagggtcctgtgatggtggaagaaagtgagcatgtagtctgttgtaaaattatgcaacttgtatctgaatgtacagcagcggtttcaatgttaatggccctctgtttccagcagcacatctcggtcccgtgtcaaaagaggtggattttgatccggcactctggagtctggactctggagtggatacttagaattagacttcatatgttgtgcagtatgtaaaattacttttcgtactcgtgacagtcttaaactggtggttgtgttgtatttgagacgaggggggttagtcaagcctttgttcactccaacagtacattgtaactgtacatgagtgatggtgggtatcagctgtttggttgctgcattaatttattttccaaacctctta

SEQ ID NO: 42712 - DNA, 2005 bp, Zea Mays
ttcattatttagatatgatgaacctattcatgatgtgcatgatatttggagtagaattaaaaataaatttgatgagtccaaacatgtagtcatatgatgtttctacttcctttagtccttgtgaaactaaccctttaaaggaagaagaagaaaatgaacgttggagagcaaacgatgaatccacccctccaaaaggtctgtcttcccatttcgattcccacatatgttgtgtggctaatgaaaatgatagcggaagcacaaatgaggatgaggaggacgaaagaagttttatgcaactctacgctcacctaagcctagagaataaggcggtcatgctcaaacttctaaaaagggtgagatagcaaagtgaagctcttcacaagctagaagatgtcctcatcacaaaagtcaaaagcttggaagagttcactaaagaacatggggagttaaatgctctcatgttgatttggtccaaaggtatgaaactatttcaattgagtaagacaactccttattatgtatcagtcaattagtaaatatgaataccttgcttaaggaccaagtagaaaggctaaaaattgaaaatctagcttttcaaaaaaaacatgatatgcttctatgttctcatgaaaatcttatggatgattatatcatgttaaatattactcatgaggttgtgatagcaaacttaaaatttcaacaacctcactcatgcacatgtgttcaaattgaaactatattgccatgtcctaatgcttggtgctcgccaacaagcaaatccttatttgagttagaatctccaagaatatatgatattgcatatcaggagctcaaggaagaaaatgagaggctaaggatgagcttgacacaactaaaaaggaagtcattgctcaaccttctcaagataatcgtgatgacatggtgaagaatcttgagacgggaacaaccgtagcatgcacaaaatccattgaagaaaatgtcaaggacttgaggaatgtcaagaggaaggaacaaaagaagaaaaccaatacctctaccaaaagcctcaaccatgcctccatacaaggtaacatccaaggtaatgatcaagccacacttcacactaagaaaaataagaagtgtagtgaatgctttgaagaggggcacttgattaggtcatgcccctatattaaagaaaatagctcggttattaacaaggatgataaaaaaatagatgctctaagaagggacatacggtcaagtcatgtccctatgtaaaacaaaatggcatagttttacaaaagaaaatatttactaaccatgtagcaagcaagaggcaaggaaagaagaaatcttcaaaacgtgaagatcgcctttgctacatatgccgaaggatgggacatctatgcaaggattatcccattggagcttcgtcacaaacaaagatacatgatgggagtcttctccatcgaaggtcttcaaaacaaagacataacccaaaaatgacaacaatgaacgccaaagctatagccgaagagtaatagctacgacttgaagtaatgtcgaagatcaagcatgttgctgagccaaagaggaaaagactagctagtctctaatgatttatgttacacttatgaacaaatgttaaggtcataaatgtatttttacccgggttgcgttcggtgcctatatatagatgaacagtaccaccatactattcacgctggattgtaatcgctcttgttggggcgaaggcgaagacgccacccttcgctcgatgccttcgccaacctcgctgcaccaacggaggcaagacgactggcagatttacccttcgtcccacgcgtcgccgaacgaagacctgcgacgaggtcgtcgcatcctgcggcctcgtccaacatggaggcccacgtgtgatccggcccattgtaacaggccctgcgtggccgctgtgcattacgggcctaatttgtaaaggtctccctgtaattacagtctgtaaccctgctttatgggaatattccgg

SEQ ID NO: 42713 - DNA, 2023 bp, Zea Mays
ctcgtccaatttccggtccaccatcagcagacttgcgtcgtcgcggagggctcgcgtcggggtccatctgaacatccgccagaccgccgccaccatgccgcaacctaccgccgattcgagcaccatggtcgccggcgagcatcagcaacaacagcaacctgccaccgcgcggatctcctcctcctcaaccagctccggaaggctcgtcactccgttctggaaagtatgagagggacgcgaggaggtactgggacatcttctacaggcgccacgaggacaagttcttcaaggatcgacactacctggataaagaatgggggaaatactttaagggacgagatggagaaaagaaggtggttctagaggttggttgtggagctgggaacacaatctatccattgctttctacatacccagatatttttgtccacgcctgcgatttttctccacgagctgtcaatttggtcaagaaacacaaggacttcaaagctgaccggataaatgcatttgtttgtgatattgcatcagaacaactaaccgagaatgtggaaccttcttctgctgacattgtaacgatgatctttatgctctctgcagttgcaccagataaaatgcctatagttctggagaatgttagaagtgtcttaaaacatggtggccgtgttctttttcgggactatgccttcggtgaccttgcacaggaaagactgatgtcaaagggccaacaaataagtgagaacttctatgtcagaggtgatggtacgcgtgcatattacttttcaaatgaatatctggtagatttattttcaaaatgtggacttactcttgaggagatatgtgtgcacaacaagcaagttgaaaaccgttcactggagctggtgatgaacaggaattggatccaagctaccttcaccctaaattcagctagtcctcaaggtccaaatggtcaacacgatctccttgcttacgaaggagaggatgataaggtagttactgacacatctaagaagaaaagcagcggtgaagaaatcgatctttctgaagatttttgcaacatgtttgggacatcacacagccttgatgaggtacaaatcattggggtgaaagcaaaaggccacgacttcaaaataagaatgctcaggaaggaataccagcacacctgcagatcaactggcttaatgctctgggaatctgctcaattcatgtgctgtcttttagcagagaacccttcgatcgttgcaagcaaaagggtcctggagttgggctgtggctcagctggcatctgctcgatggttgctgcaagtttcactccctttgttttagctacagatggggatgaagaatcactggacctccttagacaaaatatctcctcgaacatggagcctaatttgctgagcagaatcatggttaggaagttattctggggcaacgaagatgatatgaaggcagtccgagagcttcatggtaacggcgtgggttttgattgcataataggcaccgacgtgacatacaatcctgatgctatactccctctcttcaagactgctaggggagtgatttctgagaaagctaacgaggactcggtacctgctctcattctttgctacatccagcgacgagttgatgaggactccatcctttctaatgcaacgtcccagggtttcaggcttgtggacaaatggataaatggagttcacgagagtaacggtaccatcagttcttggttctctggtaatgatgtctgcagtgctttccggcatacagtactttcagtactgtacttcgagctgtgaatgctgctatgcatgtgcaaggttactgtataacctgaaggatttttgtagcagctgtatcaagcaacggcaaaccaactttgaatctttaggccttgtttaatgatttcaattttacgtgaatcggactgtactggaatggattgagatagattttgacttctatggatttaaattgacttagtgccatccaatccatatggattaacggtgaaacgaataagccc

SEQ ID NO: 42714 - DNA, 1604 bp, Zea Mays
cgaaatcctccccctccgcccacgtctcggtcgcgcaataccctccatcaccgctccgccatcattgcccctgtgcgtcgtgctcatgcccctcaccccgcccccgacatccctcccaccgtgctcatgtaccttccatcagcgaccttctatcggcgcaattccaggaatcctccattgtcgcccgtgcgtcatcgccccatgcccgtgctcatgcccccgcccccaacatcctccaacctgtgccattccatcggcgtttgccccgctctccgtcgatggaaggtgaccgatgcagggatggtccgtggccaccccagccatcctcgccctgctccccacaatctccttcccctcctccgctgcgtcttcatccctcccctctagctcccgcctcgcccgcgacctccaccgtcgcgtcttcatccctcccccccgccaaccccgctccgcttaatccttggcgcccctcgctgcccgctccccctccatgccacgccagctagaccgcccgtcgtgagctagggactctcgaccatgggggacggtggtgctgacgcctcctcctcgctgccccaccgcccggggctttctcctacctcactgtcttctacaactacgccctcgtcgccaccctactcgactttgctgtcatgcagtccatcaagttcttcgtcatatgcactgagggatccgacaccggcgacgtgttcatggtgcaaggggcatcctacagaaacccataagtgaagaaaagaacatgccaaagagatgggccgcgaacgattacctctactggcccgacttcggcgtcttccattgaggaattgcccgtcctttgagttgacttctcttgcagcctcatcaagttcggattttagcaggatgagacttgaagattctactcttaggaaaattcattgtctgtgcttcagacattatatctttgaacttgcttatcgaagtgctttgatcaactgccatattgaacatgtaagttggtgatttatcttataacaacagtggaaactacatctatttgagcttgaagaggagctgaagactaatcctctgaccaagtatgtgttgtatcagatgagaggagcaagaattggcgagtccaagctgtcgcagttggtcctgacaggttcgagagccggaaggctctgtcagaaaagtggaggggcatgagagacgatggactttcagcagaaaccaacattcctggctgtgtgtttgtccatatgagtggcttcattgggagcaacaagatcaacgagggagcattggaaatcacaagagctactctgaaatgttgattcaaccaccatctatcagttacccatgttgccatagtctcagtagaagcacatgatgcaattgcgactttggtccatgttatcattcacccatcgcagctgaaattgattcttacatttgatttatgtcatccttatcttgcagaattggtcatttgatacttttttcttggatctggtaatgcatagaatgtgacaatttattattagaaaggacaaatgatggaacttattaggctatcagccctgtatatttcttcaacacgtatcacccttttcccctga

SEQ ID NO: 42715 - DNA, 225 bp, Zea Mays
cattaccaatctcgcggattcgagtcagctattggaatggtgagccgattcactatttttactattgatttttatgatcgtgatataagacgcttagtttgcgtatgaagtttaagcagaaatacccatgatgcgtggtgtgcttcgatgagtttagttgtcgagtatgtttaaactagttctaagttgtagtgtgtggtatatcggtagtgtgtaggttaaatt

SEQ ID NO: 42716 - DNA, 3386 bp, Zea Mays
ctcgaattaaacggtgcaaagtttaagtgaccatactggtggacaccgtctcaccgctactgctaggatcatagtcgtctccctgtcctcccacctctgcccacggtccacgggacgacatccagtccagccatggtcggccccgagatgctcgtcgccgcgacggtgaaccaggtcgttcggaagatcaacgagatcatcggcgtcgcgcagggcgagacgaagctgtgctgcagcttcagcgacgacctcgagggcatcaaggacaccctggtataccttgaaggcctcctcaagaacgcggagagcaactcctttgggagcgatagggcgaacctgcggcactggctgggccagatcaagtctctggcttacgatatcgaagacattgttgatggctactactcctccaaggagcaatatgagggaagcaactatgctcagaagggatctttactctgctctttatccaatcccatgctttcgaagataaatttgaaagagcttaccattatttccatagttgggcctgtgggccttgggaagacaacccttgcacaacttattttcaatgatgcaagagctgagacattcagattcagaatatgggttcatgtctccatgggcaatgtcagcctccaaaaaattgggagagatatagttttgcaaactacagaaaaaattgagggaaacatgcagatgcagtcaatcaagaatgttgttcaagacatacttaataagtatagttgcttaatagtgttagatagcttgtggggaaaagatgaagaagtgaatgagctgaagcagatgttgcttacaggtagaaagactgaaagcaaggtcatagtgaccactcacagcagtaaagtagcagagctgatatccactgtgccaccatacaaactgtctttgttgtcagaagatgattgttcagctatattctgtcaaagggcaattgcaggtcagtctatcagtgacccacttttcagggaatatggagaagaaattgttaggagatgtgaaggcatgcccttggtagccaattttcttggatctgtggtgaatgctcaaagacagaggcgtgagatatggaaagctgcaagggataaagacatgtggaagatagaggaagactaccctgaaaacaaaattgtgccaatgtttccatctttcaagatagtatactacagtatgccccatgagctaaggttatgctttgtctactgttcaatctttcctaaaggatatgtcatagataagaaaaaacttattcagcaatggattgcacttgacatgattgaatccaaacatggaaccttgccgcttgatgttactgctgagaaatacattgatgaacttaaagatatttatctccttcaagttttagagaggcatcagattgatgcagaaatatccaatacttctgaagaaaagctctacatgaataatttggcacatgatcttgctaggtcagttgctggtgaagatatccttgtgatcttagatgctgagaatgtacgctgcaatagaaattatgattaccgttatgcacaagtgtcaacttctagcttacaatcaatagatagcaaggcttggccttccaaggcaaggtcactagttttcaagtcaagtgcagaattgcagcatgtcagcgaagttctttcagtgaacaaatatttgcgtgttttggatatcagtgggtgttctgtgaaggagatgcccgctccaatttttcagatgaaacaactgagatatcttgatgcttcaacattgtccattgcagatctgcctccccaaattagtggctttcctaagctacagacactggatctgtctgatactgaagtaactgagctaccagccttcattgccaacttaaagagactgaattatttgaatctccaaggttgcaagaaacttaagcagttgaataacctagatttgctgcatgagttacattacctaaacttgtcacgttgcctggaagttagaagttttcccgcatctctgaaaaatcttaggaaacttcgttttctgaacctttcgcaatgttctaagcttccaacattacctgatgaattattgcaatcattctctagtttttcttccattgtggatttaaacttaagtggatttgagttccaaatgctacctgacttttttggcaacatttgttcacttcagtttttgagtctgtcaaaatgctcaaaacttgagctactcccccaatcatttggtcagcttgcatatttgaaaggtctggacctttcattttgttctgatcttaaactcccagagtcctttaagtacctttcttctcttcagtttctaaatctatcacactgccataatgtagaatatctgccatcttttgacaaacttagtaatttggagtatcttaatttatcacaatgtgctggactcaaagcattacctaagtcactttcaaaccaaaaaaatctccaaattgaggtttttgggtgccaggattgcatagtgcagtcatgttatttaagcccacagtcccatacatgctcacaagaagtcaaggaagttggatcaagtagtgatatctcagataccattctaaaggagtctgcaaacagagatgtggcattaggaataagttttccagaaattgatgaagttggttatccacataataatctgaaacaaaaattgacattatcttatcatatggatggacataaaagtgaagagcctaatttcattaccaagcagaactcaactacagagacggtacaactaacccccaggcaccagttcccatcatctacatgtcgtatttcttcgattgcatcaagttctagtgcactatttgcatctggctcctcttcagatgtctcgataacttacaatccagtgtccaatgacaaagcaggcaatcaaacaggacctcagacagagtcaacgcatacggtggtctaagacgagacgatgcgggtaaccaaacatatggtttgtgattcagtccagactcaccgctgaatagagggagtggtaacccaatgggtgacggatctagaatttgactatagggtgatactatctaccatggctagtgcatcacttcttcagtcccgtagtgaatagtgattgagtagaggctggtggactcagttaaatccctcttatgcttttggtgaactgagatggttatcaaactagctatatttggacttatcttgttgtaagactttttaaatatgttgtttatctatcggatttggaacatgtaatatactagctacttatgaacctgaacttataaaataaatgtaatatactagctgtacatgtgaatctgaacttataaaataaattgtgttggatgtatgttgacgtttaattatgtatgatcttgg

SEQ ID NO: 42717 - DNA, 1149 bp, Zea Mays
aggcgatcagggctaacgacgcgacgcgatcagtacgatcagataactgatcgttcgattagtcggcaattaaccacaactaatcgtccgatcaacgcatggacgttgaaattttggcccagtagcatttcggtccagcggctcagcccatattccacttatcccaattcccacgtgaacacaggcagctgcaacgcgtgaaatacgggcacaacagtaccacgcgacgttaaatacgggcacaactcgtgaacgacggcggcgcctagcggtgacatcgtcccctcgactcctcctccatccccgacgcggcggcgccagcctgcaggttgttgatgcaccaatgctgcctaccaaattcctctgtcttaagcacctgaccgttcgcttgtcatcaggaacaaccattacccaggcatttgactatttctctttggtttctttccttgatgcgtctccttccttggagacttttatattaaatgtgagtgggaaaggcatgatccatgaatcgatttctgcacatccacaattgaggcacacacctgagcaccaccatggccacctcaggagtgtgaagatatgtggtttcagctctgagaaaagcttatttgaactaacacgttatattcttgagaatgcggtgtcactgaaatttcttacactggacaccttttatgggtatcggtgtggtcagggtaagtgtacaagttgtttacccacgcctgatgtttttatggatgtttccaaagcgatctcaggtatcaagacatacatcgagaacaaagttccatccacagttaaactaactgttctggagccttgcagccggtgccatgttagaagagtaatttagacaccatcctagtcatgctacgtcacttccatttaatttaatttgagaagaaccatgcttgtttcctggattatttatagctgtgtcccgatgcacgcaaatttaatctctgatgatggaccgtgctttgtttcctgaattaatacatgccaactgtttagttttgtagtatggaatgtggatttatttaagacaagttgtcaaatcttgtgtattcggtccgatgctgatatgttaattgtagtgtgtggctgtgctgtggacttgagagaaaatactggaaacataatttt

SEQ ID NO: 42718 - DNA, 986 bp, Zea Mays
atggcaccttcccgaagtcggaaatttcgaacccgacctccaatctcatattcttatgcacttcacaaccgcgataggatcaatttgttggtgtctttgaaaaatccacagatcgatctaagacgggccaataacacagagatcatgttgacaaaaatcaaaatgccgctccctgatatgatgagtgctgctctagctttggacgattcagttttggatgctgaccagattgaaaatctaataaaattttgcccaacaaaagaggagatggaacttctaaagaactacagtggggacaaggaagctcttggcaagtgtgagcatttctttctagagttaatgaaggtgccaagggttgaatctaagcttaagatatttgctttcaagattcagtttcagtctcagattagggatgtcagaaagaatttgcagactgtatcatctgcttgtgaggagctcagaagctctgagaagttgaaggttatcatgaagaacattctgttaattgggaatacattgaatcaaggcacaccaagaggccaggctgttggttttcgcttggacagcctcctaaaacttatagagacccgtgccactagtggtagaatgacattaatgcattttctatgtaagagaagtcaccagaagtaatggattttcatgaggatcttgtccacttggaagcttcttcaaagttgcaactaaaagcattggcggaggagcagctggcagtggtaaaggggctggagaaagttgaacaggagctaactgcttcagaaagtgatgggccggtttctgatgttttccgtaagactttaaaggagttcattgattgttcgagtgctgatgtatgctccttgtcagcattctattctgaagtaggtaaaagcgcagatgcacttgctctttattttggagaagaccctgctaaatttccttttgagcaaggtaatattcatgcctatagacccatggaaatggtttaa

SEQ ID NO: 42719 - DNA, 521 bp, Zea Mays
tctctctggtgctgcagctcgcccccccctctgctcaccatctcctccctggttcccatggcgccctccccttcttggtggccgacgcccctccctccatggagctcgcctctgccatgaccgccctctgccccctcccttgctgttcttatggcagcccctctccatgccaagctcgccctccttctgtgcccaaccctagctcgccccagcccctctccctggcttcccttgctctgttttcccccagccctagccgagctcgcccctgccctaagttctcaaggcagcccctctgtgttttccatggccggcaccctccccatcttttgtagattggaagaaaggattcctgtgagtgtgagaagaagcaaatcccagcataacgcatgctaggtgttcgacgaaatgttcaaattgggattgtcgttgatattgtggatctgagtcgcgctttgtattgcacaggtgtgtcgtggtgaatatctctagatccgcgactatgtctgtgtgttttgttc

SEQ ID NO: 42720 - DNA, 616 bp, Zea Mays
ccctcggccaccattttcccagatgtcggtgaaaaactttccgccaactaagctcgcctcggctgaggggtcttttgtatcttcaatagagaacgcagctttggcttgggccagaaccttcacgtgttcgcatcctgccttctccaagatagccgcaattcccctggcacctgagaaggcgcagacatctccacggccactcaaaacttcctcaaaggcttcggtttcgccgttgatccattcgattggaccatcgggatcgcctagtacgaagttgtcctcatttgaatacgcgccgattttggcgaaactggtttttatcttttgtacacatgccacagatttttcatagcatctttcttttgaagaacgaagctccacaactgtttttcccagtaatttttccagtagtcactggcgtctcggtcagcttcggcaattgcacattttaacttcacttcagccagctgtttatgaagatctttaatttcgcacttctgagcttcagtttgggctctgaaggaagcttcatcttcttttattttgtttaccaatgagtttaatattttatctttttcaagaccttcgttccttagttcaattacttcggaatgaa

SEQ ID NO: 42721 - DNA, 697 bp, Zea Mays
tttatatagaattttactaaatggatacttggatgagcaattttgtcagattgaggacttgcaggatgaagcaagccctaattttacagaagaagttgtttccctgttcttcaagaactcaaccaggctaatgacaaatattgagcaagctatggacaggaatcccagagatttctgtagatgggatgtaaacatgcagcaattaaaaggaacctgttctagttgtatgaggtccttccagaacctgaagagggagcatggagtcctcaggcagaagctggaatcctacttccagctgctgcgacaagccggtcctgccgtgactgcaaccaggcctagaggcatgtaaggaacggctgttggcgtgcagggagcagtgcaagggacagacagcgtcatagcgatgctccactacgccattgttgaggctagctgtaacgatgggccacgaataagaagtttgcctatggcctgtgggggagttccctgcgggttttaaagtgtaacacccttcataatcgatgccttaagctggtgctgccgagtgccgactagctaggccggcatgtaagagcagcctagactgatgttgatgtggtctggcagacgtcctgtgctgtgcctgcctctgtatttcggtcaaataaataaactagatggagtttgcatgtttgcatcatgggatctctgttttttc

SEQ ID NO: 42722 - DNA, 1592 bp, Zea Mays
tggtgctacaagctcatcatcagttcatcatgctagagaaccaaaagcaagcggaggttctctggccgcggctggtggccaacaagctcttccggaagacctcgggcagccacgccttcgtcgccgatttcccggccaccgatggcgacggcgatgtcgtctttggtggaacggagttcgacggcggcgggtgcagccccgaccccgacgacgcggacgccagccgctgcgtgaagcgggcgcggccgcagccgcagccgcaggagcgcaacaagaagaccctcaagtacaagctgttcgcgagcacgtggaacgtcggcggcgtggcgccaccggacgagctggacctgtcggactggctggacggcggcggcggcgacgacgacgacgggccctacgacatgtacgtgctggggttccaggaggtggtgccgctgcgcgcgcgcaacgtgctgggtgccgacaagaagcgcgtcgggatgcggtggatcgagctcacccgcgccgcgctcaaccggtcgtcgtcatcgcacgcgcagcgcgggggagggagcggcggcggatcaggctcaggcgacggcggcggcggcggcaggcagaaggtgcacccggtgcgggacggcggcggcggcggcgggctggcctgcagggactaccggtgcgtggtgagcaagcagatggtgggcgtcctgctcacggtgtgggtgcgctccgacctccgccgcttcgtccgccgcgccagcgtctcctgcgtcggctgcggcgtcatgggctgccttggcaacaagccgggtgatccttctcggggacctcaactacaggatctcgctgccggaggccaagacgaggctgctggtggagcggcaggactggaagacgctgctggagaacgaccagctgcgcgccgaggtgcgccgcggcggcgcgttccagggctggagcgaggggcccatcgccttctccccgacctacaagtactgccccaactccgacgcctactacggctgcgccaccgccagcgccaccgccgacgcccgccggcacaagcggcgcgcgccggcgtggtgcgaccgcatcctgtggcgcggcgaggggatccggcaggcccggtacggccgctgcgagtcccggctgtcggaccaccgccccgtgcgcgccgtcttcacggtggaggtgggcgcgcccgcgcccgggagtaacctcaactcgctcaggagcttcttcatgtccgagaggttcgacggggctggcagcaggagccccgccgccgaccagctactccgcagggacgacgacgtcaacagcgccagattcagcgacgcgctttgagacacgcatgggatgggagggtggagatggaattgtcactccacttctccggttgcggattgtacttgcgcacagacagaagatcgtatctacaacatgctgctaagatacagagatggtttttttctttttttttaaaaaaaaatccaccctgttcccaacgttctgtaactactatacatttgtactcttgttgatccagtgagtatgattgggcctcaagtcaagtttgttgccatgggcaaccatgaatgacaacagaa

SEQ ID NO: 42723 - DNA, 247 bp, Zea Mays
tagcgtcgaacaacacgtcggaatcggtggaggtgatgagcgcattgacggagtcgtccgcggctctggagtttgcgcgtgctagcacgaccgatgatgggtcatcctgtagctccatcaccggcggaggcgagaagcgccggtcccagcgagtctcccactcgtcgaacctccggttgaactcgtcgagcatgagcttgacgtcgagagtcatggcgttgacaaatttgaagctgaggatcgaaca

SEQ ID NO: 42724 - DNA, 1775 bp, Zea Mays
cgcagttggaaaccctaccaaaggagcagttcacgaggacgaaagacaacgtgtcgtcattgtattggccggaagactccaaatcgctcgagcgtcgagccgagtggaatgaagaaagagtgagaagcagcacaaggcgggaagccgggaacggataagataacaatcaacaaacaacaagcccgcgcgagactgttctttctccatttcccaatggccgccgccgccgccgtcttctttccctccaccccgaatcctcggcaccgcctcgccgccgccgcccgccgccctccacccagcttcaccggcgccaccgacgccgtgccgctaccggaggacgaggactccagcgacgacgatgccgacgacgacggcgcgccacgcaggagcgggcgcagggaccggcgccgcgcggtgcgcgtcgcgtgggagaagctagtccggtggtcccgctcctggcgccgccgcaaccgcagcgacgtcctcgagaccacgcgcaaggtggtggttctcgggggcgggtcgttcgggacggccatggccgctcacgtggcggccaagaaggccgatctcgaggtggccatgctgctcagggacgaccacatctgccggtccatcaacaacgcacatgtcaattgcaagtacttatcagaacacagattgccagaaaatatcgtcgcaacaactagtgctgctgatgctttagcaggagctgatttctgcttccatgctgttccggttcagttcatcctttcttgaaagtatttcaacacatgttgatccaaagttgccattcatatcacttagcaaagggctggaactcaatacccttcggacaatgtctacaatcatcccacgagcattgggaaatcgccgccaaccgtttgttgttctgtcaggaccatcatttgctgtagagttaatgaacaaattgcctacagcaatggtggtggcatccaaagacaacaagttggcaagttctgttcaacaactgttagcatccccaaatttgaggataagcacatcaaggagtagaaatcgcaggtgccctgaagaacgttcttgcaatagctgcaggtatagtggaaggcatgagtctcgggaacaactgtatggctgcccttgttgcccaaggctgttcagagatacggtggttggcgacgaagatgggagcaaagccaaccactctttctggcttgtctgggtccggtgacatcatgctcacatgcttcgtcaacctttcgcggaatagaacagtgggactacgcctcggttctggtgaaaagcttgacagaatcatgggttctatgaatcaggttgctgaaggcgtatcaactgctggggctgtcattgcgttggcgcagaagtacaaggtcaaaatgccggtattgacagcggtggcacggataattgataatgagttaactccaactaaggcggttttggagttaatgaatcttccccaggttgaggaagtctgacgaggctagcaacggagttctgcatttttccacttggctccgagtgtagcttgggcccatggccgaccgtatgaaaaatctgccaaagaccgttacttttttttgggtagcattacattattaatgaaaaaatgatatccagtaacggtggtatttagcatttcctaaatttcgaaacacattttcctgtccttgtacaccggcaaaaacttcacgatgacgtttcttttgaaagaggaaactgttctcaagctctggcatttaaattggaaacgtttctagcactcactggtt

SEQ ID NO: 42725 - DNA, 2757 bp, Zea Mays
gcgaggagagcgagcgcaccaacgggatctgagcatctgaccagccgcttgctagggtttcgtcccccctctccctcggccagcaccacctcgcatccctagctctagccttgctcgccccgggatcctgtagcggccatggcggcggaagcgccaccgtcggcttcggcgtcttcttcctcggccccgcggccgcctgccgcggcggcctctgcctccggcggcggggcggccgggtccgcggagtcgtacatcgggagcctcattagcctgacttcgaagagcgagatcaggtacgagggcgtcctttacaaaatcaacaccgaggagtccagcatcggcctgcgcaatgtgcggtcctttgggaccgaaggtcggaagaaagatggaatgcagattcctgctagcgacaaagtatacgagtatatcctctttcggggaactgatatcaaggatttgcaagttaagtcatcaccaccgccgccgccacctcaagcagcttccctgcacaatgaccctgccataatccagtcacattattctcaaccagcatcaacatcgtcaaatttgccttccgctgggggtgcagttttaccagacctcagctcccaggcagttcaatatgggcttcagaggccaacttttcagagtaaccttcctctataccaaccagggaatgctccacggggctcttcagcggcacctccagcaggaaatgctccgtggggctcttcagcagaacctccagcaggaacgacactttcggttccctcaatgtactggcatggatactatgcgccttcaagtgggctgccacctcatttgcagcaacctctgctgcttcagccaacaccaggattgtcagttccccagaatcttcaatatccaggactaaatccttctttgccatctgggatgcaaaagctgtcagaactccaaccttcattgatgccacctattaatagtcaaggttcttcaggtatcctgcctactacaacagctcctgcttctgctaccttattagctccagaaagctcaaagcctcaggtgccaaacatgggatctttgtttactcctgcaacatctcttggtgcaacttttccttatccaagccagccaacaccggtggctgaaactagtgcaacagtgtcacagaacataacttcatttagtagcaacaaggctactgctcttccaggctcaacactgtcataccaaactgcatctcagtctgtttcttcgactattgccccatctagctcagcacaagtggagatggctgtgcctttgttggcatcatcaggtcaactattgcagaacacatcatccatgctttcatcatcacactcgatgcaggcaccattacaggtagctagcaaagaagtcaagccggttgagccaaaggctaaggttgcagaaccattactgcctgaccctttgctaccagacccaccatcacagtctctgcctgaaaataaggagcctatattgccattgcccaaacagacacctcagaagtacaatggatctggtttgcacaaccatcacaactttaggggccgtggaaggggtagagggagtgcgttttcacagtcagtaacaacattcactgaagaatttgatttcacggccatgaatgagaagtttaacaaagatgaagtctggggtcatcttggaaagaaatcgcagtcaagggacaaggatggtgaggtgggagatgatgtgtttgatgaagacctggaggttgaggaaactgataacccagagctatctgttaagcctgtttatgtcaaggatgatttttttgattccctctctagtggaacatttggacgtggaggaccaaatggaaggggtagaccttctgaacggcgcagagtagatacagagacttttggcgaatttccacggcacaggcaaccctaccgtggtggcgcccgaggttaccgtggcggtggacgttcccgaggttcatattatggtggcagaggctatggaaacacagggacaggtggccctggaaattcttattctcaccggggctatgggagagattgattatagcagaaatgtgcaggcaaccatacttgtgggtgttgtagtcttttaccacatgtatgatgtatcccttactactggtgcagcggtgagaagtcgttttcccactgagccgagccaaaggtttaatgggctctaaattttacactataagatttaaggattggattaggatcggactctatttctattcatttttaactaaaatttatttagggccctaccattctgtgaagaatcatttggatcctaatcaattaccacccctaggttttagattcaacgcagcaaaagaatgtagatgtaagacttaccttgttattcccttggagagtgcactcgtgggagtcgccagcactaggtctgcgagtctgtccattatgcatcccttaatattcaacaaataaatggagcttaccagcatgtcacttgggtgtgccttgtccagacaaggcgtgtagcgtttggtcattgacgtggtacacccgtgttctgtaggagagttaccagtagatgagcggatgatgctggataggtataagcttgtggcccttgatgtgtataccttacgcttgggatttagttgtataggccgatctcgatgcaggcatgcaacgcctggcctagctcagtaactttttcctttaacaaagttctgccatgttgtcttttgtattggtgatagtgtaacttaaaaat

SEQ ID NO: 42726 - DNA, 328 bp, Zea Mays
acggctctcaagtagagcaagttgatcttgatgaaacaggtgaagaacaggctccatgcataacgctaaggaacatgtccatcggggatgtgtgtcctaaggaatccgaagagcctccaaatgcacaagatcaaccgtcctcctcaatgcaagcatctccaccaactcaaggtgaggatgaggctcaagatgttgaacaagaagatcaagaagatgagccacctcaaaatgacggcaacggtcgagggggagatgcaaatgatgaagacaaggaggatgaacaaccaaggccgccacacccaagagtccaccaagcaatacaacgaga

SEQ ID NO: 42727 - DNA, 958 bp, Zea Mays
aataaatccagcagtgtggttgttcagccggaacatggtctcgtcaccgcagattggcgccactgacatgcttcatcgtcgacccttcgaactgcgttgtccctggccgaattagcgcaagcacataagcctaggtaatcaggagtattctagatgtccctgtggctggaagatgcttccagtcttgaaggaggattagttaggtttatgtatgagctttggaagggttctaccttcctacttttttatgtaagttatgcactttgagtatatcaggacttgtaataaatgtaactcttcctatgtaataaacttcagttttagaaatgaaaagaatgttttataaactcttccactcttatcttcgaagtgtgtgtgtatctaatgtgattactgtaatatgcatgtatggtgggagatccttgggatgatgagttcaagttgatgaactcgatagccttgttaagttacacggtacacgtgcatagccatctaaggccgttaatggcaaggattggtgcacatgggccagataacttgggagggttgtcacaatctcctccacagcatcttcacaaccttcacgaagagctcgatggagtcaccaccaagacgtcttcacaaccttcacaacctccaggagtaacaagtcgatgacgatcacttgatgttccacctagtgcctcaaccctcaagatcactttgatgattcaatgccctagattcacttaatcactcactaggatgcaatctcaagcaatgtgggtgagtgagagtgttcgggaagctccaatgtgcttaatgtatgctaggaatggctatgtgagtttatacctttccaaccaacactagccgttatgggcaagttgccctctttaggtgcactcgtggacggtccgcgccataggggcagatgttcctttgtacaagtaacgactactcttcctatttaaaaaca

SEQ ID NO: 42728 - DNA, 1723 bp, Zea Mays
cgcgataccccctcactgctccagtgctccctcctcccctcccctccgatcaagtcggggcaacgcgcatcactcgctttaaatccgcacctcccggccggtccccttatcacctcaccttctcctttgagtcctctctctccgccgccgcagctagctgtgacgttatgctctcgccggcgccatagcgccagcgcctaccgtctacaactatccagccttaggcttacctatcccgtcaatcaagcctctcgtaaggaacaaggaaggtagctagctagttctatagctgctgtcgtcgtcgtcatcggcggcggcggcgcctgttcttagaggataaggttgtcctagcggagagggagctagccaggatttcggttgagatcaagagggggagcaggcggcggcggcggcgatggggcgcgggaaggtgcagctgaagcggatcgagaacaagatcaaccgccaggtgaccttctccaagcgccgctcggggctgctcaagaaggcgcacgagatctccgtgctctgcgacgccgaggtcgcgctcatcatcttctccaccaaagggaagctctacgagtattccaccgattcatgtatggacaaaattcttgaccggtacgagcgctactcctatgcagaaaaggttcttatttcagcagaatctgaaactcagggcaattggtgccacgagtatagaaaactaaaggcgaaggtcgagacaatacaaaaatgtcaaaagcacctcatgggagaggatcttgaaacgttgaatctcaaagagcttcagcaactagagcagcagctggagagttcactgaaacatatcagaaccaggaagaaccaacttatgctcgagtcaatttcggagctccaacggaaggtaaattcgtcgagcttgcttaaagttggccgttggaacttcctttttaagaaatgagaagtcgctgcaggaggagaacaaggttctgcagaaggagctcgcggagaagcagaaagcccagcggaagcaagtgcaatggggccaaacccaacagcagaccagttcgtcttcctcgtgcttcgtgataagggaagctgccccaacaacaaatatcagcatttttcctgtggcagcaggcgggaggttggtggaaggtgcagcagcgcagccacaggctcgcgttggactaccaccatggatgcttagccacctgagcagctgaaggtttcagcaactcttcccgtttatccgcctggtgcagtatagtatcatcgtgatcgcgagagcagcagcagtgggtttgccgtatctttttttaccaatgtatttttctcatcaatcatttcaagagtactgacagaaatctgaggacttccatcattcctgtccgctgacaagatcccaggaaaaatgtttttgcaaaagcaaagctataggcagagttctcatccgggcaaggcgattgaaccctttgtgaagctttttcagaaccaaccattgagcgttccttgacatttagcactgaagactggtcatggtcatggtcatcctttgacctgcccgtatttattttgcacaccttcggcatttggcacagaaggaccattgacacccgtagagcactacttttgagcttgcccagggccttcctttgtactaccagtactattttgaaatacatgcttgcttgcagccctgtaaaaccaagacactctgatccggatggcattctgtacc

SEQ ID NO: 42729 - DNA, 7781 bp, Zea Mays
ccccacccgaggagccgccacgcaccccctgggtcccctccaccgcccgccggcgttcccacttcaattcgcccagcgcccctttctcctcccgaaaggcagggcaaccctacaaaacgctgtctcggcttcgccgtccagcggaacagtgtacgggagcagttcgtcgcgtgtgtcgcgtcgcgttgcgttgcgccacccactaattcgaacggacgggactgggattcgaaatttcgaacacgcgccgcctgagagagagagagagagtgagagaaagagagagagagagcaggagagatggtcaggcctttgtgatctcccgcggggctggaggtgtgcggggatggatctcgcggggatgaagcggcgggagctccaggcgctctgcaagcggcacggcctccccgccgggggcaccaacgccgacctcgtcggacgtctcgacgccgtgctttcggggcccgctgttgtggaggaggaggttgccggagtgccggcgaggaaggggtgtctgaagcaaacgggcggaggtgccaccgaggccaagaaggttacttttggggcggaggtagggaaggccaggagactgaggtctcgggtcatatggtcgccggtcgttgccaagacaagggggaagtctgctcgagccggtactgattctgctgctgaagacggtatttctgcagatgtgggcgctgatgtcccagtgaggcggtccaggaggaattcgttcaatcctgccgaggctgaggaagcaggagaggctgttgctgttgacaggaagcccaagcgcaagaatcaggagaatgacgagggcgttgctgttatcgctcaggctagagttacgagaaggtcaaatttggagtggtctgctactgtattgcctcctgctgttgagaagaagagagggaggcagaatgcagctgagtctgatgtgcagaagtccgctctggtggaagtaacagctaggactacaaggtctcgctcaatcgtacctgttgtggtgccacccactgtggttgagaacaagaggaggaagactggagatccacaaacaactgtagagttgactatgctttcagatgtgcccagaagtgattttcctgccaccaggtctttaaggaacaaaattgtccacgttaacaacagcgtcgtggacgaaactcacactaccaggcagttggaaaacaagatgcgtccgtctactcgtaggcatcaacaggttgcatcttctccggaggataaaggtcaaaaaattcctgctaccagtaagtcccctctactgaggtggtcacggagaaactattctgaggccaatagtgcaaattcagtaaacatcaaattggccaaagactcgagcacagctcagccattggcacaccataattctcattctgaagatttggagaaacaaccagcagttaaagaaccaattaaacggtcaacacgtaaatctattgctttggctgcacttgagaaagagaaggatgtaattgaaggaaagaaccctgaagcacatgttaggcgatcaacgaggaaatcagttgtgcaggttaaagataccaaaagtattgttgaagagactcaatatgctaacagtgaagatgtggcgaagcaaccagcaactaaaggacctgctagggggctgagacgtaaatctgttatcacagaattgcatgagaaagagaagagtctcattgccgaaaagaacatggaaacagatgaagcgatattaacgcggaagcctgtaatcccagttaaaaatattaaagctgttggtgaaggaattcaaattggtaagggcaaagatgtggataaacaatttgttgtgaagcaacctactaggcgatcatcgcgcaaatctgtgctgcctgatatgcttgagaataatagtggacttctagcacccaaaatgaatgctgagatgaatgttaggagatcaacacggaagtctgttcttcctgacatgcataatgagaagcaagatcaccataaaatggctagaaatgagaacttgcaaagtggtaaatatcaagatggtgagaagcaacagaaagtaaaagattctattaggcaatcaaggagatctatcgctacagtgctacttgagggacaaaataatgatgaaggaaaaaagttcaaaaatcctacgaggaggacaacacacaaatctcatgcccttaatgcagttgaagaggtcagcatggatcacattgaagttggtgaagaaggcttgaaattgaggaagcgcagtaggtttttgctggaaatatcatcttcagctaatgtttcctggaagcatcagaatgcacagatctctaatgaaaaagataacacagaaggatcgcagcaggcatcaaattgcacaacttcaaagagaaggtcttcaaagaagagacgaacaactgctccagaagaagtgatgcctttcaaggtggcaaatgatgacatagttatcatggaagaaacaaaggacacacttgaatataataatgagtctagtagtaaagttcaagaaatttgtcaggttaatgctgcaagagaagagttctcttcaggtccattgcttgtaacagtagctcctagtgacgaaatttgcacagtgcagagtgtagctgtggtgatacctgggtcagaatctggtgacgatgcaaatcaaagttctgataagagtaagcaacctcaggaacattctgtcactcaaactgttgatgaccatttatctgaaacaagaagtgggaaattagatcaatcaacatgcatcacaggattagtctctgacaattgtgttgtctcagaggacaaaacattgatgagtgaagaccgtgaagagcaaagccctgtgtccggagaacagagagttagcttggaagcaaatgccaatgagcctgaggaaaagaacctagctaacgtcacatcaactgatctccacaccaaaagtctgcagcatgatattgacagaatagctaaagagactgataaagatgttttgtctttggttttccctattgaagagcatgaagaaaaatatggagtgagccctatagctgttgaaaagtgcgtctgtcgtgaagcaagtgcatgtgaatctgcacgaaaacccctaaccgttatcttttctaacaatctccacaccaaacatctgcaacatgattgtgatgtgctaattaaggagactggtgaagaagttttagctcaggagaattgtaatgaccagcctgttcctgcccagactgaccaagaaattaagttaaacgatgaacttgctgatccggatgttttagctcaggagaattgtaatgaccagcccgttcctgcccagactgacctagaaattaagttacacgatgaacttgctgatccggaccatgaagagcaaagccctgtatccggagaacggagagttagcttggaagcaaatgccaacgagcctgaggaaaagaacctagctaacgtcatatcaattgatctccacaccaaaagtctgcagcatgataatggcagaatagctgaagagactgataaagatgttttgtcttttgttttccctattgaagagcatgaagaaaaatatgcagttagccctatagccgttgaaaagagcttccgtcaggaagcaagtgcaattgaatctgcaggaaaacccctaactgtcatcttttctaacgatctccacaccaaacatctgcaacatgattgtgatgtgctaattaaggagactggtgaagaagttttagctcaggagaattgtaatgaccagcctgttcctgcccagaccgacctagaaattaagttaaatgatgaacttgctgatccggatgttttagctcaggagaattgtaatgaccagcctgttcctgccaacgagcctgaggaaaagaacctagctaacgtcatatcaactgatctccacaccaaaactctgcagcatgataatgacagaatagctgaagagactgataaagatgtttcgtctttggttttccctattgaagagcatgaagaaaaatatgcagtgagccctatagctgttgaaaagagcgtcagtcgggaagccagtgcatgtgaatctgcaggaaaacccctaactgtcatcttttctaacgatctccacaccaaacatctgcaacatgattgtgatgtgctaattaaggagactggtgaagatgttttagctcaggagaattgtaatgaccagcctgttccggcccagactgacctagaaatgaagttaaacgatgaacttgctgatccggaagttttagctcaggagaattgtaatgaccagcctgttcttgctcagactgacctagaaactaagttaaacgatgaacttgctgatctggctatggaatcaggttgtagcattactgaaaggaatgaagggcttgttgctcataatcttgatcaagaaggtttccttgaagcaacaccagagtgcaaacaggaatgtggtttgcctgaggagacagtaatttcctcaaaagaaacaggatctctgctgtgtgcagatcaatcaccaattggtctggaatctttattttcgcaagaaagcatagttgaatcagtggggcattgtgcacttgcttcagcaacaactcataccgaaaatggctttgatgattcaaaagattgccataacaagtctgcacttgaaaatgttcatgtgccagaaccttgttcacacaatgatactaaaggaggcatttttaaaaatgttgattgtatgcatacatcccagcgagatgatagaatggaaggagtaccagaggctaacactgatgaagaacatgttctgtcagcctttttgctggatgcaaatcacctaaacgtagtcattaattctgaagaagtggtttgtgagggtgaagatagtaaggagcttctccattcggaagactgtaaagcttcatccgagaaaacagatgtgaatgatggcaatgtatatggtattagtgatgctgtagtgagatgtgcactgcatgctccagccgatgataattatgagatttttttgggtcccaatactgatgtaccacgtcaggtttataatgacggatgcagtgatgtcaaagaagatcgatttgcttccaaaccctggacaattgatattattgaggatgcctctgtcaaagaaagatcaaatttaaaagattggcaacttgattccaagttggagggcacagaaatagtggaatctggcctttacttcaataaggatattggtaacattttacatagtggatctattggtgaaataactccatctggttctggtttatcaaaagattcatctgtggactatagaggggaggttttagatggcttctcaatggaagcatctcttgaaaggtcttctacacgtggggaacaaaatggttgtagactagatgctattgagaatccttcaattactttagcaacttctggttataagcatgaaggtgctttatctgaggaagcagtgtacacaaagaagaattacgctggaacatgcttgtcaaatcccagggaattaatcatggagctgcaatcccatttctcaaaggaaaacataaatgaatctgatcctcatgacagccttgtattcccaactgctgaaaattcagcagatgaacagctggttaaagtacaccatggttctaatctgtctcagttaggattaactgatctgttggatggaccaattgggtgttccaataccgacgtgttgtgccagtgtgacaatcataaaaatcaatccaatgaggacaaggtagaggaagttgaggcggtgtctgctgctaaatacatagaaagtgaagttgtgctgctcccatctcaagagagatcaaatttgaataatgagcagcttaacaccaagttggaaagcccaaacattatgggatcttgccttaactgtgataacgatgtttgtaatacttcggacaatggatctgtttttgtcattggtaaaagaactccatctgcttctggcttaccagaagattatcctaaggatagtgacttgcaacaaccggttttagatagcttctcagtggtttcatcttttcaagacaatatatctgggaagaaaactgtttctggtgtagcaggcagtgagattctttctttaagtttagcaactcctgattataaacatgaagatggtttctctgaggaagcagtatgcagaacaaagaattatactggaacttcctcggtagatccgaggcatttagacatggaggggcactctatttactctgagggaggtactgaaaaatctaatctgcaagataatcttgcatttctaagcgctgagagtggaaaagatgaacctattatttgccatgttgagaaactggttgacgcacatgcttcttcagatacataccaaggtccttgtcaagatctaggcagacatgaagaacaagagagctgcatgtctattcctatgcaagccaaagaaagtggaggggttttgaggtctagccacacgaaagggtcagttacagcagcccaaattgatttggcaggtgatgcccatcttattgtgagtgataatgctgctgccaagcaagtgtttagtgaggagaaagaggaaacaaaatctatctcttcttcagatattgatatccttcatgaaaaatcatactccagtggacacgatgaccatgctgcttgtgctgccgaaactcagttctaccatccacagaaagcatctatatctgatggactacatttgggtcctagttctttgcaagtagaatcactggatgctttggatagcgatatactgtatgttaacacaggagttctcgagcagcatcataaagagggttactatgaacccagtgtctaccaaatcacttcaggcatttgcacaatgtctgaagctgaaccattcgaagttttagaaactggaaaagatgtaaaaacgccatctaagctagatgagcaacttaatcctgggttggacggagatgaagctgagaaacacagcttagactgtggtacagacaccagtcctgtgatgagcaagagaaccctttcttcaccaggatcaggaccatgccagcagtatgtaaatgaaagcaccaccagtacacagtcgactgataatcacccaaacgacctacccgctccgagatctcctgaacaatccgcgtgttttcagaatgacaacgattcgggttcagtaggcatttgtcaaagcagcaggcgaagaggtatagatgaactttgcggtaagctgcagagtttcaaagtttccagcgccgtaaaaggaagctacgtagctatgggtgcacctcgtccgaagcctggggacagcacgagccgatctgcagccgcgctgctcaggaacatagagaacacaactgctgttaaagctggccgtcctcctgtcaagccaaacgccgatggtaaggactcgtctaggcgagccctgcagcccataagcggaaggcctgacagtaggtagttcggcggttccttaataagtgtgtcgtgtttgtgttcaaccctttgttgaaagccaggtccgtgtatttgtgcagcttgttgtcatgaagctgctgtgtgcgtgtcatttaacataagcgtgcgtgaagttgtgttatggaagtggctaaatatgtgttcgttaggaggtcaattggcttgaactgaccctgctgttccgtgatttctgtctaaatatacttgtgtggctgtgtcactttgattggccttatcgatcacatgcaatgggatcacatctagcgtgctctagggtcctcgtttggtaatcgctg

SEQ ID NO: 42730 - DNA, 1045 bp, Zea Mays
ggtcttttcctcccagactctgggtgggcgagtcccaccacggatgccggtgcacctacatcgttgggtacgggatgaccgaggcggggcccgtgctggccatgtgcctggccttcgccaaggagccgttcgaggtcaagtccggctcctgtggcaccgtcgtcaggaacgcggagctgaagatcgtcgacccagacaccagcgcgtcgctgggacggaaccagccaggcgagatatgcatccgcggcgaacaaatcatgaaaggttatctgaatgatccagaggcgacaaagaacaccattgataaggacggatggctgcacaccggggacattggttatgtggacgatgacgacgagatcttcatcgttgacaggctgaaggagataatcaaatacaagggcttccaagtacctcctgcggagcttgaagcccttctcatcacacatcctgaaatcaaggatgccgctgttgtctcgatgaaagatgaagtcgccggcgaagtcccggtggcattcattatacgcagtgaaggctctgagatcagtgagaacgagatcaagcagtttgttgcaaaggaggtcgtgttctacaagaggatcaacagagttttcttcacggattctatcccgaagaatccctccggcaagattcttaggaaggacctgagagcgcggcttgccgcgggcatcccaagcagtgacaacacacagtccaaaagttgatacgtactttcgtactattcttttctagctgtgccaaaaatcatgctgtgctctattcatgagatggcaatggtatacacaaaacgccaagcggtcgttatcgattcttctagatgggcaagggtaaggtatacttcgtttgtgtccgacatattatgtatttgtatcatgtatagatacgttttgttgacaacaagtgctaattataatgtataccatgtttgggaacctattgttcttgttaataaagagtcgacccctgtcctgaattgcgtttgctctctgttacataaatccatatccgctttggtaaaataaag

SEQ ID NO: 42731 - DNA, 969 bp, Zea Mays
gtgataatatacaaagagatactccacttgtatgaatggttacaagtagagagccaaatagattatggcccaaggaaatgaacaagacatggccataacctaaacttgatgaaaggagtatgatgggagactgttgcttcagcccaagaatatttctacgcccatcataaagatcacgaggacaaggattagtatctgattagatacggagggaaaacgatcacaagattaagttggtatgccttcgacagatatgaggaaaccaaaggcatcaagttcaaggaaaagattgggtagtcctttcctaagttaggttgataaggcacatgatgatccttaagaacaggcaaactggataagggacatcaacttgtgccaatcgaataaggacatggtttaggatggagacatgactcgaaattcttgttttaagatgggtacactttagatccaacaaagaaattatctaggcatttatttttatgtgtttggtcctggagtgataacggaaaaatttaagttttgagtcatggttcaccaactaagaacatagcctaattttgggtttaggcaaacaagccactaaccttctatcgacacatcaagtacaagggcaaacacatatgtcacctaaatagattatctaagaatggaggacagctatctcatcgaagttcataataccgcattacaccacattatctacaatcactggttactggaataaagatgagagaagcattttgggtgtataggtgacaaacatgatgcaacaatcaggatgcatgttcgtcctattcgtcctcactaattttgccaacatattgtggcaataacgttctatatcggtggcatacgttctctcacagtattttgctagtcgtcagctacacatacgttgttttcaaggttagtgtacctgcagaaaatccattgcagcccaatttcccaatgatgcagttcaaacat

SEQ ID NO: 42732 - DNA, 3584 bp, Zea Mays
accggtcttcatgcccgagatcgaaatcgaacccaaacggccaaaccaaccatcgtctactcggcggctgggctagcaccctccctaccaccatggcggccgtcgtgcctccgcccgacaacctggacccgcagccggctactcccccagccgccgctccttccgccacgctcaccccgcctcccgccgccacctccaccccaccaacccccttgacgccgggccccgcggcgcctagcccaaaccctaacctaccccctgcccctgcccctgcccctgcccccgcccccgcttccacgcctccggcggcagtcgcgccaccgatgcccccagctccgatctccttcgctgctaccttccgtccactcggtgccccagcgccaccgccgccgtaccaggtcccgcagtacgtcgcggtgccggcgaacccgggctacccgatgcagccgccgggcgtccccgtcgttatgcctccgggcgccgtgcggctgccggccatgtacgggccgccccagccgggagtatacatgccgcagcagggcgctgcgatcccccatcccggagaattgagaggatttgtaccatggaccttggcagtgtgttggttagcatttagagcggtggtcgtgccagccattactccccacaacaagaggtgccggctcatgtttgattctgcagctctagatcgtttgctccctcactgagtgtgatgcttcagctctgggttgttccaaaaacttgctaaggtatcatgattttctgccgtttaaatttcatatgccggctatatctttttttttctggtttcatataaacttctttgttgataagaagtgtagagtagtgacatatttgcctgagctcttattacctgagtagtgcattgcaatggtgtgagctataccaagtttctcaaataaccaatgcaagtgtgttatcctgtccatgaggttgagaggaatgtctcgttatcctgcaccgtatcctatgattcgtcctggttttgttccacgtccaatgccgccgcctggtgttgtgccaattcaacgaccaacaataatttctgggatccgggctattcctcctttggtagccccaactgcccggccacctgctccagctgttaagctggcagataaaccgccaaccgcagtttatgttgggaagatcgccccaacagtggacagtgatttccttctttcacttcttcggctttgtggatctgtcaagagttggaagcgtgcccaagatcctagtaatggaaaacctaaaggttttgggttttgtgaatttgaatctgctgaaggcatccttcgtgcgacacggcttctcaacaaattgagcattgatggtcaggaactggtgattaatataaatgatgccaccaaggaatacctgaagaaacatgttgagggaaagaagagagcacaagagaaggaaaaagaaacagaagatgcaagcggggatggaactacagctgttgctgaaaatgaatcatcaaaacctgtccctgatgaattggatgagacaggagatgctggagataagtacagggaagacaacactgataaatttgggattgttactgacgaagactctcaaactgacaaagatgtcgcagaaaaaataagcaatatgattgaggagtggttaaagactagaccgccacccccaccttcaccagttcaaccatctgctgatagctctggcgtagataaggcaaaaaatgattctgatgataagaatgctgctgatgctgataaaagggcagctaatgaaactgagagatctgaaactgcctctcctgataagaggaaggatagagagcatgataaggacaaacgggacaaagatcttgaaaggcatgaccgtgaacgtgaaagagtacggagggatagagagaaggatcataagcatagagaagctgataggctctacagggatcgccttaaggagtgggaatctagggaaagagagagagaatatcagaggtatagtgaaaaggagaaagaaagagatagagatcataaccgcagaagggagatcctgaagcaggaagatgagagcgatgacgaggataataggaaaaggaaacgaaggagtattagctcacttgaagataggaagaggaggaggcaacgtgaaaaggaggaagatttggcagataaaataagggaggaggaggaaattgcagaagcaaggaggctggctgtagagttgcaacggcaagcagatgaagcagctgcggcggcggctgcagccgccgaagagtctgcatcacttatggagattgatggtgatgacgaaaaggaaacagatgcacaaaacaagtcggctgttgtggaagctgataacatctcgagctttgctaatggtgttggtgctggtcgacttagtaagggaaataatggtgaggaaacatgtatgacacctggtcaaaccgcagatactaagcaaaacaacaatgttccagcaaagaaactgggttttggtttgattggcttgggcaaaaggacatctgttccatcagtttttgctgtagaggatgacgaaaataatgttgataaaagcataagacctctagtacctatcgattactccactgaagaattacaagctgtacatgctaattcttctactggggcaaatgtcacagcagctgccgagtttgccaagcgcatctcagtttctaattcaaaggaagagaaggctgaagctgagaaggataggaataggagatccagtgaagctcgtcctaatgatgagcgaagagagaagctacatgatcgcgagaaggataagcccaagtcagagaacaagaagattctggatgcaaagcaactaattgatatgatcccaaggacaaaggaagagctttttgcctatgatataaactgggcgatatatgacaagcatgagttgcaagagagaatgaggccttggatttcaaaaaagataattgaatttcttggcgaggaggaatcaactttggtggactatattgtttcctgcaccaaagaccatgttcaggctgaaaagatgctagatcttctacagtcgattttcgatgttgaggccgagatgtttgtcctcaagatgtggaggatgcttatatttgagatcaagaaagtcgaatctggactatcaggaagagcaaagtcatgaagcgaagcctgttaccctgtatgacctctgatctgcattactcatcaactgtgaccacacttgtaaggtcatactgcactacaagtatcaaaaaccatttttagtgacagagttgatggatctttttacttgtttcttgtacaaatgcatacgagagttaatgagatactgtgcgtaatatttttattttgatagattgcataactgtgtttggcacagttcacacgagtcaactgcctacttttgcttaacttgttctctggtgaacgaagaatgtcaatgctggcagtagccacaagtgatccctaatcatacatggtgtgtgtgcaaagatgttcgtataatcgtatttcacttttgcttctgtactgtagcagtaccgttgagcttttcgtggttgctgctgtgcgataaat

SEQ ID NO: 42733 - DNA, 862 bp, Zea Mays
cggacgtgcctgctttctcgggcgtgctaggcgctatccatcctgagccgccataaccaccgcctgctagtgcagccagcaagccgctcgccacgcgcgcgacgccgtgtttggcccccaccgccgttcggccgccttccctgccgccggtccgccgtactcttcttcgctagactgctccccttctccatcgatcacttgctccactacgcgcaagacgcaaccgtgcctacggcctgctagtgcctaacttcctccccctctctatgcgtgccactccaggcgtcgagctcgcctctgcgggaccgtagcccccacccctcattggctctctgcgcgagcgtgatcgcgcctccgcatcccatgttcagtggagccctaaaggttgtgtttctacgaagatccaaaattccttggaccaaaagcttcagcttccaatagtcgttaagggccttgtactgcgaactctggacaaagtttcatgctgctacaaagtgctctgcatacctggtgagtgtttaatcaatctcggtgctgatttgttagttttctttaagaggtatatatggttggatctgtgttttttgtgttagaatagataaaagtgctggtatatcatggccataagaacgattgttttatttagtggaattagaacaaattggttggatcttttactgcttgatcagatgcagatgaatatgtggggtttttaattaatagcaaaaactttcttactgtttgatcagatgaatatgtgggtattaccactaaaaggagaaaaagctcactcgagttgttacttggctacctttttaaattaatgtggagaactaaacaatgatattgatgacatgttggc

SEQ ID NO: 42734 - DNA, 1030 bp, Zea Mays
cctcagctaaatcagcagttcgcattgatcttcggtccaacagtcattttgcccccaaaggagtcgacatatattttctactcgttgaggggtttaagaatttctccaagactgcaagagaacttgtgcaccggatgcagaagattgatagcgactattatcccgagtggatttaagtggatctggaacagcgtgaagggcttccttgacccaaaaacttcatccaagattcatgtgcttggttcgaactaccagagcatgcttcttgaagtaatagattcgagtgtaattgcattagccttggacttacgcttggagcaattgctggtgttctgtcgaggaatgagctcgtcgctgcagctctctgcactcttgcaatcaatcacaaacaggggaggaagttgcttcaagactgttgaacagatagcaaaagttcatatgggcgcaacagcggttggtgcagtggcgcccgtgtgagtggtggctgtcggggccaccagtgcaagctccgtccaggaggaacgggtacatccgaataaactactacgacgtttagatatgattattgattagcataattaaaaatagcatgttaaatgcatcatcagggtcaaaggaaaatacaaattacgacctgcaatattagaaaccaacatcatcttttgtgttgtgagtttaaattcctgttttgatggttttcattttctgaacactaaatccaagtcggcgctttctgttcttatcaaggtaacacatggaattcctctgtaccagctgcatttgtaaatcaaagctaggacaaaagcgaaaaagctggctgggcactaaccaaacaagctttttttattttaggcatcaccattggatttgtgtcgttctgattgtagaaataacaaggctttaggattggaatatttaccctgtattatcatttatgaaacatagtcttatgattgttgctatttttggttcatcgaacacactttaccacacctgacctgagttggtcaagtctggctttccactttag

SEQ ID NO: 42735 - DNA, 1300 bp, Zea Mays
ctccgccaccagcttcatttccgcccgcgcgcgtctatatagtctttctctgtgcgaaaatagctcgatcgctgcaccgtaccttctcttcactagtcttctctcactatcttctccaatggcaattcattagggcgggatcaacgacaggtaggtcgccggaaggcgagctagctcgtcgtcatcatggacggcggcagcagctggttgccattcctaggccgtggaattggcgacggcgtatcgggcagcaggagcagtggctcggaggtgcagcggaaggaggacgacgacctgccgatcagctcgcaagtggaggaggagctccgacagttctacttgctgatgggcatggagagaactggacacccagcagagcgagagacgacgacggcgttgcccccctcatcggaatcatccatgttccgctccttccctggaagcccggccgacgaggcctcgtcgctcaggccacggagcagcaacaacaatagtaccacggcgaactcctaccaccaccacccggcagaagtctcctcccagtcccatctgaccgagctctccccggtcacctacggcggcggccaccgccactgtgacgaccatcagtgctacgtcaatctcgacacgatcctaaagctggacgacgagttcaagcgctgccacgacgaacaaccccacaacgaaagagcgcagcacaagaacggcttccgtggcggcgcgttcgtgccctacacccgccacctcggccccaagaagaagcccaagccacctgcaggctccggcgggcagagggcgatcaaggcggccatggcagccttggcacgaatgcacatggtcaggctcgcccagtggcagtgctaccagatggaactggtggtagcgcctgcgccgcccaccggcgggatcaacggcaacaaccagcagcagcacgttttgtcggagcgcaagcgccgcgagaagctcaacgacagcttcaaggccctcaggacagtgctccccccttcttccaagaaagataaggcatccacactgatgagagcaagggactacgtcagcactctccagtctagagtgtctgagttagaggagaagaacaggatgatgctagtacagttgcagcaccgccgcaatgatgtttctcccaacaagattgaggtcgacatcagaagtaatagagaggaaattaggaaacatgacaggaatttcacctgaagatatatagcagttgttatggtttatagtaggaggcctaaacagccctctagtcggcccattatagagggacatatagataagg

SEQ ID NO: 42736 - DNA, 946 bp, Zea Mays
tttccccaagctcgagttcctctgcgtcttcccccagccgcgcgttcctccagctcgcggagctccatggctcgcccctctgcgcaacacttcgagctctcctccaagctgccacgccctggacttctctccctccctccccttctccctgctgcgcgtgtcggatcctagcttgtggagctcccttcctctcccagcttcctttatcgacgcccaagcttctagtccttcaatccgcgtcgcgcccctctctgctcgtcgtgccctactccctggtgccggagcttcctttgcgcgccaaggtcgccgcgctgagggtcgcgtgctccaccgtgccgagctcgcccctgcgtgtagctccccatctccatggccgtcgctgccgttgcttttctctctctcctccatggccgcgtcttgccgaggtccctgctgcagcttgctcgccgcgtgctccctgctcccctgcgcgctcgcagtgggcatttcctgtcgtgcatgttgtctccccgccctcgacgcccggtgttttccccagctcggatcttgtcagccaccgttctttggtccgtgtgtcggtcggcgtcgtggagttttgtttagtcggcttgtcgtcgacctcgccggttgtcgtcattcgtcgtcgcgtcgtgtgtgcagcaacgtcgttgattcctccgtggtgcttgtcgacgaacttcgcttcatcgattcctcgccttcggtcctcactggattcgtgtccttgctagagctcgcgctaacctgctcgaccacacctcaccagctcgcaccagtctcgctctcgtcgtcattccatgcatcattaagaaaaacaagagttgggtgaagacaaagctagcaccatgatattcaccaagtgctcgacacaagggctgaaccagaatccttgccgtgttcgtggatagcacgtcagatttagtat

SEQ ID NO: 42737 - DNA, 3362 bp, Zea Mays
cacagaagcaaacgaatccgcgaccctccgacagtgctgttttccgttagaggcttctcgtcttccccggctcaggcaacctccagctgcagcggcggcgatgggggtgaagaacctctgggacatccttgactcctgcaagaagaagctcccgctccagcacctccagaacaagaaggtgtgcgtggatctttcctgctggctcgtgcagttctgcagcgccaaccgctccccggccttcctcagggacaaggtgtacctcaagaacctcttccaccgcatccgagccctcatcgccctcaactgcagcctcattttcgtctcagatggggcgattccttcagtcaaattggctacttataggcgccgactgggattaaatgctgctgaggctactcgagaggaggccaactcacaacctctgacttctttgcgtcggaacaagagctcagagttctcacgcatgatcaaagaagccaagcatctcgggttggcccttggcatcccttgcttggatggcatggaagaagccgaagcacagtgtgcattgcttaatttttcttccttgtgtgatggctgttttacatcggattcagattcattcttgtttggtgcaaagacagtttatagagatgttttcataggagagggtggttatgtaatttgctatgaaatggaagacattcagaataagcttggtttcggcaggaactcactgatatcacttgcagtccttcttggtagtgactattctaatggagtccatggctttggcccagaagcagcatgccgccttgttaagtctttaggggatgacaccgttcttggtcaaattttgtccgatggagttaaacctgcaagaaaatgtaaaggaaaaggcagtggcgccaatgcagggacggttggtggaacgtgcccaaaagcaagtacctgtgaggttgggattaaccaagattctggtagtcaatttcgtgacataataaatgcatatctggagccaaaatgtcattcaccagattcagaagctgtgcagagggcatgcagccagcggccatttcttcgttcacaactccatcagatatgcgagcaatactttgcgtggagccctgtgaaaactgatgaatatatccttccaaagattgctgagagagaacttcgaagattttcaaatctccgctccacgtcttcagatctaggaatgaaaccttcgctgaatgagattcctgtaccgtgtcctgtactggcgattgtgaagcagcgaaaagttcaaggaagtgaatattatgaggtttcatggagaaacatagatgggctccaagtttcagttgttccaggggaacttgttagaagtgcttgcccagaaaaaataactgaatttttggaaagcaaggatgctcagaagaaacaaaagaggagagctaggccaaagaaatctggtcaagctgccgtaaaagacgtggatgcgcagctccaagaattgctacttggaattgaatctgaaagtggtagctttccatgtacggccaatggccctcagacagcagctatacagatggttgcaccgctccaggaatttgttgatctatcttctccatcaccacctatacgatcttgtaagattgccaggtccagaaagttgagtgattcagacacagtaacaatggatgggattcatctgcagcaccaaagtctgcagattggatcgatggagtcaaattcggcactgggtcttgagccaattgatctgtcatcaccctcgccttgtgctgctcataaaccccaggctgctccagaagcaccaccactgtgtatggaggcagaaagaagagccctttgggatataagcaatttggtcgagaaagaaccctcctgttgcaagcatgaacctggaacaaatgtgcaggtggaagagtcaccattgttcaggcatgggactgggatggcaggcgaagctgattcttcacggagaggcgatgcgcagagtagggaagtagtagaagctgccatgatcgacctctcttctccatcaccagttaaagtcgataatagtagaaggaatggtaagaaggattgtgaggctggcagcagcagtcagtctccagaacacgagaggaaagcgagggagctcagattgttcctagacagtataagagacgagttgtattaacattcgattggattgtatgtaaaccgatatgtgcaatgatgatgtgtgttctccatttcaatggtatctcatctactggtggtacaacagtaaccaatgaattgtgcaggtattggaaccagcagagaatgtgaatagcaatccagctatcagagcaaccagtagcacaatcagagcatctatgatgctgaaattcccaccaccttgtcttttgcttgaatcatccttcttctgtaaagacgagacgaacgactgtccgctgcgagatccaggcaccatatcccaaagggattctaatgtgctacaagctgatgcactttctggttccaggattgaagagctctccgcggctgtttccagtgcggatgcacggccatagcaggcttgggaaatcgcgtgaataacctgaaagatggtaaagagttcacatccaagccctcgaaagcatggtatggtatcagcaagtggagcctggcatttttttgcataaataagagggaaccattgaaaagaagaagctgacagtgctaacctgcgacaaggcagcaggggatgtggccttgaatgatgcctcggaagcccatatgtaagtaagcgtgcaacaacagattgctgaagaataagaattcatggtgtgaaccgtgagtagggatggcaatggatgtgatttatccgcgtacccgcggataaaaaacccgttgggcacggttttgggtacgagtttgtacccatggatacggatacgggtagcacttgatatccgtggatatttttaaaacggatatgaaaaatcaatatccatacccaaatacccgaatatccattaaaatatcttgtagtctcgtcccacaagtggcaggcttttaagtgaccatcgcagtcgtctcactcctaaaatggtggaagctttgatgtgcattcaaagttggcttcgtcacactcttaaagatgctggtgatggaagattcaatagtttttggtcttgccttgaagataatgaagaagacatgaaaggagaatcttgtgtgttggctgctgattctgaataaccagctggtctttggtgttgattcttatggcttgtgtgtttgtaattttatcaatttgaataattcagatttgattttgctagacaattttatattgctcgctgtatgccttaatacatgtatcagatttcattgctggacaaatt

SEQ ID NO: 42738 - DNA, 321 bp, Zea Mays
gctaaagcctctccttgattcctatttatccagcatacccttgagagtcttttccttagtcgggtaagtcttgctgagtaattccatactcagggtttatccctccgttgtttttaggtgaggaagcaacgaacttttgttgcttttgctccaaggtggttcaaaatgaagaaaaacaagagtgaagctgcgggaggacttggtcctccatatagaacttttgtgaaagaacttatcgggaggagtttttgcctcccttggtatgtgtaataatattactctgcactcgttttatagctctggtctgtaataagtaacttg

SEQ ID NO: 42739 - DNA, 822 bp, Zea Mays
gtccaggaaccagaacgtctacttgtctagatgcgccgcacaggagttcagggcttagacgctgagatgcgcgatcagccaggacagttgtgttgagaaaccctaaaaggggtttaatgggctaataccgaaactgcccttagggggtacacaggttatatatatgtacccatacccatcataataaagatagacagaaagagcttccatccactgtgtctcttgttcctctctgtgttgggttgctgggaagggagcgagcttctacaacttctcacgtcactactgctgttgggagggtttggagtccggatcggggatctgcgacaactacgttgtttaacacgtcatcaacactgctctaccctaactcgtggatccgatcggcaccgactctccatcacaccggcaggtctccggccttgccgaactgtcctacgcgacagccttcgctcctgttcgtcgagaaacgcggtatgaaatctcgatccgcgatttacttttcgacgttaaaaaaaaatgcttcgtcgtcgtatctgtcgccggcctcagacacgcactgcagcaccatcgcttgtcgcggacctcgcatgcggccctgcacgcgtcgtgctgcccatccttgattccctgtgcgcatcgcatgtccccattgtaaatttggaggccgctctctgcacagcctgcagcctcaatccttgtgtcaggcttgtccgctccgcagcttttttttctttttctccttctcgcccgccgcgcgaaattccgggacgcagagctatgcacgtcaatgcctccaagaaaaacggatcaggatttgga

SEQ ID NO: 42740 - DNA, 1673 bp, Zea Mays
tgaaatcacctggccctgtctctattttctcatcctctcgtccgactcatcttgtactgcggcggtggcgcccggcttccctcgacgaactccaccgacggcgaccggctccctcgtcctccaccggtcgcgcccggccctctacctccatcgatcgcgcccgaccctctgcctccaccgtcgtcgctcgctcagctttgacgatgatctttcattgcttgctatctgtacagatgcatgcaaagggttagaaaatgcaataaagcttgttttccctcaggttgaccaaagagaatgatttaggcatctcatgcataattttgtgaaaaggtttggaggtgacatatcctctaagatgtaccctacacctagggcatataggccagaagtttcatagtactttttcaatcaagttgtagaagcctcccaagatgtaaagaaatggctagatgcttaccacaagctgaattggaggaggagtcagtttaaccctaccatcaagtgtgattatgtcaccaacaatctagctgaagtattcaacaactggattaaagattggaatgaccttcctgttgcggagcttgcagacaagtgtagcgagatgataatggtgttgtgggaaacggaggagacatgggggaaagcttactggcaagatcttacctgctgttttgcagcagttgaaagcaaggactagaggcctaggacatctataagtgacaaaggcagttgaggacagcacaaacattcataataggcatgtggtgaagtcatatttgcattagtgtacataccttgagtggcagcacactgacaaaccttgcccacatgcattggccttgattacagcagaaggattttgtgcatgaatactactcagtccaaaggttcaaaaaagtatacaagagaataattaaaccactaccaaataggtctcaatggccacaagtggaacaaccctatgtggttggtgcaccacttgacaagataggaagaggaaggtataaaaaaactaagaattaagagttgtttggaaggtgggaacaacaaaggaaaaaggtagctaaagaaaaaggcaaggaaactcacaaggatgcagtcctagaggctgacatggaggctacaaaccaatctaagaagggaaaaaagaagatgatgtgaggcaaaagaaagtgcaaaagatgtggagagttaaatcatagcgaaactagctacaagtgcccgttaaatggaacaaagaaaaggtaagtgataaaatgcctaatttgaacatgtacattttttatatttgactctatatgtggtgtctaacatgtagaaagagaaggcctcacattaataaaacaaagtatggggagaataccaagatccccaaaagccgacttgaagaaggtgtccaaggtgaaggtgttatccaaggtgaagctgttgtctaagatcatggtgttgtccaaattgaagctgttgttcaagttggtccaagtggaagtttctcttccagtgcaaagcccaattatacgaacaagggagtctattttacaggacaacttgataagttcagctagagctgaaccaatgtcccaggctcccagctggacctcgcctcacggatggccccctggagctggacctcgcctggagctgagcgacgtacgttcgtttcgttgcctgtg

SEQ ID NO: 42741 - DNA, 608 bp, Zea Mays
ccgaattgatccccgtcacaggctttgttttggcactgcggccggtcgatgggcacggcgttataggcctgtgaccttgtcggggtagagatctcgagacctcctcgcccgcccgcccgcccgcgcgcaggaccacctagctaccggccggccggaccgggttgggcatggtcgcatggacgtcgtcgacgcggcgctacctgacttgcgcggccggctgcatgcggctgactgctgaattcgtaacctaactgcgtgcatgcatgccggcatgcgcgtacattgatgtacgtacatgcatgcatgagatcgagcagctggtcgtgctcgtctgcgtgagtcctgcaaacagaggtgcacgcgtatttgcgcgcacaaatagatgatatatcgtacgtacgtctgtacctgtacgtactcaatggagtcactgtatcttgcgtctcttctgcgctgacgctacgaacatatatatgtacgagtatatgcatgcagacgttattggccagtggccatcagatcgattgatagacgtttaggccgccatatagcctgtaggcgacggacgcgtgtgtataaactgccagcgtacgtgctcgttggcaccc

SEQ ID NO: 42742 - DNA, 652 bp, Zea Mays
agtcttcgtcgtgccactgttccctgatccgcgctactccctggtcggtctcacgctcgcctttagcgtcgtggccgcacccaggttctttggccccgttctagctgcaatgacctctcctatggggcatctcgtcgtcgtctggccatcatccttgatgtccattccactctccagtaaacctatggcggtagatgagagacctcggaagttggttagatgaagaaaagaaaagtaaagttcatacagcgcccgtctggtgttcggcaaaatgagtggaccagtgctcgtcgcgtgttgggaagatcagcaccgaggttcttgccgaatattgcttgattggttttggggagaacgacgcacacatggtgttcaatgaatggttcaaaccggatagcctcgtcgaaatctcggctccgagtcaattcgaacatggtacattaaataattgcgtgatgtggaggacggcccaagtcgaccccaggaaaatgtggagattggacatctcggcaagacgacgtcatcagtcggaccaacctgaagatggacagacgaagcaagtatcggggcaaaggatggtcgtcaagtaatcgacgcctaacaaacactaacctagtgttatccaggcaagccctggtgcatgcaacccctt

SEQ ID NO: 42743 - DNA, 1417 bp, Zea Mays
ccccaccctcctgcagcttccagagcattcactctccaccacccgtcccgacgatataaactagcccccgctctctctcctcacaaacttcccctgtcacgagagtacgagaccacgccttccgtgggatcaatcggctagggtttcggagatgttcggccgcgcgccgaagaagagcgacaacacccggtactacgagatcctgggggtttccaaggacgcgtcacaggatgacctcaagaaggcctaccgcaaggccgccatcaagaaccaccccgacaagggcggcgaccccgagaagttcaaggagctagctcaggcttatgaggtcctcagcgaccctgaaaagagagagatctatgaccagtatggcgaggatgccctcaaggagggaatgggaggcggtggtgggatgcatgatccctttgacatattccagtcattctttggtggtggaagcccttttggaggtggcagcagtaggggcagaaggcaacgacggggagatgatgtggttcatcctctgaaggtttctctggaggatttgtacaatggcacatcaaagaagctctctctgtcccgcaatgtcctctgctccaagtgcaatggtaagggttccaagtctggagcttcgtcgaggtgtgctggttgtcaaggttctggcttcaaggtccaaatccggcagttgggacctggaatgattcagcaaatgcaacatccttgcaatgagtgcaagggttccggagagaccatcagcgataaggatagatgcccacaatgcaaaggtgataaagttgtgccggagaagaaagttcttgaagtggtagttgagaaaggtatgcagaatgggcagaagatcacattccctggcgaagctgatgaagcgcctgatactgccactggagatatcatctttgttctccagcagaaggagcatcccaagttcaagagaaagggcgatgacctcttctacgagcacacactgatcttgactgaatctctgtgtggcttccagtttgttctgactcacttggataacaggcagctgctgatcaaatcgaaccccggcgaagttgtgaagcctgattctttcaaggcaatcaacgatgaaggcatgcccatgtatcagaggcccttcatgaagggcaagctgtacatccacttctcggtggagttcccggactcgttgagcccggagcagtgcaagaccctggaggctgttctcccgctcaagccagtatcacagtacactgatatggagctggacgagtgcgaggagacaatgccatacgacgtgaacatcgaagaggagatgcggaggcggcagcagcagcaccaggaggcctacgatgaggatgatgatgtgccaggcggtgggcagagggtgcagtgcgcccagcagtaggcagcttgcggt

SEQ ID NO: 42744 - DNA, 816 bp, Zea Mays
taaaaaatcgccgccctccaccccatccccccgtagagtggcagtgctagctcggtacgctgcccagagatcccctcccctctcaaacgcccccgtcccccatcccctagcgtcacggtgcccgccgagagggccatcccccctcgacgtcgtcttgctttttcctagaagtggaagaaaagcttaggagccgctccagctgtaggtgattaccttgcccggttcattggttgtagcaaacaatttgagctcctcctgcagcctgttgagtttgtccagatgcccacaactcttcatccgttccctccccagcctcccctcatgccggacgtcccaattgacaccatcatcgtggtccagccgtcgttgaggtcttctgtctaaggaagtccaccataggcatcaacaactacaacacgaggagtgtaaacatgaattctagctattacgtatttgatatcagtttatggtgctgggtaattcaagatattatttggatttaatgtagtatcatatcatggtacatagaggcaacttgaatggattgtttgaccttgtgttatatacttatatacatgtttatttcagcaaataaaatgaatgatctttgacgcagccaccgatgcccatgcggccacaccaacgacaaggtcgttgacgagtgcgagcacgatattaacatggagggccccctctatcctgacgacaagcttcgccacaagttaatggaactatcccacataacttctcatggctccccaatcttcagatattgtaagtgtaatgtcacacccggctttaaggaacaaatccaag

SEQ ID NO: 42745 - DNA, 1804 bp, Zea Mays
attcaatagatcaacacgcgcgagaggcgcgaacgagaggcgcttcccaccgggcactcctccaccaggcgtgagaggcgctaacgagagccacaaactctgctccgcgtgcacgccgcgctccatggccgccgccccagcagcagccggaggccttatgcagctccagcctccgctatgcgtgtcgcctcgcgccagcgcttcttgcgcaccaagcatctggggggccctgccccagcttcgccgccgccgggccctggcgcgcgcggcgtcgtcggtagcggccggggaggctgaggcgtacacggaacccgagctggtgttgctggaggccctcctcggcatccagggccgcggccgcgccgtcgctccgcgccagctccaggaagtggagagcgctgtgcaggctctcgagacccagggaggcattcctgatccgacaagttcaagtttaatcgaaggtagctggcggctcatcttcactacgagaccagggacagcatcgcccattcagaggacatttgttggagttgactctttccgtatcttccaggaagtttatcttcgaacagatgatccaagggtggtcaatgttgtcaagttttcagaatcagttggtgatctgaaagtagaggcagaagcaactattaaggatggaaagcgcatacttttccgttttgaccgagcagcatttgccttcaagtttctgccatttaaagttccatacccagtgccatttagacttcttggagatgaagctaatggttggcttgacacaacgtacttgtcccacactgggaacatacgaatttcaaggggaaacaagggaaccacttttgtcctacagaagagtgcagacccaagacaaatcttattgtcagctatatctgcaagaacaggagtagaagaggtcatcaatgattttatttcaagccaaaatggaacaaaggctgatctaagcattctggtgggtgaatggcaactattgtggtgctcacagactgaaggtgaaagttggtcatctgttgcatctgccggtctcaaggacttccagattataagagaagatgggaaattaaagaattcagctagccccttcccaggtctcactcttaatgcaacaggcaacatatgcaaaaatgggagtggaaacacctttaccatgtccatgaaagaaggagctgttaaagttggtggtttacagtttcccttggatgctcaaggagaatttgtgatggaaatcttgtatggcattcacgtcttcctgaaattgaaatatgaagcttatacttaggaaaatgttggttgctggtatatcgacaacaagataaggatatccaggattaaccagcacatgcttgtccatttacgcattgcgaatacaacatgacaccttaatgaagactatgtgaacatatatcctaatttcattgctgagcacacctcatcagatgtgactaggtcatgcgacataattttaaatttactggtgtatagctaacattttagcacaaaattttctacatagttttcttgtactcaaaccgttttctcacaaacatatggaaccacagttgagcagtttgtatggcaacattctgtaaatgcctgtttgaaaccagatccgatttctcaggggatttcttatgtaacttcagagttcctagaagacatgggcagaaagtagatctcaaaatgcccttgtgcaattaacttttattttctttatgggcccggacggactcaggctcgtgttcgtgctacccgatttatgtttcaggactgaatgactactctctcgtca

SEQ ID NO: 42746 - DNA, 5417 bp, Zea Mays
aggagcggcagttagggttaggaaaccctaaccggccactaccttcccaaacggcggcggtcagcacctggcggcggtgggcgcgaccccggtccccggcctcccctggcggtcgtacgggcagcaccgacgcgaggccactcggtccctcggcgtaggccggcgcacgcccgcggcggcatggcgtcccggtgacgctggcggccagggcgtagctctctggcggcgcgggcgcggctgtgggtgtagccccggcgtcccacggcgtggacacgaggcgtggccggtggagccccggtgcagcgcggtcgcgcacccggctcaggccatcccggcccaaatggcgcggcggcgccccctggtggccggatccgcccggcatggccaccccacaaggggcgggcgcagctcggcggtccccctgcgcaggctcgcgcgaaccggcgcggcttcctggagggcgcgcggctccctggtgcgatgaggggcggcggctggggggcttgggctccctggtggcgcgcaggcgcgggatcagcccgactcgggcggatcggctactgccacggcgcggagggtccggcctcggcggctcggcggcccccagccccggctacctggcgcggacggtccggccacggtggcacagggcgcggagggtccggcctcggcggctcggcggcccccagccccggctacctggcgcggacggtccggccacggtggcacagggcgcggcccctgttgacgcgctagcgcggtcccctgacggcggcgcgcgggctcgcggccctcctgcgcgcgcgagcacggccccccggcggtggtccggttgccaggcgcggcgagcccgctgtgtcctcccggcatcagcgcgggcgtatggcccctcggcatggcggccccctcgacgtgcaggcgcagtggccctgtcaatgcgctgccccgacgaccggtccggcgcgggctaggccagcgcgtgtgcgcagccccgacggggcgcagtaccatgggcaggacgcgtgcgaagcccccgcagaacccctggtggcccgtggccctgatccggcttggaacatggccggtggccccgatgagccatggccgtgaatggcgaagcaaccatcagaaacaagaaagattaaacaaaatagtgataatgcgtaccacataatccttctgcacatttctgtttcttaacttctgtgagcgattccttctctcagcaacttcaacttctctctgtttctcacgagcagtgctgataacgtgttaaactctatcacaacgctcagtggcaaatgaagattaacagagacaaagacaaatcgctgggacaatcctttattgcagagtagtgaagtatatatacaagagttcccaaggggtgtgtcccttgggaaataactgtcactacgacatatggatggattagatcacatgtataaaatgttttataacaatgtgaaaccacatctgtggaactttcagtgtgtgatgactgggtcactggtggaataccgtgttttctgagctggtcgctttcagttcgcggccaaagtcgatagctcaactatcttttgagtttagctcccaggttctttggcttcatttcaacaagcccgatcttcttctgacctctaaggtaaacctgcgaggaaaccattcccaaagagcatggcactctggaacggcataggtcaggtggcaagcatcgcacagttagccggggtcgatgcctatgggctcatctccatgatcgtggaggctgcaaagacggtgaagaggaaccgggagacctgccagctactggcacgccgtgcaaggatgattggggaccttctacatcagcttgaaaggacacagctgatgcagcacatggagacgaggaacccagtggagcatctggaggagacgcttcggcatgcgtatgtcctcatcacatcctgtcgcaacagcagctacctatacaactgctgtatgggagggaagcaggctgatcggcttcgagaggtgcagaatgagattaccttctacctccaacttttcccccttgtcagctttgtcgacaacacccgtacttgggagcggcttctgagtagagcttgtcctctgtgcacaacagaaaacatggatgagttacatgcagcagcacatcatgtggaacatgaagatggatcagaggccatcaaggcaactaaattcgaaaatctcggaagtcatcctaccctaaaacctgacatagatcaaatggaaggccaagtcatgaggatgggaggattagtaaatctcattggtggtacaaaaggagcagagttatcatgttttaccttttctcatattttggcggcgacagacaacttttcagagaaaaatttggttggtaagggtggatttggttatgtctacaagggcaatcttattaatggtcttaacgttgccattaaaagatttgatgcatgttcatcatatcaaggtccacatgagttcagaactgagattgatgccattccaaatcttcgacacaagaacataattggtctacttgggtactgtgttcaaggagaagaaagcatacttgtctatgaatatatgtcaaataaatgcttggcatctgtcattgctgatgaaacaaaaagggggttgctaaattggtccaagcgtcttcaaataatcaaaggcatagcagatggtcttgcttttctgcatgggcattctcagatgtgcattgtccacagggacataaaaccaagcaacatcctgctggaccatgaaatgaatgccaagattactgattttggtctggcattaatgttggctccaaaatcgactgcagaggttcctgttttgggcacatatggctatgcagatcctgaatatattgttactggaaaaatctcggagaaggcagacatatatggatttggcatagtactttttgagataataagtggaaggtcgatccattcttatatgaaggcagagggcactcgagagctaccataccctgcttatgcacacaaatacaacccaaagacgctgcacaagcttgttgatccattgttgcgcgtggacgagcatgaacgggctcagattatggaatgcgtgagggtggcgcagttatgcgttgaccatcgtgccaagcatcggcctgtgatgtcagaagttgtcaccatgcttggcatggcagcatcaaagggatagttgtagctttgcaagacccacaaagggatagctgtgaatgatgcaagtgtgaactaattaatgagctctactcaactattttcccccttctcatgcatgattgtgtaaacatcagggagattagtcagtgaaatatttggcatgcaccttacttgagcgctgtggctaataaattgtggttggctggaatgcaaattgctccatggtgttgttaatttggtctaagctggagatgaagtgactgactccatgggcatgtggttcacctccctgctggtggtggacgacaaatatcaggctggcattcacgtagaatgtgcggcaaagactgatgactgatgagtgatgactggtgaggaaccagacaaatgatgagttgaatctttcaaagtttgacagttcagtctccaatttttttttctcaaatcattggtactgtgtacaagcttgaagcttcctggaaacagcccctcctccacgggtttgttcaaccatgtgagcttccacaccagtacaggtcatcagtgtcttggactttctctgccactcccagaccttggtatcctttttaagggcgctcattctgtcattcaccacacctgtctcgttcctcactaccacaggtccaaagcaagcaagaagaaacgaaggacgataatggctctggtcgggcaggtggcgacggtggcgcagctggtgggcgtggacgcgttcagcctcatcacgatgatcgcggaggcggcgcagacggcgcggcggaaccgcgccgtgtgccggcagctggcccggcgcgtggagatgatcggcagcctgctccggcggctgcgcgagcaggacgacaacgacgacatgcggctgctgcggcacgcggagacgcgcggccccgtggaggcgctggaggagacgctccggcgcgcctacctgctggtgcggtcctgccagcggcgcgggtacgcgttccgctgcctgatgggggcgcggcacgcggacgagctccgcgagatgcagggcgagatcggcttctacctcgacctcttccccctcatcagctacgtcgactgggcgaggcgtcgcggcaacggcaacggcaaggccgcctgtggtgacactcgttctttgcaagaggcacctatggtaagaccatgtcttgtgccgttcctgtttctctcgctcctgcgatggatgcaattgttcagggagtacgtcatgcacctgctctgcttatcagcttatgtttactgacgtgtgtatctgtgaaatcattttgcatgttaattttcattaacaatgatctagctagctagctagcaccttaattttcattgctgggaaacaagctagctagctactagtatgcagctgttgttggtcctctgtttttcggactactatctgtcgagttcaggtgaaattgcctttcttttttgaaccagattaaataggtatgttggaataatcctatttttttcctcttgggaacgcaaccagcacacgttcatcaggagtgtttctgtttggcctggctatctgtttcggtttggatacatacagatagcttaccttcttggttcatcaggagtgcaaagttgcaggatctcaggcggcgctgacgatgacgcagcagccctggagccttccacggccgagcaaggacgagtaggaaggagggccacatgcgtcgtggccccgtgacacctgcttcacgttctctcaggaaaaaaaatctgcaaaaaaatctgcaattttaattttatgacgcacagcgaaaagcccaaaaggaggggggggaagatgctgtcgatacagatcgttcgatccacacgggaagatctgaagcatgagagcatgtctgaaacagtcgagatgtcagacatgtcctgccgccattttattttttacccgctcatgtacgggggttatttttttttcgtatttctttcctcagcggcgctgcagaatagaaccgatcgaggcggagttgtctgtcatctcatcatctctcagtaatattcacacgcgctgcgtctctcccaagggcgccgccaacttgtacatatagcagcatttttttttgggtttttttaagatggtgccctcgattttggtggtgtgctcagttttaccctcagtggtgttttttgctcagttttgcccttctgttctatagcactggaagggcaaaactgagcaaaaaacaccactaagggtaaaac

SEQ ID NO: 42747 - DNA, 2381 bp, Zea Mays
ctcctcgccccctttcccgtctcctctcccacaagtcaactctccccacctctagagcctagctaatgctccccccattataaccgcccaacccttcccccatccgcagctctccgctcccctccagcccgcccgctcacgtcccgccatgggaaactccctcgcctgcttctgctgcgggggcggcgccgccggccgccgccgccacgtggcgcccgcggcgctcccctcggaccccgcctacgacgagggcctcggccactccttctgctacgtccggccggataaggtgctggtgcccttctccgcggacgacgacgacctggtcgccgacgccaaggcggccgccgcggccgaggagcccaccacgttccgggccatatccggggccgcgctcagcgccaacgtctccacgcagctctccacctccgtcctcctcctgctgccggacgaatcctcctccgccgccgccgcctcctcctcctcctccgggttcgagagctccgaatcgttcgccgccgtgccgctgcagcccgtcccgaggttcccgtcgggccccatctgcgcgcacgggggcgggttcctctccgggcccatagagagggggttcctctcgggccccctcgacgcggcgctcatgtccggccctctcccttgcgccgccacatccgcccgcatgggaggaggcgccgtgcccgcgctccgccggagtctctcgcacggcggccgccgcctgcggaattttacccgcgcgcttctcgcgcgggcggataagtttcaggattcgatggatctcggctcggccgccgccgccgcctgtggcgccggttccgccgggctgcagtgggcgcaggggaaggccggcgaggaccgcgtccacatcgtggtgtccgaggagcggggctgggtgttcgtcggcatctacgacggcttcaacggtcccgacgccacggacttcctcgtctcccatctctacgccgccgtgcaccgcgagctccgcggcctgctctgggatcagtgcgagcaggaggagcagcgcgacacagatcccgaccagccgatgagcaccacggcctcatatcaccaggaccagcccgccaacggccgccgcgcccgccgatcaagaccgccgcgcggcgccgatgatgaccaacggcggtggaagtgcgagtgggagcgcgactgctccagcctcaagccgccaactcagcgccctcctaggagcagcagcgagaacgaccacctcgccgtgcttaaggcacttgcgcgcgcgcttcgcaagaccgaggaggcctacctggacgtcgccgacaagatggtgacagccgggctgtgctgggaacaatggacagtgttgatctcgaggagatcagtgggggttcatttgatggattggtcggggatggcactccgctcttgtcagctctgcagctcacctcagaacatagcacgtcagtgcgagaggaagtttgcagaatacggaacgagcatcccggagacccgtctgcaatctccaaggaccgcgtgaagggctcgcttaaggtgacgagagcgtttggagctggtttcttgaaacagcccaaatggaacgatgcgctgctggaggtgttcagaatagattacgtcgggtcatccccgtacatcacgtgcaatccttcgctctatcaccacaggctcagcacgagggacaggttcctgatactatcgtcagacgggctctaccagtatttcaccaacgaggaggcggtcgctcaggttgagatgttcatcgcaacaacccctgagggcgaccctgcccagcatctggtggaggaagttcttttcagagctgcaaacaaagcaggaatggacttccacgaattgatcgagataccacatggcgaccgccggcggtaccacgacgacgtatctgtcattgtgatatctttggagggcaggatctggagatcatgcgtgtaaataggtcagccatactagtagtagattagagaaagaaacgtatatagagagagagaggttcttgaaggcctacttcactcgtcccagctgctactgtacaatatcaatgaagcactgggtggtgggcttgggatctcaagttgaaccacgatgagattcacctggagcgtgccgatgccgacgcagtgccgtatgagatgtccatgcaaaagaggatttgttcaattactaataactcaatcaaatagcgaccaattggtcaactttctttgaccttttgttttgcatcttctgtgttcataccataacatgtgcacgggagactgattcaaagttggacttctgagattctggactttgtgcaaaaaaatgcagatgggttacttggtcagaaatggtttgcggtgttgaccagacctctt

SEQ ID NO: 42748 - DNA, 2144 bp, Zea Mays
tatcggagtgattacaaaagagagtgattcaaaagaattataatttaaaatgaataaaatatttatagtttttaaaatacatgctagcttaattgacaatcctcaataaagaagctaaagatgtgatatacttatataaaaaggccgagcccaccggcacttagcaccatccacactatccacaacagaacaaacttataacctgaaaaacaatagggaataaagccctgagtacgcaattactcagcaagacttacccgactaaagaaaagactctcaaggatatgctggtttgttgggaatcaaggtaaagctcatcaaatttcaaagactcgtttttgcagaaaagcttactagtagtggatccttatgccaacttttacttcacaaattaagtacttttcctgaatctagatttgcctaatctagagcattcaattgttctacactagcttcattttaacatctttagtttcacttgttaattatgatgcagggcagtgatctagtcttcatatccgagaagtaacagcgatccgaatcgattaatactcagctgaggatctccaaccacacgacatatgtagcacttaacccttgcatatgtcaactcgcccacgggtttcttaagaccagaacaggtccccgctaaccgagagctcagtaccccaccatccagcctcttgccaggtggatacacgatactctcgccatctctccactcccattgcaggccggcctttctggtattggtccgaccgaggctaagcttacccatgatgaggcatgtggccagttaaagggtcctagatcagcaagcctactttcggtacggtccttaatcgacacaaacgggcgacctttcctgctcaacgtctggtctcatattaaaataattctgaaaatctggaacctattagaggtaccctaccgaaatgatgaagtcatcaagacctttgataccttcatcattccagcccctttttctttgtaaaaacatgattcatacatcaaaatattttgttccttgtctataagcaggctaagcatatctagattttcaaatcaggtatcaaggatgataatcaataattcaaggaagttatgcagcaaaggtttacccattcaactcctaccacctaatgcagcatataagtgataaaatgtttttaaaacagcaaggaggtggcaaatgcactggggcttgcctgggataacactaggttagtgttgttagacgatgaccacttggcgaccagccttgtgtgttggcactggttcagtctgtccatccttaagtttgttcattagcatcaccttgcgaagaaaccaatacttaacaccatcttgtggtcgaccgagctctagtccttcacatcacgtgatcacttatcgtacctaaatgatatgcataatgcacatgagcatggacataaaaaagcacaatatagataagctatactaaagaggataatacttaaaacaaacattacaacccttgggataactactagatacatttaattctatatcagtcatgactttctagtcaaatggacctaaccaaatatcaagaaaacaatacatcatatttagacaacaaggcatatttgattaagcatttatttgcaactacgtaagcataagggcatagccaaagctaattccaagtcacccgtattgtaatcaatgaattaccagttaattaagctgcatgatcattactacctggatactttactccccaaccaaaaactcaagtcacaacatgaaaaggcttagagatatataaatccaaaatactatcccttactaactttctattagcaatggagaacacttaaacgacatgacctgatagaatcaatatgacaaaccagtaataaccataaataaatctccatcctccgtgatttattaacttaagcaattaatatagaagatgaaactttttaagacaaggtatgcaagcaaccaaacaatagaaattcacacaaataacactaatacttaatggcaagatgtcacaaacagtcttaattaagcactagataggtttatataccccaacacaacgatcatgttctccaatttactcgaacctaatccgaacattaagaaacatccatatgcagttataagac

SEQ ID NO: 42749 - DNA, 2284 bp, Zea Mays
tctggattcctcctcccgtcctccggtcctcccgtttccccccttccccttccgcttcgccattccttctcggtcagaacgacgcgcatccccgcccgcacgttcccgtgctctcgcttctccggaggcgaccagggttgggacttgggaggctagcgagaaggtgctacccgggccaactcctccgatcgcccgcaggagaaggggatctctccgcctccccgccctcgtcgggcctttcccatcgccacccgcgaggccacgcgctccagctcttgtgaaccggaagggttctggatttctgagccaagcgaccagcacggtggctcggccgggctgacactcccctcccctgtcgcccggtctcttccttcccgagcagaactcccctgcgtcttgccgcttctagcatcggggagaaaaattatagaggaaggatatgcgggatccatttgatgcaccggttgatctcattaacccggaccataatggtgggaacaaactttctaggactggtgcagtgtctgctggggactatggtttacaaaatggacccaaatcctttgccccaaactccgacaccctagtcaggcatcaagtccaggttgcatccttgcacaaagacttagttttggaagatcccaatactcgtatcatggatcctgagaccaaggaactttactttagatcacaatcacaaggggacgagatcttgttgcttcgcaagaaaattgctgaggcatctctcaaggagctgagattactgggtgaaaaacatattctggagaggaggctcacagacttgaggatggctgttgacgagaagcaggaagaagctatatctggtgctttgcaacaattgaaccagaagaaaacccatcttgaggacaatatgagactggcaaatgaactaaaagttgaggaagaagagctatacttttttacttcttcattgcttagcatgctagcagaatacaatattcgcccacctcaaataaatgcttccatcattacaactgttacaaagcgtttgtaccaacagatgcatttgaagctcagatctttaaatgacaatttaggtgatatgactcaacctggaaatatatataatcccaatcttcagcaagtaaccctatcaagaaatgaaccttccccatcttataatttggattcaaataggaacactcttcaacagtatgctcaaggtccaagtgaccgacatatggatcaaatggatactggcggtactactccctctaattattttgagggagacagaagagtagatggtgactcacagttataccaacctgatggtgacgctttacctggtattgaggggtttcaaattgctggtgaacctagaccaggatttcaattaacagcatgcggttttcctactaatggtactaccctttgcaatttccagtgggttcgccatcttgaaaatggtaccagacagtctatcgaaggtgccacgatgtatgactatgtggtcactgcagatgatgttggtacttttcttgctgtagactgtacacctatggatgataatggccgccagggtgatttggtgacagaatttgctaacaatgggaataagataacctgtgatccagagatgcagagtcatattgatgcatatatttctaatgggagagctgaatttgaagtttttgtcctggcttattctcctgaggagtgggaattggctacattggtgctaacacgacctaactatcagattaagttcaaaaagaccggtgaagctataattgatgagaagtactcacaaagtctacagatgaaaattccaaatgggcgcacaactcaatttgttttagtaactgcgggtgcaactctcccatttaacacacagggaatatcagagccaaacaatgaggattacgatgttaggttacgcgatctaatcgtattagtcatgagaactttccagaaaaaggctttagatgccaaaaggaaagtcaacacttagaatccatgttgatctgttacaaaagattctatgtaaaaccgtagaaaattttcctatttttgattgttttgtgcagtattcgatgatttttgttcttgagatggaatgagctctcgatcaaagttttgctaggtgctagacggaatctaggcgatgacccttagcctagggactagtccaagcctaggcgatgctagacgttttgccaacttatataatatatacatttatagataaaaaagagggaaggaccagtagacataccttttgtccttgcagatctgctaa

SEQ ID NO: 42750 - DNA, 2030 bp, Zea Mays
gttttaagatcggtgacaactagagagaaggcgaagcgaacttgagccagagagagaatctcgcaccgcagcaggaggggaccgagagagaagcgaactcgagaaagggattcaaggaggctgttgccgatggccatggcggcgcggctgctgcgagcaaccgaggtggcatctcgatttctatctgcttcccatggtttcgtccagcgagctgcatacacagctggtgggatagtcgatgttggccaaccaacaccccagtctcatccagagttattagctgatggagagatcacaccaggcatcacaaacgaggaatacatctctagaagaaaaaaacttttagaggtgctaccagagaagagcttggccattattgcttctgctgatcagcagatgatgactgatgtagtgccatatccattcagacagaatggtgattacctgtatattacaggttgtacacaacccggtggagtagcagttttgagtgaagaaacagggttctgcatgttcatgccagatacaaataaggaggatttagtttggcaaggtgaaactgctggagttgaggctgctgtggatttctttaaagcagataaagcatttccacttagtcagatgcaaaagatccttcctgaactgattgagcaatcaaaaggggtgtatcacaatgtgaatacaacatcttcttataagaacttggatgcctttcgtagggcatcactcaacaataaagtaaaagatcttacaaattacactgatgaattacggtgggtcaagtcgaaatcagaaattaagttgatgagggaatcagcatctattgtttctcagagaggaaagccagttggcagctaagattgaatacgagtgcaaaatgagaggtgcccaaagaatggcgttccatcccgtagttggtggaggagcaaatggcagcattatacattattcaagaaacgatagaaaaatcaggacaggtgatcttctgctcatggatgttggctgcgagtatcatggctaccttagcgatctgactcgaacatggccaccctgtggcaggttttcacctgctcaggaagagctgtacagcctaatactggagacaaataaggagtgcataaagctctgtaaacccggcacaagcattaacgagatacacaatcattcggtaaagctgttgataaagggattccaagaactgaggatcctggagaaggggaaatccatccaatacaactacttgaacccaaccgcaataggccactcgttaggcatggatattcatgactccatgacactccccaaggacaagcccttggagcctggcgtcgtaataacgatcgagcccggggtgtacatcccggcggccccggtcctgaacgagcgcgcgccgagcaggtaccgcggtatggggatccggatcgaggacgaggtcctcatcaccgacgacggccacgaggtgctgacggcgtcggtgcccaaggaggtctcgcacctgaccaccctgatgaacatgggcaggggcggctcggctgcggacgcccatggccatgagctgcgagccgcctgcagctagctgaggcggctgcgtgcgtgaggtcatgcccgtggcggcggccggacctagtagacctggcacgacgtcgtggagcagaatctacgtgctctgcgaatacccgttgcatccattgattggactgttgtaatcacgggaacagatagcgaattgggcaggtgtttttttaaggtaatgggaggtgttatattctggacccttaccatggcgcgtcattgtatttgcatgcgcagttgtgttgtggccgcattcagcttctttatattgttttgtcgccgttcagaacggttagccgaatcttaccgtgagccatggcatggtgaccacacggattacagccagccgtgtggcgctagcagatgcatgcaacagtcggctggggcggccatgaatgcgggaggctgtagacctgtagtgatgtcctgtttgtttcagtttatacattatataatct

SEQ ID NO: 42751 - DNA, 2754 bp, Zea Mays
ctgggattgtgagataagcgtgggcctaccaaccacacatgtcaattctcggaatttctcagaagattggagacgggcgttctcttttcatttggagttttggactagtcgaactgacgaactggcagagcgttcaggatagacatggctgccacctttgccttcatccctctcctgctactggtctgcgtccagagcgcggctcctgttctcggcttcacaaggagcgagttccctgaagatttcgtcttcggatccgctacctcggcttatcagtatgagggtgctgttggtgaggatggtaggagcccaagcatctgggacaccttcactcacgcagggagaatgccggacaaaagcaatggtgatgtagccgccgacgggtacaacaagtacaaggtgaaataaattagctgcgaatcagtttttctgctggtatcgaggtgctggtttcttactatgcctgtcaactaaccttttgtctgatctctattttttttattgaaaaaccctggcatctaaatatgaaagttgctgtcttaattttaacatgtagtttgttgggctgacgtactgtcacttctgagatcagcatgctgaatttttcagcatatggaaaggagcattcttgatctgtttcttgctttgatcttaaccatctaatgttttaggacgatgttaagctcataattgacaataacctggaggcatataggttctctatctcctggtccagacttataccaagtataaccattttttgtgccaaaactctatcatgtaccaagcaataaatttctagggtcgtcgattaaactttcttaattaaatacacagatggaagaggtgctattaatccaaaagggatagagtactataacaatctcatagacgagctagttacacatggtgtccaagtccatgttatgatttaccagctggatctccctcagatcctggaagacgagtatggtggatggttaagtccaatggttgtggaggatttcacggcatatgcagatgtgtgcttcagggagttcggtgacagggtttcacactggaccactctggatgaagtcaatgtggctgcaattgggtcctatgataatggacaaattgcaccgggaagatgttctgatccatttggaacaaaaaaatgtacagtggggaactcaagtgtggagccatatatagcagctcataacatgctactggcacatgcatcagctaccagactgtacagagaaaaataccaagtgagtaatcttgtacctgaaaacatcacatgtatcttaacattagtgttgtattgtttctttttttcttgaatacacaggagagctgagcatcgttgcattagaagaagaaatgtacatagtgtgcaaacacacacacccacacacttgtaatatcagaatctttttttttaccaagaaatactgtaggggaagcccctacagtaatatcagaatcttataccgtgacatgtgaggttgatccttataatagatcttacatttgaacatgtttcactcatgatccaaggcatcagtttgtcttctaactacaccaaaaacattccctttggctttatatcatcagatatttacccaaacataaaatgattgacctgtaggctgtgcaaaaaggagttgttggtataaatatatatacaatgtggtcatacccactaacaaactccactgccgatttagaagcaactcaaagatttctggacttctattccggctggatactagaaccattggtgtttggagattatccaagcgtaatgaagaagaatgttggttctcgccttccgtcattcagtaaagttcaatctgaagccattcgtggcactctagatttcattggaataaaccactattattctttctatgtgaacgaccgccctttagaaaaaggcatccgtgacttctcactggacattgctgctgactatagaggttcgagaactgatccgccaataggtcagcatgccccaacatctattcccgctgatcccagaggattgcaacttttggtagagtacctgagtgaagcctatgggaaccttcccatctatatccaagagacaggttatgcaaccacaaacggcagcctccatgatactgacagggttgattacatgaagacccacataagcagcacattggctgctctaaggaatggggctaatgtgaaaggctacttcgcgtggtgcttcctggacgtcttcgagtacctgtcagggttcatgtcgcaatacggcctgtaccgtgttgatttcgaggacgaggcgctaccaaggcaagcaaggctatctgctcgctggtattctaaattcctagagaacaaggggatccatgtagaggacgagcttgatgatgcgggatcacacgttgagcaataagttttctacagcgacacattgatctgtacatcctctagcgagactattgaatactactgtgcgttgcaataagaacacttatattaaaaaaacaaattccatcaaaacctctgtccaggactccaggtaaacaccaccacaatattagggacacggtcctgccagaacaagggaccgtttgtacaactcaagcccatatctgctagagtgtgaggagaaatttcattatttgggtcttaattcggcttcctgtgatctttagggcctgttcgtttttcacggattcaagccctggaatagttcctagccggattacttctctaatttatataaattttgat

SEQ ID NO: 42752 - DNA, 481 bp, Zea Mays
cacaggtgcaggtgctggtgcagaagacgaatggtcgccgaggtggaatttaaggctgaggtgaccgatgcgtctataatttaaatttcacttaattaatgcataacagtatgttacgcgtttcgataacattaacctaacattattccggtccaactgcgaatggcgtaactgttttgttcacaagctagaatcgaggaggcgcaatatccccatgccaacgctgcctcgttcttctcgttagcgccatctagctggaagatttgtctcctgagaaaaatagttgacgcggtgtatgctcgcgacgacctcggcactgcctcgcgcgggtgcggaaagcctcggctacggcgggccccagccacggtgtgccctggccaagcgagtgaccccggcctcggccacggatcggcataggcgagcgtgcacacgagcgagcgggcaggcgcggcgtgggcggccagccctggccacgcgcggg

SEQ ID NO: 42753 - DNA, 2228 bp, Zea Mays
tatctccgatgttctataatgtctgcaagatgggtgaaacgttcctggtaaggtaagaaagaagataccgaacttgtcaagtagttcaggggcacctacaggattgtctgaggtccgttggacaaggacaactgtaggtgggcctaattacttgggaggttccgtcacacccttatcggccatgctgggccgaaccaggacttttttgacctcgaagttgatcacattcattgggaagagctctgtatccacctgcatttcctgaaatttcaatcgtctctcgttaatggtcgattggatctatcgtcgaaatacattacaatcattagtggcatgagaaaacgagttgtgccacttgcaatatgcataacattttagttcgtcggtgggtggaacagtatgatttattttaatgttcccattttttagtaactcgtcgaatatcttgtcatatttgccaacattaaatgtaaattaaacctcttgtcgtttcttttgaaccggttgtaaggaggaacaagctaaagatttgggcctgctttggccaaatcatttcagcagtgtatacttctgttgatttgtcgtccgagctactttggtcgcactctagtatatggacattgtgacgaatagttttggcagtttctttgcttcggctttcacaagccaaagctctcttgtgtaattgtgctagagtgaaaaacgggatgccttctaatctttcttttaaatagtatctcagtccattaaaggctaatcccgctagctgtttttctgccaaatgaatttgaaagcattggtttcttgtatcatggaacctttggatgtacttattaaacgattcctcttttccttgtcgcagggccactaggtctaccaaatctaactcatagtcaccggaaaagaagtgatcatggaatttttgttctagattccccatgacaaaatagaattaggaggcggagccggaaagtattcgcccccatgggtttgggacactgtattaatgggctggtgcattgtatattgcgacgggaagtgctgctgagacggatgaggatttaggtaacaatcttcctcaaacatccctgtgccggatcgtccggtcggatacatgaaagtgcattcatcccttttgtgagttttggtgatttggatgacaacacatttaaaagactaacaagtttgctaagtgttgaacaggaaattcagtatgatgaacatacttgaatagtgtataatgacagtgaacaaaggttcaacacaaggttaaataaccagtgagacaatgcaaatggatataatatgatctctatattggtttgaatatatggacaagacctgagaaatcactacataaatatgatcagaatagacgatgaagtgattaagaggataggtcaagccaaagtgtataagatatgaggaatcgtgaattggcttgaccatattactattagtccatatatgcttctatgagaatcaaactagagcttgattgatcttaatagttatatctagaagacattcaagcaaggttcccaatattgaagaaatgattctctcaatggatgctcaatatgatgtgactcaagaatggctagatagggtgaagatagcaaggaaagtgcttcgaggaactaagcgaaggtgaaggccaagcgatggcttgtggaccgatgtaccatggctaaggtgaagaagagagtacttgcactaagtcgatgaactaatcagctatgaagagttataacatgttgatacatcaatacggtgacttaaagccatgatttgaactcatacatggtgatatggtacaagtcacagggtttgatttgtgtttgcttcaaaaggtgagacaaagatgtttgtgatccctatgaagcaacaccatggagaaatcacacatgagacaccaattactcaaggagtttacttaattatattttatttaacttgagtataggaatcattgtactataaagggggatccaaaaagaaggttggtgtttgccaaaggtcaaacctctatattaaaaagctatttttgaaaaacaaaaatctcttgaagattctatggttgaccgtggttaggtttgagaaacctagagtgttcctgttgaaaagcagctggacttcttcaactgcagctgagcttttcagctgagctgaacttcagctgagttgagcttcttcagctgcatctgagcttttcagctgagctgaac

SEQ ID NO: 42754 - DNA, 216 bp, Zea Mays
aggtgccatcggaggaggattactatgacgagttcgacgaggtctaggtgtcatctcccagtcagcttgatggcgccaagggataataatgatattagttcattctatttattatcagttattttctaagacattttgttatgtaataaagattgtgacatttttctctataatctgagtcatttatgtgttgatcttgattgacgcacatatgag

SEQ ID NO: 42755 - DNA, 1315 bp, Zea Mays
tttagaaagactgataataaaaaagctcaaccaaagggcctttattgttgtgggcgtacgcgaccagtgaggtgcggttggccagccagcggcgagccaaaccgagcgtacgccatggatcgcgagtggggctccaagcccggcagcggcggtgccgcctccgcccagaatgaggctattgaccggcgggagcgtctccgccgcctggccctcgagaccatcgacctcgccaaggatccctatttcatgcgcaaccacctcggcagctatgagtgcaagctgtgcctgacgctgcacaacaacgaggggaactacctagcccacacgcaagggaagaggcaccagaccaacctcgccaagcgcgccgcccgagaggccaaggatgcgcccgcgcagccccagcccaacaagcgcaagcttgccccccgcaagtctgttaagattggcagacccgggtataaagtaaccaaacaatatgatcctgagacgaagcaacactcgtttctctttgagattggttaccctgaaattgaagataattgcaagccaaggcaccgcttcatgtcatcatatgaacagaaagtccaaagttgggataagaggtatcaatacctactttttgctgcagacccctatgaaatcattgcattcaagataccaagtacagagattgacaaatcagcgagcaaattcttctcttactgggatcctgacaagaaggaatacctgccaaggccgccagaaggtagtaaaccaccaccagctcctcctggaactttgcctaatgggactggggctcctggtgctccaccaaggccaccggggcaagctcccccaccacccccgccacaaattccaccgccccctcctgcacctatgggaatgccccctaggattcctccaccacctattggggctgttcaacctccgccacctccagcacgagtggcaaatggtctgcggccaatgattccaccgccacctaacttcactcccggagcacccccaccgcgccctccaatgcaaggctttcctgggcaacagcagtagttgactgcttagcaggcaatgttccagtaattggcagtcagtaaaagtttcaagcttgtgttgactattgtttttcggcttaaaactttgtatgttgtctgggactatactcaaacggcagcttgttggatttttttgtatccacatttattcaagtgcttgtttaaaaatagctagtttgcgtgtattcggcttcacaaacatatgataccgttgattttttttcgaaaactttgatccctaatcttattcaaagtatttattc

SEQ ID NO: 42756 - DNA, 437 bp, Zea Mays
cttggtcgtgtcctgctctggtatccgtgcttgcctagagcccttgcgctctgacgatcatcatggacctcgccatcgacccacgctgtgtccacgatgtgttcgtcgacctcgatgatccgttttccaattgcgcgctacttacgtcgatctttggaactccttgtcgtactcaaccctgcaagtctccaactcgccgtcattccgtgcgtcatcaagaaatcccgagagttgggtgaagaagcgattctcgtgtggcgctcaacaaacattcgacatacttcttaaacatgtgatcatcgtcatttctgcgaattccaagtcggatttaggtaagatgattcactatttttattaattgattgggttggtggatcaaatagaattgttgaacataatgatttttcttgatttagcatacgtgttgtcacacccgg

SEQ ID NO: 42757 - DNA, 3293 bp, Zea Mays
ccgcaatcgacttgcgtttctgcacactttcgtgtgccgcgtgcgcctccagctccatgtgacgtcggataccgcgttccgttccacttcccacctgtattttacaaccccctagttcttgcctctccttttgttgtctgctactagtagagtactggtactggtcgcgatttttccgctaaagaaaagcaccggatccattttcctctcgggggagcggattgggtagttgcctgcttattgactagttcttggcgtggcggctaactattgtgaattttgttttagtctgtcctgttggcttcttccttccgcttctcctttctggccgccgaaggcaaaccacgcggcttgttcttattgaatccatcaaggacgcaggaaagataggatcttcggctccgattctcggagcaacagcgcgaccgcagcgggttttggtgcttcctttctttagggttgtgtccttgcagaagttgctctgtggaatggggacctgtgggaggagagttctgggggtatggtttttcttctggttcttgttgacacttgagcagtgcacatccctgaatcgtgaaggtgctgctctgctgagatttaaggcggcgatcgaggcagacccatatggtgctttgttggactggaatcaagagagtttgagcccctgtacttggtttggtgtggaatgctccgatgatggactagtcatgtctctgagcttagcaaatcttggtctaaagggcgttttgtctccagagcttggaaagcttatgcaaatgaaatctctaattttgcacaacaactcattctatggtaccatacctagagaaataggagacctgcaggatctaaaaatgttggatctgggatataataatttcagtggatcaattccatcagagctacaacacatattatcgctagaatttctgtgcagatttcttgaaggtaacagactttctgggcgttcaccagttggagtacaccaactcactaggatatgtgaacatgaaaatcaagtacctaccactaccacaaggattgttacaatcaaaatcagaagactgttaatgagcaaacaaaaagattttaaaatggtcaatattacggggcatccaataagatttccattgaattctccggcagcaccatctccttctgatcccattccaccccctcccgcaccaccatctccttctgaacccattccacccccttctgcaccaccaagccaagagaacaagagcaaaagttctgcaacactatatgcatcgattggagcagttattgttttttttatggtggcctcgtcagcactatgtttcttttactactgccgcaagaagactagcactgttgtacctttgtctgcaaacagttcaagcaggcaattgcagaccactaccatggaaggttgcttgatgtgctaatattttgctatgcatatttgttcaatgattttttttcctgaaaacctggcacgagctctgcctctcaattaaggaaggaaagaggtttatgtacaggttcgcctgaaggcctgaaatgccccaaagtgctcacacagaaaacaggaaacacacaatcccctccctttggggattagactaaatagccaaatcgggttactaaagaccctagttcgcacatttgctcaatgctcacattgctgtagtgctttgcattcctgtagtttgcatatgctttaggtgtacgctgcaatactgcttgcttcaatgcacaaatagaacctgtgttcctcttctaacccctgtttatgcagggataactttattcagacgatctgagcttgaaacagcctgtgaaggtttcagcaacataattgacacactacctggatttacactgtttaaaggaactctcccatgtggagcagaaatagctgtggcgtctacatcggtggcttatgcaggaggttggtccgctatagatgaagcacattacatgaataaggttggagctttgtcaaaggtaaaccataagaatcttttgaaccttgtgggttattgtgaagacgaaaaaccattcattcggatgatggtgttcgagtatgcttcaaatggatcactatttgagcgcttgcatgttaaagaagcggagcatctgaattggcagtcacgcctacggatagctatgggagtactgtactgcctgcagtatatgcaccagcagaacactcctgtaaccctaaagaatctaaacagttcatacatatacttgactgaggacgatgccgcaaaggtttcagacatcagcttcagcgttgacaagagagaagatgatgagtatgatgctcctgatgagtatagcacagtgtataagtttgctttgctactgcttgagaccatctccggaaggcgtccatattctgaagacgatggcctccttgttctatgggcacgcagatatctcacctgcgctagcccggtgatgggtatgattgatccaacgctaaattcagtccccgaggagcatgccagagcattatcagagctgattcggttgtgcctaagtgaggaccgaaggcagaggccgacaatggcagaggtcaccaagaggatgcaagagatcactgggatcactcaagatcaggcgattccgaggaacagcgcactttggtgggcagaacttgaaatcatgacatcatgaagcctgtcgactgtgcaactgacttgccccgactctacagctcagtccatcttctatgagaaccgtaggaaattgtacagtttacccttttttaatacaaagatacacagctcttctgtgtcgagaaaaaaaaatgtgtacagtttagtatttttaagcggggcataagttgtacagcagtacaggtatacccagggtcacaattcttccgttctttttttaaccaaatatttattttgttatttgttccggggtcaattctttcattctttttgtagccaaatatttatttcattatttgttctatggaaagcaaaacaatctgagaaagcctgcaaagtatttaggcagggcataagttgtacaggtatgcccgggcacacaattcttttgttttttaaccaagtatttacttcattatttgttcttggaaagcaaagaaatccaagaaagcctgtgaagtacaaggatatgccatttgtgctgtgaacagaaaacaactggaacctactgtagctattaactgaaacagtcgcagccacagcaagctcaaacgaccagcattgctggatccattttattgaaatggcaatcgctggtttgtcttttttttttcttatata

SEQ ID NO: 42758 - DNA, 343 bp, Zea Mays
tagccgttcacctcgggagtgaataagggtcttgcaagcccgggctagagagggaatcacgactcgtggataaagtgcgcaacctctgcagagtgttatgaaactgatatatcagctgtgctcgcggttatgagtggccaagggagctccattgattagagacatattgaatcatggctactttgtttaccgatgatgatgaggataatgctggtttctattgtgattatgactatgattatggtttctagtattctttccgtttggaaagagtacttttgggttaacaacttgggttaatgttaaaacctggctctctactagtaataattacctgatcaac

SEQ ID NO: 42759 - DNA, 2298 bp, Zea Mays
caaggaggctggaaactagtctgtagaagaacgaagcagttaatctattcttctctgataccagcgcttggaaacaagaataacataagagtttccttgcgaaggaacacctcaagagtctaaagtctaaagggtgttgtcccagggtacgagcaaggaagggacacagacaaagtttgtttgaagaaaaagaatggcatacggaaattgtcgttggattggtattcaagatgggaggatcagccaaatgacatggaagaagagttatcattaaatatggagaaggaattgcatttgctcgacaatcttgaaccaccatcaaaaatcgagaagctgagaattcgtggctaccggggttcacaattgccatgttggatggcaaagcaaagtgactcttgtggtccagccgatgatacacatatagtaatgcaaagaaatccatctgaattctcccatctgactaaactagtattggacaacttaccaaacttggagcatcttggggagcttgtggaactgccactgataaagatccttaagctcaaaagactgccaaagttgggagagctgcttacgaccacaactggggaggaaggagtggaagcgcaatgttgtttccatcacgtttccactctagtaataattgattgcccgaaacttgttgtgaagccgtactttcctccgtccttgcagagattgacactagaaggaaacaatatgcagttggtttcttcaggatgcttcttccatccacgtcatcatcatgcatctcatgctcatggtgacgagtcttcatcttcctcctattttgcggatgagacgggtactcacctcgagagacttgaacttcgtcggttgacaggatcatcatctggttgggaggtgctgcagcatctcactgggcttcataccctagaaatattcaagtgcacaggccttacgcatttacctgagagcatccactgccccaccaatctctgtagactggtgataacacagtgtgataatcttcgtgtgctgcctgactggcttgtggaactgaaatctctacagagtctggaagtacggttatgtgatgctctccagcagcttcctgaacaaataggagaactctgctcactccagcacctcaccatatcttctttgacttccctgacttgccttcccgagagcatgcagcacctcacctcgcttcgaactctcaacttgtgtctttgtaacgcgttgacccatctgccggagtggctaggcgaactctctgtacttcaaaaactctggctccagggctgccgtggccttacatccttgccccaatccatacaacgccttactgctctagaggacttacttataagctacaaccctgacctagataggcgttgcacggaaggattgggggaggattggcaccttgtctcacatattcaaaatttaaggctacgggactaggggcttcagattagtgcataatattctaaggaagacaaggatggccagaatctgcagcgtttacatatatgtgcatcaactttggaaaacaagtgtttgcagaggtataaataagttaacgactcatgtgcccactctcaatcttgtacttgatggaaacatgtcaggctttccccttggaaaatctgtaccgtggcagttcagtgtcctcccaggataacacttgcgaccatactgaacgggtcaatgggcagagtgaatagagatgcaggctaccattgcaggggtacaggaggattgatgtggcgaaccccgcagggaagttaggagtttactctgcagatggtgtctgtgctctgaaccagtttcagtttctctgtaacctcagatatcgatttctgcttgctccacacgaagacagagtttgcagaagcagccagacatgaacacacaagatggcagaagaagtcctggtgcattctgctattggcatttggcattgcgttgcatttgcattcagctcgctgctcttcttgccttgttgtgtgtgatctgggccaatctgacggcattttgggcacagttggtggtcgcgtatcccgtcggcccgtgttctcagttgctgagccaagcatattcagaatgggtcgcatcgcaacctaacatgtgctccatgttcacaaaaagctgggcccggatgttctctcaatataaagaaaaaaatatattttatgtctaccaattatggttaaagttagttttttcttcctcaactataaaaacccaacacagctccttcatcatcttctaaaaccagacacatgaccgtcctagctgtttttctcgatg

SEQ ID NO: 42760 - DNA, 799 bp, Zea Mays
gccgtgcgtccgtggctttgcatctgcaaccccgcccgatcaatcttcctcgttccgccgctccctcgcctccggcagcgaggagcgatggctctgtctgcgacgctacggatttctcttagcgtcgcgttctttggggttctggcgttcgtgcttggtgtcatcgccgaaaacaaaaagtataaatttatgcaagaggaggatgggttttggcatagtggtgggaagccttcccattcagccaaaggtcctgcattcgacgcagcctctttgcaaaatgctctctgcaaaatgcttgtctcagccctggctcttgcaatgtcgctgtgggcaactgtcaccgagggtcttcaccgcagcaagaacatccaccacgacatggactaccagtgccctactgccaagaccggcctgttcggcggcgccgctttcctcgcccttgacgctgctctcttctggcttgtttgccagatgctggccctcaatgcaagggctgactaccttgacgaggatgacggcaagggagaatatggccagatttatgctgctcaagtcgatgatggctcgaaggtctgagcctatgtggtcatgctcggcagggttctatgattagtgtcatttggctacattatgccatcaacaaagtcgctttagctctcagtaaatttgtatataagttgcaaagtcttacataaggctggtggttattgcactttcgtgtttcagtgtgatcgataaacagtatctcagtacaatcggtttgctatgccccttggcgaacttgtccttgagttttctg

SEQ ID NO: 42761 - DNA, 2002 bp, Zea Mays
gtcgcatctgctgcacctgcacctggactaccgcagacagccagacacccaggcgctttatttctttgcgtctacagccacagacaggagacggcatccaagcattatttccaggcagagtgtcccggccgctctgtgcctgtgttcaaggcgtggtcgcgtggaggaagaggatgagaatggcggcgtaatacgatggccttccagtctccgtcgaaactcgagcaaggcccaagggactcccgaaagctcgatttcgtgccaaatccagcgaaactattatgcgcgccttctttcttttctctttcgcgcgctgcttctccccacacgttcgtactggccgccagaacaactccgccgcccgccaactctagccttgtagtgccgagccgaactcccatcgcgtcgtcgtccgacctctgaaggtccctcgttggccgtcacagcctttggaaggacaccgccatttgaaggtcctccgtcccgcctctgaaggtcgaccgccgccatttgaaggtcccctgtcccgcctctgaaggtctccatttgaactcgccatctgaactcgtcatcagacggccccaactttttcctcttcggtggttggacagctgctgtggttgggagttgtcgaccaatttcttcccagcacattctgcttagcctgatgggagaggtggaggctggacaatcagaagaaggtggttcatacttcacgaacttgctgaatgaaggccaatatgatgcatgttttgaagaatatggaactataccatttgagtcacagcactcttgccgcctgaaaaggagagaaatccctcatcaaagccatcacaaaagcaaaaagggaaaaattttagcgtggatgaagataggcttattgtgtcagcatggttaaatgtcagtatggatccaacacaaggaacaaatcaaacaaaagatacattttggagaagaatccacaagtactatgagagcaatagaggaactttaccagaacgtagtcagaattcgttgttgcatcgttggagttctattaatgatgctgttagtaagttttgtgcttgtgtaacccaaatacacaatagaaaccagagtgggatgactattcatgacagggtggaggaggctgaaaagcttttccagtctctagacccccaaaaaaagtcttttcagtttaggcattgttggctccagctcagaaatcagccaaaatggcatgacaagctgcagcaaatggcagctgtaaaaacaagcaacaaaaaacagaaggtagccaaagatttgagtccgggattagttgatcttactactcaagttgggaatgaagtttctcctgtacagattgtccctccaaatatagctgcaccagaaagaccaatgggtaagaagaggtcaaaagaagcaatgtgtaaagggggttttgatgcatgttctgatgcattggacattttgtgggaaaagaagagacaggctgatgtagagaaggagttaaagagagaggagaggtatgcacaagcatatgctctagataaagagaggcttgagctggaacacaagaggcttacaattgaagaacagaagcatacaaatgaacaaaaaaggcttgatcaagagaaagagcgcctagccaatgaagcaaacaacctttacattaagcggattgaagaagaacagaaaattatgagtatagaccttactactatgagtgaattgcaaagacaatactatatgtgtttgcaggctgatatcgttgcacgtcgcatgaattagttgtttttttcaaattttggtcagatcacagatgcgactttagattattttgtttcattagttgtttttttcttcaaattttggtcagatcatagatgctactttagattattttgtttcactgagtacacatagagatgaacaatctatggatttttagttgcatgtgctactcttatatactgttttccgtttagttttatgtgcatctgtggatttttgtactgaa

SEQ ID NO: 42762 - DNA, 1956 bp, Zea Mays
atactgtacaggccaattcgttcgcagactcgccaaactgctgccccgagcggccgagcccccccccccccccccccccccgacctcgaaatcctccgtcttcctcctcgccgtgtcgggcctcgccttgcatcgtccccaaatccaacccaaactcctcaatctccgtcactggcatggcgtccgataccgagggcatcgccgccctcttctcaatgtacaacgacgacgaggaagatgaggacgccgacgagcccaaccctccgtccccagcgccgctcaccaccgtcacctcctcgtcgccgctgtcccctcaagccgggggcgaggaccctaacccttccctggcgcctccgtcgcctccccgtcccgaggagtcggccagtctcaaaaccctagtgagtccccacccttccccggcgcgggcgctgctaccgccacttccctcgcggcgctcttcgtcgcccttcgcagcgtcgcccccctctccgctacggggaccatcctccgcgccgccagccgacctgccgcgcccgccccggcgcggggcgcttgcaatcgtggactatgcgcacgacgagatggctatgtcgcccgagcaggaggatggggagatcatgagccacacatacagattcgtttcagatgctcaggctgcagaggggaatcttgaagaacgaactctctctggcacagttcatatcatgacaccaaatactccagcagaattgtctcagcatgctgatgcacctgagcagaaccaattagggacagacatggcagtggatataactagagcagaaattgaagacgcccaggtggaggaaactactgatatttcaactaatggtgaaaatgatgatccattgagtcgtttccttcctccacccgtgactacaaaatgctctgcagcattaaagtcgttttctcttctcaagttttgtgaaagcatcatgatgaggttcctattcaggcaatatttacactaggaatgtgtctacacaccttcacattaattcctgtgttggttcttacagccagtatttacttaaaactcatcatctgttgttttctgtttttctgcagcaaaaaattaacaaattccttgcatacaaaagggccggaaagagctttaatgctgaagtgcgcaacaggaaggactatagaaatcctgactttttgcagcatgctgtgcgataccaagaaattgatcagatagggacctgtttcagtaaagatgtttttgatccttatgggtacgataaaggtgactactatgatgagatagaagctgaaatgaagcgtgaacttgagagaaaggaacaggagaagaaaaggaatccaaaagttgaatttattactggaggagtacaaactccacatagtgcatcaataccgaagatcccaggtttggcgggtgtctgtacactaccggtacctacagaaggtgtacagaaagagactaggccaaacaagaaatcaaaatgggataaggttgatgatgatgttaagaatcatgtagttcctagtggacacgacaacttatcagcaactgcttctgtggcactcctgacttcagctaatgttggtgctggatatgctgcttttgcgcaacaaaagagaaaagaagctgaagaaaagagaagcgatcataagtcagacagaagatcgtagcaccactttttttttttcattctgagcagtcagcgtatcatttagtttttcagtaacatagttttgtattgtgggtaaggaaaagaaggaaacagttaaaatcagtccgagggaaatggttccagaaaagcccctcagagcgacttgttgtcttatacaggtatcagaaacttaacgttttaggccaagaaaaagagaacagtgagcgttctgcacttctgccccccgttacggtggacaattactcctgtcctaaaaagaatgcaccaaaattgaatgcaa

SEQ ID NO: 42763 - DNA, 8139 bp, Zea Mays
gttttattccctgttgtttttcaggtttagttttgtgctgctgataatggtgtttaagtgccggtgggctcggccttcttataagtctaagtacttcttctatacttcttaatgaggatggtcacttgagctagcatatatttcaaacttataattttgtaatcactccgataaaataatgtaaaatttttgtaacctgtaaaatttggtagtaagatttccgctgcaacaatattggtgtgtgtgatttgtgttacttaatcccgcggttctggttgaaagtggtttatccgatgtccttggggcaatcggacagatcctgttgagttatctggtgcacatgcatggtcgtctgaggtctttgggacaaggacgggtgcatgtgggcccaataacttggaggttctgccacacatacgacatgaacccctccacgatagttgggagtgcctgcaactcctcatgtacccactccaggcagcaaagtccgggctctcggtccggcacttcgaagtcaccagtccgcgcgcccagctcatggtatgaatccataagctgtttgcgcgtccgctcagcctccgctcgcgtcgcagcctcggccctttccacacggctctccagggcgctgagccactcctgctactgctcggcgcgctccctggcaagattgccctccgcccgcgccagattggcctccgcctgcgcagcctgcgccttggcgagggcctcgttggcctccctcctctcccccgccagttggcgccggaggtcagtcttctccccctccagtgcggccaccttgtccgccagcttgcggcacttactgtcggcgaccgatttttcccggacggcgtcagcatgttgcgtccgaagtctctcgacttcggcagacacaaccgccgtgagggcccccgacgccgcgcggtctgcgaagtcagtcgcctgcaaaacacacgtaagaccgcggccccaacaaagccggcaaaaaaacccgaagtctagctcaacggacctgatttagcgcctccttcatctccttcagccggcgggacacagcgcccgcctcgtccctgacaactgcgagtgccggcatctcgcctccggcactaagagcaccgcccttcgccttcggcactacggcagccgccgtggacgccgcggaaggcgcaacaataacaagttggcctttcgtccgaccctgcgacgtatcaacgaactataaaaaaaagagccaacggcttaccaccaagatagtcgtccacactaatatcagtggcgaagtcggcgacggccttgcccggcgatggcaaccctcgggccgccttcgcgacctccggtaccctgctggacgccggcaaagccttcgcgggtctggaaccaccggcgccagccgcagcctctgacgccttgctggatgcaggaacggccgacttcgccgccagcggcggcttgcctccaccgggggcagcagccttcgcagcccctcgctgcctcttcggcctggcttcgtgaagcctgacaaccgcctggcgcttctgagcagctccctggcgatccttgtccatcactgccgacacaacagcagcaatattccgcccgtaaggaaacactttccactcacgaaccatgcgagatgtaaaaaagtcttcgccggccgcgcgggggataggaacattcctaggccaccaacccccggtaaccctcagcatccgcgccgaagactcccggagctcgggagaagacatccttccccccggggccacgcatgtcctcatcaactctctagcaaaaccatcggaaaccccaagtcctcccatagcagtacctagtttcctcttcttagaggatggggcggctgccggcgcagggtcgtctccagactctaccaccggcttcttcccgcggcggtccacatcgtcttgaccgggatagccgttatacggcagtcgattcaattcaaaaaccctgttcaaacggtcgttcgacccgcagatatcccagctacgctggccctctgtcctcggcacgtaccggccaacgagccacaccgccccaacctccgcctcacgcacaaaggcggccggatcgcggcttcgcagatccagcacgaaggcaggacttcgcaccatcttcccaccatgggaaggcatctagcgagggcacacttcgcccaacgcccagccatgcgccaagggccataccccgtacgccacaaattcttcaaccaagtcgcgcccactgctcaggccggcggcgcaccgaagggccccttcgtccgcatcctcctccgccacctcaaagggcggatatgccgagtaaaaatgtgaacatatctcggacacggggatcccctcatggtcttcgacggtaccctccgcgacgtaaaaccaaaactcattccagttgccccacttgttgcgagcgcaaggaaccaactcgactacctgcatcgtggtcttgcctgtcttcggtgtaaatgtacaggacccaaactgggcaacttcatctccaatcatcctattctgctagtgcaggcaatagtacttcgcaaagacttcgactgatggctgtccgccgtacgaagtcgtcgcccagacatacttcgacagagccaccacgacattcggagtcaactggtgtatctgaacgttaaacctgcgtaggacttctccaacaaaccggtgcgcaggcaggcggagaccggcggcgaagaacgcctcgaacacaaccaactcgccctccggctcggggacttcctccgtccccgggacacgcgcaaccccgccgccaaagtaacccagccgctgcatatcttgcacgcggaccgatgacatccgcgacacgccgaaatccaccaaatcgccggcgcgtaacgcctccgccaccaaagtactcggcgtctcctcagacgaggcgtcggccggcggcgaggcgtcggtcggcagcgtagcggcagcagaagaagaggaggtcggcatcgctacgtaccgtcggcggcggtgggcggtctgcttcactcgagccagatctccggcgaacaagagcaaggcgggcagacgagcagcaaggcggtggaaaaggcgactagggttttcacggagcacggaaagtgaagttcaaaaagcgccgacccccgcccccttttatacacagggcgcggcgcttcgggaaacccgcagtccaacagtacggggtcaatcaacggtcatgtcaaaaacccccgcggaaccacttcgagcgagggcagcgtctccgccatctagcgacgtcttcggcaccagatgactttgtcgaactggtccctcggagggcaaatgttggggcgaaggcaaagacaccacccttcgctcgagagccttcgctgatatcgttggtccaacggaaacaaaacgggcagggacacccttcgccccatacgacgtcagacgaaggcctccgacgaggtcatcccaccgtgcggcctcgtcgcagcgcggaggcccacgagtgatccgggcccatggtaacaagccctgcgtggccgctgcgtgttacgggcctgatttgtaaaggtatccctgtaaattacagtctataaaccctgctttatgggaaataattctgggggataaacctaggtgtctgagggcacatgcgtccttaacacaagacgctgggcgcccagacacctataaatacccccgcacagtgcccgtgagaggccagattaacagagctattgccatcgagcgcgagaaccctgttaacgccattgttcacccttgttggatccccttgcaactgagagcaagttccaacaacatctttcttctgtggctgtaataagcttgttagctctgatcctagaggacttagcatagtgaaagcaagggtttagtcattacctctaaaatttctgtcacgccaatagaagttgccgaaggggtctctgcagaatgcttcggcggagaagatctttcttcttcgcggctcgatgatataatatttcttttcttagatgctgaaggttctggtgttaacttcgatctttttgttaaccttttcttcttgtccttacgactcttttctttttcactcccccgcctcttcgctaagtctatcatagtcaggatactcaaaggcaagggcatccatcacttgatttagcatttgtttctctcgtgtgccgaaggcaacagtcattagttggtcctctttgtcagtataatttccaagtatttcattacacattgtctcaatgacctccaacaattcggcacaagggccgctgaaggttttctgaaatttaaagcgatatggaagtctaacaatctcaaatttctttccttcgtctttcttcttcggcattcccctcccacctaataaaattttgtacgtcgagtattcttgaactaggtcccgagtactgatatgctcggcccataaccctaaattctactttggctagttggcatggggagccaagttgcatgttgcataatggccttgtcatgccgaagttcggtttcaagggactcatcaccatactcataagcttctcccttctcttctcatcagctttcacataaaaccattcacttgtctagccagtgggccacttggtgcggtatccttttggtatgcaaaattgtagcatccaaagttcttttgcagaccgtctgctctcgccttggtctagtaatggagttctggactctacagaatccttcaacattagcactccttccttggcttcagagagcccatatgtacacactaagcttgactatagcatttggagtcagttgatgaagatagatttcaaatttcttcaaaacttcacccatcatttcatacagagggaactgaagccctgctctgaagaagctcttaaaaacaacaacttcatcatatcttggctttggaaccacttcgtctctggcgaaccttatcaactcatcatcatttttccaaaatatccaagcttcttcattaaaactaaatcttctaccttcatagtggatttcccaaattcaatttggctaggcttgctcggactctatgccatcatcctcttcatcatcactagcaacttccgcattagtatgttcagcttcggcaataacgtcatccttctcgggaatagactcttctccctcttgaacaaccaacccaaagtgcctcattacttctgagattggggctatcacagttgcctcagtctcttcaccttcatttgtcagcctagcagtatacctgatcctagccatttcaattcttaagacgaagctaacttttaactaactcgacgattgtttgaagattaaacaacaagtgcacagacaacaaaagcttcgactttagtaaaaattttcaatagcacaacgatgcaatagcaatgaatgatgtggtaacttctcaccagctcgtctgtttatatagtcgtgcaggtgaagaaggcgaatcaccgcattgctcatactgactgatcggtggaccggtacaggccgtaactttttattcggtttttaataacaagcccagagaaggtgtttttcggaccttcggcattcagaagccttcgtgtgtttcgttgatcgagctcgttatgaaaaaacgacctagcaccgccaaggagctactgttggggatctccttctccgttgaatgtcctcatgacgtaggaatcgtctacaactaaatgggctgaacgccaaagctgcaacagacatgtgtaaaatgccgaaggttcatagcttcgtcccaagacgattacaaaggtcaaaagcgatgttgagccaaagagtaaaagacccgttaatccctgatgtttgtattaggataatatgtacgtatcatggtcataaatatatgtaacacctaaaaatcttattttgatatttataaaagtttctcaaaaaattcgatttaaaacatcttttaataatagatttctttctttataaaggatatctctctaaaataaataagtgatagatactatatttttttggttatgctttaattggatcatacatttaaggaattattccctttcactcgtatttgttttttattcccctagccggagatgtcatggctgacttcacccatgtatcaatgacgcgtgaagaccgcacaacaggactgttatctccttcatccatgcaacaaaattttgttgagaaaaatctgattccttcagtgctccgactgggtatcctcttagggaacatatctggtgctcaaaggggtatggtgctcatgtgcacattttaaatctggtgcatccatgttacatctaacagcagcaccaattttgtgaagcaccccttccaccttcttcccctggtagaaggggttcttcgtaaaattagctggtgccgttgaatgcaagatggatgcaccagatttaaaatgtacacatgagcaccgtacccctttgagcaccagatacgttcccacggcctccataaatagactgccatattctttctccggtttacagaagcgagcccagtcgtcgttcccaattgcgcgcagagagagagagagagagagagccgcgagagttggagcgaaacatcaacgtttggatctaggggcacgagcaagcaagagggtagggatgccggcgtcaatatatcacatacgagtaactgagtaagcagtgaggtcacgagaatcccaaagaccaatttggtgaaagcacctgggaatctcaagtcacaggcaagttatgcccttgatcacttttctctttacccaataatattctggttaatcattgtgacatgctcaggttaatttgatgggccctaataggattacctagatttgtttatcctacaccatgtttaccactgaacttttggatagttagttttgctatttctctacctggttttgggaaattaatgttacattatgatcatgttccgttatgttgttgttttaattattgttcatgacaagatcattgtgtcaattggaacatggagcttaacttgagatatccgtgctaccacaagggtggaatgggacgcctttggctgactaattagaaaagctagtggaggactaccttacccgaaaggggcaagggcggtagaggagctacgtttagggaggttctcaggtcgatcatgttgtgatagcttttcgaacgagggattcctatattgcccttcttagaaaccatagcgggttttctgaagctagtggaactttataaaggcctcgtagtggatccctagccattcacgttagaagtgtctaagggccttccaaaccctggctagacgggatacacgactagtgggtaaagggcacaacctctgcagagtgtaaaactggtatatcggtcgtgctcacggtcaagagcgactcatgactctcgcatgattaatttatggacttaaatttaatctagtatatgcattgcattgtgggatttattgataattgtgatctattatttaattgggttggtatctacttattcttagtaactgctaataaaattttgaccaactctaaaagcaatgctcagctttaaccatctcctttgtaagccttacacttcacatgagctcccacctttggtgagttcatgcacattattccacacaacttgttgagcgatgaacgtatgtgagctcatccttgttgtactcacaacccctaggacaagaacatgtatcgcaggatgaggcgcatgaaggatgctgtgatgagttcatgagtggtctaggccgtcgtctcccagtcaactatggttgctggatcgttgtcttcgtatgatgtaattatttatctattttgtacagaaccctgttatatattaatgttgtgacattcatttctgtactatgagtcatcatatgtgtgagacttgatcctagcacacttggtgaagttcgcgcccgggttttagacccctgaaatctgggtgtgacaatgtacttttgcttgggctgcgccccttgcctataaatagatgaacagtacccccgtactgttcacactagattggaatcaccctctcgctttcgccttcgaacaagctaaaggtacaatgtaatgtacattgtgtatcactttgtcaatatatgatatggatcttaatgttgtttaacatttgatatgaaatgaataatc

SEQ ID NO: 42764 - DNA, 3841 bp, Zea Mays
gcgcaggctcgtattatcgtctcgttaattatttaataatgggattcacagctaattaaatctggaagtatatcttgcccgcaaggaaagaatagaagaaaatacaggcggagagaggcgaggaaggaagaaatcgacgaggggattggattggactgcgactgttgttgattctctcttgcacgcggcggtcctcctccagagtccagacccaatcccaaatccctaatcctacagagggatcccaaatccggcgtccagtccagtccaacctgtagtagatatccccgccggcttggccgtccgtccttgccccaattccgattgaccggagaggagttggatcagggagcattggaatggccgccgccgcataggatggagctggattcctccggccgctgctcggttgctcccgtgaatgctgtgatcgtcgcgattggaggtggaggcgaaggttctcttcagtaagagcttcaagagctgtgatctagctgattgggtatggaggagagtggcggcagctgcggaaagcgggaggacgcggcgccgccgtggaggccgagcgactccacggcgttcggccgttttgcggcggccgcttctccgccggaggcgtccccgtcggcctccgccaatggggctgctgcccgcgtcagcagccttcatggggtcaggcggaaaccgtctgttgcgagattaacagcaggcatcattcagacatatctacaatgtgatcccgagtttaagtactcagaggttctaaatccaaaacgtttcctcacgaatccctctaccccagcccacaacgatgggcttgacaatgcaaattgggatctcatattgtatgtcaacttggagttggttaataagatgtcgaacagaaggtttattgtcaaggaaatgcttgggcagggaacttttggtcaagtagttaaatgctgggacacagaaactaacgactatgttgctgtgaaggtgataaaaaaccagcctgcattttaccatcaagctatcatggaggtttcactattaagaacgttaaatcagaaatttgatcctgatgatcagcataacattgtccgtatgcttgattatctgtcatttcaaaaccatttgtgtatagcttttgagatgcttggccaaaacctatatgaactgctcaaaaggaatcacttaagaggtctgaaattgaaatatgttcaagccttctcaaaacagatattggatgccatggttgtgatgagagaagctggaatcatccattgtgatttgaagccagaaaatatcctgttagctcccagtgtcacaacagctgcagaagtgaaagttattgattttggatcagcctgcctggagggtaaaacggtttactcgtacatccagagccgctattacaggtctccagaggttctccttggctatccatatactaccgcgatcgacatgtggtcgtttggctgcatagttgctgaactgtttctaggtttgccattgtttcctggagcgtcagaatatgatgtgcttcagcgaatgatgaaaattcttgggggccaaccaccagatgaactgctaagggaagctaaaaacactgcaaggttttttaaacatgttggaagtatctatcctggcaatgaggcacctactggtctttgtagtgcgtacaaaagtttaagtgaagaagatgttgaagtgagagactccaagaagccacagatgggaaagtggtacttcccacacctaaagcttgacaaactcatatgtacctatccttggaacaattccgaactgacagcgattcacgtcggtatccagaccccttgttcgacatttggttggatgactctgtaacaaatcacggcgcaagcagttacgaccctgtgggatcaaagcgcaagtccactacccctgttttggtgctattatgcgatcccatggtcttacattttgattcagagacagaaaaaatggatcgtttgggattagttgatttcttgaagggtctccttgaatttgatccaaataagagatggtcaccattgcaggctctataccatccattcataacaggcaaatcgttcaccggtccatatgaacctgtacctgagaccacaagaattcctgttgttcgtgctgcagcaattgatcacaatcctggagggggccactggctacattcaggtctttccccgcaggttggaagtgtcaacagatacctaccttcgaataatgcctaccctccaaaggttcctttttcttatgggagtagttatggaagctttggtagccatggtagctataccgccaatgctggttttggtaacagctacggaagcattggtgatgttaatgctatcaatatgtattattcacccttaagttcttctggattaacgcaaattggctctagtccagatgttagactaaggatgcttctcccacatgatagaggaattcgattgagccctggtagtcttgggcctatgtctcttggagccagtccatcacagtttaccccaccaaactaccagatgcaaatcccagctaattcggttgggaagcatggttctggttctcctgcaagtggaggcattcatggttctccgttaggaaaatctgcaggagtgggcccatacaacatgaggaggaacttgccaatgccgccacatgattatgtatctcagcatggacacgggcgttgtggagatggtgtcagtttcagtcattttgatgcctgtgctcgaggacatacaggtcactctcatagtgcagcgggacctagttcttatcattctggttggagaccacaaataggttcaaggagtggtatttccttggaggcctcgtctagtcatgtgctttcacaggctccatcacaatcgtttgacttttcaccttcatcagcacttgatcctgctaattgggaccctaattataggtatggaatactcaaatcgattcttgtaaacttgtattaaaggcaatattaatctataccatgttccattttgtagtgatgagtcactactgcaggacaattcactgtcagctgaactaagtagcaacctccactttggagatgcaactggccaagggagtggatctatcaggtcagcaaatttccaaggccacgtcttcgctacatctaaccctgtaccaacaaaccaaagagcagatcaattatttcatgtgtcttctcaaggattgagtgcccattccagtgttcccgtcaactacggtggttacaaccctccaaattatcctccgcaaaatctccgtcctcgtcgtggacaaccaattcttcatcagcgatataaccaggcaacttccagtccgatgcggccaatgggaagccatcacagtgggcagcctgcgtggcctagttttggcatgggcgatggagtgccctggggaggaacaggagggcactcatttacgacaagtgggctatcttcatctcttgcaagaaaggattatgggagcatcttttagtgtgttgtggacaggaggaatggcgttgattcattgcagtcgtaaattatttgtattagcaaaattggagtgcgatgattctggtttattgtttcgatgttgttaccccatccctccaattggtcctttgtgaacaagacagttgatatacaatatatgatcgatgacaatagcattcctttgcagccctttttttatcagtcagaagtttgggtgttcgcctgattgctgactatgttgtagttgccttgtcagctatgtaatatgaaggcgtgatgtgcttaggttcaggtgtgtttggttcagctttctcaactagattggtcaccaaataaaatctggaatcgac

SEQ ID NO: 42765 - DNA, 448 bp, Zea Mays
agggtactccatttatgaaagccctacttacaacagaagttaagtgatccagccaaaaattcatgatcctttacatgccaattataaaagtaccaccgcatgggaagaaaagtagcaactgcaattcagaagtttttgtggtagatgccaactgcattatttggtttgtccgaactctaaaatgccaccattctctttgtccttccgatgccaccattctattttagttaattacttcattcctgttgatttttgtgtctccttccaattaaagaacatcctcgattttataaacttaccaaggacatcatttacaggcaattggttggcaattcactataactatttcatctcctagcagtacattttaagggttcaaattgatcgaaagcgtagatctggctcctctcgaggagctgatcgatcccctgacagtgggctggtgtgg

SEQ ID NO: 42766 - DNA, 97 bp, Zea Mays
tttgttaagggcaaggctcccatggttcaggataatgagggctatattttatatcctgctaattatctcgaacacaaaattaggagaattcatgcta

SEQ ID NO: 42767 - DNA, 2877 bp, Zea Mays
tttgttgcaagattaacagcaggcatcattcagacatatctagaatgtgatcctgagtttaagtactcagaggttctaaatccaaaacgcttcctcaccaatccctctaccccagcccacaatgatgggcttgacaatgcaaattgggacctcatattgtacgtcaacttggagttggttaataagatgtcaaacagaaggtttattgtcaaggaaatgcttgggcagggaacttttggtcaagtagtcaagtgctgggacacagaaactaatgactatgttgctgtgaaggtgataaaaaaccagcctgcattttaccatcaagctatcatggaggtttcactattaagaacgttaaatcagaaatttgatcctgatgatcagcataacattgtccgtatgcttgattatttgtcatttcaaaatcatttgtgcatagcttttgagatgcttggtcaaaacctgtatgaactgctcaaaaggaatcacttaagaggtctgaaattgaaatatgttcaagccttctcaaaacagatattggatgccatggttgtgatgagagaagctggaataattcattgtgatctgaagccagaaaatatcctgttagctcccagcgtcgcaacagctgcagcagtgaaagttattgattttggatcagcgtgcctggaggagccgctattacaggtctccagaggttctccttggctatccatatactactgcgatcgacatgtggtcattcggctgcatagttgctgaactgtttctaggcttgccattgtttcctggagcaacagaatatgatgtgcttcagagaatggtgaaaattctcggaggccaaccaccagatgaactgctaagggaagctaaaaacactgtaaggttttttaaacatgttggaagtatatatgctggcaatgcggcacctattggtctttctagtgcatacagaattttaagtgaagaagaggttgaagcgagagattccaagaggcaaaagatgggaaagtggtacttcccacacctgaagcttgacagactcatatgtacctatccttggaacaattctgaactggcagagacagagaaaacagatcgtttgggattagttgatttcttgaagggactccttgaatttgatccaaataagcgatggtcaccattgcaggctctacaccatccattcataacaggagaatcgtttactggtccatatgagccaatacccgagactgcaagaattcctgttgctcgtgcagcagcaattgatcacaatcctggaggggggcactggctacattcaggtctttccccgcaggttggaagtgtaaacagatacctacctttgaataatgtctaccctccaaaggttcctttttcttatgggagtagttatggaagctttggtagccatggcagctatactggtaatgctggttttggtaacagctatggaagcattggtgatgctaatgctatcaatatgtattactcacccttaggttcttctggattaacgcaaattggccctagtccagatgttagactaaggatgcgtctctcacatgatagaggaattcgattgagccctggtagtcttgggcctatgtctgttggagccagtccatcacagtttaccccaccgaactaccatatgcaaatcccagctaattctactgggacacatggttctggttctcctgcaagtggagtcattcatggttctccgttaggaaaagctgcagcagtgggcccatacaacatgaggagaaacttgccaatgccaccacatgattatgtatctcagcatggacaagggcgttttagagatggtgtcagctttagtcattctgatgcctgtgctcaaggacatacaggccactctcataatgcagcggtacctagttcttatcattctggttggagaccaaaaataggttcaaggagtggtatttccttggaggcctcgtctagtcatgtgccttcgaaggctccgtcacaatcatttgacttttcagcttcatcgacacttgatcctgctaattgggaccctaattatagtgatgagtcactattgcaagaagacaattcactgtcagctgatctaagcagcaacctccactttggagatgcaactggccaagaccacatctttgctacatctaaccctgtaccgacaaaccaaagaggagatcaattatttcatgtgtcctctcaaggagtgagtgcccattccagtgttctcatcaactacggtggttacaaccctcaaaattatcctcagcaaaatgcccgtcctcgtcatggacagccaattctccatcagcgatataatcaggcaacttccagtccaatgcggccaatgggaagccatcacaatgggcagcctgcgtggcctagtagttttggcatgggcgatggagtgccctggggaggaacaagagggcactcatttacgacaaggaaggattatgggagcatcttttagggtggagttgtggaccggaggaacgtcattgattcattgcaggcgtaaattatttgtatcagcgaaattggagtgcgatgattctggttgattgttttcgatgttgttactccatccctccacttggtcctttgtgaacacactggatatatacactatatgatcggtgacattagcactcctttgtaaccttttttaggaatcagaagtttgggtgttcccctaattgctgactgcattgtggctgtactgaatactgtaccattgtcaccggtgtaatatgaaggcgtgatgtaggtagactaaagggctctttgattcgtggctaaatgtgtcatactttatctaaggttagttgttcgaattaaagaactaaccttagtcag

SEQ ID NO: 42768 - DNA, 2156 bp, Zea Mays
atggacccgggcaacaaactggcctttgcaaaagcgcccttcagctcccggaccgcttcccctgagctgctgcccaagaacttcgacaccacttgcccaccctccctggattcttgcggctcttcctcgagctcatcgaatccttcatggagagcgccgagggaccgtccccgtactccggtgatcgagcgactccggcggacatacgggatattgtcactccatttgttcataaagcttgatgaggcaccggttcaggatggcaatggccaaactacacctgggcataattcgcgaaggccaaacctttctttgcaaataccagctaggaccttggataccaatataccttcatcgacaagagttactatatcctgcagccccagttcaacgagagtgggtttgccaccgagacctaattcgacgagaacaaaatcatctatcaagaacatgaatcctcagcacagtttcagagcaaggagttcagcccaggaaggtgatcgagtggtccttctaaatcctgggacgtcatctgaagggcagcaggataatccaagcacagcaagatcattttcttttagaaaggtcattaactcattatcggcaaaaaggacccattctcttccagtaacgcctgtaggaactactgacaaggctgcatctcctccaaatcaattagataccctgccaactacaactaatgaaggagttgaagcaaaaattaggcgctcactttcagtacctggaaatcgcaaaaacagaagtttgaggagggcagattcattaggtgtcatccgtgtgattccaacaaccccaagacctgtcccagtcgaagcaaccacatcaagcgatataattgaagaaacaatcgatgtccctgaagatggaggcgaagatattcctgaagaagaggcagtctgcagaatttgttttgttgaactcaacgaaggaggtgaaacacttaaaatggagtgcagctgcaaaggagaacttgcacttgcacaccaagactgtgctgtcaaatggtttagcatcaagggaaacaagatatgtgatgtctgtaaacaagaagttcagaatctgccagtgatgttactgagaataccaactcaaactgcaaacaggcgggtagcaaatgctgctcagcagagagcagctcaacaatacagattttggcaggacattccaattctggtgatggttagcatgcttgcgtacttctgtttcttggaacaactcctggttactgatttgcagtcacgtgcactggcaatttcgttgcctttctcgtgtgtgttaggcctcctttcttcaatgatagcatcaactatggtgtcgaagagctatctatgggcgtatgcttcattccagtttgctatcgttatcctgtttgctcatatcttctacaatgtgttgaaagtgaatccagtccttgcagtcttactctcctcattcactgggtttggtattgctattagtacgaactctctactagtagagtatttgaggtggagagctaggaggaatcagcgtttggctcagcaggctgccaatgctgcacagcaccaagaatctggaaatgatggtggaaatgacaacgatgacgctcagcaagggcacgatccaaattctgggaacaatgctgtgtgatgattcaggttcttggtgcaaaaatccagcaccaaaaaaaagattatgaaatggtatgggtgtgaacagctgttttttttatctgtacagcaagtatagctcattcaacgcggcaccagtcacaagctgaaacctggaaaaacatatcttcatatgccacgtggagggcgctcacggatatcattatacatcacgcagagatgaagcaaaacacgatatgtttgtgtattagtccggtagtttgacttcaaatgtatctgttattcattttaagcttaatagatctaatgcattatagaagtacttcggtaagtgtgtgcagcttatagttgtgagttgcgagtatagccccatatagatatacatcaatgaaatgtacctttccagtatattgaggtttgctagccggcacggaacggaagaaatcctcagattgaattgtgatacaattgtctcaactgagaactacagaattgtatgcaatgcgagcgattgaaatacccaag

SEQ ID NO: 42769 - DNA, 1510 bp, Zea Mays
tccctgaaactgggcgccaccccaacgcgtgtctaggagaatgcagagccgtcctccgacctgggcgcacgtggacatggtgcccagacaatcggcaaaggaaacaccgcaccaggctacgacacacggccgcacagtgggaaggcgagaagcaattgaaacactttccacgcaggtcaacagggacaggactagaagaaggctttgaaagacaggatctccgacgatgatcccgttgtcccacaaccctcacccagccaccatcgccaacgcgggggtctgggggcttttctgcgatcagcacctccttataagaacgacgcgatccactgctaccccaaagaagcagcagatgaagcgtcagggccttcgtcttcacaccatcgctgagccttcgagcagcctccaggaagagcagcagaggggtgggtgggaaaaggaggagaggaggctgacgacggggagcaagggtggtggccggcgaccttggaagatagaccggcgtgaggctgtggggaggaggagctgaggcgtcggcctgggggaggccaaggggcgggagcggaagggacatctgactctgtcacagtttaacaagtgcatgtcctgcagcatgggaaaccagaagagcgttctacaataattacacaactcgctggacagatagtgaaaatgagccagcagaaatttgcttctaatgttgttgaaaagtgtcttacttttggtaatcctgagcaacgtcagattctgatcactgaaatgcttggcacaactgatgagaatgagccgttacaggcaatgatgaaagaccagttcgcaaactatgtggtgcagaaggttctggagatatgtgatgaccagaaccgtgaattgattctttcccgtatcaaggtccacttgaatgcactgaaaagatacacctatgggaagcatatcgtggcacgtgttgagaagcttattgctgcaggagaacggcgcattggtgccccatcctcttgctgagatggcaataaagctatatacaggtcgcagaataacacctgtacagacagacagggatagcgaggcctagctttttaccattaccagtagtcggtaatattgagcgacggagaggttaaaaaaggctcccaaatcctttgatgtaaataaaggatagccgctggaaataaataaaaagaatgagaaaagatgaagagattttgcttgtccttgagggaagagttgtatatttgtgtggtttattttcccctcttgaagcagatggataaatgttttaggatcatagatgatgggaagcaagggcagctgtagattatcctttctttttttccttgggtttcattagtcaatgtataatgtattaatgttcatggtgatgctaatctctgtaaagcctgccttgagtttactgacattttcctgaaatgaaattaaatgcatgtttcctggtacttgtgaaatgcctgcgtctaggcagctcatcaaatatcagttgtttcccaccact

SEQ ID NO: 42770 - DNA, 3209 bp, Zea Mays
cgccctcatcctgttttgcttgcccgcatccccgtcagtcattttggtgaaaaccgaaaagcgcctcccctcctgctctgctcctgcctctctcgtcactcgtcattgcggccgggcactgggccactggcatcgtaacaactgccgatacgcccgagacagcgcgggcggagccagcgagagggaaggccatgaggtcgcagctcaacgcgtccttctcgccgccgccctcgctccggcgagctctcccctctgccacgccccgcgccctcaggttccacgcgttcccgtggcggttccgcgctcctcagcaccacggccgcggcgctggagctcgctgcgctaccaatctgcccgcgcccggcagccatggagtcggagtgctcgcctccgagaggagggccgacgatggcgacactaccgtgaaaaatgcagatgcgcctagcacttcaacggcgacgcagggaaacctcaacatggctgccattgttagcatagcattctgctttctacacagaattgtttctggacggatgcagtcgatgatgaatttgttcccttggatgtcaaacggcattgcaagcttgccatttgcttgcatatctgatcctaccagaaaacccatgcctcttaagctagatttgactcttccaccactgcctgatttcggatggaatttttcgcgactgtactatcggttcaattctcagcttgatcggaacattgccttgtctatcattaccttgctcatcacttgcttttcatttgtcattgttggaggattactgtttcataagttcaggaagcaacaacaatccctggaggactgcttttgggaagcttgggcatgtctatgttcatcatctacccatctaaggcaaaagacacgtgttgagcgtgtcattgggttctttcttgctatctggggtatattattctattctcgattattaagtgcaatgacagaacaatttagaaaccagatgcataaagtaagggaaggggcacaggtgcaggttattgaggatgatcatatcattatttgtggagtcaatagtcatctgatgtctatattgaaccaattgaataagtaccatgaatcatcaattcgcttaggtttagctacagcaaggaagcagaaaatccttcttctctccgatcttccaaggaagcagattgataaacttgcagatagcttggccaaagatttaaaccatattgatgtattcaccaagagttgtagtcttagcatgtcaacgtcatttgagagagcagcagcacacaaagcaaaatctataattatcttgccagcacagcatgaacgatatgaagtggatacagatgcatttgtctctctattggctctacaaccctgtaaacaaattgcacctgttcctatcattgtcgaggcttccaatgcaaccacttgtgaacttctgaaatcaatcactggcttaaatgtgcaacctgtggagatggttgcttctaagttatttgtgcagtgctctaggcaaaaggaccttctgaaaatctacaagcacttgcttaatcagcacaaaaatgttttcaaccttttcaggcggcctgaattagagggcatgaagtatatggatgcagtcgtttgtggtatcttccggtctggaaaaattcattttcacccaagcgaggaagaactactgaaagaaacagacaaattgcttcttattgctcctgttcgtgggatgaaaagaccacaatatagagcattaagtgtacggaaagaaacacaaacattgagtcgtaactcagagccaagagagggtcaaggatcatttaatatggctactaccatggataatgaaacacggctaaataacattgtaaagcgccccttgaaatctctttctaagtgattatatgcttggacccaaggaatgtgtacttattgttggttggcggccaaaagttaccgaaatgatacgggagtacgataattaccttggacctggtagtacagtggaaatcttgtcggaaacccctattaaagagaggagcagtatcatcaacccccttttgcagagccagcttaaaaatgttaaagttactcaccgggtggggtgtcctttgaactacgatactctgaaggaaacaataattaacgtacgagaatctgccaagtcagataaagaggttccactgtcaatagttgtgatatctgacagagactggtttgttggagatgctgcacaggctgataaacagttggcatacacccttcttcttgctgaaaacatttgccagaaacatggcgttatggttgagaatcttgtatcagaaatcgttgacatgggactaggaaaacaaatatctaaaataagaccatccctttcatttattggagcagaggaaataatgagtcgtgtgacagcacaagttgcggaaagtagtgagctgaatgaagtatggaaggatatcctgaacgctgaaggcgatgagatctatattaaggaaattgggctgtacatgaaggaaggagagaaaatatcattcttggagctctctgaaagagcagttttacgccgtgaagttgcgattggttacatcaaggacggcaagcagcatattaatcctatcaacaaatcggagccgctgtcccttgaaatgaatgattcgctcattgtgatatcggagtttgaaggtgaacaaccaattatgatgggcggagaaacttcaggatgaaattttcagctttatatctcttcacagaaactctaacaactcttgctaccatgaagagatgacatataacctgtttataatccttttctttttgtacaaagggaaagcaaaatatagtttaaaggccacaaatcaagttttgttcctcccatagccgtagaacttctttgatgcaaatattttactgcacagtttaaccgcagaatcttttctatttatctgtaaacatagtgaataacacaggcaacttgtatggtacagatgtctgaataaaggaaggatgaaggaaaattgattgactatgttccttgttgtttccttctgactaatgaatacaatgtttccatttttttagtcctgagctagacaaaatcagctaggtatggccttgctgttctctttgggagataaattcgtcgcctctagcatttggcacaagaaaagtttgttttacactttgcttcattaaccaagccactgcttcagccttt

SEQ ID NO: 42771 - DNA, 3497 bp, Zea Mays
cgcaggcgctggaggcgtccacagggggcgacacccgtgaccctgcccccgttcgacatcagcgctcctccccccgaccaccgtcgatttggtgtctgagccctcgctagatctcgcaccctcaccgaagccctcattggattcgacgccctcactggaggttgcaccgcgatgggatctaggaaccgtagatggcctcgaccacccacgtgggttgttgcctctgcggatgagacgcagcgccaaggggccagaggaaacgacgtgatggacctcatatcacagctcatgtcatggttcatgcctctcatcgcctcccgccgtggttcgccgaggccgccccatgctgcacgccatgggcagcgatgtcgccttcacgaagctcggcatggagtgctaccccaaggaggccaccgctgttggggtcaagggattccccgacatggaaaaataaccgacgacgagatcaatgccgcctccgtcacttgctgccgcatctacctcagattgcagagctgagaacaccttgaagctaggagatgtcatccagtaccatgaatgtggttaccgcattctctataagaagcgggcaccgatccatgtgtagtaccagcaaacttcccattttctatgactccaagcaatggcagttgccgttcagtttggactatagaattcaattatgagttcagtttgttgatattaaaggaaagatacaggtcagcctcttttacttaacaaggtaagagctctaaatttatgttagtatagtagaagtttttttgttgtaaatatcacttgcatatacgccagctagatgctcactatttgtcctctctcaaggtctcaatctgtctgatgtttattcaaccgattagctatcatcataaacctgaataacattttgctttgttcatgttcaggattcatacttaaatacttaacaaggtaagagctctaaatttatgttagtatagtagaagttttttttgttgttgtaaatatcacttgcatatacgccagctagatgctcactatttgtcctctctcaaggtctgaatctgtctgatgttttattcaactgattaactatcatcataaacctgaataacattttgctttgttcatgttcaggattcatacttaaatttatctgatgcaatttttcaactgaacgtgaacttggcaggggtgagtacggagtagtgtacaaggtatgtccattcttctatcgctccaattttcaactgatggaaacagtaacagataattaatggctcacctacttgcaatgaagcgagttctgcattgagctgtcgtagagagcgtagacagacactctagccaacgttgttggctgggattggaacacaaaagcgagacaagggatgagaagcacaggaggagccaggtgagtttggcggaggcctcaatccgggtctagaccaaggtcatggtggcgacgaaggtggaggccgaggtggagggtgatgcttccactctcagtcttggggtggggtcgtggggatgacatatgagagtggggtgcagtggtggctcgtcgacatcagccattggcacccttcccctgcccagttcgatgatgcaccctccctcctactacttcacgatggcaccaccatctccaggtaccgtgccgatggaggaaaggagaaacaagattaagagtgatgccacatacttagcgatggggtgcttgatatcctagatattgtactagcttcagacctcgccgaattgacaccttcgaagaaatgaagtcgccagattggtaggctttgagtgtttcaccagaggaagtatgtagtgcagttaaggaaggaaatgaacttccatcagacttgatagacacactactaaagtggatcccaagcaatgatgaggagcttaggcttcgactgtcctcccatagcaccgccacaccgcatgcgtccgcggcggcgtccgcctcggcgccggtctcgcacaccgctccctagctggggaagttcatcgcctccgagcccttcaacgtggggggattcgattgggcgatctacttctaccccgatgggaagagcggcgaggatggcgttgtctacgtctcgctcttcatagccctggccagcgaaggcaccgatgtgcgcgcgctgttcgaggtcacgctcgtcgaccagagcggcaaggggcaagacaaggtgcatacccactttgggaggtctctcgagagcgacccatacaccctcaagtaccgcgacagcatgtgatgagtctatgtacaggttgtttcctacggtatgcttatctatggtggaaagaaaaagtgattgactcatacttgaaaagaaaagatggcctttgcccattgacgcctgagacaaccagaaatttgccatgacctcgttcctgaccaagaaaaactgtcaagcacagttgatatattgggattccaaggtatcagaggctgatatggatgcaatgtggaaacatcctgatgtgtataaggagtggataaaatctggtgagagacgtggaaatgtacgattctcccatgatgcaaagaacatgccttacctttctcgcgtcgaggtgaaggatatgattgccttctcatgttgtgtatatgatggtggtgatgaggagaaggaaatggatgcagccagagaaataggttggagagggaaatttactaagagaggacgtgtaataagaccaggaattattagaatgagtggaaaatgtcctcttacacctttggaggttgggttaatgcttcgtggaatggatttcagcaataagactgcaatctttttggcatctggaaagatttacaaagcagagaagaacatggcttctcttcttgaaatgtttcctctcctacagacaaaagagacactggcatcagaagaggaacttgctccattcaagatggctgctgttgactatagtatttgtgcccaaagtgaagtttttgtgaccacacaaggtggaaatcccgcattttttatgggtcacaggagatacttgtatggtgggcattcaaaaacaattaaaccagacaaaagaaggcttgctgtactcttcaataatccacgtatagggtggacggcattgaagcggcacttgcttaatatgagagcatacagtgatgtcaaggggatcgaaatgaaaagaccaaacgaatctatatataccttcccgtgtcctgactgcatgtgccgcttgaacagaacagaacactcgaaatccaaacagagtagatagtatatttcgtatgtagaccaaatggctaaaaccatccaatattttcatagactgaaaatgcagagaaagcaacaaaggtgtatcaatacagtcgtacaagcttagtatcggatggtttttaatttgtatagcaaagcacgggcacatacctatatatcttttaatgtatgtaaatattcttaacctttaaaagatactaacaagcaggtataacgataattaatgtttctata

SEQ ID NO: 42772 - DNA, 2456 bp, Zea Mays
caccaccggacactgtccggtgcacccagactgagcagactttggctgaacaaagccatctcttttccaattcgatttctcctgtttccagcacttagacacaatacattagttctcaaaacattgtactaagtctagaaacatacctttagacttgatttgcactttgtccatcacttggcatagattttcacttaagcacttgtgttggcactcaatcaccaaaatacttagaaatggcccaagggcacatttccctttcaatcacatcaattgcttttgtattatggctatcactttgtattatagggaacaaggcccatgacatttcagtggaaaactctatagtggaggcagtggggagcatccaagaggagccactgctggagcatcatatgtgcatgcagaaggatcagggctatatacgaagttactcgaccgaaagcttggctcttgtgtggggctccaacaagaattagtgagaattttgcactcttcttaatacctcggtaagaatactaaagtcaccgatgaaagtttgtatctctatcacactttaagctcatgtatttacatagtgctaccttggttatatgttataccttttgagcttaggtataaggtagtgaataggtttagaacttaattaggttgcaaaagttttttgtggtagaggtgtctattccgcttcctcggcggtcaccaatgctgctcaatcatttctgaaaatttgtatctctttcctgtcaatcctactatgctgctcattgcccaacatccaagtcgtatgtttccatctgatgttgcccccctttagcacctcttagactccactttgatgtttgatgatggttaggctccatccctatagaagacaatgattcaacatatatcgctttagctgttgctccagccatgtgtgttgctcatgtagggcaccacgaacacgctcgagtgagcatgactatagccatgactcttgggtctaatggttgtgggcttagggccctagcgacatgacatatcgttccctcgcgagccatggtttgctatcgaatcatcccttctaagaggctagggtcgcaccccgccttccatgttgtcatgtcattatactcttatagaattcatagttaatacttgtttcaaccaaacaacttctatctttcccacaaccgtcaactcacaacatcttcctcaacttgcaactagaatctaatttttagaaatttacaactcaaccaagcaaaaccttttgtatggatgattgactctagtgcaagcagaagactgttgattatatatccaagaggtaataataatctatgagaacactaatggacctttagggtaaaagtatctacatatacaaagagactaacatgctagaagtgatacacacatcttaactggtgtcgactctctccctgttgttgtgggttctcaaactaccatcgttctttcactcgctatgtgtgtggtgctagcacaccggcctcgcggtgattttatccctattgttagaatataagtaaatagtccattcatctctattaatttaagcttttggattgaactaattaactataaagagccagaggtctcgagcttgaatcctggttaacataattaaataaaataattggtgtttgctccaattccacatctgagccttgagagaagctcaacatgatgggctgttggaacataggtgaattattcacctatctctatcaatttaatcttttgggttgaactggttagtacatgcaactcaataccggtacatatagatactttggagacgttgttgttggatttatgaagttttgatcggtaatgaacgtgaagaccacggataaacatgttactactcctgatacgctaggacgtgtgactacttccactgcattcgcactcttttttctactatgttacgcatacaatgttaacaatctttaatcttatcttctaattgtatataaaatgtagtctatatatgctaacatatagtgcacatattttcttacatgaacgccacctggttcacgatgaggaacagcgcgaccggggccttgcatgccattggtgcacagcagtgtgtgccctcttggccacatccagaaaagcagagtgagcttcgagaggagctcttgatgactcgattgctaagtgcttgtggtggttggagacggcgttagtagggtgtggtatttgtaagtggccgaaacgaagcgcgaagatgatgtgatcaacttgttagcacatgcatatgaggttgagatgaggattcaggacgccgatgatctgctggatgggttagaactagcgaacaagattgctgtagtggcggacgcaggttaaggtttgcggtttaccctactctattcgcgatctttgccataagccaaactaaggccctgtttgggaacaaagtttttgaaaactacagtttt

SEQ ID NO: 42773 - DNA, 400 bp, Zea Mays
cctctgcgcggtgcttctgctccagctcctgcgcgcgcgtccatctcctcggctcctccggtgcgcgctctgcttcttcttcccccagtcgctccctcttctcccagggtcgctcctctctgtcccgagctcatctcctctgccggcgcgcccccaggcttcttccccacgcgcccctctcctctgctctctctctctctgatgcgcatctcccatggcgcacgcctagccacccctccatttctccctacgcgcctgctcccatggccgctgtgccctggctattgctcggttcttgtcgcacgctaagccctatgccgcgccctagcccggagctccctgctcggcgccctccctgctcgccctctccctctccctctcgtttctttgttgttcgccg

SEQ ID NO: 42774 - DNA, 4072 bp, Zea Mays
cacctcccccgcatttcacactcccacttccagcctcccccacaacccccatcctcaccaccaccactcgcccgcgcaattcccaaatctcccaggggcctcttcgcttacctcccgcccgactcctcgcgaccccatcgcctcgcctcgacccgtcccgagccttgctcgtcgcggagcgccacaaccacgcctcgccgccgccggcgagcggtcaagcctaggggctatctccgtgtgatggctaccgcgccggcctccgaaagctcgaccgcctcctagggcggcagttacccgaggctgagctcgtgcgcgcgcgtggggacccccgtgctcagctcgcgaaaccctaggagcagcaggaggcgaggcttggctggcggcgatggacgtggactcacgcatggcgacggagtccgactccgactccgacgcgcgcggcggcagcgggtccgggagcgagacccccacggcgtccccgtccccgtctgcatccccgtccccatccgcgcccgggacgcccacggccgcggtcgcgtctccggcgccggttgcggggcccaggccggcgccggggtatacggtggtggacgccgcgatggacaagaaggaggacggaccggggtcccggtgcggccacacgctcacggcagtgccggcagccggggaggagggctcgcccgggtacgtgggcccgcggctgatactctttggtggtgccaccgcgctcgagggcaactccgccacaccgccctcgtcggctgggagcgctgggatccgtcttgctggtgccactgcagatgtccactgttatgacgtgttatcaaataagtggaccaggcttactcctcttggcgaacctccttcaccaagagctgcacatgtagcaactgctgttggaaccatggtggtcattcagggtggaattggtcctactggcttatccgctgaggaccttcatgttcttgatcttacacaacaacgaccgcggtggcatagagtggtggttcaaggtcctggtcctggtccacggtatggacatgtgatggccttggttggtcaacgattcttattgacaattggtggcaatgatggaaaacgacccctggcagatgtatgggcccttgatactgcggccaagccatatgaatggagaaaacttgaaccggaaggtgaagggccaccaccatgcatgtatgcaactgctagtgcccgttctgatggcctccttttgctttgtggtggaagggatgccaatagtgtgccactatcaagtgcatatgggcttgctaagcatagagatggacgctgggagtgggcaattgcccctggtgtgtctccatcacccagatatcaacatgcagctgtttttgtcaatgcacggcttcatgtctcaggaggggctcttgggggtggtcgcatggtagaagactcctcaagcgttgcagtattggacactgctgctggagtttggtgtgataccaaatcagtagttacaactccaaggacaggaaggtatagtgcagatgcagcaggtggtgatgcttctgtagagcttacacggcggtgcaggcacgcagctgccgcggttggtgatttgatatttgtgtatggaggtttacgtggaggtgtgctgttagatgacctcctagttgctgaagatcttgctgctgctgaaacaaccagtgcagctaatcatgcagcagcagcagctgctgcatcctcaaatgtacaaagagaaccgggtagatatgcctacaacgatgaacaatcaggacaaacagttacagtttcaagtcctgatggagctgttgttcttgggactccagttgctcctccagtcaatggggacatgtatactgatattagtcctgagaatgccattatccagggacagagattgagcaaaggtgttgattacttggttgaagcatcagctgcagaggctgaggcaatcagtgctactttagctgctgtaaaggctaggcaagttaacggtgagatggagcattcacctgacagggaacaatctccagatgctgcaccaagtgccaagcaaaattcaagccttataaaaccagatcctgctcttatgaacaattcaacaccaccacctggggttcggttgcaccatagagcagttgtggtagcagcagaaactggaggtgccttaggtggcatggttagacagctctcgattgaccagtttgagaatgaaggtagaagggtcatttatggcacccctgagaatgcaactgcggcaaggaaattgctggatcgacaaatgtctattaatagcgtgcccaaaaaggtaattgcttctctgctgaaacctcgtggttggaagccccctgtgcgaaggcagttctttcttgactgcaatgagattgcagatctatgtgataatgctgaaagaatattttcaagtgaacctagtgtcttacagcttaaggctcccattaagatatttggtgatctgcacggtcaatttggtgacctcatgcgcttgtttgatgaatacggtgctccttcaactgctggagacattgcttacatcgattatcttttcttgggagattatgtcgatcgtggtcagcatagtctggagacaatcagtcttctccttgcactgaaggttgaatatcctcacaatgtacacttaatccgagggaatcatgaagcagcggatatcaatgctctatttgggttccgaatcgagtgcatagaaagaatgggtgagcgggatggaatctggacctggcaccgtgtgaacaggttatttaattggcttcctttggctgcactaatagaaaagaagataatctgtatgcacggtggtattggtcggtccatcaaccatatagagcaaatagaaaatcttcatagaccaattaccatggaagcaggctcagttgttctgatggatcttctatggtctgatccgactgagaacgatagtgtagagggtctcaggccaaatgcacggggccctggtcttgttaccttcgggcccgacagagttatggagttctgcaacaacaatgacctgcagttgattgtgcgagcacacgagtgcgtgatggatggcttcgagcgtttcgctcaaggtcacctgatcactcttttctcagcgacaaattactgcggaacggcaaacaacgcaggagcgatcttagttctcggaagggatctggtcgttgttccaaagctcatccatcctttgccgcctgccattacgtcacctgagacctcaccagagcaccacattgaggacacatggatgcaggagttgaatgccaatagaccgccaacaccaaccaggggccgccctcaagcgcccaataacgaccgaggctctgttgcttggatatagcggcctggccatattatgaaacagtcagatttctcgcctcccaccagtggcttgaggcttatattatccatccatcttgggcacatgcaggcggtctgtgctgaaagcacatgcttagcccaaaacaacatcgaaagggaactgttcagggagcgagactaagcggtgctctgaagacagaaggccagagaagactcaccagtcaccgtcgacagtgctctccaaatccttcccctccaaatgacatgagaagtagaagaacagaaccaagtgttggcaaaccacagggtcttgcctgaggtcacgcctgtacatactcagatgccagcagataggcggggttgtgtactgtgttctttttgtcgagcgtccaaagtggtagcagcagtccattgtgctaggtattcatttgctgtagggtttttgtttcttgtccctcatgttgcagagtatggaagtgataaaaatgggtcgttctgtcaggtcgtgtataatagcgttgtcgcttgtttatgggtagtagcagcgagtcagctgtcagcacgccttacacctccctcgtgttgtaattcccgtcacctgtgctgagagtgtgcacaatatatcgtcgtctgttgtccaaagttttgggtcatggacgggtttggtgatttgagttgatttattagagaagcaatgtgttgttcgattttgagcttt

SEQ ID NO: 42775 - DNA, 565 bp, Zea Mays
caaaggcaaaaacagaaatgtgcatgtaggcgagacgagcccacgggagctttttctggcttaacatgtatagatctgagatcacgcacgacatgggagagaaatggagtggggcccatagaatagtacctttccttctttcactgcgcacgacggagcacgcgttttcttcaccacgatgcaattgcacgggccggtggtttcttcgtcacttttggaatgcaggggcagcgagcgtcgggtgtccgtgcatgtttgccggtgggcgacctagcggtgtggcacaacagctgtgcaggaggggcgtggggcaccagcggctcatcggccatgcgagctacgccgggtcgccgcgctggccgcgccgggcgagtagagcgtcggcagcggaggctcgccggggcgccgcttggccagcacgccacaacgtcgatggaaagggcagggcggtgcggatgctcgcgagccgaggcagcgcggccatggcggatggatcaggcgaaggggtagcacattgtgcgggcactgctgttttgaaaagggagcgacgggaggacggttgtcg

SEQ ID NO: 42776 - DNA, 3664 bp, Zea Mays
gttccttccccaactatcgttaggcttctccaccccgccctccccgccctccccgccgaacgcgcctcactctccctccatgcagatcaatgcgtccttccaccccaaccgtgctcctcgcccttctctcgtcgtcctcgttccccctagactggcgtggagtgaagatccatccggactccgattgatttcttctcctgctgaagaaacggagagattcggccaagattgggatcaatctgcgcatgggtcggtatcgtataagaacgtatagttgcaggtgatcaagatccaatacttgaaaataggatgttgacatgttactgtttagatgacaccagatgataatctctcaaaaaaggcagtaaacttatcaagtatagtaggaagggaagacccaagattcgtgagttcagactttctagtgatgaaacatcattggtttggtattcccatagcaaagtgaagtaccttgtactgtcttctgtctctagaatcattcctggacaaagaactgctgtatttaggaggtttttacgccctgagaaggactacctatcattttctttgatatacaagaacggacaacgttcccttgacctggtttgcaaggatcaagcagaagttgaggtctggttttcaacgcttgaggcacttattacttcatgccgtaaaagttattcagctgatggtccaagtgatagattatcagtttctgacgaagtatcacattaccaagatacttttcatgatacaacactagatattgcatcgagtatcacacgtacttttaactcagcaaaaacagatgttgtatctgatcgtgcaaatatgctaagagcaagtacagacagtagccggcttagtatttccagtgcccctagttcttcaagtcaaggttctggacaagatgacattgaatcccttggtgatgtttatgtgtggggtgaggtgtggactgatatgatccctgcagaaggatccgcaaactatttgtgctccaaagcagacattttaattcccaaaccacttgaatcagatgttgtcttggacgtacaacagatagcgtgtggttataggcacattgcactcactactaggcaaggagaagtatttgcatggggcgaagaacttggcggacgacttggtcatgggaccgatgcagatattagccgtcctaaacttgtcgaagccttagcagtgtcaaatgtagaatatgttgcgtgcggcgagttccatacttgtgctataactgcctctggtgatttgtacacttggggtgatggatactacaatgctggattgcttggacatggtgctggaactagtcactggcttccaaaacgagtctcaggacctttagaaggggttcaggtattgtctgtttcatgtggttcatggcattcagcactgaccacatcaagtggtaaagtgttcacctttggtgatgggacatttggtgcccttggacatgggaatcgtcatactgtcgcatatccaaaggaagtcgaaactttgagtggatttagaacaataaaagttgcctgtggactctggcattctgcagcgattgtggagaccactaatcaggcaggtgtgaatgtgatatccaggaagctatttacctggggtgctggtgataagaatcccctaggtcacggggataaagatgctaggctagttcctacttgtgttcaatctctcattgattataatttccatcaggtagcttgtggacatagtatgaccattgccctttctacatctggtcatgttttcacaatgggcagctctagcaatggccagcttgggaatccaaaatctgatggtaaacatcctaccccagtacaagataggctggctggagaattggttgaagagatctcatgtggctcatgccatgttgcagtcttgacttcacgaagcgaagtatatacatggggaatgggagccaatgggaggctgggacatggtggtgttgaagataagaaaaaaccaactcttgtggaagcattaaaagatcgtcacgttaaaagtatagcatgtggttctaatttcacgacctgcatttgtatacataagtgggtttcaggtgctgatcagtctgtctgctcaggttgtaggcaaccatttggcttcacaagaaagagacataattgttacaattgtgggcttgttcattgccatgcatgtagttcaaaaaaagttctgaaagctgctttggcaccaactcctggcaaaccacatcgcgtatgtgattcatgcttcatgaagcttaaggcagcggagaccagcagcaacagctcacatagcaaaagaaatgccattgctcgtcgctctgttgatagcaaagacaggtcagagagaccagaaataaggtcttccaggcttgcaactggatcaacagcagaaccactcaagcaagctgagctgaaagcagttagaaacgagataaaaccagatcctatgtccacgatgagggcaccccaagttccttccatgctaccttttaacaatcttgcttttggcgcaacatttggtggtccagctagtctgaagcccatgacaatggctccaatgccaatggccatgcctatgtcaccagctcctctcacaaagaagccaactccagcagcagcaactcctctttgtggtaaaagtgataccgataacttgaagatggctaaacaggtgctgaatgaagatatctcaaagttgcaatctcaggttaataaactgaaacaaaaatgtgatgcccaagaagagcaactgcagaaagcggaaaggagagctgaacattctgcctctacagctgcagaagagtcttcaaggcgtaatggtgtcttggagttcattaggttccttgacaatgagctcaagagcatcgcagatagggtgcccagcgacgctgccgacggcttaaaagccttgcaaaaccattcggagaggtttctcacagaacaaggtgttcgtccactggaagccacaggtatgcatcgtaagtgcgcaagcataggcaacctcgtaatgtctcaggacggcagtgctggaaacgcgagcagctcggctgcttccttggcgagcgagtctccatgccaccgtatcatggagaacagctcgagagctaacggcgacttagcaccgaagctcggtggtacccatggagaagtgcagctgattgagcagtttgaaccgggggtgtatgtgacgctcatccagcttagagatggcactaaggtgttcaagcgtgtccggttcagcaagaggaggtttgcggagcagcaggccgaggaatggtggagggagaaccaggagagagtgttcaggaaatacaaccacccggccaactaaccagcctcaccagacttcaccattggacacttcaagaagaaggcaaagttttcttcatgttgcttggggcattgctcctgcggctgtgtgccgtgggcctgtggcgatgtagaattaggttgtggatggggaagatgctgatgtagattctcattctgttgttgtttacctcctacagtttaccctttctctagctcacctcctacagtttactgtttcgcagttttgatatctcaaattattcattcaacagccgtgtgtttggttggaatgtgtttcgttggatcgcggcggtgaaaaaaactgacgtgga

SEQ ID NO: 42777 - DNA, 227 bp, Zea Mays
ttagtaagcatttctgcaaaacagagtctttgattcttgataagccataccttgaatccctctagccagcatacccttgagagtcttttctttagtcgggtaagtcttgctgagtaattccgtatttagggttttattccctattgtttttcaggttatagttttgtgctgatgatgatggtgttaagtgccggtgggctcggccttcttataagtctaagtaaccc

SEQ ID NO: 42778 - DNA, 988 bp, Zea Mays
cccgtcgcgaccgcaacagcttctccggactccctgggcatcagctggtcctcgcagtcgtcgctccgtgcgtacaaatagtgtcgaggaagcctcggtcgcgtgcaccaatgccttgccatccgcattctgccgctccctctcctctttgatccgcgcccagccgccgccgcgggaagcaggggggtcaccacggatggtcttcgccctggccatcggactcgccacgcgggatgatctatggatgaatgcggggctcgtgcgtggtgcactgggtaacccaggggcttggcgatgtctgggtcatcacgaattgctcaccggagcaatttgtactgccgcataccacacctcgccatggccgcctgtcgggagagaagaaaggaggggattccgccgccgccgagccccagttcaagctcttcttcactcgcatctccggaccgcctccctgggagctccatggacgatggcttctgctgcgccaccacgggtcgaacagagagaaaacgaaggagagagagagcggagggctctgcgtggtcacagcggctcctcatcgtcgatccggatccggggaagccgaccgagacctcgcggcggaacctacgtcgtcgcagcgcggggaatttctcggcggacgacgggggaagcaccgcgcctctggtcgtcgcggactgcctcacctacatcaatattctggtgaggtcacgagtcatctgaagatcatcctgatacctggaatctcaagtctcaggcaagttgtgcccttgatcacttcttttacccactcatgttctgattaatcataatgatccgcataggttaattttgatgggacccaataggtcaccctagtttgttcgtcctgaataccttgtttacccctgaatcacttgggtagttctgctactgctttatatggttttgggttaatattccattacatctatgttccaattatgttgttattctatttatgttcatg

SEQ ID NO: 42779 - DNA, 894 bp, Zea Mays
ccacgcccgcccgccgcaatccccagtccccaaccgccctccgcaatcccctaccgcccgccgtgatacccgccgccgcggcagccgcccgccgcaacctctgcctagataaggatagggggcgccctcctccctcgatcatccgcacttgtgtagccatcgcgccatctacaccggccaccgccacacgaaggttcgtctctggccttgcggcttgcgacctcgaggtgaccgagcccgcgggctccatgacgacaacggtgacgccggaggcaaagatggcggcgcagcagcaggcccccgcgtcgcgctcctcctcccgacctcgccgtcgagtccctattcccgccggacctcgatatcttcgcaggccgctggaccccgccggggcgggtgaccgatgcagtgcgctctcgatccgtgcagagcgcaggtggttggatggccgcccgtgcgcaactaccggaagaataccctcgccgccgcgaccgcctccaggagcaaggcgccgacggaggaggccgcatccggagctgggcccatgtacgtgaaggtgagcatggatggcgcgccctacctcaggaaggtggacatcaagatgtactccagctacgaggacctctccctggcgctcgagaagatgttcagctgcttcatcgctgtggtctgcataaatcatcgagcaaagacagactgactaatggctcaaaggtggatgccctcaaagatcaggagtatgtccttacatatgaggataaggatgcagactggatgcttgtcggtgatcttccctgggaattaccttcagagttggaggagctcaccattagggcggttcttttgcctaccgacaaagaggaacggcggtggcctcacagtctcacacaggggcag

SEQ ID NO: 42780 - DNA, 3975 bp, Zea Mays
aaaagcttttctcccttgttctcgagctctagtcccagtccactacaaaggtgctggagtcctggcttcccacaagtattcttgaccgtgtactacttgttccatgctcgacaaagaattcctagaagaagaagatgaaattcaagaagtggtttcggaagaggagtctgcttcagtgcttgctcatcaagtgatgggagccatctaactgggtatttaatagagggatttggaacctcttcattgcaataagggaatttgctggggttcctggttttgtaccggggcattgaagcaaacccggagaagatcaaggcgatgaggcgatgaggcctccggtctgtatcaaggacgtccagaagctaacggggtcattagccgctcttagccgcttcatttcaaggctggctgagagggcgctacccttcttcaagctgttgcggaagtccggcccattctcttggaccgaagaggcagaacaagcattccaagagttgaagcagcacctggtgtccctaccaatactggtagccccagagcctggggagccgttgtatttatacatcgcggcggctacagaagcggtgagcatggtgttggtcgtcgaaaggacatcacaagaaggccaggaacctgaggactcgggaccagctgccggggtccggaccgttcagaggccggtctactacgtcagcgaggtcctccacgaggcgaagaccaggtaccttgagacgcacaaacttctctatgctgtgcttgttgcgtccaggaagctgcgtcactatttccagacacacagggtcgtggtggtgacctcctttacgttaagggtcatcctccacaactctaacgccataggcaacatcgccaagtaggccgtggagctcgctgagttccagctggacttccagccttgccttgccatcaagagccaggtcctggctgacttcatcgtggaatggacgcctcccccaagcgctcctgggggcctggatcctgattcggaccccacacctgcggagcccaggggtccggtcttcaccgagccccactggacgctcttcttcgacggatccgtccgtcagcaagttggcggagctgggatggtcctcatcgacccaagcggatatcaagtgaagtacatggtgcaccttgagttcaaggccaccaacaacacggcggagtacgaagcactgatcttcgacttgtcggtggccctacccctagggatccgccagctcctggtaaagggagactcccagctgatcatcaagcaagtccgcggggagtgtagctgcaacgagcccagactcacagcgtagcttcttcacgtgaggaagctggaaaaggacttcactgccctggaactgcaacacgttccttgggctgacaattcggcggcagatgacctctccgcgagggcatcaacttgggcacccatgcccgagggcgtcttcgaaagatggctgctgagacccaccgcccagccagccgaactgggcgaagggggcgagactagcacctcgaagctagcggtcccagtggcgtcccatctacagaacccactgaagactgtgtgtgctataggagatcctgccagtcccttagcgccacagccaatatttcagagtggtcccgatgcatggatctccgagatccgggactacctgaaggaaaatatccttcctgaagaccatgtgtccgtagagcgcatagtgcggttggctaaacgctacgcggtggtggaaggggatctctaccgctgtggcaccaacgacattctcatgcggtgcattacccaggaggagggccgtgagttgctcacgaagatccatggaggagagtgcggaagtcattcatcatcccgtatgctggtcggtaaggccttccggcatggcttttattggccaaccgctctccaggacgcaaccgagatggtaaagtcctgcaaggcgtgccagttccacgcaaagcagacacacacaccagctcaggctctacagatgattccaccctcctggccattcgtcgtatggggggtggatatcctgggaccattccccagggctgtcggtgggtaccggttcctcttcatcgccatcaacaagttcacaaagtggccagaggccacccctgtggtcaatatcacccagggtgctgctgtcgctttcctcaagtcgatcgtctgtagatttgggctcctaagctgtatcattacggacaacaggacccagtttacaagtcgaatcttccaggagtattgcgaggacatcggcacccagctctgctttgcgtccgtagcacatccaaggagcaacgtccaagtggagagggcaaacgtagaaatcctcaggggactcaagacacgcacctacgactgcttgaaaaagcatggtgcaaattgggttagcgagcttccgtccgtgctatgggggaaccagaccacacctagccgagctactggggagaccccgttcttcctggtctatggggtcaaagcctgccttcccccggaaatccttatgggctccccacgggtccagttgtttgatgagtctatgcaggaacagctacggcgtgaggacatggatttcatcgacgagcacagatggcaagcagcaatctgaaatgcacggtacaaccaagcgcttaggcgctaccaccaatggttcgtgcatagtagggagctcagggtcggggacctggtcctaagacgagtactgaaccgagaagggctccacaaactctcccccagatgggaaggacctttcaaggtgacggaaatatgctgacccgggtgtgtccgccttgctacaactgaaggagagcctcttcctaatccctggaacatagagcatctccgtaagtttttcccataaaaacaagcctggggattcgattttcttcctttgtaactaagttgcgcatatatgtacgccagcccggtgaggtccgccctcataaacccagtctgttggcctacactcttgaatatcaagttataaagaaaagattcacccccagatttgtttttgtgatggtcttatttttgcttcaatttacgagcatcatttttatctaacccacccatacaattcccacccttgctggtataatgacatcctaattgagtagccagacttgcagtttgggatccctcggtaggggggtctggtagcctgggggccagttctagagaatggatacttgtctcctagggtggtccggagctgtgtagccgtttagcttggttccgtaccctaagcctgcacgctccaccactctatgacgggtaccctagtatttggaactatagtcctgtgggtccaacaacctggggcccggttttagagaatggacacacgtcccctggggtggtccggagctgtgtagccgcttagcctggtcccgtaccctaagcctacacgctccaccactctgcgacaggtgccctagtatttggagctgtgatccagggggtccggacacacggactggtttcccggtctaaatcctgcaggtcctgttgtgtgaatcgaaggataaaagataccagttagtgggccctatgggtgcactactaaagcatcctagccaaggctgtgtgcaggtccaggtcccagtcgagactacctcctaggggccaggtcaccaattctttcttaagtatactagcatctagcctcgacacgttgagcctacatcccaggggggccaagtaccagagagaagttggtaacgatgcacacagcaaaacaaatagcatagagataagttctgtcactgttagattaatacttcccaaaagtatcttacaaaaccaaaaaatattacaaagctgcttcctagcgggacccttgccttctctctgcagatccagctactcatcatcagcaggatcccgctggaaacgttcggccaccaattccacggcatcttgaacagcctcccgggcagcatcctcagtgtcggcca

SEQ ID NO: 42781 - DNA, 8195 bp, Zea Mays
cttcgaagagctgaagcaatatttaatagatctaacaacactaactccaccaacgccaggggctcctcttttgttatatgtggcagcttcgcactcagcggtaagtgcagcacttgtccaggagaagcttgaaggtcaagtcaaaaagcaagccccaatatactttgtatcagaagttcttagtctatcaaagaaaaattatacagaattggagaaggtactgtatgctgttttgatggcctccaggaagcttcggcattattttcaagcttacaatataattgttccttctttacaaccgttaaaggatattatgagaaatcgagaagctactggaaggattggaaaatgggctgcagagcacaatgaattttgtattgattatgtgcatagatcttcgattcagtcccaagcgttggcagacttcattgctgactggacgccaggggctcaggaggaagaaacgaataaagatgccgaagtatggacagtgttttgtgatggttcttggggaaccttcggagcgggagcagctgctgtgttggtttcaccttccaaagttaaaacttgttatgcgacaagacttgatttcagttgcacaaacaatattgctgagaacgaagctctgctcttgggtcttcggaagttaaaggcaatgggaatcagaagggccattcttaaaactgattcccaagttatttccggtcatattgacaagagctacaaagcaagagatccgaagcttgaaaaatatttagatacagtccgaaggattgaggcttccttcgaaggattctctgtaaaaaatattcctcgtggagaaaatgaatatgctgatctattagccaagtcagcagcacaggggctgcccttaccttcggaagtatttttcgaaacaataaaagcaccttcgatcgagcttcttgaaagagcagtcctcaacatatcccctgtctatagtgaagattggagaactgggatcatctctttccttcagggtaattttctttcagatgacgaagcttataacaggaggatagaagcaagagctcgaccatatgtcataatagaaggggaattatacaagcggggggtctgttccccgttactcaagtgtttatccaaagccgaaggcatagaattgatgaaggaaatacacgcaggcctgtgtggatctcacattggatctaggcctttgctcggaaaagtttttcgtcaaggattttattggccaaaagcagcttcggatgcagcggatttagttcaaaagtgtgaaggctgtcagaaatgtgcaagagatcagaaacaaccttcgtctttaactcaattaatacaacccacttggtcgttgcaaagatggggccttgatttgctaggtccattaccaccagcacaggggaacttaagatatgttgtagtggcagtggaataattttctaagtggattgaggcaaagcctttagccacaataacttcggttactattcaaaagttttttttggcaaaatattgtttgtcgcttcggagtgccgaaggccattactgtggataatgggacacagtttaattctgaagctttcagagaattttgcgatcaaattggcacgaagatccattttgcatcagttcgacatccggagtcaaatggacttgttgaaagagctaatgggatcataatgacaggaataatgaagttaatcttcaatcagcccaggggaaagtggccagacgaattaatcaaagtggtgtggagccataacacaacagtgtcaagatcaacaggctttacgtcatttaaactattgtttggtgatgaagcaataaccccggaagaagtcaaaacaggatcaataagaacagtagcttcggcagaaggcgaagatgaagctgattattctatggaaaaagatgctatagaagggatcaggcttcaagctgtggaaaacatcaacaaatatcaggctgaaacaataaaatggcgtgacagaaaggttaggttgaagaacattgaaccaggacactggtgcttcgaagagtagccaaccctgagacagtgggcaaattacagctgaagtgggaaggaccttttttggtagtatcttcgtcaagacccggttcctacagattgaaggatatggacggcaacgacattcctagatcatggaatgcggatgagcttcggcgatattatgtttagcttgatgtaattttttctattcttttttgtggcacccttttcctttccaaagggggagaaaggtttttaatggggccacaacatgtaatttttcttttccttatttcaattctataagagtgatatcccccaaaaaatgtaaatgtaaatgcaaaggaaaaagaaaagaaaacagggagaagctcaaaagttgttcctaagggaatgcagagcttacagcgaaaaataaacgttgattccgctgaaagtaaaaggcgaagaagctcctaagggaggcttacagcgaaaaataaacgttgattccgctgaaagtaaaaggcgaagaagctcctaagggaggcttacagcgaaaaataaacgctaattccgctgaaagtaaaaggcgaagaagctcctaagggaggcttacagcgaaaagtcaacgctgatacaccgaaaagtaaacggtgaggccgaaaagtaaacggcaaaaagatttgaatcattctcaagaggatgaagggttttgattatggtttatgaatatgtgttccaatattcatttgcacgatacattacatcatgtcatttgcattgataaacattcatttagacatatatagaatcatcatcatcataccacacaaaaaaaagacagatgcttcggcaatgaggaaaaacttcgaagaaagaggaaattttcatgcttcgttgtgtacgaaaagaagggaaggtgtttttcgccttcggctcaaaagagaagtttcgtccacagcaaagcagattgcacacggataaaggagacaagatacattgcaaggtatgtacaaatttacataagttttttccacaattatattacaaaaatctctccagaattttttgcagaagtctattatagcaactattaagcttcagcctgtcatacttcagctttgtcatcctgcacatattaagaagcagaataagaaaggtgcaaatttccaggagaaggtaaaagtaacaaatataactttctcaccagtttaaggtggcttcaagcttcgtcaccagccatctttcgcccgccatttacccaaatttgggtcataaatctatttccgatgcttcgggctaagcttgggatatcaaccaaatctgctgctgacaagctgaagtttggcctattcacaatctttccgtgcgtacagccatccttcagaaaagcggtagttgtgcctcgagaagctaccagggcgcagaagtcagcatgcccaccaataacttcgtcaagagcatcaacctcgcattcaatatgttccaaggtgctgggcaggttttcggctgaaggtgaaaatttttcagaactggctccgatagagtgaaatacgtccttcagccgctgcacgcatcggctgccgaaatttaggcatttctcttggagatccttcaatgatttttgcaaatttgaatttttctcgacctcagtcttgagaattgcttcaagcttctccctttcttgctcatattttttctgactttttgagtaattcattctttaaactgtcattttcggcttggacctcagccaaggagccttccatagactgaataacaaagtctttcttttctagggcaccttcgtgttctttagatatgatttcaaggtcttgaatggtgaagtccttcttctttagaacagcttcgtaattttcaactttttcttctaaatccttgatgatagctttattcttctcttcttcaagatcttgttgcatttttagcactttacttaatagtatactctgccaaaacaaccttcgtcagaaaacgacataaaaataataataataataataaaacaataataatattttttaccttaaaattagcatagagcaggctaccggcgatatgttgtcgctggtacctgcaaaggtccgcttctatcttcggcaggccaacgctcttggagaaggtcctaacaactttggcttcggtgcgattccgaaggcatcttagcttcccttcgttgaccccaccaaatagcatagaccctggtttatatccgcaggatatggcatatttcttcagctcttctttttcagcacttgttaaatcttgtccaagtaaatcttgaaaattaaaattttcttcctccaaaatgtcttcaacctgctcttttcccttttcagtagccgtgttcaccgcagccacagcagcttcttcttcagccattttcagaagaatattgtcaataacttccagtgtggtttccaggtttgaatcttcggtggccccggcttcggctccggtagcttcggctccggtagtttcggcggcttcggctccggtagcttcggctccggcagttgcaatttcagtagtttcagccccggtagcttcggctgcggcggcttcggcttcggcagtctcggcaataacaatttttgacgccgataccgatggcggcgtctgatgaatcacatctgtcacttggataattctgcgttttttcggctttgcaggactttctgctgccgaagcttctttgtccttctgaaaaaacttcgtcagttctggtgccagcggacttagcttgacaggcaaagattcagtcattaccttcagaatttcttctacttgagtagcagaaggtgtcgcaggaacttcctcatctcggaccaaactctctgattctggagatacaggctttggagatgcagcttttctttttcttgaagcagctaccttcggttcaaacttttctttcttcttttttggttgatcttcgtcgtctttaatcaaaatgtctgctactcttttcctttttaacccttcggcacccttatcgagccacccataatcagaatattcaaagcctatagcatcaagcactatgtttagccttcgtttcggccgggtgccgaaggctgctgtcatcaactgatcctcttttttagaataattcccaagaatttcagtactcatcacttcgattgtttcaagccattcttggcagggtgctttaaaatatttcttgaacttatagtggtagggcagtcggacaagctccccctctttcttctctctttcaagctacggcataacccattccttcatagttggaaatattttgaaagccaaaaattcctgcactaaatctctaatgccaatgtgctctgcaataatcctgaatttagccaacgcgatttgggttggaccttctggtgtcatactgcattggggtctggtctctccgaagatcagttcaagcggactctgtaccagcttctccttgtcatcgtcagctttgacgtagaaccattctgatttccagcctgccggacacttgcttcggtagctgatcacatgaaattttgtagttttccgataggcaaaattgtaacaaccaaaattttcatgtaattcatcctttctggctttggtttggtaatgtaactcgtgcacccggcagaaaccttcggaaaatggttccaccccctggcttcggagagcccaaatataaacactaagcctaacaatagcgttaggagttagttgatgaagatagatcccaaacttctttagcacatcagcaatcatcctattcaaaggaaatctcaaaccagctttgaggaaactcttgaaaatcactatttcatctttctgtggcttcggggtagtctcttctccaccaaagcgaatcagctttttctcatcttcgctaaagtagcccgacttcaccatcttaggaaaatcagccttagagatggttgactttccgaagtccaggtggctagtgaaagtcgcctagagggggggtgaatagggcgaaactgaaattctcaaaaataatcacaactacaagccgggttagcgttagaaatataatagagtccgcgagagagggtgcaaaacaaatcgcaagcgaaatgaagtgagacacgcggatttgttttaccgaggttcggttctctcaaacctactccccgttgaggaggtcacaaaggccgggtctctttcaacccttaccctctctcaaacggtccctcggactgagtgagctttctcttctcaatcacttggaacacaaagttcccacaaggaccaccacaagtttggtgtctcttgcctcaattacaagtgagtttgatcgcaatgaaagaatcaagaaagaagaaagcaatccaagtgcaagagctcgaaagaacacaggcaaatctctctttctaatcactagggcgttgtgtggaatttggagaggattttatctctttggtgtgcctagaattgaatgctagagctcttgtaagtagttgggaagtggaaaacttggatgcaatgaatggtgggtggttgggggtatttatagccccaaccatcaaactagccgtttggtgaggttgtctgttcgatggcgcaccggacagtccggtgcacaccggacatgtccggtgcgacagccacgtcaccaaaagtcgttgggttcgaccgttggagctctgtcttctgggcccgcctggatgtccggtggcgcaccggacatgcactgtagattgtccggtgcgccagcatgggcgtgcctgacctctgcgcgcgcatttaatgcgtcgcaggtagccgttggcgccgaagtagtcgttgccccgcggtcacaccggacagtccggtgtacaccggacagtccggtttattatagcggagcagctgaaatgaatacccgaggctggcgagttcctgaggccgctcttccttggagcaccggacatgtccggtgtacaccggacagtccggtgaattatagcggagacgcctctggaatttcccgaaggtgatgagtttgaagtttgagtcctctggtgcaccggacatgtccggtggcgcaccggacagtccggtgcgccagaccagaggtgccttcggttgtcccttgctcctttgtttgaacccaatacttggtctttttattggctaagtgtgaacctttggcacctgtataacttatacactagagcaaactagttagtccaaacatttgtgttgggcaattcaaccaccaaaattaattagggactaggtgtaagcctaattccctttcagctaggcttgctcggtactgcgatactgtgatcaccttcagaatcagtctcttcaatatctgcttgttctggttcagtagcagggatgtcttccgatgtcatcaacccagatcgcttcattgcttccgagataggaacagtttacatagcttcggcttcgtctccttcgcgctcaactctagcagtagagcgcactctggccatttgattttgaatttcttgaaaatttcttggggattaataacctttcttctgaagctcttcttctgacgaagcagacaccaaactggagcttcgtttgaatgcgaaagttaagcttcggctatggttaaatttttggcagcagaacagtgcaatagcaatgaatgttgtggtaactgcacacctacctgtctgtttatatagtgctgaaggtaagaaggtgaatcgtcaggatttttacaccaggcaaacagttgttcgcacccgctgcatggtgggccgcaaaaaccaaaatagtgaacctgcatgatgggaccgctacgcgctcgaaaactgtatcgtttctcgacaacgagctcagggaaggtgtttttcggaccttcggcttcctgaagcctaagagacttttttcacggatcaagctcgttacgaaaaacgatctagcgccgcgaaggggctactgttgggaccatgcttcgtcgccgaaggtcctgcagaaagaaacagcttcggctgaagccgcccgtacgtgacgccgaaggcaccattcatgaagcttcggtattacagcatatccgaagatgaagggtcgaaccgacttaaagatagaatgaccttttagttcataagggtctgagtcattgttataaacttttatgaggggcatgattgtaattcctcacaggctgtgtcctgtgactataaatagtgaacagtattcctttactattcacgca

SEQ ID NO: 42782 - DNA, 275 bp, Zea Mays
gcggagaaggcggccgcgcgcagctcgggcggtagttacgcgaggacgacggggctgacaagccgggcccgcgagcagatagagaggggaaagcgggggcgggcgcgtggaaggcggccgcgctgacgggcgggcccgccagggcagagagagcgggggggagaggcgcgcgcgcgggggatgggcctagttgggccgaaaggctgagggggcgggggagtgggcttctttcctttttttcttttattctggaattgttttctcttttcttttta

SEQ ID NO: 42783 - DNA, 1442 bp, Zea Mays
ggaccgattttgctaaccctgagcccaacgcgacccaacctcttcgtctccgatagtccgactccacgaagcgaagccgctcaacatcctcttccgctgcgcctgcgcgcgcgggaggacgaaatacggcaagaagctactcgagaaaggccacgcacgatgatggcgtgtcggcggctggcgagggacgccgtcgcggcctcgctccggcggagcgccgccaccgagaccaccgcctccacgcccgccttcttctcctcttcctccgccgctgcgtcctcctgctcctccggcgcaccagtcgccggcagccccattcgccacttcctggcgcgctattcaagccccgctttccagatccagcctagcgctgcggggctcggcccttcgttcgccgcgagagtggcccttggtctccggccgcagttgtcaggcctcaatctgatcaaaggatttggaacaagcaccatgctagcgatgacgcttcatcagggacaggttactgctgccacaaaagagcaaccatcaaaagccatagctggaccaccccaggggtctttgaaaaccaagcttggttcattttggcctttggtcaggaaacttcagctgccagttggattgatttttctgattatgtctgggttacacagcccattaagtctcaccctaaatattttgcttctcctctactgctcaagtccaagccgctattcaatatatttgtttcttcaggagggaggtgggtcaaaaccatgctgtgtcgaaggaggagtacatgcgtacaagaaatattattactgaagattacaagtttttttcaattggaaccattgaattagtagatgggagggtgctgcatctcattggaatgctgggcagctggtggatctaccgtgtgtcattcaagtgcaaagagctggtgtagaatatattttagttctgaaggaagagcgagttaaccatgtggtgctgaatagcagatattttgaatcatttctaactgaagtaggtacttgaattggcttttcagtaggtgctgtattactgttttttgaaagcagtgatgtccaatgttttgctagagtattttgcaagaatataatggaagtatggagcccggtggccggtgctatttctcacagggcataaagcaattccatgtggaagatacatttcttgtcacatagcacatcgttgtcctgggtgtgttttctgtacaatcgccaatggattgcattatgtcccaaatgttgcttctctaggtttatcatctgtaaacaaggacatgattataatgaacactagtagctgccgcacgcacctgcgcgctgccgccatggtgctagattcatagtttatcatttgtattaggatatgtataagtataaaagtttaatttttgaataaattttagtctctatattcagagttcatgttctcta

SEQ ID NO: 42784 - DNA, 2372 bp, Zea Mays
gccccacaccgcttcactcgtttccttccgatccatacacaccgcgcacgtacgcgtactccatcgtcccgcgggttcacgtcacgacctcgggcgagacgagatggcgacgccgaacgggcttgctcggatcgagacgaacggggcgaccaagcccgacaacggcgtgtgccacgacgacagctcggcgccggtgcgcgcgcagaccatcgacgagctgcactcgctgcagcggaagcggtcggcgccaaccacgcccatcaaggacggcgccgcctcgaccttcgccgccgcgctctccgaggaggagcgccacaggcagcagctgcagtccatcagcgcgtcgttggcgtctctgacacgtgaaaccgggccgaaagtggtcaagggcgacccggcccggaggggcgaggcccccgcgacgggtgcaccgccgacgccgcaggcgcaccaccagcaccaccaccccgccgcccccaccatcgccgtcagcgacagctccctcaagttcacccatgtcctctacaacctctcgcctgctgagctgtacgagcaggccatcaagtacgagaaggggtcgttcatcacgtccaccggcgcgctggcgacgctgtccggcgccaagaccgggcggtcgcccagggacaagcgcgtcgtcaaggacgaggtcgcggcgcgggacctgtggtggggcaagggctcgcccaacatcgagatggacgagcacacgttcctgaccaacagggagagggccgtggactacctcaactccctggacaaggtgttcgtgaacgaccagtttctcaactgggaccccgagaaccggatcaaggtccgcatcatctccgccagggcgtaccactccctcttcatgcacaacatgtgcatccggcccacggacgaggagctggagagcttcggcacgccggacttcaccatctacaacgccggccagttcccctgtaaccgctacacgcactacatgacgtcgtccaccagcgtagacatcaacctcgccaggagggagatggtgatcctgggcacgcagtacgccggcgagatgaagaaggggctgttcggcgtcatgcactacctcatgcccaagcgcggcatcctctcgctgcactccggctgcaatatgggcaaggacggcgacgtcgccctcttctttggcctctcaggtaccgggaagacgacgctgtcgacggatcacaacaggcttctgatcggcgacgacgagcactgctggagcgagaatggcgtgtccaacatcgagggcggctgctatgccaagtgcatagacctatcgcaggagaaagagcctgatatctggaacgccatcaagttcggagccgtgctggagaacgttgtcttcgatgagcatactcgtgaagttgactacaccgacaaatctgtcaccgagaacactcgggctgcctacccgatcgagtacatccccaacgccaagataccatgcgtcggtccacaccccaagaacgtgatcctgctggcgtgcgacgccttcggcgtgctcccgccggtgagcaagctggacctggcgcagaccatgtaccacttcatcagcggatacaccgccctggtcgccggcacggaggacggcatcaaggagccacaggccaccttctccgcctgcttcggcgcggccttcatcatgctccacccgaccaagtacgccgccatgctcgccgagaagatgcagaagtacggcgccacagggtggctcgtcaacaccggctggtctggcggcaggtacggtgtgggcaagaggatccggcttccctacaccaggaagatcatcgacgccatccactccggcgagcttctcaccgccaactaccagaagaccgaggtctttggcctggagatcccgactgagatcaagggcgtgccgtcggaaatcctcgacccaatcaacacctggacggacaaggccgcgtacaaggagacgctcctgaggcttgccgggctcttcaagaagaacttcgaggtgttcgccagctacaagatcggggacgacagcaacctgaccgacgagatcctcgccgcaggccccaacttctgaactaaagcagtgggtccggatgaataaaacggtggtatgcgtgtgaagaagaagatgatgacgacgaaaatagtgtgttggatcgatgggccagcacagtgtagactagcttttgtatattatctcgggttggaaatctggtgttgttacctaaaatgttggtctgttctatcggcttgttgaaaacagtttgcgcgtgcttgcatcttggcccccctgtattctctgtggtttcagaatttgaacacgaaacagcttggtctcgggatcatgttggtttcatatgtca

SEQ ID NO: 42785 - DNA, 2178 bp, Zea Mays
atgctctaattttactagcattttttatcaactaactattagctccaaacaccccctaattttagtagcaagagcaaggaaaacccccagccatcttcatctgcctgctggtgccggactgacggttagagatggcccacccctccgccgccgccgccgccgtatcctccacggcgcccgctgcaaaccctagttctggcgcccgcgaggaaggaggcgcccgctctccgccgtcgccgtctccgtctcagagggggcgggccaaggtggtgatcgttatgggcgccacgggcgccggcaagtcgcggctggccgtcgacctcgcggcccacttcgccggcgtcgaagtggtcagcgccgactccatgcagctctaccgcggcctcgacgtcctcaccaacaaggctcccctccacgagcagaacggtgttcctcatcatctacttagcgtgattgatccctctgtcgagttcacttgccgtgatttccgcgaccgtgccgtgccgattatacaggaaatagtggaccgcggtggcctccctgtggttgtcggcggcacaaacttctacatccaggctctcgttagcccattcctcttggatgatatggcagaagaaatgcagggctgtactctgagagatcacatagatgatggtataggtcttactgatgaagatgaaggcaatgggtttgaacgcttgaaggagatcgatcctgtggctgcgcagaggatccatccaaacgaccatagaaaaatcaaacgctacctcgagttgtatgcaaccacgggtgccctacccagcgatctgttccaaggagaggccgctaagaaatggggtcggcctagtaactccagactcgactgctgtttcctgtgggtagatgctgatcttcaagtcctggacagttatgtcaacaaaagggtcgattgcatgatggatggtggcctgctggacgaagtatgcagcatatatgatgcggatgctgtctatacccaggggctgcggcaggctattggggttcgtgagtttgacgagtttttcagagcatatttacccagaaaagaatctggtgagggttcctgtgcaagcctgttaggtatgcatgacgatcagcttaagagcttgttggacgaagctgtttcccagctgaaggcaaacactcgtagactagttcgacgtcaaagacggagattgcatcggctgagtaaagattttgggtggaacttgcatcgtgttgacgcaaccgaagcattcttctgtgccactgacgactcatggcaaaagaaagttgtcaaaccatgtgtggatgtcgtaagaaggtttttgtcggacaattccactgttttgccaagcacaagcgcaagtgacccctcttcaagagagctgtggacgcaatatgtgtgcgaggcctgcggcaaccgggtgctgcgaggtgcgcacgagtgggagcagcacaggcaagggcgaggccaccggaagcgagtgcagcgcctgaagcagaagagcctgaggccatggccatcgctgctgccccaagaccgcagctgatggtaactttttcacagcagaaccggcgagaagtgggacggggacgttgacgtggacatggtcgtctcgtcccacccaaaaaagcgtgccagcctgacagcgacatgctttcccaatcccgaattcctggcacgtcgacggggggactacctccatgccttttagcagcggaagaagcaggcaccaaagaactgcttatcaaaagtattgtaccacacgtacgacgggtctagaagccacagaaacgtagtgtggaagtggatagatacttgaacaatggtccatctttctatactgctaaagtttagcatatgctaaggaggtgtttaagattgctaaaatctctattttcaaaaccgaagtattgcaaatactgtagttattttaagctattctaaacttaggtctggaccttagtttgcaaaactgtattgaccacagtttgtaaaactgtattatttcaaactgtggtattgtaattactaaagtaaaaactgtattatttcaaactgtggtattgtaatgactaaagtatattatagtattttaaaaactgtggtttctaaaatgggcttaaactttggttaaactttagaacttgagacatgtttgatgcaagtgtttaaca

SEQ ID NO: 42786 - DNA, 1680 bp, Zea Mays
atggggcggaagtggaacgagctgtcgtcggctccatggaggatgggggaggcggcagaggacgaggacgcgacaaggatgagccgagaggggaaggtcagcatcaccagcaaccccgaggagatgcccaccatgagcgtgccccggagcagacgcccggacctcgacctcaccatcgatgacttcgaggaggacgagatcgaccccgagctgcgctactccttccagcggaacaacaggtttctgaagagagtttttagcgtggacgcacttgtcaagcctctccctcctgtaatggcatacagtgtatcccgcaatataaacttcttcttccggatcttcacacagttctgggtaaacaatggtctcaagccagtattccatgtatcccgcctctcatgggtgatcatggacttttatctggatttggcagaagacaacagaaaaattactccacgagattacctagagctagcattgaggcctgttcaaggtggaggaagggacatatctgcaaagaatgtgatacgggactccatccgtgcactttttccggacagggaatgttttacacttgtgcaacctttgaacaatgagaaagatctccaacgtcttgatcaacttcctgttagattaaaacttttcctaagttcatttacgcaaatagcaaagtatattatgattgcttatagcaatgtggcttctgtttttttggcttacagtgctttaaatgtttttgctgttggtgctgggtcagctcgttcaaaatttgaaaagcttcttcacagttctctcaaaaaggcctttgaggactacaaaaggaatgcttttctggaggctgacttgcaatgttctaataaagttcagaacatggaatcaaaggtgcgagcagcatgtaacagttcgaatgcaaaattagatgacatagtcaggagtatgagtcaacggcctatggtcctggaaaatggaaaaggctagccacattcttacagcagtgtttggctggccctgttctagaccttttcagaagacagttagagcatatagatgctgaaaggaacgccctgagattgaaatgcaattcaagagatgtggaactatctgagaagcctccccatatgatatcatgccacgtggacaagtttcataattttctgagtttgtttgtgttttataaaatttttaaacggctggatggcaagttcacggccatgttgagtgagcatggtgctcgaagtttccggtacgctcctgaaatcggtcgtaacttgtgctaaatagcatggatatgatttttgcatgcacgattttctaagtttcgagtgacttgcagttcaaatgtgattttttcgaagaaattcaaataaacgaactaaatctactagctatagaaaacacttttctaattgtcccaaaatggtacaagtaggtctatatagtgtaggaacacaccacaaaaagtttggttgggaaaataaaaaaataaaaatgtaatttgccgagtgtccagaaatgacacttggcaaagtagcctttgtcgagtgtcagctagttgacactcggcaaagaaaagtaaaataatctttgccgagtgtagcccaggggacactcggcaaagacgcctttgccgagtgccagatcgggggcactcggcaagtgtattttaaaattaaaaaaaaa

SEQ ID NO: 42787 - DNA, 4301 bp, Zea Mays
cagcgagcaagctgaaggtgaaagccacagcagctcgtccccttccccccacttcttcctcagataaggagaggccccaggccagagaaaaaagcatcgaatttccccccgttaattggcctgagccctcagccgtctaccagcagcagctagaggcagacaagctaggttttactgcttcattgagcacaaagatccgctgacctcttgctcttgatatgccaccaagagtacaaccagccaacatgtatattccttggtgttcaagctggattgtctttgttgacgtcagagctgactatgatttttggcatagcactcggattcaacctcctgtttgaatatgatgatctcatcacagggatatgctttgcaacagtggtacctaatctgctaccatatgctatatcccacctgggaaagaagatggaagggacaataaatgcctgcatagcaggatttgcacttcttagttatgtgcttggcttattggttagccagccacaaattcctctcacgatgaatgtaatattccccaagatcagtggtgagagtgcttactctctgatggcgcttcttggtgcaaacataatggcacacaacttctacattcattcatcagttgtccagggtcagaaaaagtcatctgcagttggtcttggagccttatttcacgaccaccttttttcaatattgttcatttttactggaatctttatggtgaactatgttctaatgaactctgcagcagcggaatctactaatactcttctcattaccttccaagatgttgtagagctaatgaatcagatatttgtaaaccctctggcaccaactatatttttagtggttcttctcttctccagccacatcatctcgctgacatctgctatcggtagccaagtgatttcacaccatttattcggtataaaccttcctctttctggacatcgtctcctactgaaggtttttgccatagttcctactctgtactgggcgaaagttgcaggagctgaagggatataccaattattaattatatgccagattattcaagccatgcttcttccatcttcagtcgtcccactttttcgtgttgcttcatcaagatcaataatgggagcccatagagtgtctttgcatctggagatactggtttttcttgcatttctccttatgctattttcaaatatcatatttgtggcagaaatgctatttggcgacagtgggtggatgaacaatctgaaaggatatactggaagccctgtggtgctcccatataccgttttagttttagttgcacttatatctgtggctttttcactgtacctggctgttacaccattgagatctggaagtcatgaagctgaatcccatgaatggtctgtgcattctcagagagaactcttgaatacttctcaagaaagggaagatgttaaggtggacaatgttacatatgaggaagatcaaagatcagatgttgtcccttctcccagggatgtgcctgacagccatccggaactggccttggactatattgatacttctgacactgctgtagaatctgatcacgactctcaacaatctactgcttatgcatccactgctcctgaaacctgctcctccccgtcgtttactcgcgaggagtcaaaatcagttgttgcagtcaactggccggagcctttggagaaggttcctacttctactgtgatggaggaaagcacagtagaaaatgtggtctctaggatcacgactgaaagagatgttttagtagaaacagatgttgtctcgggcaaggataaggaagatatccgtactttggagtctgagaagtcaattgttgatagcaccccatatgtgtctgatgacggtccgccatcccttactttcagcaggggaaagggctcagatgcaggaaatggcagtggtagtctctcaaggttatctggtttgggccgtgcagcaaggagacagctagctgctactcttgatgagttctgggggcatctgtttgattaccatggtaagctcactcaagaagctagcaccaaaaagtttggtatcttgcttgggatagaccttagaacacctagcacatctgtaagaacggataaacaagctgctgaaatacttaagagcccactggtgagagactcaatgcggggggcagcttttttgtcaagctcagtggacatgatgtcccctaagaatgaaacgtcgaatttggaacttgcatatgggcttcagaggggacctggcatgggattgtcaagctggtctcagggtatgcagctaccaaatacacagctgcagagctcaagcaatagcctacttgagcagagtgcaagattaaactcaaattttagttcatcttattcagacaacaatcagttctaccaacctgcaacaattcatggataccagctcacatcttacctgaaacagatgaatgccagcccaagcctttactctagcatgccgctggacccacaacggcttccaaaatcatctgtgtctgctgtgccaaactatgctgattccatgatgcatgctcgtaatcataacctgcttgcttcactgggtggtactactacacagcttcctgcaacatcccgcgtaggctcaatgatgcctgaaagatcgtattatgatccttccagcgttgatgggaatgaaaacgctggttcacctgcttactcaaaaaagtaccacagctcacctgatatgtctggaataatcgctgcaagtagagctgcactcttgaatgaagcaaagttgggtgctgccattggaccacagtcatacctcagcaggctggcggcagaaagatctcaatatgcaagctcaacagccaggcccgcggctccattagcatttgacgagctttcacctcctaagctccagagtgatatcttctcggcgcagtcaagcatgagaccaagtgctagatccctttgggctaagcaaccatttgagcaattgttcggcatgtcaagtgcagagctcagtaaaggtgacttcaatcttccaggcagatcaggtggcgtggccaaggatgatttctcttataaggaatctgagacgaagcttcttcagtccctcaggctctgcatcatgaagctccttaagctagagggatcagggtggctgttcaagcaaaatggtggttgtgatgaagatctaatcgaccgagtcgctgcagccgagaagctattgatgcaagggactgccgagaatcaactgctgcttcatggtggtgatctccagcaacattcttccgaccaggccggcatccagtacatgcgcacgcttcccaactgcggggaggactgtgtttggcgcgcgtcactcgtcgttagtttcggtgtctggtgtgtccgccgagtgctggacatgtctctggtggaaagcaggccagaactttggggcaagtatacctatgtccttaaccgtcttcaggggatcttggaccctgcgttctccaagcctcggggtgctctgacaatatgcacctgccttcagaaagacaccagagtgcgcaatagcccaccccacagtgggctaacagccatgggcccggtccccacaccgatccggggcgccttcacgaccgcaggcgtggttctggagatgatcaaggacgtggaggctgcggtctcaggccgcaagggcaggagcggcacggcggcgggcgacgtcgccttccccaaggggaaggagaacctggcctccgtgctgaagcggtacaagcggcggctcgccagcaagggccagtagcgcgcgggtgtcagacaggcaggcgatcgcaagcaatgttaggaggagcctgactattgttctccaggggggctgccactggcgccggcctccctgagccctggattttttcgttgcacgacgttcctagggaccggtggttgcccgatggtcgtcttggtcccttccagcaggttttttttttccttccctctttctgttggtttctttttgttggctttgtgatgttttgtaaggggcaactagggtatgtgctcagaaggactcaagatgtacacgcgaagatgtactagtctgctgatgcagcgttgtaaagtccacactctgcaggttaaccctttttggggccgtcaagtgttagtgcgtgccctatgtatgttaatcacccctgcagagaggttgcgaatactgaactactcacagacctgcacctgtcgagatcgtttgtaatatccgacgtcttgttcagaattgttctcactcttttttgcccgttgtgtaatttaccctgaagggacttcaag

SEQ ID NO: 42788 - DNA, 261 bp, Zea Mays
tttaaatttgtgctattcctgtttatatgcattcatgtgcattatgcaaataatttaggtacgcttattaatcacgagatgtggaggataagagccgagttgaccccaagatgacgtaacgggtggactactccgcatagtgaagcagatggacgaatctgaagatgggcagactgaacaagtgccaacacaaaaggctgatcgccaagtggtcgtcacctaacaaacactaacctagtgtttattccaggcaagccccgg

SEQ ID NO: 42789 - DNA, 4387 bp, Zea Mays
gaggcgcccgcacgcaaaatccaaacccaaaccctcggcgaggacgccaccgtggcgaccgcggtggatgcagcgggtctggtgcccgccgacctggagcggcgggtgatggcggcggtgaaggcgtcggaggcgcgcggggacccgccgcttctgcaggtggtggagctatcccgcatcgtcgccgtggagggcgcggggaccctctccagcgccgaccttgccaggatcctcgtctccaacctatgcttcgcgcacaactcgccctcgctctggaagctcctgggccaggccgtcgtgtcccgcctcctctgcccgctccacgttctcgcactcctcacccctagggtgctgccgcagcggcgagcgcagcctgaggcgtaccgcctgtacctggaactcctcaagtgtcatgtcacgtcgtccttactgtcgatggaggctgggcctaatcgtgacaagatagggaagtccattgctgaagctttgcaactatcaaaggtttatggattttctggaacagagtttggacatgttgtcattatgtttgtgttggctgttgtcagtaaactgattgatagtatatttgaggattgtggctttccatctgcgatggtagaggggcaagagagtgtcaatgccatcgatgggccacagcctatggacttagacgttaaaatgggatctactgagaaccaaaatgagcatcgcgaacagttacgtcggaagaacactctcatcgctttggacgtgttgcatatgatgactgctgatagaaagattcaatcatttctgcgcttgatattcctgaacatgcctgaaaggttcagttctctacgccagaggttgagttctattgaagcacagaaggtgtccttggagactctactgccttctggacacaaaattaatgaattgttaataaatttctggagagtttgcaaaacagactatcaaccgaataacaaacacattcttggtgttcttggtaatatgggatctggtggatcccttctgggccaacttactggagctgggaggcctgcctgctggataatatttgatatatatgtggagaatgcaattgatgggaggcatctaagtgttatatcagctatccgaattataaaagaaatgaccaagacaatgcaagtgcttaacgaagcaagctggcaggaaacatttaaagctctttggatttctgcccttcgtcttgtacaacgggctagagaacctcttgaaggaccaattcctcatctagatgcaaggttatgcatgttgttagctcttataccattatcagttgctgcgattcttcaagaagaaagcgatatgcttggagctgaaggaaacaaaattcttccacaaagacaagggcttatatcgtctctccaggatctgatccagtattcaggacttcttgtgccaccttcatcagtggtgaatgcagctaatgctgcagcctcaaaagcggcaatatttaaggccaactatgaggctggggttggcaactctagcatgatggaccagactgactcttcaatgaaagctgctgggaacatgctccatcttattattgaagcctgtatctcgagaaagttgatcgatacatctgcttatttatggcctggttatgttgtaccatctgggactttaaaagatacagctttgccccaagaatccccttggttaaactttatgaaagggtctcgactttcaggaccccttattgatgctctggtcgcatctcctgcttcaagtgttgcggaattggacaaattatacagtatagcattaaatggttcagaagaagaaaaaacagctgctgcaaagattctttgtggtgcatcacttgttcgtggctggaacattcaggaacatgtggtcggtatggtggtcaagctattatcagcttctttaccctcagattctgcaacttcaactcctgggagcatgagcaactaccttgctcatatgtctacattaaacgaaatcttactcggttccagatgttgctgtggcgttaatgccaatatgtgaggcttttgggtcaataccaccgccacctaatcacaagtctaccattcttggtgaaatatctgtttatacagtcttctcttgtgcattcctttgtcttcttcgtttgtggaagttttatagacctcctcaagagtattgtcttgctggtcgtggaggctcagtaaagctggaactgactctggactatctgttgttgatgcacaataatcacattgagttctcaaattcatctgcctctaatagggattcttgcaatgatatgggctcagtaaatgaggttcctgctcagctgatttatattgattcttttcccaagctaagggcttggtatttccagaatcaagcttgcattgcttctccactttctggtctttgcaacaaaaaccctgttcatcaagttgcgaacaaaattttgaatatgatttgccgaaaaatgaataaaggtgtggtatcgtcaagtactctttcatccacttctagtagtagtgtcagtggttcctctgtaagtgcatcagatgatccttgccaaaggcctgctgtttctggttgggaatttttagaagctgttccttttgttcttgaagctgttctgacagcatgtgctcatgggcagctttccagccgagacttgactacaagcttaagggatcttgtggactttttgcctgcttctcttgctgcaattgtgagctacttctcagcagaaattacacgaggaatctggaaacctgtcccaatgaatggaattgaatggcctagtcccggtgcttctcttcattccattgaagctgaagtaaaggaaattcttgcctctgctggtgttcagattaacagctgctatccacgtggtgtgccaccaatgcttcctttacctatggctgcacttgtcagcttgacgattacatttaagctagataggagtttggagtacattcaaggggtcattggacaggcgctagagaactgtgcaggggggagttcctggccaagcatgcccattattggggcattgtggacacagaaagtgcgaagatggcatgacttcatcgtcctctcttgtatgcgttctccattcggcagagacaaagatgcagttgcgcagctcatccaaagttgcttctcgtcctttctgcagtcttcatccagtggttctgatataattgcaaaccgtggagttggggctttactaggggactcaatcacgaatcaaggtcttaggctcccaatggcacctggtttcatctacttgagaacatgtcgaactttccatgacacttactttgttagtgaagtgatccttaagcaagtgattgagtgggctcacaaacttgcaaacggatggtgtttcaatggtcctccgcagttgaaatcagggcggacaccactatcttgtgcagcatccatggtgcagcaggtcgcgttgcttggtggaggtctcctatgcatagcaggtggaccacttgtggtccaggtgttgtatgaggaaacactgccaacactgctgctatcagccagagatcagagtttgaaaggccctgggccagtttctagcacactccaaggttacgccatggccaacatgctcttctactgtggtagcctgctttggggagcggataggacttctcctgtcatgaaattgtccttcctctcgaggcggccacgggtggtgagaacccacatggatttcatagctggtgtgttggacggacacattcttctgggctgtgacccgggtacgtggaaagcgtatgtgtcgcaatttatgttcctggtggtgaaatttgttccgtcatggttgcgggacataaagctggacacgctaaagaagatagcagctggacttcggagctggcacgaacacgaccttgctctgtctcttcttgaacgaggaggaccacaagcaatctctgttgtagtcgagacctttctgtaatccttccgtttggacattttgcccccacctgacatagcagccgccgttaagggtttgtagttggtgatctgaggtctagctgaagtaatccggatgacccttttgatccagaattacacttgtgctacccgggtaactgatgtttatctcatgtatggcgagctcatcggggttttcgtgaatccaatacggaagaacatgcaacctactagggtgtacttcagccctaacatgtataacatgtgggaagttcatgcaacctactagagtgaactttctgtatattttgttgcaatgcatcgtgtttcctatctgcggtaaaaggagagaaaataattcccgcgtttttgtccgtcaacttgttaaccgcactttgctcttctgggttcgcatctcactcttatcgtccac

SEQ ID NO: 42790 - DNA, 1581 bp, Zea Mays
atgacctatagtccttagggacagattatcaattgtaattttcaagactgcttcagctcatagttgggcatgcatggatctctacgtttttgcaacaccatataggataacatgggactattattttgctgctcgggagcacactttggagattaaatcatgggaggaagaagcggaattgaaatatgtgaaggagcatggcatttctatttttctcatgccatctggaatgctcggaactttgctatctttgattgatgtcctgcctttgttttcaaacactgcctggggccaacattccaacctagcctttttagagaagcatatgggagcctcatttgagaaacgaacccaaccttgggttgctaacattagaaaggaggatatacaatctggtgactttttggctttatcaaagattcgaggacgatggggtgggtttgagacattagagaaatgggtgactggtgcatttgctgggcatacctcggtttgcttaaaagacgagaagggtgatctttgggttgcagagtcaggctatgaaaacgagaagggagaagaaatcattgctatagttccttgggatgaatggtgggccatggctctcaaggatgaatcaaatcctcagatagccctgcttcctttgcaccctgatgtgcgtgccagattcaacgaaagtgctgcatgggaatatgcccggagcatggttggaaatccttatggctaccataacatgatatttagctggatcgatacaataggagataattatccacctcctcttgatgctaacctggatttcgaccttcaggggatcattatggagattgaaagacgtggaatgtcttttgatcagttgctcaccatacccgagcaagacgaatgggtgtacagtgatggtaaatcaactacttgtgtcgccttcattcttgcaatgtacaaggaggctggaatattcacccctttctcggagtcgatccaggtcaccgagttcactattcgtgacgcatacatgctcaagatatttgaagacaacccggcaaggcttccaggttggtgcaacgcaggcacggacaagcttcccttttgccagattctcggagagtacagaatggagctaccagagtacaacacgattgaaccttatgcgaaaatgaacgagaactgtccgtccttgcccccaacgtacaaacgacccgcacgctgctgactacgagattgtctactatgtatctttctgcagctgctgcctttacacagtggcattagagtgttgttgctatgttctgtaaataaaagacactatatatataggtgcttggtagatggtagttcttaccagtaatgtagctgcgatgtattcaggttcacggttttcagtcgatcagttctgaagccacggcgtcggcgaccaatatgaaggttaggatttgtcagctccggaaagttgcttatatgtatcaatgtatgtatgtaggcaacattatggcttggtcataaattgtgaactccgtcaagaaataaatctataatgcaacgtcaggtgattctgatatgtgattaagaaaataaaaaaacaaa

SEQ ID NO: 42791 - DNA, 2963 bp, Zea Mays
gtgatttttaggtaacccatgcccgcgtccgagaccgagagacaaggccaaaatcatcgctgcgccgccagtggacgcgttcgactccggccgccgcccctgctcctcctgcccacccgcaccggccattgccctcgcctgctctgccacccgcaccttccaccgcccccgcgtgctcctccgcaggtctggccgttgcacccacctgctccccaccaccgccgccccacccacttatccaccgttgccggtcgtcgccccacctgctcccccactgacaccggtcgagtttctagaaccttccagacctccagttcccgacctcggcgccatggacctggacccagaggggatcttccgcgacgacagcgatgaagacgaagacagtgtccaggagagggaggcgaacaaggagatggttgtctaccttgtcgacgcctcgcccaaaatgttcacccctgccaccacccaggacaatgaaaagcaggagacacatttccataccattgttaactgcatcacagagtctctgaagacacaaattattggtagatcttatgatgaagtcgcaatatgtttctttaacactaaagagaagaagaatttacaggactcagccggtgtttatgtttataatgtcggagacagagagcaacttgatagacctactgcaaaactcatcaaggatttttctttgatagaagattcttttatgagcaccattggaagtcgatatggaataacagctggatctcgggagaataccctgtataatgctctttgggttgctcaggcgctgttgcgcaagggatctgtgaagaccgtgagtaaacgaattcttatattcaccaatgaagatgatccttttggtactattacaggagcagtgaaaactgatatgattaggacaacacttcaacgtgcaaaggatgcacaagatcttggcctgtctattgaacttcttccactgagcccgcctgatgaccagttcaacatgtccctgttttatgcagatttgattggtctggatggagatgagatgaccgaatatttgccatctgctggtgataagctagaggatatgactaatcaactgagaaaacggataatgaagaagcgcagaatcaaaactctttcatttgcgattaccaatgatgtgtgcatagaagtcaatacatatgcgctggtccgtcctactactacagggacaatcacatggcttgattcactaagtaacctcccattaaaggttgagaggtctttcatatgcaatgatactggggctctacttcaggatgcacagacacgtttccagatgtacaatgacacaattgtcaaattttctgtacgtgaactctctgaggttaaaagggttgcaagccatcatcttcgccttataggtttcaagccattggattgcttgaaagattaccataacttaagaccatcgacatttatttatccgagtgatgagcgtatatttggaagcacctgtgttttcgttgctttacatagctcaatgttacgtcttggaaggtttgcacttgcattttatgggaatccaactcgaccacaactcatagcccttgttgctcaagaagaggttacttcgtctggtcgtcagtttgaaccgcctggcatgcacatgatctatcttccatactccgatgatattagatatcctgaagaagttcatgtgacttctgatgatgcaccgcgtgcaacagatgaacaaatcaagaaagcttcgaacatattcaaacgtattgatctgataaatttctctgcatgccaatttgctaacccagaaatttacctacagagtcagggtcaactgccaggggtagccaatgctattgaggaattcaagacttcagtctatggtgaaaattatgaccaagaggaggcagaagcggcagcagggaaagcttcccgtggtaatgcttcaaaaaagcggaaggaggtcactgatgcagctgcgcagataagtgctgcttatgattgggcagaacttgcagacaatggaaaactgaaggaaatgaccacggtggaattgagatcctacctgaccgcgcatgatctcccggtttctggtaagaaagatgtacttatcagcaggatcttgactcacctgggttttatgctcagggtactgttgcatgctgcgaaatggctttggcttcaaatgagcttggagacaggagaagctgatgaagtcatgtgttgggcaatccttgtcatctatagggtgacttcctgggctttaggtactcgctttcgcttccaaccagcgcgtcctcagccagcgctggaggccgcccagccgcgcctgcgaccgcagaccgcgcgtcctcactcagccagcgctggagatctcctgtccgcccagccgcgcctgcgacagtgcgaccgccctcctgcccccagcactgcaagatgatactgctccagtccccatcgaggttcctgctccagatcctgcaagaccgtgttctcagtggcgagaagggcatggacattgactgtcacacggtagagttcgatgatgtccggtatcatatccaggtaagtaagttctatactgtcgcatagatttgtgtcaaaaggatggtatatgtataccaccatggcggcaatggcttgacacattttggcatcaatcctaatcagtgtcatattcttggggtagctaacttttggaagttggttttggtacaaattaaacagttgatcctaaggtggctatccactcgatggttaggtccaaaaatatatatacagtttgcagttttaatcctgcataatataactcaatatataacgatagtcagtactcagtagttaattgggtctattcttcccagtttggtatgtgccatttgatagcatgtcccttttaaccccaaattacctctttgttcacaagaacagtaacaagagcaatgaataaaatgctgtcagcc

SEQ ID NO: 42792 - DNA, 1066 bp, Zea Mays
tctcaatgtttcattcattaaacttcgcgagaacatgggaggagcagtagagcagcacaggacgtagatgtacggtagccggccggcgcccatggattcaagctcacagcccgccgcaattgatggatcgagagggagcggaggaggagagagaaacaaaagggaggaggaggacgacgacgaggcggcggcggaggccggcaacggcagacagctggtgatgcccgaggacgggtacgagtggaagaagtacggccagaagttcatcaagaacatccagaaaatgaggagctacttccggtgccggcacaggctgtgcggcgccaagaagaaggtggagtggcacccgcgcgaccccggcggcgacctccgcatcgtctacgacggcgcgcaccagcacgggcccccgccgctggcggctcctcccggcggccacggccagatgcagggcggcggcgcctccgactccaacagatacgagctgtgcacccagtacttcggcggggcccggtcgcgctgacgacctggcgggccagctagctagcgtcgggggtggcatggcagctgacaagaaaggccggccggcgggcggcggcgtggcgtcccgtcgcgtcacgctcacgcccgcatcacctcctgcccctgctggctgctggcctgctgcagcaccgatcgctttcgctgcgcaccggagggcagcggcagcggcagcggctggctggtgctgccggtggcggttgacttgacgccttgcgccggcgcaaccgacgtgatgttgagtgcggattaattggtgctgcaccggtcaacgctgtggtctactactagtgtactacactattacgacgacggtgcgtacaaaaaattaaagctagctttatcagtggaataagcctaatctgtttagtcagatttaacatccaaccatttgcagattgaaaagcaccagtgagtaccgaggcactccttccagaattatataattcagcttatagatataagcatctaatgacctgcttataaattatcataatctagatatctagattatattatttgtttgtca

SEQ ID NO: 42793 - DNA, 1255 bp, Zea Mays
gcttctctcgcattcggcctccccttcccaccctcaacagcgaagagcacacatggataccgccgtcttctcccccgccgatctcttccacggagtcgacgacagcgacgacgaccgagatgagatgcaaatctgctccgatggggagaagccggtggcgttggagtatcaggagagagtccacgacttccctgacatggttgagccattacgcagtgaaagctgctgacttgtgaccacaaggtcctgtgtctgagttgtggaagcctcttgcaaatgcagggaaaggccgtgtactatagacctaatagaaactgagtgtaagggagttctcatgtcatgagcttaacgccaacctgttgtggccggggacattttcatttgctacttggctggttaagaaccggtcaattttggatggacgacgagtcctggaattaggaaggagcgcttgcgatctttcttaggaaggcatttgaggtgaacattacaacctctgattatgatgacggcgaaattgaaaagaatatatcttacaattgcagagcgaatgccttagatgtgttacctcatattagacacacgtggggagatccatttccagtttgcacaccaaattgggacattgtcattgcaagtgatatcctactctatgtcaaacagtatgacaacttggtcaagacagtgtcctttcttttgaatgagtacaagcagaaggatcacaaatctggctgcataaccatcactgacaaatcaggtactttctaaaccaatttgatcttgtaaatcattagaggatgctgtgcgaaatgtttctttttcacttggcagggacacaaatatctgcaaaaccaccggtgtttctaatgagctggcgcagaagaatcggcaagggtcatcaatcactcttcttcgacgggtgtgagaagacgggcctgcaagtgcagcacctgggtgatcttgtgtaccttattagcaataaacaagaggcggattttgtggaaacgaagtcagacggtggcagtagtgaggggatgattttttgagtaggttttgttaagtcatattttgttcaatttcccccaaacacttgattttttgtttctctgattctatttgggatattctgtttgattctgttgcaagattgtttatgcactgaggtggtttataatggcttaagcatgcagcccagcgaggtgatctatgcaggcttaagcgtgctgctctcagtatctgcttttggctttctgca

SEQ ID NO: 42794 - DNA, 532 bp, Zea Mays
tttgaggctgcgtcggtggctcgaattgattaaagattatgatttgtctattcattatcacccgaggaaggcaaatgtggaggctgatgcccttagcaggtctggggtttcaaaagtggccttgcagttgattgctaatctggaccgtttggggatcgctttgtgctatgtcggcactgctagtgaggagactcatatgcttattcaatcttccctcatggagagagtgcgtgcggctcagcagcaggattgtttattgcaggaagctcgattgagggttgacgtttctaagtacgtggccgcctgtgaagtatgtcagcgcgtgaaggccgagcataagaggcctgcaggtttactgaagccattggagattccagagtggaagtgggagcatatcaccatggattttgtggtgggcttacctcgttctcctcggggcagggatgctatttgggtggtagtggatcgcttgactaagtctgcgcactttattcccatgaagaccaccaattcagcttcagaattggtcccc

SEQ ID NO: 42795 - DNA, 1133 bp, Zea Mays
ctcatcccgccaggcgctccctccccttgtttagcgtgtgtagagcaacgctacatgctgtgcacagtaacccgccagaagggtaacactagtcactcctcttgcgtggttttatatacacgggagtatttattagatagagaaaaattgatagtagataaaaaataggtataggaaatgatattcttatggttgtagtggggtataggaagagaatatagggaaccgttgcggaagatgaaaaggtagaggatggaatattgatgatgtgacacaaaaaatagtatagaaggaaaaatttagagaaaactgttgcggatagcccaaaactgctacattggtagcgtgtgatacaaggattcaccagatctggggagcgagccggctccctaccctcgagcaacgtacgcagcactgtttttacgagaaaaaatattaatgatagtgatgtataagtagataaaataatattttatgatagtagtgaaatataggaagagaatttagagaaaatcactgtagggacaagaaaagtaagagatagactagctgcataatgcggtagcgcctagcggtttcaacggttccccgttcgtctctcctccctctcgttttaaggctaatagaaccactctaaacgctacaacggtagcatctatcgtccctcatttcgacgacaaccttcacgctacctctccccatggttgacagtgatgtctgtcccgccagcctgtcgtcagtccccgcagcttcgaccgccgtcggacttcgtccggagtggatccagcgccggcgaactgtggcaaacggtgtatccggcggcgctggactgacatgaagaggctgctcggttggcgcatggtgtgctgcacgaccccgccaatggaatctccgagctcggtttccatggatttacacctaaatcacaaaaaaaccacttttcctttgctctgtttgtggatctaaacttacttttttaatttaaggaggttttatctacacatgttcgagttatatgtactaatgtacgttcttgtgtaattcaaatttggttagttgaaaaaaaatgtatataataatagtatggtgaggtatagaggattaatttactgttgtagatgatataaatatag

SEQ ID NO: 42796 - DNA, 960 bp, Zea Mays
gaaatcatggctatctcatcgccaagcaagtctttcgaaccactcgacggagaatctatagctacaaatctaagaatgatggtactgctacacttacccacatctcaagtggaagttcaacattgcttcctcgacgactgggcaatggtaaccaattatatcctaaaagatagattgggcttcaattttcaaaggctatggcacgagtagcaaggagaagaaaaaatagattcagaagttaaagccccatcgagattggataatgcattctcaacctcttctgcagaaccatacatgaccaaaaaaaccaaatcctcttgatcttccactctcctgttatatatggtcactgctcccaataactcaccttgctcagtgaacaggtttgcgagagctgaattgtcaacactctaggaaaggtttttccacgtagaccatgttggcatcacccttgggtcctcatggtgaggattgatccctggatggaggcggcctaggattcaccatcaaacttcttccagcaagtacttatattttttgagagatcatgtcagatacataagaaaaagaaaaattttctagacattctgtaacggaatatactcaatcaaggaaacagaatacaaatgttctatttgaatccctgaagactaaccgttaacgttgaacttcatttatgcaatgtgtgatctggtaggaagccatgagtgatgaacatcacataattcatagagtattgctaagtttacaattgtaagtaaacaggagaatggtccactatgacagcaaaagaatgtgcatagctctagaagagctgaagtgaactcacatagccattaaattgctcagcaaccgcctcaacttctttttttttgaaagataaccgcctcaacttcttcgatcgaagacacggtcacaacccgaattcacagtttcttcctgtcaatttgtcatagataa

SEQ ID NO: 42797 - DNA, 481 bp, Zea Mays
ttgggaatctggaacgcatgaggcagaaagctgatactgaaaaattgtcaaaactatttgagagcgatcgtgttactttggatgcatcaagaacaaaatatgcaagacttgtattttgcactccctataggtcaagttggttgcaaaatcagaaattcgacatcttggttattgatgaggcagcaagcttaaatgtaacaagatgctaattcctcatcaatgatacacactggacacatataaggattctggtccacgatgtatgaggcagtagggtggaacccgctgctctgagtagctgtagcgggaggcggcagggacgcgggggacggcggcggcaacacgacgatcgaggaggttggggcggtggcagtggcaaccgacctttgtcttgcaccattgcgcgtagtttaccgaattccatgaaccctggacgttcagccaatttcccggcgtccacctccggcaaaccctatggtga

SEQ ID NO: 42798 - DNA, 3125 bp, Zea Mays
cccccacatccgtcccgtccccaaaacacatttctttcctttgcctgctttcctaccaataccatctcgcccgcttgcgttgcgtgaatctgcccattcctcaccattctaaacacccccctttccataacaatgccgccgtggaggcagcgcgcgcggggcctccggcggtgctagatccgcggcccagcacagcgacgcgagccgagccaaggtaccgggcggggacctccagcggcgctcaggaaggcgccgaagaaaaccgtggccgccgggacaggcgggggcgtccaatgcacgagcacacccgcgcctgggcgtgggaggcgacggtgcgcaaggtgcagcatccgcagcccgtgggcaggcgccgggtgtccccgatgtcggccgcggacgactacgagacggcgtcgtcgtcctcgtcggccgccggcgacgtctgcgagcacgtccacggctacatggagcgcggcctccccaacggcgacttctacacgggccagtggcgcgacggcgcgccgcacggggccggcaagtacctgtggacggacgggtgcatgtacgagggggagtggcggcacggcaaggccacggggcggggcaagttctcctggccgtcgggagccacctacgagggcgagttcaaggacgggttcatggacggctccggcacctacaccggcgccgccggggacacctaccgggggtcctggtccatgaacctcaagcacggcagcggcaagaagagctacgccaacggcgacgagtacgacggcgagtggcgcgcggggctgcaggacggctccggccgctacacctggcgcaacggcaccgagtacacggggcagtggtgcgcggggctcatccacggccgcggcgcgctcgtctggtccaacggcaaccgctacgatggcgggtgggaggacggctgtccgcgtggccaggggactttccgctgggccgacggcagcgtctacgtcggccgctggacgcgcgacactcccaccggcattgtccagcagaagggagtctactacccgtccccggcggcgtcctccccgacggcacgcgatccccgcgacgtgttcgccagggacctgccgggcttcatgggcgccagacccgactccccgtcgccgcgcaagtcacgcgcatcgtctgtcagggcggccaacgggcgggcgagctcagcgtccgggttgagcaacagttccggcggcgacaggaagtatgagaagatttgcatttgggagtccgacggcgacatcacgtgcgacattgtggacgggcccgccttgggagatgaggcggggaccgcgcggaggagcgtgaggacggacgacggcggtgacgaccggggcctgccgccaccatcgccggcgccgcacgtcacacagtgggtacctccacgggaggtgaagcgacaaggggagaccatcgccaagggacacaagcactacgagcttatgctaaaattgcagctcgggatcaggcatgcagtggggaagcaaggcccaattgtgcttgatctgaaatcgtctgctttcgacccaaaggaaaaggtatggacgaagtttcctcctcaaggctcaaaatacactcctccccacaattcttgtgacttcagatggaaggattactgcccacaggtcttccggacgctgcgcaagctgttcaaggtggatgctggtgactatatgttatcgctatgtggaaatgaggctctcagagagctttcatctcctggtaagagtggaagctttttctacctgacaaacgatgatcggtacatgataaagacgatgaagaaatctgaagtgaagatgcttctgaagatgctcccagcttattacaatcatgtccgggcatttgagaatactctagtaaccaagttttttggtctacactgtgtcaagttagctggagcaaatcagaagaaggttcatcacttgggcgcacaactgataagccacatacagagatcgatcagtatacaactttgaaggatcttgacctgaacttcatctttagattgaagaagcaatggttccatgagttccaaaggcaagtggacagggattgtgagttccttgagcaggagaaaatcatggattacagtcttcttgttggcgtacatttcagagataacacagagaagcttctgactgaaggttccattgactttgatatcatcaacaacgtaccgacacctcgcctttcaaaaggaaatacagatcggtttcttgctggtccaaacaggtctcctaaaatcaaacttggggccaacatgccttcgagagcagaactcactgcccgtaagagcgactgcgaaccgcggatgatcggagagcccaccggagagtgctacgacgtcatactgtattttgggatcatagacatacttcaggattacgatatcagcaagaggcttgagcacgcgtacaagtctttccagcacgacccaacctctatgtccgcggtggacccgaggcagtattccaggcggtttaaagaattcgtgtacagagtgtttcaagaagacgggtgcgcagctgcagacgcgttgagactttggagatgccgcagcctccatgtgtaggtgggtgaactctcaaaggaagcccatctgggtggactagagttgccagaagccagcctccatgttgagactttggagggtggcgtgggtgagcgtcagtcagtggaagcccatctgggtggactagagttgccagaagccagccgtcatctttgtcttccagaattatagttttagccatacacatacgtacatagctcatcactaatgttttgtagggtagggaggtgtttagcttacagatccagctcacagatagaaagattgtaagacaagagcgcaagccagtcgggagatgtagattcttcatcacccgtcccgaggtgtttagcttacagattcagctcacagatacaaagctactgtcttgatcgcaacctcttattttaacttatcgataggaaaccccttgtagacgacgagtgagatcgctgtaatgtacagggtttgtgggtggcctacaagtgatggctcagttttgttccttctttgttttctggaaatgaatgatcttgctaacttc

SEQ ID NO: 42799 - DNA, 2449 bp, Zea Mays
atggagtttgctgcgatgaaacggagagacctgctggagctctgccggcagcacggcctcgccatccgcggctccaaagccgacctcgccgccgtgctcgcaggcgcgctctcggggcctcctgttgctgttgctgctgcagctgagagtgtagttggtgtggtggtgaggaagggctgtctgaagcgtctgggaggtagtgctagcggtggcacttccggggcttccaagaaggtgagttttgcattggatgaaacgccagaggtgaagggacgaagacgaaggtcccaggtgattttgccactcgttgttgccaagacaagggggaggcgcaagggtaggaaggcacctagttctgcagcagtgagtggaagcggtcggcggcggaaacacgatggtggtggtggttctgctcgtggaagcgttaccagagaggttggtgcagatgccccagtgacacggtctaggatgaaagtggcgtctttacattctcacagtggggttgaaagtcagaataaccctgctaaggctgaggaaagagggaaggtggtaggaacagctactaggaggaagcagaagcgcaaggcccatgagaatgctggggatattgctaattcatgggcaggaatttctcgtaggatcacaaggagtttaagctcgtcggctgcagcagtctcattgccatgtgatgctgaggaagagagaggggctagaaaggtagaaagctcagtagcagctgatgtgatattggccaccctcgttggaaaaaagaggaggaagacatggtgcaggcctaaggccagggaggaacttcctgccgcagctctaggcgaaaggggtagctcgcagaagagtgatgttggtggcggttctgttgatcatggtgcttttcaagagttgtgtgcagatgctccagtgacacagcacgggacaaaagtggtgaatttgtgtgctgaaagtggggttgaaagtcggaataatcctactgagggtgaggaaaaagaggaggtggtagaagcagccacttacaggaaacagaagtggaagatccaggagaattctgaggatatttgtgccagagcgtcgtctggaatttctcataggaggacgaggaagtcaagctcgtccccagctgctgttctgttgtcccctgctgctgagaagatggaagtagcagatgataaggatgaacctggtgttaaggagttagctgaagttaaagtgttcgccaccacagcagtaccaattattgctgagagtacaagtaagaggaaggaagtagaccacgtccctgctgagctgaaacctgctaaggtagagttttacggcagaactacaagatcacactcaacagcagctgctgcattatcgcccactgtgattggaagcaagttaagaaaggcaggagatgtgcacacaaacggagaggtgtctaaggacttggaggttcctcgaaacgatgctcctattaccaggtcactgaggaacagagttgttcatattaacaacagcgcagttgatggaactcgtgcccggaagaagcttggaaccaagaggaagcccagtagtagaccagcaactcacgggcgtcagccacctgtacctcctgtagaggataaagaacaagttgctgtgccctgtaagttctcccaacacaggcgatcaagcagaaaccgtcctcggcctgatgaactgttaagaaacacatatttagaaaataacaaggtgaatggagtaccagtggggggcaaggacttgagtatagctcatcgattgacacataacgccgctaaggccagcgtgggagatgttgagtcgctgtcgccaggtttcgaagacagtctcaccaggagcaacaaggatgatgtgagaaccaaaggtatgcaccaaagtgttagtaacagggagttccaaaatgccaagggtggagatgtgggtaagcagccgactggaaggggatgtgttaggcgatcaacacgcatatctgcgacgtcggttcgaatctgaggcagccctctcttgggttggatcaacctatgctctccaccacctggagctcggctgcacgaggaggcagtcggctttttgttagctaaaatagtatctttgtggcagcaagactttggccaatcgcatcttgggcaccagcgacgaccctgacttccctctcgagttcttttggcgcctgctctcagaaagagaatatctgtaagcaaggtcgaagtaggtcgtttgcttttgctaacatggtgcttgtcatgtaaccaagtgtgttcatgcgctcctctaaaaaaaagaatatttatatgtgtgctcctaaaaaaagagagagtgcatttatgtgaccctgattattaaccatggtagctacctacttggtttgaggctttgagccccacctgtatgaacttctttaaccataattgtgcaatatattagccatgttggt

SEQ ID NO: 42800 - DNA, 1437 bp, Zea Mays
gccgccaccgcccaccgccgtatcatcctgctggcgcggcacaagacgccaccgagccaagaatttgcatcctcatcctgcggctgtcagtgtcaagcagccaggctcagggggttccggtgggatcggcagtgggtggtggtgaacgccaaagggcgagcatacacccagagggtggagcccaagcttgctctggtccaggtggagttgccgccggaggccttcgctgagaactggcagcccacgcccgacgaccacctggttatcagagcacccggaatggacacactgaagatacctctaataacggaacacaccacaatcgatgatgtctctgtctgggagtggtctggctctgcgtatgatgaaggggctgaagcgtctgaatggttctccacttactttgggaagccaagtcgactagtgcgcttcaaagaagcatcggaaactaggccaaccgatccagattatgcccaaggttataagatcatgttcaccgattgcttcccatttctgatagcttctcagttgtactgcagggttcactggatgcactaaatgagattcttaaagaacctgtaccaatgaaccgcttcagaccaaatattttagtggatggatgccacccatactcagaggacctgtggaaaaccataaagataaacaacctaacattcctaggtgtgaagttatgcaaccgctgcaaggtgccaaccattaatcaagaggatggagtacctggtactgaaccaactgaaactctacagacttttcggtccgaccaagtgcttcgtccaagccacaaaaataaacgacaggtgtactttgggcagaatttagtctgcaaggaatctctatcaggtgaaggaaaggtcatcaaggttggcgatccagtttatgttgtgcaggcattcgcttcttctaatgaagccccagcctgattcagggttaaaagtagtgacagggtgttcaaaataagtgagtttgtcttgcacactggataaacaaaaaacagtgggctgttgaaactgttaatgagacaataaaacacttgccgctggacagtaattatgaattagctgtaccttcatcaggggcttatttacttctatgatattacataccttgtacatcagaataatacaaaacaataagaagtgccaaaaaaggaggtgagttagaagagactgtctaaataggatggaatggatggctgatggagtcttttgtaccctatacaaaatcagtgacccactgcaagttccttcagtaacatcagaacagcatgtttgtctatagttccaaggatcttccaaagctcttcaggccacgattgatactaaagaaattgtcacatgaacagtgcagtggctgctttgtcggtgagactggcgtgatcacatcaaaatgtagtggcagccatcatagcctgaaaag

SEQ ID NO: 42801 - DNA, 1661 bp, Zea Mays
ctttactcctccctaatctgatattgatgcttgctttgctggttcaagctttggattcccggatcccacaccaccggtctctctcggggagtgtaatccagcgagcgttgagttgaaagccgcgcaagtggagatgagtactctgaagaaatccgacaagaaggctgccctcgacttcgcagcatggagtttcaatgtcaccacatcggttggactcatcatggtcaacaaggccttgatggctacgtatgggttcagtttcgccacaacattaaccgggcttcattttgtgactactaccttgatgactatcttatttcgttggttaggcctgagtcagccatcccacttacccctagcagatctagttaaatttgtgatattttcgaacttgtcaattgttgggatgaatgtgagcttgatgtggaactctgttggcttttatcagatagcaaagctgtgcatgatacctgcatcatgtcttctggaggttgtatttgatcatgtacattattcccgggacacaaagctgagcataatggtcgtgcttataggagttgcagtctgcacggttactgatgtcagtgtgaatgcaagaggtctaattgctgctgttatagctgtttggagcacagctttgcaacaatactatgtccattttctccaacgcaagtactccctgaactcattcaacctcctgggccacacagctccagcccaagctgggtcactgctgctagtgggaccatttgcggattacttgttgacaggcaaaagggtggatcagttcagtttgtcatcgcttgctctgtttttcctggcactctcatgcttcatcgccattggtgttaatctgagccaattcatctgcatcgggcggttctctgccgtatccttccaagtcctaggccacatgaagaccgtacttgttctgtcccttgggttccttttctttggcaaggagggcctgaaccttcaggtagtccttgggatggtcctggccgttctcggaatgatatggtacgggaacgcgtctgctaaaccaggtggcaaagagcggcgcagcatcctgccggtgaggtctgcgagtctcaagggaagttccgaagaaaaggccggtgccgagaaatagtcttgctatatctgactgcaaactttttatttagatggggaatttttcgttccgaaggttaaatttctggtgaggtgacgcgagtatcacagattgggagctctgcattatgtctgacgcgcacaaaacaaacgcgtcccttgtagagactctggattgttatagttacaggtatactgtaaagcttcatttttttttggcgctctgaatcgtttgcagtgagggggaaagacggacatggtttacggcccgttcggttcttccggaaccgtagcctggaatggttcctagctcaattgtttacctaatttatataagttttgatcaacccgaatgattcttggatgaatccaggacaaacgaacaaggcctacggagggtttaagacagtttttttttatcttatcgaacatatagttcggtagtttgaggaacatatccttctgaatttcgaggggaactggggatgtgctgtagtaagagattaatcaaaatataggtctgcatttgctgaaatggatttatttaa

SEQ ID NO: 42802 - DNA, 3866 bp, Zea Mays
gcgggttgggccttcttgttcgcttgggtcttgtcttgttagccgaggaattgatttactaaggaatgccgagaaaccctaagactgcgtgtctcctctttgctagatctgtgactcccccgccatcgatgccaagtttgccccgttgccggcgtcacccctcccctcgacggtgaagctcatagcttccctccaccgccggtgtcgcttctcccccgccgaccaagccgtgcctgtcgccggcgtcgcccctcccccactagtgaaactcgcggtctctccaccgcacgcgcctcgtgtagttgtggctgcgtgcaccccctgtagccccggcgataggtcctactgctccatccggtttgcttccggcaacaagatcaacaacaagcgagcgaggtagtgaaaagctgcagctgtgatctctggaggtgctcttcctactctttctggtattttgatggtggcttgatggccagtaatatgcagtcttctgggctgcctcagcctccaagacctcccatgatgggttctagcgctcagccacaaaatcttggaccaccaatgcctatgcagtttaggccagtgatgccttcgcagcatcctcctcagttcatgccaccagcagcacagcagttccgtcctgttggtgagcctatggcgggggctaacgttggcatgccagggcaaatgccacattttccacaacctgggcagcacttgcctcactcaaatcaagttccacctgtatcacaaggggttcccatggtatatcagccagctagaccaatgtcatcagcacctatgcaacaacagcaacaaactgcgtatgctgggggccatttgcccaccatgggtgctcctatgcaacccctgacctatacatatcaaccaacatcgatccctcctgtagcgcaaccctggagtacaggcccaggacagagtgtacatcatgtgcctcctctagtgccgtctgggcaccagccggtgtcagctccaacgactttgcctcctgtcaacttgtctgaacctagctcttcagactggcaggaacacactgcagccgagggaaaaaagtactactataataagaagacaaggcaatcaagttgggagaaaccagttgagttgatgacacctttggagagggctgatgcctcaactgaatggaaagaatttactacaccagaaggacggaagtactatttcaacaaagtgaccaagcaatcaaaatggactattcctgacgagttaaaggttgcacgtgaattggcagagaacgcatcaaatcaacaacctgatcgagaatcaggaatagctactagtgctcttgtcagatctgctgcctttgaaccttctactgcacctgctaatcagtcgtcatctgctgttggtataattgcttccagcgcacatgatggatcatcaaactctgttctttctggtcctcccctgccgcacaatgtggagaatacttccagttctattgttggcatgcaaaatggtggttcgagtactgctgttgttcctgttgcagcaagcacagaagttccattagttgcaacagatgcagggtccagcagaaacaacgatgaaaattcatctctgaccactggggctgacgcagaggatggtacatccgctgaagatttggtggaggccaaaaagaccatgccagttgcagggaagattaatgtcactccagtggaggagaaaacaagtgaagaagaacctgtagtctatgccactaagatggaagcaaaaaatgcgttcaagtccctgcttgagtcggtaaatgtggagtctgattggacatgggatcagactatgagagtcatcataaatgacaaaagatatggtgctttgaaaactcttggagagagaaagcaagctttcaatgagtacttgaaccagcgcaaaaagtttgaagccgaagaaaaacgtatcaaacagaggaaagcacgtgatgatttccttgcaatgttggaagaaagcaaggagcttacatcatcaacaagatggagcaaagcaatacttatgtttgaagatgatgaaagattcaaagcagttgagcgtccaagggagcgtgaagatttatttgagaactatcttgtggaactgcataagaaggaaaaagccaaggctgctgaagaacacaaaagatatgtagcagagtacagagcttttctagaatcatgtgacttcatcaaggcaagcactcagtggagaaaagttcaggaacgcctggaggacgatgaacgttattcccgacttgagaagtttgatcggttggatatttttcaagagtacattcgacacctagagaaagaagaggaagagcagaagcgggtacaaaaggatcaagtgagaagacaagagaggaaaaaccgtgatgggtttcgtaaaatgttggaagaacatgttgctgatggcacacttaatgcaagaactcggtggcgtgattactgtgcacagataaaagattcacagtcctacttggctgtagcatcaaacacatctggctctacaccgaaagagttatttgatgacgtgatcgaggaacttggcaaacagtatcaagaagacaagatccaaattaaagaagtggtgaaatctggaaagattcctatgacaacttcatggacattagaggaattccaaactgctactctggaggatgatgctcttaaaggaatatcaaccatcaacatcaagcttgtatatgacgatcagcttgaaaggctcaaggaaaaagagcaaaaggacgctaagaagcgccagcgcttgggtgaaaatttttcagatcttttgtattccatcaaggaaatatcagcttcttcaacatgggatgattctaaacagcttttcgaggatagccaagagttcagggccttggacagtgagacttatgctagagagctttttgaagagtgcgttgtccacctgaaagaaaggttaaaagagaaagaacgtttgagggaggaagaaaaggcaaaaagagagaaagagcgtgaggagaaagagaagaagaaagagaaagaaaggaaggagaaagaacgcaaagaaaaagaaagagaccaccgggaggagagagaaaaggagaaagggaaggatcgatcaaggagagatgaaatggagtttgatggtgctgatttgaacacccatggtgcaaaagataagaaaagagataaagataaagaaaagaaacataagagacgtcaccatgacacagatgatgtaagctctgagagggatgataaagacgatgctaagaagtctcggaggcatagcagtgatcgcaagaaatctaggaagcatgcacatggctcagattcagatagtgaaaaccggcacaaaagacataaaaaggaccgagatagtagtagaagaaatggagcacatgagctggaagatggtgaacttggagaggatggggagatctattagtctttctgtttgctaccgagattctacttgtagcactcatctccagtcttgttacacatggatttattgccatctcttgcctgttgagttgcgcacttgggctgaagcctaccagctggatttttgctctgccgcacctgtgatgctactgctggggggcaatggatatagcaataacaccagctactgctggggagcaatggatgtagcaataacaccagcccatgcttgacacctttctttggtccttctggcagctgaccaggctaaattttcatttccttcaaagtccatggtgctgtctgtgctgaggtaacagattgctcagtttgcaacgagtttctttgtgagtgatgtgcttttgggagagtatggagtgtttgatttgtcgctcatgtcatgttaaggcttgttcattatac

SEQ ID NO: 42803 - DNA, 1047 bp, Zea Mays
ttctaactatcttgttggtttcttgcagtcggcgtcacatggtgaccagccttgttccatcttattggcctatgctatggcccataagggcaaggcgacgtccgatgtcacctacaacccggatgacggacccgaggtgtacatcaaccccgccgtctacagccgccttcatgactacaccgccatagcgcaggaggtccatgacccagaatacgatccgagaaccgagcagatcgatcccgatgtcctcatgagggtcggaggagacaagagacatgggcggtactggattgccgacggggcaatcgactcgtcgtccactcccactctgtctcaggtgcgagcaaggagcacgggctcgagtccagccatacgacctcggtacgacagctcacaacatcgcatacaacaactcgaggcccagctaaaaaaagtgaggagggaacgtcaagagatggagacgaggatgatggcagagcgggaggcagagcgggaggcccgcctggcagatcagcagaggatgttccaatacatgcagagccttggcgccgcacagggtttcgccccaccacctccattgttccctacaattgactctgctctgtttcatactcctgtgagtatcaaaattgtagttagatgttggtaatgcatctggtataacacatgcaatctcttctctgtgcaaggacaatctgggacggcatccaacaaccctcatggatcgcccagcccatcgccgcaccagtccacccgccaacctcgatgagatattatctttcttagtgttgttgttcttgagacttatattcttagatgttggtattgctctgtgagatacttgatacttatattcttgaatgttggatacttatgtttgtgtccgaacatgttggtaatgctgtgagaacttgtttgatttatggtgtttgtgagatatgtgatgtatatgttatatctgtgatgattatgtgatatatgtgatgtatatgtgatcttttgtttgtttggatgtaatagcaaaaacaaattaaaaatttgtatact

SEQ ID NO: 42804 - DNA, 920 bp, Zea Mays
ctcgtcaccctcgtcgccatcctcgccctcatcgaactcagcaccgacctcctcgtagtccttctcgagcgccgccaggtcctcacgggcctcagagaactcaccttcctccataccctcaccgacgtaccagtgcacgaaggcacgcttggcgtacatgaggtcgaacttgtggtcgatgcgggagaacacctccacaacactggtggagttggagatcatgcacacggcacgctgcaccttggccaggtcaccaccaggcaccacacttggaggctggtagttaatgccgcacttaaagccagttgggcaccagtccacaaactggatggtgcgcttggtcttgatggtggccacagcagcattcacatccttggggaccacatcaccacggtacatgaggcagcaggccatgtacttaccatggcggggatcgcacttggccatcatggaggatggctcgaaggcgctgttggtgatctcggccacagacagctgctcgtggtaggccttctcagcagagatgactggagcataggaggaaagcatgaagtggatcctcgggtagggcaccaagttggtctggaactcattcacatccacgttaagagcaccatcgaacctcagggaggcagtcagggatgagatgacctgggacacaagcctgttgaggttggtggacaggacactgttgtatggctcaaccactgaggtcgaaacttggggggatgggtacacagtgaaaccaagcttagacttcttgccgtagtcaacagacagacgctccaggaggagggaaccaaggccagagcctgttcctccgccaacagcgttgaagacgaggaagccctggagaccagtgcagttgtcggcaagcttcctgatgcgatcaaggcacaggtcaacaatctccttgccaa

SEQ ID NO: 42805 - DNA, 1641 bp, Zea Mays
tgaattaacgtatgatcattgtggtttatggttcacattggaatttatgtgttgttcgtgcttgatgaattttctccaaaggaacaagggagacaatgagaggcgatgttgaagctatcgatcccgggaataaagctgctgcggaaccggtgggagatgtagctgcgctatcgtcaaggctggctaggaggctactacatggatcatggtgccctcctcggtgccaggggatatgcttggatcagagtaggggtaggtgaggttaccttatgttgttttgatttgttggtcgctgctccttggagaacattcatgctatggacacaaactcaggtggacgtggtgttcgacaattcaaaacatacctattacatatattggaaaaggaaaccccaggcgtttcaaagttagagtttcacagcttgcagcgaatttggaacaagggagacaataagaggcgatgttgaagctgccgatcccgggaataaagctgctgcggaaccggtgggagatgtagctgctgcggaacacgaaagttttaatcaaggaaatggtccaagggtgcatcactggaataagctcgagaccacaagtgtcatatctcctctaatctttactctctcagccatggctgtgctgaatttgcaatggtaggttccagttgaatatgttcattgctacaatgaagccgttttgttgtttgctgtccgccgccgtattcggggtcttcgcctgcctctatgggctcagggcggacaggggcctacaagatctcctcgggccaaggaatcgttcccctccggcgacctccctcctccctttcgtctcaggccttccactgtatctccatcaaagcgaaggatcagaggctactccgttaggaggagaggaaaggaattgtgagccttgtgttggagaagtcgaagactgagagtatatggtggctccattggtgtccatgttaatggctggcgtgttctagagcaactcggggttgtcgtagagcttagggagacttgccaaccttagggagacttgccaaccttgtcatcgcgtaccatgccaacagaatgcttagcttttacgcaccagcgcgtgacgccatgtgggagcaaagttgggaaaatggatattggcggtggtcgagaggtcactcttattggaagtctagaaatgccaaaggatgacatatggcttgtcacagctatcctatctggtctgattgaataatgtgcgaagatataagtcatatatttcttggcctcctatcttcgcctcaggcagctgggagtggttttatactcgctgatgacatcaagtcttaggtgcttccattgatcaataactcagggaaatatggagggatcatgatgtggttcaagtactatgatgatcaagatggctacaattcttgagtgaagagtgatgtttaggttgttgcctgtggtgtgtcacaatatctgtgtgttacttgtgtgtatgtgagaaattatgtgactctggagtctggatagtgcaataagtattactcaagtatatgattgaatcttctgtcatactattcaaattatgtcatattgtatcttttaaggtatgtaaacatccacttttagcgatgctaacaaaagaatagaacaacaa

SEQ ID NO: 42806 - DNA, 403 bp, Zea Mays
cttaccagctggggtgacggcgatggcatgctgcttggcgcttcggtgaggtgacttaagtgaagcgctggcgaggctcgacgacgtcggtggcttgggcaggaacagtggcgagcgcaacacggactccttgcacgacggcgagctcagcgtggggcggctgctgtgcagttgcaagaatgcggcattttacgagatcgagggaggggagagcaggtaccagagcttcaaatacgggcgacttggcgatcggttgctggcgtgcgccatggccaattcaagcaggagaagcagattaaggaggggattacgagtggggccacgacgcggagcaagagctgggtgcccgggctctacgcgcgtgcccgcgcaaccgctgggctgagccggccggaggggtagg

SEQ ID NO: 42807 - DNA, 440 bp, Zea Mays
ggttgcttcttttgcatccatgtctatgtcggcatagaggcatcaatatggccacaatttgcacatctattatgatgtctgatccaagagcgagagcaccgagcccttcttttattggtttaataacatcattttgtcttttggttgatgatgttcgaccctttcatatattcaaggagttcttgctaagatattggagttttgtgatgggtacaagtttgatcccagctgatggggagatttggcgtgttcggaggcgtgttattgctcccgcactacatcagaagtatgtgactgcgatgattggtctccttggagaagattcacaacggctctgcaagaaattgaacaaggcaacaacggatgaggaggacatggagatgttgctgatcgaaaggaagcgaagggttagggcatgctcattactgcctacaggataa

SEQ ID NO: 42808 - DNA, 802 bp, Zea Mays
catagaccattttcctatccaggaagtccattgaacatgttaaggtgtgctgtaatcatctgtgtcaagtatgatgccaacatgccataaacatgttaaggtagagaggttacactagctgacattgtcagataatcaacatggctgaactcaaaaatgcaatggttcacaggttggcattggccacaattttcaactgaatgcaactggatggaagtggaagctttctacttgcctggggggagatggtgtgtctcagataagaaacaagtcaaaactcagcttgttcccagggtttgatttgaggattggatggaaagcagagtatgtgcttcctgagattcatggggctgttggcacaggagaaccagccttcagtatgaactatggaaggttgcatgcatcgatagatcgggtcgaggctatcgttactcagtcagatcagtattgatcttccagtgcggaaaggcaagggagtttcttgatcaataacaaacacgttgagtagatcccagggttacaagaagcattctgaagctccgtgcctgatgtacagcaaataccaaagtttaggaccacgctttgagaagctgtttgagttctccaaagcttttgactttgagcggcttctgttgcttctgaaagcgtaactataaataatgtttatcctgcttgtgtacgaaacaccagagtatcagtaattcagtatagtgagcgacgtcaaagcatgatctctatgcatcaagatttgtcttctaagctattcggaagtacgcttaaaccctgcataagtggccgcagt

SEQ ID NO: 42809 - DNA, 2088 bp, Zea Mays
gcgtccccgcttccgttactccctccgcgccccgctcctcccgcctgtcctccacgcgacgttccttgtatccccgtcgccttccttgggcagttgggctgagtcctcccgtctctcgcccctgcagatatagttgcggcggggtttccttcttcgagaaagttccgaaccagagggagccgcgcggaaagccggaggcgtcccatgctgctggcagtcttgctaacttcagctgatggttaatatgagggacaatgactcatcaagcgacgcacaattggacgagccattaggacgggtatcgatactctcttacggttctgggcatatgctcaacgacatcacatcgtcttgttggtttacctatttgcttgtgttcttgacagatctgggacttagtccaggtgatgccgctattgtgatgctttctggacaattggcggatggcttcacaacaatctttgttggggaattgatggatcgctttggacatttcaaactgtggcatgcaggaggatctattttagtggcaatttccttctcgtctgtttttggtagctgtgttccttgcaaacttatgggaattaatacatctactttggagactgttggatacagcacatttgctgctatttttaatgttggttgggcagttactcaagtcgctcacatgtctatggtaaactgcattacatcaaatccaactagccgggtttcacttgttgcgaatcttagcctgtatggcgttgctttggtgatatttactctattgcagtcagtgaatgtactagttcagtatcggtggattgcttaggtgtccatttccctcggatcttgctttgttgtcatcttcttgattggaaccaaagagccaggatcaattcggcactgtttggataagagtccttccagaatttcatgggactactggttcaagagagtattgtactaccaagttgctctagtctatactctgactagattggtgaccaatgtttcacaggcatttcttgctttctatgtaataaatgatttagaaatgaatcaatcctccaaagcattggtacctgctattatctacatctgcagtttgatagtatctgtaatattacaggagactagatggtcaagttggcgtcttaagctttacttttcagctggagcagtgctttggatattgtcaggtcttggaattgttcttctaccgagcagaatgcacaacctcatgtatgccatttcaatcgtaataggagctgcgaatgcacttatgacagtgacaagtattagcatggaaggtgttctagtaggagaagatctaaatggttgtgcttttgtgtatggctcattaagttttgttgacaaagtttcatgtggaatagctctctatgttctcgagtcctatcaaggaagtacaaagatcagatcaaatttaggaacaacatctggctattcagttacaagacttggcttgggcttagttccagctgcttgttcgctgctttcagctatagcagcttataccatggagctccctgatactcagaaaggacctttggtggaaccccttctagcataacttcactggtggcagtgttacagtttcaccgtgagatttcacagtaattgctcgatggaatgacactgctgctcgagcctgaagatgttagcgacctggtcaattcgttttgacttcgtatatatagtctgaataaattatgacggaggggatatactgagacacgtttgaatagggattagaagtgacataggggggctaggggcaagaagatctgtgttgatcatactgagctttacaagtcattctgcaatccaatgtaaatataacttagcttcatttcgaaagcatcaaaactgccaactaggcacatgtagcgacgatgggcaaggaaaagaatatctctggtccttgttctacgctataatttcattgtatatgtagcatcatgattgaaaagaaatatcttatatttatattgatgggtgaaatagtgtcgcctatgctcatgtaaattgtttctgacatttagaaattaaatatgcttgagaagagagcactaatctgtctaa

SEQ ID NO: 42810 - DNA, 615 bp, Zea Mays
ctattacatgccaaaatggaaaaatgggataaaatggaaagcaaagcacataccacttgttatatccttcagaggtgtcccctgtcagggaggtcaggaacctgaatagtggcacctgaatagtggtgaaaagtttaaggtgtcttgtgattaaaaatattgtatgattactatttgtgattattaactgacaggtcaaaattttcagcagatcagcaactcattatttagcgctgaaggtattgctaaaaatggaaaacacaagaaaacgacaatttttacccggcatgaatcacatgctagtcttaatgacaacttctagacaatatcgacaacatttacataaagaaacagataaaataatggctcaccatccccttgtagttgtgaacgcaaatgaagttaagaaagtggtacatgatctccttgtcatgtaagaggctttgatgacaggtgcccgttgaggaactgcacaccattgccaatggactttgacagagaaggggaaggaggcattggatagctcgaagtccagctcaagaacaaacgacaaccttttcatcaacttgaggaaccgtacctggtcgttcttgtttgaagatgctccacctgagt

SEQ ID NO: 42811 - DNA, 2102 bp, Zea Mays
gccccgtccactcatcgttagaggctcagagtcagaggctcagagcccagcccaggccggagaccactgtccactgcgtctgtctctgtcccgagctcccgatccatccatctgcatcgtgggaacaagaagaacaatgggtataatgcgagtcgcggacgatgtggaggccaggttggtggtcggggcaggtggcggcggcgggaccgccaccaccacgacggagccgcttctccgccactgccacggcggccgcaaggaggaggacgaccaggggtctaagatccgggacagcccggaggcggagggggcgtccgactgcgggaggacggacggaggctcgctgcggatggtccttgtctccaccgccgtcgccgtctgcggctccttcgagttcggcacctgcgtcggctactctgcgccgacgcagtcagggattgtagaggaagtcgggctatctatctccgagtcggagcaatggttggtgccgttactagtgggcgcttggctgattttctcggacgaaaaatgaccatgcggatatcagctactatttgtatattcggttggctctccatacatctggccaagagcgctatcatgctctactttgggagaaccttgctgggtttcagcactggagttctttcttatgtggtgcctgtgttcatagctgaaatagcgccaaagaatctccgcgggggtctcgcaacgtcaaaccagctcttgatctgttccggaagctcagctacctacatcataggagccctggttgcatggcgcaatttggtacttgttggtttagtgccttgtgtcctcttgctagctgggcttttcttcattccagagtcgccaagatggctggccaatgtcggaagggaaaaggaattccacgcctcattgcaaaagctgcgtggagaggatgctgacgtatcagaagaggcaattgagatcaaagagtatattgaatcactctatagccttccaaaggccaggcttcgagacttatttctgagcaaaaatatatatgcagtcattgtgggcgttggcttgatggtttttcagcaactcggagggataaatggtgttggcttctatgcaagttatatcttcagttctgctgattccaatcacattgtttggggccatactcatggataggagtggaagaagggttctcctgatggtattaacgctacaaagctgagctgatgtgcatacaaagaaagattgttaggtagaatgttttgtgagatccttttatcatataggtctctgcatctggaacatttttgggctgcttcctcacaggagtatcattctatctgaaggcacaaggactgttctcagaatgggttcccacactggctctttccggcatactggtttacatcggggcatactcaattggaatgggtcctgtcccttgggttgtcatgtctgagatattctcaatcaacatgaaagcaactggtgggagcttggtgacccttgttagctggctgggctccttcgcgatttcttactcgttcagcttccttatggactggagctctgcaggtaccttcttcatgttctcttcagccagcttgatcactgtactcttcgtggcgaagctggtccctgaaaccaaaggaaggacactagaggagatccaggactcactaaacaccagaagatagtaatgaatttacttcacactacagaataattaattctaagatggaaaaatgggaatttacaggacacagcagaataattccaagatggaaaacgaatgtaccgtcagacctctgctcatcgatagatatgtatacaagaaacaatatatataattctcacgtcctcccgcttcccctccctttctctcccgcaccacctccgtgtaatacgtagtgtactgtgtaccctatgtaggttaaggaatgctgcagattcagattacgcattatgtaccgtgcccctccagattgtttgagcatgagcagcgacagaaccgacattatgtttatgtaccatgtccctctagatcaaccagcagtacattttttatattcaggatcaacatttatgtatcatgtttttttagggaaaaggctcag

SEQ ID NO: 42812 - DNA, 612 bp, Zea Mays
cacgtcatgatatcaataggcctgcaaaattattttggttgtttcttttgttctctcggaaaatgacaagatttatcaggtcaaacaatggacttcagaacacagaacaacaaaagatatccaagtatatcaacacacatgttacagaggctttccctatgagaaaagcaggaaagtttggtaacgaaaattgcaagaatattgtgaaggtttctaagtctgttgattctgcaacagcctcaagttttgcaccatcttcactataatgtttcaaggaagttgagaaatggagtgaaaatgctttgtggagtgtatctgagcttcatgttggcgatgagaagcagactggttctaacaaatctgatatggaaagagtactaaaagggtttggagcttgtgatgcttttgtggcttctaggctcaacgcccctaatggacaagttggtggtattacgtttaagtcttcagacattgcccttctaatatgattgttcgtaggaaagaaagctcctctggattttgcctcaaagactagcttgcagtttgtttcattgtcaccagtcaagtggagtcaaggtttcctcaattgcggatgctcgcttgctgctatgt

SEQ ID NO: 42813 - DNA, 2541 bp, Zea Mays
cctgctcatcgatcttattcatttggcctcaacgatcaggattagtttggcttccactccttgagccttctgctcaaagcaaccaccgctggctcagctcactccggtggcctccggccgcctctgcctccgaggattcgcttggggggagacgtattatgaggttcgcggggtggtacctgaagattgcggcggtggggcctccattggcgctgccatggagctcttcatgatccacacgggcttttatgagaaggtaactgtcctggggtcagaaaaacgagcttgggaaagcagtctagaggcccaagctatgagagaagctctcaatccatggcaaaagcatgatgaacaagaacaacagaagaaatagtcaagagttatgtgtcttaagtgtctgcgttcccatccgtatacccttgaatcagcttccagaacacgttgaagggctatcgaagacagttataaactgcttttttcatgggatgcaaaaaaaagaggggacattgtacactatcacactgggtttcacttgtttttatgatattttaacattagaacatcagattttgggtatagaaatgggtgaaagttgtctgcttctctgtacaataattgaatgctctatggattgctcatgtaatccttttcagttatgatatttttttaaacatcatttgttggaacaaaagggtgtacataacaacagtaaatatggaggagtttgcacatagctcgattcaatgagcatcaaaaattcccaatggattttatgcaacctggctccaattgttagtattaatgcccagtaaatggaataatactcgttctgtacaaacgtaccacctcctaagctgatagtttcctatcctcttgatgtctcctgtaatgtattcatttcacgtattgtatgtaacccatttcagctagaactaaccaaaattttgtacaagctagtttctctgttaactacttaactggaaacttggtgatggtgcttacaacttgaccagctagcggcagtagaataagctggttttgttcgtatgaatagaactatgcttgatgctaaccctagaattgtgatgcaagcccacacaaagaaggtggttgagtagcacttcacccccatgcacataatcatggtgtcaacaatgccagtccagttatccactactgtcatcttttggccatttccatcgtataccatggcagcaatctggccatagaggagtgagcccagcgggatattggtaattaggatgttgtgattcactccaatgctatttggtccaaagagctcggaggtcactgacattgctgcagcaaagatgaatcctgagcttagaccaactagtgttgttcctgctaccagggtgcttgcatcttgttggttccacataaggaaaaaggccattggcatggggaccaatgcagcagcaagccaccctgtgcgagcaagtggcaccttcctgtatacaaattttagttaggaagcatgtgatatgatgacatatatgtttgtatataaagcaaaacagatacctgtgaaggatgtcaggtagtgcagaaagaagacgaccgaagaaagagcaggatgagtaggcaataagtagcatggtgagctgtgactgctggtgcaatgactgcgcaatctgccccaagttgttgctgtataccaggccaacagtggctccacagaagtaggctgtgtagtagagccagaagtccacacaccaaatgagcttctttgcactatgttcttcaccgagtgccaccagtagcgatgcagggtcagggccatctgtatccacatatgaggaactggagcaggcagggatgatgagaggaagggcgaggagaaccatggcacctatgaggatgacccatgcagtagagccagttgcggtgaaagttccaaagaccacaacatatatgccagtgatgaatgcaaggatgtagaggccgaggaagacacgcctgttatgcctgggcgcactttggaggtggctgtcatttgtgtggcagaggaggatcactgggagtgcaagaatagagacaccaagagggaggattgcattgaggaggaggcagatagacagggctaaaggggagagggcgtttgcaaagagagtgtagaaggcagcgctgagcccgttgaagcttattgagagggagagggctagggagcggttgtttgcagagaagttgcggatgcagagaacaaagcagactgtgttgaaccagcagatgctgcaccctgctatcaagcagaccaagaacacctgcaagggccaacatatgaatcagaatttgatcaaataattaagttcgatataagttgcatgttgtctttatgtcttggcagtttaacctctattgtctctacatcttgacttaaatacctttgaggatagtgtttgcaatcagtttgtccagagtcgagacgacttgtgtaatatagtttgtttactgaaagctacaggatggatttgtatactgggagcccaagccccgtatggtatcgaatacattgtacga

SEQ ID NO: 42814 - DNA, 3623 bp, Zea Mays
ggggtagccgggccggctagggcgtgctcacatctcgcggcgaagcttttctctccgctcggtgtttcagccatgatgtcgcggtcgtataccaacctgctcgacctcgcggagggcaacttcgcggcgctgggcccggccggcggcagcgggcggcagagacatgggtcgttcgggctgcggcggatgtcgcgggtgatgacggtgccggggacgctgtcggagctcgacggcgaggacgagtcggagccggccgcgaccagcagcgtcgcctccgacgtgccctcgtcggtggcggtggaccgcctcatagtggtctcgaatcagttgcccatcgtcgcgcgccgcatgggtcgttcgggctgcggcggatgtcgcgggtgatgacggtgccggggacgctgacggagctcgacggcgaggacgagtcggagccggccgcgaccagcagcgtcgcctccgacgtgccctcgtccgtggcggcggaccgcctcatagtggtctcgaatcagttgcccatcgtcgcgcgccgcaggcccgacggccgagggtggtccttctcgtgggacgatgactcgctcctgctccagctccgcgacggcattcccgacgagatggaggtgctcttcgtcggatcactccgcgccgacgtccccgcagccgagcaggacgcggtatcgcaggcgctgctcgaccgattccgctgcgcgccggtgttcctccctgaccacctcaacgaccggttctaccacggcttctgcaagcgccagctctggcctctgttccactacatgctccccttctcatcgcccgcttccgcgtctgccgccgctacctcttcctccgtcgccacttcgtcacccggcaacggttgcttcgaccgcagcgcttgggaggcatacgtgctcgccaacaagttcttctttgagaaggtcgtggaggtaatcaacccagaggatgactacgtctgggttcatgactaccatctcctggcgctgcctacctttctccgccgccgcttcaaccgcctccgcatcggattcttcctccacagccccttcccctcgtccgagatctaccgcaccctccctgttcgcgacgagatactgaaggcgctgctcaattgtgacctcattgggttccacacttttgattacgccaggcacttcctctcgtgctgcagtaggatgctgggaattgaataccagtcaaagcgtgggtacattggattggattactttggccgcactgtagggatcaagatcatgccggtgggagttcatatgggtcagttggagtcgggtctgcgcttgcctgatagggagtggaggctttctgagcttcaacagcagtttcagggcaaaactgtcttgcttggtgtggatgatatggatatctttaaggggatcaatttgaagcttcttgcatttgagaacatgttgaggacacatcccaagtggcaggggagagcagtgttagtgcagattgctaacccagcccgtggaaggggtaaggatctggaagccatccaggctgagattgagcagagctgccagaggatcaatgtagactttggccagtcagggtatagccctgttgttttcatcaatcgtgatgtgtcaagtgtcgagaaggttgcctattatacgatagcggaatgcgtggttgtgactgctgtgagggatgggatgaacttaacaccatatgagtacattgtctgtaggcagggtgcaccaggatctgagtcagtatcagaggtgagtgggccaaagaagagcatgctggttgtgtcagagtttattggctgctcgccgtcactgagtggtgctattagggttaacccatggaatatagaggcaacagcagaggcgatgaatgaggccatttcaatgccagaacaggaaaaacagttgaggcatgagaaacattaccgttatgtcagcagccatgatgttgcttattggtcaaagagcttcatcctagacttggaaagggcttgtagggaccactttaagaggacttgttggggcatagggttgggttttggtttcagggtggtggccttggaccctcatttcagaaagcttaacatggattcaattgttaatgcttatgagatttcagagagcagggctatattgcttgattatgatggaacactggttcctcaaacttccatcaacaaggaacctagtccagaggttttgaacatcatcaataccctttgctcagatagtagaaacatcgtttttcttgtcagtggtagagacaaagatacgttaggaaagtggttctcctcatgtccaaaattggggattgcagctgaacatggttacatcttgaggtggtctagcaaagaagaatggcaaacatgcacccaggccatggactttggatggatgcaaatggcaaagccagtgatgaatttatatacagaagcaactgatggatcctacattgagagaaaagaaagtgccttggtgtggcaccatcaggatgctgacccaggctttggatcctcacaggcaaaggagctgcttgatcacctggaaagtgtactagcaaatgaaccagtctctgtcaagagtggacagttcatcgttgaagtcaagccacagggagtaagcaagggaatagttgccgagaggatacttgcatcagtgaaggagaggggaaagcaggctgatttcgtattgtgcatcggcgatgataggtctgatgaggacatgtttgaaaatattgccgatatcattaagaggaatatggttgctccaagaacatcgctgtttgcatgcactgtgggacaaaaaccaagcaaagccaaattctacctggacgatacatttgaagtggtcgctatgctgagcgcacttgcagatgccactggagctgaactgaaatctgattcggctgatgaattggcggcatctatctcatcacttgatattggtgacgaacaatcagaatccagcgatacaccaattggagggtcttagccagttttctcttgaatttcagaatataatgattatttcaatagtcaattctacagaggggaagcttctcaatctgctgcactccaagtttatccagttgggcaagatagtagtctgtcgctgcaaggcgtagatccatatgttcatagctgactcgccgacttggcatattctttgactttctcattcctggttgaagtaaaatgaaagcctgacagaaggaaagggaactgtgtggctgaagtaattggggaaagttataggagtggcaaatgctaaaggagcccgtgcgcagcttctgatatgatcccttattaacatgacattacaaagtggtgtcactttttgaactatcagtagtaggtagtagcaatctcaagggtgaggtttaaattgattagttgcttcaaaaccagattttggctcctctgtgtttgggttatattttaattaattatccagggttagtatgttgagaattgcctaaatagtttggaaacttaaatcccttttaagattattggggattgagagaaaatgagctattttttcactcaatccccgggaatactggagcagatttaagtttctaaactagcctttaggtgcacgatagcgcgttttcag

SEQ ID NO: 42815 - DNA, 981 bp, Zea Mays
ctccttttcccccttcctccctctatggcacgcggacccaccccacggccctctcctccccctcgcgcgtcgcgcggcagtctgggcacaacacgccgccgccgtggcacggctcgcccagcgccgagccggctgcccgcctgaccgcctccccacctcttccccttcctcgcaagtggagcaccaggaaccgtcgtgcccctccctcttcctctcccccactctcgctccccattgaggtcacgccattgatgacgttaatggccgccgccgaccattacttcctctccggcgcgctctctctcttctctctctataaaaactcaatgccacacccatggacacttccctcggccgccgagctcgcccacgcctctcctccctctttgtcgttgtacttcgccgccggccgaccttggctcgccgtcctcgacgttcgtcgccactagaacacctctgtccacgtcctcgccaccgactcgagctcggagcgccactatccacctcccttgatcgcctcatccaccgccgtccggaactccactcgctgtcagcccctgagcgcaagaaacagaggggggaaggtagaagaagtggatttttgctagctagcccctggtgtttgtttaatttgtgcagaattattttatcagctcaaaagtgttatattaggtccttgcaatcttccgttctacccctagaagtctatggttaatcccgtatgtgacccctgcagcaactattctattttaaaaaatttaattgaacccatatgtaatgatgttgatcatacatgttttatatgtatgtgttagcatgttagaatacttttttgtgacaagattcatatatccacaaatcgatttaaattatgttgttgttgttgtttaatcgtagtttctgctaatataagaaataggaaggaatggtagaccatatatttgtagcataagcgctagatgattatttatgagtcttcca

SEQ ID NO: 42816 - DNA, 3715 bp, Zea Mays
actccagttcccacacggcggcggccgcgcccgccatttactccgctccggcgtactcctcccactcctgagctgtcgctgacactgacagcaacccccattgactcccgacatccacagccgcacttactcacgtgccaccgacactccggtcccaccctatgaaccccctcccaccgccaccagggccccgccgcgttcccaccctactacctgtcaccgcggccgtcgtctcccccgtcctattcacgaattccgaattccactgcgctgcgcttctgctccccccttctctctccctccgtgttcgctccctcggatcccacgcggctgcgggctgcggcgggggcggcgtccgaggcttagggtttagcgtttggaggagtttaggggtttgtgaggaggaagaggaggaggaggaggaggaggaggagcggatggggacagcggggaagggcgcgtgggtggtgccggcgccggcgtacagggaggtggaggggtgggagggcgcgggggacgacgcgccgggcttcaggtgcgcccactcgctcaccgccgtcgcgcctaccaagggccacggcccgcggctcatcctcttcggcggcgccaccgccatcgagaccggcgcatcttcgggcctccccggcatcaggctcgcgggggtgacgaactcggtgcactcgtacgacgtggagacgcgcaggtggacgaggttacatcctgctggagagcctccgtctccgagggccgcgcatgctgcagctgcagtgggcaccatggttgttttccagggtggaattggaccagcagggcactccacagacgatctctatgtccttgacctcacaaacgacaagtttaaatggcacagggttgttgttcaaggggcggggcctggtcctcgctatggtcactgcatggatttggtagctcaacggtatcttgttactgtctcaggaaatgacggaaagcgggccttgtcagatgcttgggcattggacacagcacagaaaccatataggtggcagaaacttaaccctgaaggtgatagaccttcagcaagaatgtatgctaccgccagtacacgctctgatggcatgcttttactttgtggtggaagggatgcttctggaatgccactgtctgatgcctatgggctactaatgcatacaaatggccagtgggaatggactctagccccaggggtatctccatctcctagatatcagcatgcagccgtttttgttggtgctcggttgcatgttactggaggtgtccttagaggaggcagagctattgaaggagagggcgcaatagcagtcctggacactgctgctggagtttggttggatagaaatggcattgtgacctctcgtactttgaagtcatccaatgaacatgatgcttcttcggatctacttcggcgctgtcgtcatgctgctgcctcagttggttctcagatttacatttatggtggactcaggggagatatcctcctcgatgatttcctggttgctgagaatgcacccttccaatcagaaatcacttcgtctatgtacaatgttgatagagtccctaggggggaaactcaaaatagaaacaataattttcattcagattcacctgtccatcaatctacaaataacagtgcggacaagaagtcaattgacatgttgatagaggcctcaactgcggaagctgaagctgtcagcgctgtatggcgagctgctaaggaagcatctgcagcgtcttcggaagacagtctttcggagggaataggatcagaatccccattgagtgaaacttcaccaatgcctgaagatttcgatgatggggggtctctagaaccagatgtgaaactacattctagagcagttgtggttgctaaagaagcagtaggagatttaggatgcttggtcaggcagctctcactggatcagtttgagaatgaaagcagacggatgcatccttcaaacaatgaccaatcttatccaggccggagaacattaaatagacaacgatcaccacaagttggcgagctatgctacgctgccgagcagatttttatgcaagaaccaactgttttacaattaaaagcaccaattaaagtatttggtgatcttcatgggcagtttggggacttaatgcgcctttttgatgagtatggttttccgtcaactgctggtgacataacgtatattgattatctcttcttgggagactatgttgaccgaggtcagcacagcttagagacaatagctttgcttcttgctcttaaaatcgagtaccctgaaaatgtacacttgatcagaggaaatcatgaagctgctgacatcaatgccctttttggcttccgccttgaatgcattgagagaatgggtgaaagtgatggaatatgggcttggacaagattcaatcaactgttcaattatctcccactcgctgccatgatagaaaagaaaataatctgcatgcatggaggcataggaaggtcaataaacacagtggagcaaattgagaaacttgagaggcctatcacaatggatgttggttccattgtcctcatggacctgctatggtctgatcctacagaaaatgatagtgtggagggtttgagacctaatgcacgagggcccggcttagtgacatttgggcctgatcgagtaacagaattctgtaaacgaaacaaattgcagttgatcataagagcccatgagtgtgttatggatgggtttgagcgtttcgctcatggacaattgatcactttattttcagcaacaaattactgtggtactgcgaacaacgcaggggccatacttgttgtcggcaggggcttagttatcgtgccaaagttaattcatccacttccacctcctgttaattcacctgagtcctcccccgaacgtggggatgccacatggatgcaggagcttaacattcagcggccacctactccaaccagagggcggccacaagctgccggtgataggaattctcttgcttacatatgatacttgacacgacagagccacctccatctgctggatatgtttgtttgtaatcagaaatttctttaccagtttcaaggtacatatggtatagccaagaagaacaatcaaccaacaggacatcatggatacacttgtgatcagttccctggtaatcctttgtgatgcatcggttttaactgtagttgtgtgctaccgtgacttcagctcctaactggggagctgcataatcagcatttcagatctcaagcaacattgtatgattgcgataccagtggacaataatcaagtctgatgtagttgtaatagctaatctgtaatttcagtgtacatggatagattgttctttcgtcagagtaggaaggtttccaaatgtttgcatactatgcatgctgcagcctgggacgcggtttaaacaggacagctatacaagttgccagatctgagctagattgggcagagaagatttgaaccattttatttgctctccgcggagcgcgaatgtaagaggttgtgttgtgttgtgaaatactgaattcgttataggtatttgtgcaataaattaagttttgcttaaatcagtgaatgctttggtttagtgacctgagttacaacgacaacaaagccctttagttagagatggcaacaagtacataccttatgggtattgtcatcctatgcccgtacgtgcgggttgcatattaccg

SEQ ID NO: 42817 - DNA, 1655 bp, Zea Mays
tgctgaaagcctgaaactgctcaagtagcgcgcaacgacaagagcaacgaggaacatcagttaggactacctccacaaattgagcatcggttaccccattgcatcgtcctcttcggcggcgctggcgcccacaccaccgaaccctcttccagcttccttccacccgagcacgccggtcacccatcatcgccgaagccctccccctcctgcttcagctgtgctggtattagattagatcaaagtggaccgcgtcggattgcggttgcagattcctctcctgcgaggcacgagctgagtcctatccctatccgcccttgttgcagcggtgcggaaggcaatggtggggttgggatggagagtcggctcaaaggtgcagagatggggccggagctgcctccggggtttctcttctgctgcagttccgtctcagctggagaatgtcggattcatcggacttgggaacatgggttcccatatggcaaggaacttgatcacggctggatataaagtgactgttcatgatatgtaaattcctgccaatccttatactactgttcatgatatgcgtcacagagttcattgtttttttcccttccagttcaaaactggtttcttcttatatctcagcttaatggactgttcttgtttgataaacattgaatctatctatcagaaatgaaaattctatgaagaaattctcagaggatggaatccctacaaaacagtctccacttgaagtatcagaatcgagtgatgtcataattaccatgcttccttcatctactcatgttttagaagtatacaatggacccaatggcttgctttgtcggggcgaacgcttgggcccatggttatacatagattcatcaacagttgatccacaaacatcaagaaagatatcgacagccatctcaagatgccttttaaaagaaaagaaaggtaagttccaccatataacagtaaagacatagggcctgtttgtttcagcttatagattatataatctagattataatctagattatataatctggattataatctatggagattataatctgtatgtagctgtctggtagttcagattatacgtatgcagattaatgttctgtgagacacaatgacaacaatgctcttgtttgtttagttgtcttctttttttacggtttggcattccatcgattcatacaactatttgcaaaataggaaattaaaattatgccaaatacaccattggaaagctacaaatttcgtttgtaaacatcagtcatagagactggtatacaatggcagtctttataagcatttcatcgattatgtggcgcacacataaaccatatagtgagcagcatcaatggagctagctcctatggtaaatagtccctgctgcgacatcaatggatcatcaaaagggagttgtgtttgctcgtcggggttgcgtttggtcgccggagcaacgcttgctcgcggcgaggacaccggagctgcgttcaggctgcggcgtgaaagcacgcccagaggcgacgccgccattcccaaggctgcacccgctccaccgttgccgaagcattccgcagagccattgtagatgccgcgctcgccgacgccacaatgttccccacgtgaagaggatcaacccaggagagggactcctg

SEQ ID NO: 42818 - DNA, 225 bp, Zea Mays
gctactcatgcagtcatggctttgttcgaagcctttctctcttttctttgctggtcttcccaatgatgcgtttcgtgcttgctggtaagcacacactctcggctctcccgcatgctttccaacccttgtgtgtctgcggcttgctccccatgattgcccacatgagaggggggcaatccttggctccgtcctgggacaactgcacttaggcaggcaggatctatg

SEQ ID NO: 42819 - DNA, 1404 bp, Zea Mays
gggggatggagtttggtgtgttggtggtcggttcgtctcactacgacgatgcgcagggcgccgggagtatcgtccttctcccctttgaggcaccggtggcagacgtggaagattggaggcggttcgaatcggcctcgccccagggtgatctaagcctcaggactatcaaggagacactcggtagctttggggttgcaatctcgattgcttgggcgtcgatgacacgagatttcacccctttcggcgagtgtattttcgcgtggtcaagggctagggcggaggcgcagctgtccgccctggagcagctctgtgtgggagccgcccattctgaagtaaagctgtgtgagcttgccgagctccgctccaggaccgaacgacttgagagtgaggcggtccaactacgctcctctgagggtgagggtgccaaggtcgaagccgatcacctccgggaagaggagacccaacttcaggggagcctttgtgaggtgagtctccgggttagggaggccgagtcgtcccttggtgaggccaatgtccacctagagagggaggatgcggagctttcgtgagagtgcgacgctactagaggtaggtcttttccatactcttatgccttctgttgttggttgcttttgccttccctcctcctcagagctccggaggatgttttctcgggccgatggggccaagaaaacagcggaggaggtgaaagcagcagttgaggcccgggtgcgacagctttcgcttgctcgcgatggcgcgccattgctacgtcgaccgaggcgacgatcgtgctctctgagcggagcgccgagctccaggagctctacttggtcgtcggcaaggtgtgtggccacctttttcccctgcctccaatcaaggtgcccttggtcggctggctgcagtcactacttggccatgcggagcacgtcgttgtcgtgggcatgttccatctgagcgacctggctccggggcagatggtgtctcacttcattgagattgacgcttctgtgatcgccaaaggctttactgccggtcgaaacgaggagctaggcaccattgaagatcagctggtccgccctcgtgctagatcgcttgccgaacgagttgatgtgaagaccctgttgtctacccctaggatctgacatcgcccgctggtgatctgcccgctggcgcttagaatgttccttatttcaatgcctctttgtaataattcctttggttagacaagatctccgcgtgacggactacttctgcttgaaactctttgcttttgggttttcggccggagtggcgtctcagtgtttgtggatctttgtggcagtggtctttggtaggtgtagagcctatcctttacttcccgcagagcatgacgacctgactgccttagtgacttgatcgata

SEQ ID NO: 42820 - DNA, 1079 bp, Zea Mays
attgtaagttaatgggccgaagttgtacagtgaaccatctcccacctttgacacttcgcgctccccatccaaaccgtactgatccgccggccgccgttctccatttcaaattgcaaacctatactccttttccgcctcctcgacgcaactcgtcgccgtcttctccaactcgcacttcgtccctcgccccacccaggggcggatctccacccggggctgcctgggctgcagcccctgtcggcagtcgcggcccagtccatcatcgcgcgacatgacctagcagtagcagcagacgtcctacgtccagccccagccgccgccgtttggctcctgcgttcgatctcgctgcgtcctggtcctgcgccctgcggtccagcctcctctccaagactccacttctccagcgcgctcgcccgcgccagccgccagggccgccaccggccaccgccattgggccccaccatttgccgctcccgcctacgatgccgacgagtgaggtgtggagcttgtccgattttgaaatcagcaagtacatcgctgagggcaggttcggcaaggtctacctcgcccgcgagaagcagagcgggtacgtggtggcgctcaaggtgatatttaaggcgaaactgaagaagcaccgcttccacgcgcacctacggcgggagatcgagatccagcagagtctcgaccaccctaacgtgctccgcctcttcacctggttccacgacgaagagcgagtcgtcctcgtcctcgagtacgcggcccgtggcgagctctacaaggtccttcgcgctgctggccgcttcaccgagcgcacgtccgccacatatgtagcgagtcttgctggtgcactggcatactgtcacaaaaagcaagtcattcatagggacatcaagcctgagaatttgctaatcgacatcgagatggctttaaaaaaacttgacatgtgggggtaaaactgccacacgacattatattaagaagaccatctcagcaggtcgagaaaacccctgccccacccatacacggcgaaaccgtagcccatataagaacgaccgcgactcgggctagaccttagacct

SEQ ID NO: 42821 - DNA, 1761 bp, Zea Mays
ctgactggcgttcgtgttccgtgttcgactcgacgcgctcgtgcgtggcatacagacgaacacctcacaaggacaaccagtcccctcactcaggaagcttcccggggaaagaatgtgcgggtgtgcggccctcgtcgccggagcccggccgccacggcccgtcctcccccgcaggctccgtcgccgtcgagggagctccgtccgagcagaggtctcaccaggcggtgagtcccagccgaagaaggtcaccgtcgcaggcgccggctgggccggctttgccgccgcgcaccacctcattaaacaggggtacgatgtcacgcttcttgctgcggagagtggcccaacggaggaggttggcctcagaggattctggcaaccgtatcgcaacatcttcgctttagtcgacgagctggggatctcgcctttcacgggctggaataaagcagcatactattctacggagggccttgctgtcgaatttcccatatttcataaccagccccgattaccagctccctttggagtctttgcatatccagaattccctaatcttcctttgagtgataggctgacatcaattcctgtcatagctgcagtcattgacttcgacaacactgacactgcttggaggaaatatgatgcaagaaaattctgacttcttgctgtgccgtggtgaagtagaagaaaaaattttctctccttggctgcaatcattggagcttaaaggcttaaaatttgtagaaaataaagttccaacaagtttgactacagatgtggatagcggatgcatctcttctattgtttgtggtgatgatgtgtacgaggcagatgcatttgttttagccatgggactctcttctctacaatccatcgtcaaaaacaggaatcttcttcacctatctacagtcgatgtgatctctgtaaaattatggtttgataaaaagatcataattccaaaggttgccaatgtgtgttctggttttgatgattcatctggctgggcattctttgaccttacctcagtatatgatgattattgtgaagaatcaataaccattgtggaggctgaatttgtatgttcatgtcacctttatcagtttgaaaatatacagcattttcatcaggatgtacttactctttcaacttatttctcagtataatgctagccatttggtactcttaagtgatgatgatattgtctatgaagcttcatcacatcttatcaaatgcatacaagattttgagggcgcaattgtgataagatattcaatcagaagatctcctaattctgtaatcaactttcttccagttgaaggagatgagccccatatagagacattgcgaagtctcaatagaagagccaatgaactgaagtcacaaattccattctcagaattctttctccaataattttgttgggatttttctgtgtttgttgagcattgccattgttgtaggcattgttattaagtcggtaaggtaaagcgtggcgacctagccctttgagtcgactagacgcttaaggcgcgcagcgaggtgtcgccatacagatgtcctaacctacaggagagcaatagaaacataccttgttgatgccaattttggagctccagtttcgcttgttccatgtagcgtgtatcccccttacagattgcaacatgaacatgttgtgaattataattaatgtaagaaacaatttataatgcaatgattgaatgaatcatctgtgtaaaatatagattggcttgaaggggatttaac

SEQ ID NO: 42822 - DNA, 1306 bp, Zea Mays
gttcggcgcttccgcccaactcccgcctccctcctccgttcctcactttccaatttccgtctccaccctccgcggtccgcgccgcggaccgcggtcaccactcaccagcagcgctgcagcgccacgccgccactccagtcccccaccgaccacttgccgattgccgttgccgcgtcggcgttgctggatcctcaagcagaccgcccggacccgggaacccgcccgcgcgcttattaataacggccacctcgttcccccgcccgccccgaaggccgagggaagtgtacgcgcctagcgaccagcatagattcgttccacgcctacctcctgccctcgcccgtgctctcagatctcgcgcgcgccccgcaaagggtaactttgagccatgggcacagttgtggatgctccagcagttgtggctgaagaggtcactgagaacatgttgggtggtaagaaagttacagctgtatttgttctaggtggtcctggaagtggaaaaggcacacagtgtgccaacattgtggaacactttggattcacccatcttagtgctggagatcttttgcgtgcagagattaaatctggctctgagaatggaaccatgattgaaaacatgataaaggagggaaagattgttccatcagaggtgactataaagctgttgcaggaggcaatgataaaaaatgaaaatgacaaattcctgatcgacggatttccaaggaatgaggagaatcgtgcagcatttgagaatgttaccaaaatttctcctgcatttgtgctattctttgactgttctgagaaagagatggagaaacgtctcttggggcgcaatcagggaagagttgatgataacattgaaactatcaaaaaaaggttcaaaacctttgttgagtcaagtttgcctgtcattgagcattacaactcaagggacaaggttaaaaagattgatgctgcaaaaccaattcctgaggtgtttgaagacgtcaaaaccatttttgccccatatgctccaaagcatttgttggcgctcccattcccctccttcccgcttttgagtcctctgggctaggttcaatgaattttgcccacttccaatctaagaagggaaaacgatacagctcgtgggcccttcttcagcgacgccaaaaagaactgaacaaaactgaaatacattcatttgtatccataatcccaattctaaaaacaccaagacctcgttcgattataatttagatatacatatatgtactatttgtttttatgcaattgttatataccaacatgttattgaatatttgtgtgccgt

SEQ ID NO: 42823 - DNA, 3012 bp, Zea Mays
gcgccgcttcccagagacgatggagcgaggacggggtggtagtggcggtcgcggtggcggccgcacgtttcagaggaacaatgcgggggaggagtggcccaacctcgtcggcgtggtgctgtcgtggagcctagcggatgtcatgaacaaggacctcttcaaggacaaggtcaagcagataccgtccacgttccccaacctcaagagctacctggagtgctacacctctccattgctggaggagctgagagctgagatgtcgtccagcctggaatccctgtcaaccgtgccttctgtcaggatctcacggatagaagaaaagagagacaaacacgaaatttatctggcttctgattgccaggttgctaagccacacaatcgccctgaatgctacactccaagtgtcggtgatatgcggatggaggggatgaatacgacgactcaccaccggctaagtatggcatcgtagcgtcaggcaaaatcgatgccgccgatgacgaacgccaagatggtaaaagtacctcactttttgctgcttgtctgctcaacattgtgacatacatccggatatggcgttgccttgattatgaagcactcagaacaaaccgaggccttatagagaagatggtaaactatcagccgatttcatctacttcagagaacagcacggaggatgctggtccaactgacagcgtggagatatggaccaagttgtctgcaatggaacttaacacttctcagaacgatgctgtcttgaactgcatttccaaaatgcactccaagagcagcacatttacccttatctggggtcctcctggcacagggaagacaaaaacaatcagtgtgctgctttggttaatgagagaaatgaagcatggtacgctcgtatgcgcaccaacaaaccttgccatcaaacaggttgcttcacgtttcttgaagctggtccaagagcactctggcgacacaaggtgcttgggagatgtcctattgattggcaacaaagagcgcatgtgtgttgatggtgacctcaaacaaatatatttatatgaccgtgtaaggaggctttttggctgctttgcaccattgaccggatggaaacatcacctatcttccctgtctgattttcttgagaatggctactcacagtacctccaacatctacaagacagtcaggaaggtgatacgccttcctttttctcttacgccagaaaaagatttgccgttatttatatggagctcagaagatgtttcaatgatttgttgttacatgtcccaaaatccagtattctggaagtgaattacaacagtatccttttacttcttgaaatgcttgaagagttcaaccacatgattcagtgcaggtattttggggatgaaattaggaaagttttcttgtacagtaatgatgaacctgatcagacaaactcgagtgtagtcactcttggcaaaatgaggataaaatgccttgaggaactgagcactctgttaagttgcttgaagcttcctctaacatcctcaaagcctaccattcgtgatttctgcattaaaagcgcttccatagttttctgtactgtatctagctccacaaaaataaccgctaacaaaaaggtagagtttcttgtggttgatgaggctgcccagctgaaagaatgtgaaacactgatccctttgcgtctgtggaccttaaagcatgctgttctaattggtgatgagtgccaattaccagcaacagtcaaaagcaaggtttgcactgatgcattatttggaagaagcctctttgaaaggttgagttcacttggacacgaaaagcatctacttaatatgcaatacagaatgcatccttccattagtattttcccgaacactagcttttatgaagggaggatctcagatgccactaatgtcatggaaaaagaacaccgaaggatgtatcttccaggttctatgtttggtccttactcatttataaatattgaagatggaagggaggaacgtgatgaacttggccatagcaaaagaaactttgtagaagctgctgtcattgaagaaatattataccgtctccgaagagcttgctttaaaaccaaaaggaaagtcacggttggtgtcatatgcccatacaatgctcaagttgtagcaatccaagggaaaatagagaaaatgaggttcgacccattgcaagtaaaaactaattctgtcgatggctttcaaggtggtgaagaagacatcatcattttatcaactgtgaggtcaaactcggttgggaaggtaggttttctttcaaacgcacagcgggcaaatgtgtgtttgacacgggcaagacattgcctttggatcctaggaaatgcaacaactctagcaagcagtggatctatttggtctgatctagttcgtgatgcaaaggataggcggtgtttcttcaatgccagtagcgactatgttatctctcacgtgattgctaagcaaaggagagatctcgacagagttaatgttgaaaagagcatccatatctcaagttccaaaaactgcagggtttgggttgaaacgcgatccccaaatgacctgaatgaacagggcacttcttcgacgagtgtttcacattacgctggaatcccgtcaagtgacattgttgttgtttctgaattccagcgtccaagcaataaaaatgaggatgtcgaggatataactgtcattccaaataaagagaatgataaggatatcaatgctatgcccgttattccagataaagggaatgtcgttgatggcaaccatatcctcgccattccttgcgccatgttgagtaatctagctagatggtgtatccgttcgttccgatcttaattgttcctttatgtctcctatccctttttactcctaagtttacagcattatatataagtgtctctccataacatggtcggatgtttgatttttgtaatgtgggtttgaataatgaaaatgtatgtttgggcctttttagcctcccttgactgttgagagaaaaaaaagcta

SEQ ID NO: 42824 - DNA, 2133 bp, Zea Mays
atggatcacgtagtcgggggcaagttcaagctcgggaagaagatcaggagtggatcattcgggaaactttacctcgccgtgaacgtgcagaatggcgaggaggtggctgtcaaactgggtggaagctgccggcgtgaagcactggccaccgggtgctgcacgtcaacggccaacagggggcaccgtgcaggtgggcagaagcagccagcgacaacagtagggcacagggatgtatatggaccttccaaatacactagacttttgcaagcaaccaaagatactctcagataagaagtcggtgcatgctgattatgcaccaagaaacatcctttcacagccccattaatcatctccatagcagccatcgacaaaaaaaagtccttgaaaatttagaaccttccttcggttaagaaatatgtccgttactgaaatggagaagggttgtacacatagttcaatgaatcaaaaggaaaactggtgtctgatgagatcatcataaatctgctgtcaagacgcctggaagagggagaagaaaagggtgaattggggttcatccttgatggctttcctcgaaccatgagacaagcggtagaaaatggccgatgccgaggatatccagcccctcgtctgcgacaacggaactggcatggtcaaggctgggttcgctggcgacgacgccccgagggccgtcttccccagcatcgtggggcgcccgcgccacactggtgtcatggtcgggatggggcagaaggacgcctacgtcggtgacgaggcgcagtccaagaggggtatcctgaccctcaagtaccccatcgagcacgggatcgtcagcaactgggacgacatggagaagatctggcatcacaccttctacaacgagctccgcgtggctcccgaggagcaccccgtcctcctcaccgaggcgcccctgaaccccaaggctaacagggagaagatgacccagatcatgttcgagaccttcaacacccccgctatgtacgtcgccatccagaccgtgctctctctgtatgccagtggccgtaccacagattttagagattacctgtatcgcaattttagatattccgtggaaaagacggaaggcctgggtgtgttcagaacacatgtgctcacagggcttgcccgctgcatcttggttcagtgaacgagggtaggatccagtgcccttaccatggttgggagtactctactgatgggaaatgtgaaaaaatgccatcaacaaatatgctcaacgtgcacatccagtcattgccatgctttgagcaggaaggaatggtctggatttggcctagggatgacccaccaaaggctacaatcccttctcttctgcctccttcaggatttacatgctcactgttgatgcagggggtgcatggcctagggggaggatggcgactaggttcatcgatggcggcaagcagctcgtgttcgaccacgcgacacagttcttcactgcgagcatccgcaccgctgcaggtgctgcatatcatcggcagagaggatcgagttcagatcgatgatgcaaggcggctgcatcgtcgagctgtaacacctgcagcgatagatgatgcctccttatgggacaccaccaccatatgcagcaatgtatgcacaaggtacaccataacagcaggcaccaatgccaccgggttcacacccatacagttcttatcctatgcagtcaccaaacggacagttcaaactccaataagaatctcttggctgctcacctgtcgcatcttccccgattcaaaatcgtcctggtcgcatcttccccgattcaaaatcgcccaattttggagatatgtgacaaacgccatgccctgtgcattagagaagatacagaatcgccatgccctgtacaagacagtgagccaaattcttgttcattttgcactatgatacatattgattcattaggccctaggttggaggttgtgactgatgagttgggaagggattacttgattggtggtgtacaattcttggactggatacatgttccagtttttggtccattagttcaggaattgtttcatttacatgtatattcagtacactcgtataatggaaacaggcaaatctctatctcattctttggttattgtgtta

SEQ ID NO: 42825 - DNA, 504 bp, Zea Mays
ccgcgctcctctaccgcgcccgctgcttgctcctctgctgcgcgcccatctcccatggcccctgcgccctggctcctgctcggccgaagctctctggctcgccgcggtgcccgtctccctgcgcgcacgcccgggttcctgctccctgttcccctcccgtccccctggtgctttcctgcgcgcgcttgctcccctgtccagctcggtcgaccgtccctgctcgcgcccccacggtgcagctcgagtctggtgctgcaaacggggaaagaagcagccgagttcctttgcgcgcagccgcgttcctcggttctggccggacctccacctcgcccatggcgatttccccgcccgacgtactccctcgttggtggccgagcagcccactcttggtgccctgttcgcgtccacctcccatgctgttgataaccgtgcgctcgggttctctggcgccgatccacgctcaccctcgtctccttcgtcggcaagctcggcgttgacgagttc

SEQ ID NO: 42826 - DNA, 3206 bp, Zea Mays
gagtaaccaaaccaagcaccacgcgcggccatggccttccccgccgacgcgctggttctagagatcaccgacacatcatcctccgccaccgccgccgccgcccgtgctccatcctcaccttctcccccgccgctgtccatctccgacctcgcgctaatcgagagctcctcctacttccgcgcgctcctcggcggcagcttcagtgaatccggcagagagcatgtgcgtgtgggctgcaatttggaggctgctgtgcaagtgctgcgctacctttttgagccttccgagagctttaacatcacgcacaacaatttcctccccctgttggaggtgctaccctaagtctccaacttcacttatcatccagggagctttgtttcttgctgttgagagccttctagtggagtgtcaaagatggttcggcaccatagcctctcaaacttctgccatgtcagttccattagatttcataattgaagtctggtactttgctgaagagcatggtgttacttttgttcaagacatttgccaaaaatttctagctcagaattttgtaggcacatgctatctcaggaaggtcatttaataaaataccttatgatttgctatgttcagcgatcaaatgtccacatctgacagtggatagtgaaaaacaattgtgtgaagcaattttgtattgggtttcagaaaatatgaaagcctgtgaacaatcaaaccccaactcagtagatggccacctcttcattcttagcaaggtgaagatatgccttttaccattaggatttgcggcagggacaatgaggcattggtttgactttggaaacaagatcatatgcactattcttgatcttctcaaagacagtttgaaaactttattggatgctgttgatgatggtaacttggatcgatattgcattcgaataacagaatattcaaagaacatagtgctttcaggatgtccccaagtaactacagcattcttgtacatatctgttctccctaatgatctgagtgtttcattgaagagaaggatagtgagttcatacacccaggttgatcatcaaaccttcgttctttatgaggaattagagaaggctactaaaaccttatcatttaagaatgtacacatggtggatatttcaaaatgtccaaacgttcattttggcgcagcaattgactggttgaagttgggttttccagaattaagggtattcagggtttcacattgtttatcatttcaatttgatgatttactatatctgttaatgagatgtccatggattgatgaaattgatatgactattgatacaagcactgtaacacccagacattcagtaatctcgtctagttctgaagtcctaagcaaggcaaaaccaaatcagaaaagatatggcatacattgttcagcatatgacaggcaaccaaattcggttttcttaaatatatcaagattgacattggaaggcagaaatgatattgatgatatggacttgttggagatatctgtcctgaaaaattctctgtgctatataaacattagaaactgcttcctgttgacggatgatggtatttctaaccttctgatgaagtgtacaaagatccattcgatggttctttcttatacttcttttggaaatcgatcaattcaaatgctatgcgctgccaatccttctggccacaacagtggacatgctcatgttatggcatcttatatgcaagaattacatctggatggctgcaaaggtattgactctgttgctttgtcgcagctagtgagcattataagtatcacaaagtttttgagcttaagggaaacatcacttacagatggtgcactctgcaagtttgttggctctagtctggagtatcttgacgtttcagagactgtgatttctatggtatcattagcaccagttattcaaagaaactgtaaattgaactgtctgaaaacagctggatgctgtagtcttctgttgcaatgtgctaatgtagaacatatcaatggtaacaagtatggagattttctacaggagttaggaactacctactgtctggaggatgttgaaatgggctggggattttgccctattcgaatcgaagaccttgttccttcttttagtaaagtaaggaagatgaaaattggtctcggcacatcattagcggagaatgttctgtgtgctcttcctatgatttgcccattcctcgagtctttgattctaaggtttcaggtgatatctgacagagttgttagacgtctattggaatcagcaacaaatcttcaggtgctttgcctgcactattgtcttggaagtttaacttcatttagtttccaaacaaaggcacctgcattaagagtattgcggcttcattgggtaacttcatggcttacaaatgatgacttgacaatccttacagagaattgcaatttggctgaactttcactttctggttgcaaacttcttgactccagctctcaagacattatctcatctgggtggccaaacttggcacttttacaccttgaggaatgtggtaaagtaactgttgaaggggtttcttcttttttcaactgtaaggctttggaagacgtcctactacggcacacgggtaggggcatcggaaggagcatcatagacgatgctatcagagagttaccactactgcggaagctggctttggatctttgcgatgcctgtgaagacggttacgatagcccaaacgatgcggaagggaagatgattagaagtgtaaggatgagtcgatgcaagaagatggcggggtcgtgtttggaggtccccagacaagggtcttcaacttcaaggccggtgcacaaggacactgtagtgctggaatggagcagcagaatgttcacaaccaccatagtgaaagaaagagtgtgatgagcctcttctgtagttttgtccctgatgaagaacacaagagcaggccacaatatatatgacttgtatgaatggtctccccgcttctgattttgaatgctttgtatgtggacatatcctcgtgtgtgaatgtatttgtatggtatcaaacgaagatcatcttttgcagtcgtactgtacccatgcactcttatgttgatccacgaacaaagtttggaatttttaggtgaccgtgttcatgtttgaaaattattgttgtactagtccttggtaaaataaaggaggcaaggcaggagccaaaaaaaa

SEQ ID NO: 42827 - DNA, 767 bp, Zea Mays
ggaacgtgtagtgtccaattacgtagaacttaagaagggtttttgtaaccttggatacatcattggatgttgtagtcattatatatataaagtcacgggcttctaataactaagatagccttggtccaacggtgtcctccggttcagtcgcgtcaggtccggacgtatataaaaggaaacctagagtgatagggtttagtttttgatgccccaccccgatgcacgagcaatagcacccacctaggtgcgtgtgacgatggtggttgcccaagagcgcgcggcggcggacccccggggcagcgacgatggcagctcccagattcggaggcgcggcggcggtggctcctgatccgtacgcgccatggtgccggttcttcgatcctgagccacggctgcagtctccagattcagaagtgcggtggtgacgactccctgattcggagggcgagcgacgacagggcaccggggcgggtgagcagcggcgaccctaacgagcgagcggtggcaatgccccatgaggcgcgacagtctgtggtggcggttgccacgctaggcataggtggcttcagcggcgacatcggtcgcgtgagacgtgggctgcgaggatcggtggtctgcacgacaatttgggtgtccttcgtttatcaactcctccaatccggtggcctcgacggcgtccagcgacgatatcctgcaatcctttgtttatgcatgcggatgttggttgagcccatactaggagtttcttcactaattatgatgtgcat

SEQ ID NO: 42828 - DNA, 2363 bp, Zea Mays
actgtcttgcctgttgcctctgcggctttgcctgcgctcacggacggtcactggctcacgctcccctcgcctgcgtcgcctcgcctagacaagagacaagacgcctagtcgcctccgatcgaaatcgaatcgagtcgggtgggctcgggcccggtcttgttgtcttgtctcccagctaggaatagcgcaacgagatccctcgcgcgcgcggaccccggagaggccgagggagggtgacagggcgtgtcctcgaccgcgaggggaatgggatcggagggacgggcctggaacggcgcgggcatggccgccggcagcggctatggcggcggggtagaggcgaaagcgaccaccacggctgtgtcggccgcggcccccgcggaggttcccacgtcggcggcctccgtcgacatctcgctgccgctcctgaagatgtcgcctcgcatcatagctctctgcaaggaattggtcgaagggtggtcgtcgattgacagctcgctcttctccatcgagaccgtgtccgggggcatcacgaatctattgctgaaggtttctgtcaaagaagacaacggcaatgagtcttctgttactgttcggttgtatggaccaaatacggacttggtgattgataggaaaagggaattgcaggtgagaatctgagtggtacgagattgtgtgttatagtcatattatactaacctagtaacctgcatcctatagtattctacattgggtctagtatgaccccttgtatttggtgtcatatttttatagtggcatattttcaattcttctagacatagcatagtcatggtcttgtagtagcatctgtcctaccaagtgcattaccttttgtttcatatctgtaccttttccctgacaaatggatttcatttcattctctgaaaattgctaacctagaatgatagtttttaagggttcctagactgtacacatagtataatttatctcggttctaaaatatttcctaatgcatacatctattaccgtcatggttaggcgataccatatctctcagctgcagggttcggggctcggctacttggaatatttgagaatggagtagttcagtcattcatctatgctcgaacactgtcaccagcagacatgaaagaacctaaaatagcagctgaaattgccaaggagctacgcaaattccatcaagtagacataccagggtctaaagaaccacaattgtggaatgatatattcaagtttttgaagaaagctgcagcattgaagtttgaggataacatgaagcagaagagatatgaaaagatctcatttagagaaatacaagatgaagttcaagaacttaaggatctcttggacattctgcgcgcgcctgtggtttatgcacacaatgacttgctttcaggaaatctgatgctcaatgatttggaagctatattttattgattttgagtatgggtcatacagctaccgtggctatgacattgcaaatcatttcaatgagtatgcaggatttgattgtgactataatttgtaagttctctccatgtcaatgaaatactcaaaagcaattactgttgtcatgtttttagtcagcagtattcatttgattgtgtatttaggtacccagataaagatgcccagtatcacttcttcaggaattatctacacactgatagacctagtgaggtggatgcacaagatatggaagtactttatgtggaaacaaacactttcagactagcatcgcacatttactgggcattatgggcccttattcaggcaaaggtatccccaattgactttgactatcttggatacttcttcttgcggtatggtgagtacaagaaacaaagggagtcctgcttctccttggcacaaagctttctctccgagctaaaaaatggctagagcctgagaatctgttcacgagtttatactggtgtacgcatgctcggagcgggtacgcgttgtgatcatcgactgctacccagaaactctattatagcggttgtagcagcccctcattgttgtatctgatgttaggttcatcattgtctaaggactagtttggatactctagtatcgagctcaattcatgtgtatgagatggattcgggtgtaacttaaactaatttacacactaatccaactcaacacatgtggattggggtcaatactaaattacccaaacaaagcctaacagggaagtcaccagtggcaaattatgtacttatatttataataataaacacaatcctgatgggttgtgccctgttgaatttgttcttcgattaattctgccctgtgcaatctgttctgcacttccgagtatatagtttttaatgactgggtagtcctttgaaggtccg

SEQ ID NO: 42829 - DNA, 525 bp, Zea Mays
tacagatccctccactggtgattctctcgaatctatatcacctttcggggacatggattttctggctagccacgggtcaactgtgatgttattcgacattcacacccgtctcctatgctatggatttacggtaaccacttgttggtaaacctctttctgtgtattttacccaagaggttgcatctgattctgtttggggaagatcgcgtaattgccacttgcccaatagactcagatagtacagtgtcatcagagaaagccaactgcacccatggaaccttatgtgttcctctggcagacatcgtctctactgatggacatatatgatttagcttgtggcgatacatgttatgtccactagagaaacgatattctgagacactcgccttcgcccaagactgccttatgattatcgctgatatggacatgtggtacatgcttctctacccttagaagtctttcactccgaatctcgggacgagattcttttaaggggggagggctgtaacaccccaggtgtttacc

SEQ ID NO: 42830 - DNA, 751 bp, Zea Mays
gtcgcctaccatcgatgtcggccatggcagtcgttgctccgcagcctaccatcgacgtcgaccatggtagtcgttgctccgccgcctaccattgacgccggccatggcagtcgttgctccgccacatcttgctgcatactcccgttgatgggaacgctcgacctcccggtgctcccgctcccgtccttggtgagcgtggagggcgcatcacccgtggctacgacaacagtaggtcaaggcaagtggaggtggaggcattggcgcggtagtcaataggttattcattttgttgagattgcctgattgcaacaaagttgcatccagttaaattggcaatgtggtacaacaacgagctttaattaagctgtgcatcctatggccatcatcaacattacatatgatttacctttttcctcctcctcttcttttttttaaaaaaaacttcaccaactcaagatccacactgtttcatgagtacagaaagtcattggcttccaggggtagcgtggtcagccccaaaagatttgtgattacaactcaaatatgagcttcaacatgctctcctgaagctcgaagcagcaaaaggcttcaacaacacagtaaaagcgggtggaatgcatttttttctttggagagagacgaactacggggattgagttcttcatgtgcgaatagattgcaattcataacagttcattgctaactggtttagcatcgtctattcagacctggcttcaagttacttagaaac

SEQ ID NO: 42831 - DNA, 323 bp, Zea Mays
gtgaataagcgagtgtaatggactatttgagaggtttactcgcctatcctaatatgttttggattatgtggatgctagcgaaaaaaagtaatacatcctacgtgattttaatgtgaaacttcagctcctaatggcaactagtttggttgaaggttataaggaggtggtcagtcatgctgttctaggaaataataaggttcgtctacatcaggagtttaagtgaaagaagtaaaggatatacctgatgtgagggagttctcggatgtgttccccgaagatttgtctagttgcctccagaaagggatgtggaattgcgattgggt

SEQ ID NO: 42832 - DNA, 5833 bp, Zea Mays
aagaacaaaacttttaactcctgtggtcccaggagaccgagtggctacggatagccagccacaggtccagcttgcccagacaacatccactagctagctgcagctggtgtggtgtatcttttttcttctctgtgctctagaagattagtattgtagggcttctgtgcagcacccaagcaggaattcagaaagaatgcctggaagcatccacatctcagccactcaaccaccagtcatcacccctctgtttctgcaagtcactgtgggcaacagagaatacagtggaaacatagaacaagatgctttatctttccccgttacatcacttcgggagagtatggtaataatgctgtacagtgcagacggggcattgatatcaaaatcagagctgaagacaaaagagattgtggagtcaggaactatggacacagtatttgctcttgatagcgggggagaaatagttcttcagattcagttcttgctcaacgatgatgaccgcaagcgaatccaagaaatgagaaattctgcgatgaagatgaagcagcaagggctgcttggggatggcaatgaactcaatttttcagcgcattgtctaaacggctgacggagaagatttccaacatccgaagcaaagcagctgaacgatctgagcttcagaagagcatgtcactggatgatttgcaagagcgggccgtgttccctggaatcgatgcggatccacgggtgaaggcctcaagggactcgttgctgcaagggggtgtaaggttggaagatcccggtggctccaagcagcggctgagccaggccgaagtcgaagccttggcatcgccggtggaaggggagaggcggcgcctaggcctggacgtagcatccggcggcgggcgaggggtcgtgggagaggcggagcaggaagtcagcgacggggcaggggcagtggatgcgatcagcacgtggccgccggacaggccgggccctggctccaagaaaggggacagcataccagagagcagcaaatcaagtagtgcagtgaagacgatgataagtagctttgaaggcaccaccaccccacagggtatcgtttcagaaaccgactcaggcagccgcagcacgcaggcaggcaaaacagccatcatccctgttgatgatcaccacaaagcttcaaatcacaggtctcagcatatactagtagaaacgatcgcacctgcacaactacaaactattaggacgccaaaagcagccgaaagcagaagccgacgcagagcaagcaagcagcacaacgagctgcatccaagaactaggaggaggtcacaggcaaagcagatgcagatgcagatgcagccaagggactacgtggagcgtcccttgaactatctggttgcgacgtcgagcacctggatacacccgcacatctgcgtcacgggcgcgaccaagcaactgaaagacctccttgagcttgagcacctcaacttccaacgcaccgctactaagggacagcaaggtacccgagagagaaaaagcgacgaatccattgccgccgccgctgctcgggctcgcagcggtggtttcctgatgataaacgggtggctgatagttcagggggtgcgtgctgcagttgtgctcacggtttgctgcggggccatgttcttcagcagcagcagcagatgaagaaatctagcagtgcctacccctaatttttgcatacacaagccacagccacaataatacgacgacctctcctgctcctccgaatcctgaaaccaaccagatcacacgaaccaaaccaccgcctcctcccccgaccggagaggagcctcaccgccggcgcccatggcgacacgctacttgatcgtgtcgctgcccgtgcagtcgcccggcgccaccgccagctccctgtggtcgcgcctccaggactccatctcccgccactccttcgacaccccgctctaccgcttcaacgtcccggatctccgcgtcggcaccctcgactcgctcctcgcgctcagtgacgacctcgtcaagtccaatgtcttcgtggagggcgtgtcacacaagatccggaggcagatcgaggacctcgagcgcgccggaggggtcgagaccgggaccctcaccgtcgacggcgtccccgtcgacacctacctcactaggttcgtgtgggatgagggcaagtaccccacaatgtcccctctcaaggagatcgtcggcagcatacagtcacaggttgccaagatcgaggatgacatgaaggttcgagcatcggaatataataatgtaaggagccagcttagtgcgatcaacaggaagcaaagtgggagcggttcgtgatctttccaatctggtaaaaccggaggatatgatcacctcggaacatctcgtgacacttcttgcaattgttcccaagtactcccaaaaagactggttgtcaagctatgagaaaattgacacattcgtggtacctaggtcatctaaaaagctctatgaagacaatgaatatgctctctacactgtaacactgtttgctaaggttgttgacaattttaaggtccgtgctcgcgagaagggttttcaggtccgtgattttgagtacagtcctgaagcacaggaaagtcggaagcaggagatggagaagctactgcaagaccaagaagccatgaggaccactcttcttcaatggtgctatgccagctacagcgaggtattcagttcctggatgcacttctgtgctgtgcgtgtctttgtagagagcatccttagatatggtctccctccatcattcctgtctgctgttcttgcaccatctacaaagagcgagaagaaagtaaggagcatcttagaggagctctgcggcaatgcccatagtatttattggaaatccgaagacgacgtaggcgtcgccggtctgggaggtgaaacagaggcgcacccttacgtctccttcaccataaattttgtctgagaccggcatgttcctggccgtctgcggcccaggcaatatttcgagcagaactgccataaattctttgttgatttgtcggttcatgtgctcctgtaattcacatcacagagagaccagccgatcaataatgtagtttctgaggacatgtttccctgcagtattgtaccttgggagcgcattgtaaatggcctggaacagttgtctactggatttgtttatttatttacaataaaagccatgtgaaaataagtaactaaaatttggattgtcagttgatgaaaaatggaatgtggagctagctaggctctgggtttgtggcgcagacgatttttttccagtggaatgtgtacgttctggttctggagagcttcctatcctaccggccaggccatctctaccttgagccccttgcaattgaacatcacgaaactgggtgaaccagaatagattggcgtgtttggaacgcatggctgacaaattaaacccaagtcttatggaattttctcagttcccgaattctcgagccaagaggagcgagcagtactggatgccgagaactgccagccgtcgtccccgcgccgccgcggcgtccgggcgtttacaccacccatgcacgcacggacgaggtacccttcatcgtcgtcgtcgccgccgccgccgcccgctccaaaaccagaaagcggatgccactccaaggaagggcagctcctttccacactagtctcgctcgggccgacagcgatgtctccgtgcgcctgctcctcctcctgctgctgctcttcctcctcgcgcgcgctcacacccacctaacctataacccgctccgcctagctccttcctacccgttacctgctgcggagcggagacgacgaccacttccacctcctcccccccttccgcacccaatcccatccccctttccaaattccaatttccagcaggccgcccgcgatgcccaagccggcgacggcgaaccggcgccggaagcgcggcggcggcggcggcgaggggggcgccgccgatgaacaggccagcagcaagaggaggcccgccaccagcgtgctcacctccctggacgtcaacgacgccccgcgcccggagctccccctcttccagctgagccgacctcgccagcaggcggaacaggacgacgaagaggaggaggtgaccggtgggggcggaggaggaggagcggggtcgtcgttgtcatccgtggtcaacggccacgggcagagcccgcaccagcagcggcggctgtgggtcaaggaccggtcgcgcgcgtggtgggagcagtgcagcagcgccgactacccggaggcggacttccggtccgccttccggatggggcgcgccaccttcgcgatgctgtgcgacgcgctgggcgcggccgtggccaaggaggacaccgcgctccgcgccgccatccccgtccggcagcgcgtggcggtgtgcgtgtggcggctcgccacgggggagccgctccgcctcgtgtccaagcgcttcggcctcggcatctccacctgccacaagctggtcctggaggtctgcgccgccatccggggcctcctgatgccgcgcttcctccgctggcccgatgacgccgccgccgaggcgttcaagtcccggttccaggcggagtccgggatccccagcgtggtgggcgccatctacaccacccacatccccatcatcgcgcccaaggtgtcggtgaccgcctacttcaaccgccggcacacggagcgcaaccacaagacgtcctactccatcacgctgcagggggtggtggaccccgacggcgccttcaccgacgtctgcatcggctggcccgggtccatgcccgacgaccaggtgctggagcggtcggcgctgcagcagcgcgcggcggccgggatgatggcggggtcctgggtggtgggcggcgtcagcttcccgctcacggagtgggtgctggccccctacgcgcaggccaacctgacgtgggcgcagcacgccttcaacgagaaggtggcggaggtccggcgcgtcgccgtggacgccttcgcgcgcctcaagggccggtgggcgtgcctgcagaagcgcacggaggtgaagctgcaggacctcccggtggtgctgggcgcctgctgcgtgctgcacaacatctgcgagtcgcgcggggagggcatggaccccgcgctccgatgcgacatcgacgacgacgagacggtgccggagaaccccgtgcggtcggacggcgccaccaaggctagggacgacatcgcgcacaacctgctccacagcggacgagccggcaccaaattcttctgaattctctcagtcggttcgttcgttccatcagattcttctactatgctgctgctgctactctgtctcccgactccctctcctttcattggattggaaccgtccatggaattgatcattcgttgggttgtttgaactgtactgggaagtgggaagatcacccgcaatccgtcatcctcatcctcgtagaacgctgaacacacggagagaaaggtagatcaaagacaaagagtgggttgggtttgcttttgatcataggatttttagtctagtagcacgtggtacagttgttgaacaaacctacgtatccaagagccaagtcaaagaaacagcaacaagaagcagtagcacatctcaatccgtgcgttttccttgtgttttacctatggcattggcatgatcatgtaaaacaatattttgggatgaccgtatggccaaaatgctgaacgtgttgccgatcgggccgatccgatcgatatccactggtcgttaacaataacatgtttggatgagctggtcgaaccggacgttaatgactgactttcgatttttatttatgaattatttattttt

SEQ ID NO: 42833 - DNA, 404 bp, Zea Mays
atgagttttattgtgtatttattgtgttcaagttataaaacaccatccccggacctcacaagtccctgtgcaaatgatgcatatgttgaggggtgatatgttacaacttggccctttgagactaatttgtctgctcaagtacttttagtatagccttaaaggtgaattagaaagggaaatggtgcacttgaatatccaacaagactcccactataaaatggtaacatgttcaagttgccctaagtgttcattgccttctttcttttatttcacaatttttggtgaggcaatgaggttttggaggccactagttcttatgtttcggtgcttaatgccaaaggggaagaaattaaggccaaagcaaatagatcagctaccacttgtgaatttttcaaaaatttaag

SEQ ID NO: 42834 - DNA, 4209 bp, Zea Mays
atatatgccttcgttcctcgatcgtcagccgccgccagttcctttgccggttcgcgcaccacgcaacgcaagtgctcttcccttcttctctctcggttctcgccttctcggccctcctcctctattcttccctctcgtccacggccacaggctagccggccttgagcgcctgtgacggcgcaggttctggggttgcaacacgcccctccgcccttccggcgcatctgctgaattccactctcctcttgcccgccggcgtcgcctcttttctttgctatcgtcggcctcggaccccaaagacgacaacagcaggagggcagcgcacctgtgaaagcggcgcctctcttgccgttaaatttccgcgtcgcctggcttctcttccgcactctgctttcaagcccctctgccatgaccgtgcccaccaaagacgacagccaaaggttagagggcttgtgaaggagcacatcgactcatttaactactttgtcaacaaaggaatcaagaagatcgttgaggcaaacaaccgaattgaagcgcgcaacgatccatccatttaccttaggtaccttggtgtgcatgttggcatgccctcggtacatgtagagtataacattgaaaatatcacaccacatttttgccgccttactgaccgcacttactctgctcccataaaagttcatatcgaatacactgtcggaaagcagcatgaagtgagaagaaagaataactttatcattggctacatgcctattatgctaagaagccatgcctgtattctgtatgaaaaggatgaagctgaactagcaaaatatggtgagtgccctcttgatcctggcggctactttgttgtcaaaggaacagagaaggtcattctaattcaagaacagctagcaaagaatcgtattattgttgacactgatagcaaaggaagggtgatcgcatctgttaccagtagcacgcatgcaataaaaagcaagacggtgatttttatggataaggggaagatttatttacagctgaatcagttcaacaagccaattcctattatagtggtgatgaaagcgatgggaatggaaagtgatcaggagactgtacaaatggttggcagggacccaagatacggagatctcttatttccatctattcaggaatgtgcttcagagagaatatatacacgccagcgagccctgcagtacatggatgagaaggtgacgtatcctggtgccacaaatcagaaggaaggtcggtcatactcaatcctccgtgatgtgtttattgcccatgtgccggttaaaaatgggaacctacgaccaaagtgtatatacactgccttaatgttaaggcgcatgatggacgcaatcgtaaattctgacacctttgatgataaggattatgttggaaacaagagatttgagttgtctggccaactaatatcccttctttttgaggacctattcaaaacaatgaattcccaagctgttgagcgcatgaataaaaatagtgacaagactcactctagtcctttggattttagccagttgataatgcaagattccattacctttggtctggaaagggctatttccacaggaaattgggatattaaacgttttaggatgcataggaaaggtgtatctcaggttctttcgaggctatcctacatggcatctttaggctatatgacgcggataacaccccaatttgagaagactcgtaaaacaagtggtccacgtgctttgcagcctagtcagtggggtatgctctgcccatgtgatactcctgaaggagaagcttgtggattgacaaaaaatttagctttgctttctcatgtcacaacagaccaagaggaaggcccactgatatatctgtgttatagtctaggcgtggaggatttattgtctctctcatctgaagaaattcatacgccgggttcatttctggtcatgttcaatggattaatactggggaaacacaaagatcctcagaggcttgttattgatttgaggaatttacgtcgatctaatgtaattggagagtttgtaagcatttttattaatgagaaacagcattgcgttcacattgcctctgatggtggccgtgtttgtcgcccacttataattgctgatatggggatatcaaggatcgatgagactcacatggaaaaactgaggcatggaacttgtggttttgatgatttcctgcgtgatgggttgattgaatatcttgatgttaatgaagaaaacaatgcactgattgcattgtatgagcacatggatcaagatgatgttgaaagaagcagcatcacacacattgaaatagagccattgagtatcttaggggttgtatctggacttattccatatccacaccataaccaatctccacgtaatacttaccagtgtgcaatgggtaagcaagcgatgggaaatattgcatataatcagttgttcagagcagattcactactgtacttactagtgtatgcacaacggccactgctaacgacgaaaactattgagttggtggggtatgataaacttggcgctgggcagaacgccactgttgctgtcatgggatatagtggttatgatattgaagatgcaattgtgatgaacaagtcatcccttgatcgaggatttggccgttgcatagcattgaaaaagtacacagttttaaaggataactatggagatggtgtatccgatatgattgttgaaccccaaagagataatggtgttttgattaaacagaatatgagagcgttggatgaagatggaattgccggacctggtcaaattattcgcaatcatgatatctatgtaaacaagcgaactcccaaaaacacttcaaaaggtattggtagggcattgagagaaagtgactacaaggactcacctgccttgtacaaaggtgttgatggtgagactactgtggtagatcgtgtaatgctgtgctcagatacaaatgataagttatccattaagtgtattattcgtcacactagaaggccagaggttggtgacaaattcagtagcagacatgggcagaaaggtgtctgtggtacgattgttcagcaagaagacttccccttctctgagagaggaatctgtcctgatttaatcatgaatccacatggtttcccaagtcgtatgacaataggtaaaatgattgaacttcttggtggaaaggctggtgtttcttgtggacggtttcactatggcagtgcatttggtgagccaagtggtaatgctgacaaggttgcagacataagctctactctaatcaagcatggtttcagctataatggaaaagatttcttgtactcaggcattcttggtcagcctcttgaggcatacatcttcatgggaccaatctactatcagaaactaaagcacatggttcttgataagatgcatgctcgagctagtggaccgcgggtgttactgacgaggcaaccaactgaggggcgaagccgtgatggaggcttgcgtcttggtgagatggaacgtgattgtctaattgcatatggcgcgagcatgctaatatttgaacgtctactgttatcaagtgatccttatcaagtccaggtttgcagaaaatgtggcttgttaggctactacaatcacaaactgaagacttcatactgttcaatgtgcaagaatggggaaaacatggccaagatgaggctgccatacgcttgcaagcttctattccaggagttgcatgcaatgaatgtagtaccacgcttgaagttaaccgaagtatgacagatgctgggactgtacaatgagagagatgctggattcgaaatgtgtttagagctatatgataaattaaagccctctttgataggggcatagggcttttttttttttgttaactggttcgagagaaaccacgtttaggtgtgtggtttcagccgtctagctagtctcttcgcgggcttctcttctcccgcggaggtatacaagctatcgccgggcaattgttgtatatatagttttttcccgatgtcatatatgaaggaatctggacctctttgtttagatgatcgctgaacgccctgcagggctagattacgatctttgaatgctgaatcattggcatgtgccattattattctagagtcactcgataacccaccctctatccagataattgcactgacgccccctttgataattacattctaatgatagtaatttgtgc

SEQ ID NO: 42835 - DNA, 978 bp, Zea Mays
acttctctctttgtctgcgcttccaacgcaggaggcgttgcggccatggcggcttcgaagcccatcttgtatagcgcgtggatcagctcctgctccttccgagtccggatcgccctcaacctcaaaggtgtggattatgagtacagggctgtgacaaggaacgatctagattacgaaaagatcaatccaatcaagtatgttccagcattggttgatggggattttgttgtttctgactccctggcaatcatattgtatcttgaagataaatatcctcaacaccctcttttgcctcaagatctcaaaaagaaagctataaatctgcagattgcaaatatagtttgttcaagcattcaacctcttcaatgttatgctgtaattggtctgcttgatggcaccttaggctctaaccagagccttcagattgttcggaattacaccgacaagggatttaaaggttgtgacagtaaatatgctactggagacgaagtccaactgatgtgtttcttgcgccccagatgtatgcaggcgtgacgcgcttcggaattgatatgtcaaagtaccctcttctggagaggttctacaaagcctatatggagatcccagcatttcaagtcgcggttcctgaaaaacagccggatgcgcctgcgtccccatactgaaacggaggcagcaaccatattgatattcaaattgatttggttatcttggaatcatgttgtatgtagcatgacatagaaggccacgatgtatgcctatttgtttcgtacacattctggtttgtccgaagaatttcacagtaaataaggcccgatgatttgtgtagtagtgttaatagaaaaaagaaacagaatgcatggctcctgttgtactacatatgctaaaaaaatctgcgatgccaaatgcaaatgactcctcgttggacagagatgaggcaccgaccaattcaaattaattcatatcaaaactgtaagctga

SEQ ID NO: 42836 - DNA, 1552 bp, Zea Mays
cccacttgctctagtgatgtgggcaaatggctagcattgagtttggtgataaattttctgacgttgttgggagcccctattatgttgcccctgaggtgcttcaaaaatgttatggcccagaatctgatgtatggagtgctggagtgattttgtacattttgctatgtggtgtacccccattttgggcagagagtgaagcagggatcttcaggcagattttgcgaggcaaacttgatttggaatctgaaccatggccaagtatctctgatagtgctaaggatttagtccgtaagatgcttatccgcgatcctacaaagaggttcactgctcatgaggttttatgtcatccatggattgttgatgatgctgtcgcacctgataagcctattgattctgctgttttgtcaaggctgaaaaacttttctgcaatgaacaagctcaagaagatggcattgagggtgattgctgaaagtctatctgaggaggagattgggggtttgaaggagttgttcaaaatgatcgatactgacaacagcgggacgataacttatgatgaactgaaggatggtctgaaaagggttggctcggacctgatggaacctgaaatccaggctttaatggatgcagctgatatcgacaacagcggaaccattgactatggagagttcttggcggctacgttgcacatgaataaactggagagggaggaaagcttggtgtcggcgtttgcgttcttcgataaggacgggagtggcttcataacgatcgacgagctctcacaagcatgcgaacagttcggtctttctgatgtccatctcgaggatatgatcaaagatgtggaccaaaacaatgacggtcagattgattatagtgagtttgccgcgatgatgagaaagggcaatgctggcggagcaggacggcggaccatgaggaacagcttgcatgtgaatcttggcgagctcctgaagcccaccgagacctagttttttttaaccagaggatcctgcttcccagatgcgccccatctgaaacttaccgtgtgcctcatccgctttcacagatcgattagttgatctctagtagcagcgccaaaagcagtttaagattttctcagtggtactagtagtgaggggaaaatagcatcctgtggtgccagtgagagattttaggcgctgaagacgacgtgctatgctactccggagtcctgttgtcttcttcttcttcttgttgttgttgatttcaggtttgtactattactgatctttgttgtaaaatgcgctgttgtcccatgaggtaggcacctaggtctcctccatttgaattatatcaaacggatttgtaaacacgttctcatgcatgaaaccatttcttaatgatgatttattgtgtgcttttttccccccgacactgatgtggaaaggcgtttcggatgcgaatcatgtgtatggtttgcagtacttttcgtgtggtggaggaacatgcattgacaggggttcagaatctacgtaccatgtacagagcgtttgtccagacatggtcaaaccagtgatgt

SEQ ID NO: 42837 - DNA, 645 bp, Zea Mays
cttgctgcctccacatcatggaagatggaactactgtcaagcttgtaagaggtttgatcacccgtaatgtgaaggacacagttgatttgttccaccaaagatttggttgtttgtggaaagagggcaggagctttcacttgcttgcttgatgaaacggggcgatatggtcctcacgattctttacctgaggaagtaaaacctgacttcaaggtgtcctcactgacagaagtattcgctgtgctggaggagcacttcgatttggcaccagtgcctgccgagagtagaatatgacagggaagttttattggacctcccttctaatgtgaaatcggctacccaaccaacagcttgaataatgtggaggacgttgatgggactttcaagtatcagaagcccctgctagagcctgcagccagagcccagaaggacgatggctgttccaaggggggattgaatgtctttggaaaggcaatgaagtgattcagttcgttgtaaatctattatattatgttgccccagactaaaccagcttgtgtggtttagtgactgaaatgaccacacgtatctggagattcagaatataacaatcgatttccacggatttcattcgttcaatttggttcccctatctctttcacacagcaa

SEQ ID NO: 42838 - DNA, 2412 bp, Zea Mays
agccaacaccctaggaagcattcctgcatctaaaaatctctcatggtgaactcatgtgcacctgcagcatttcttcactcttctgcatcctggcaagctttacttgtcttttttatttctgtgactgcagttggtgccgcagatgctggaggccaagatgctggtggccaaggtccgtgtcctcatttctcctgtggtgatcttggcaacatatccaaacctttccgtaggccaggcgacccagaagagtgcggtgtaaaagcatacgagctggtctgtagcaacggcaaggctacaattcgcatcaacacggggacatattttgtcaccagcatcaactataccaatcgttccttctgggttgtggacgccaatttggatatgcacagcagctgccctcttcctcgttgggatcagtttccttacacttctgagggattgttctggagaagtggtaaacatacccatatcgatttgcccactgatgatgcctctttgtgggcatgctttgttaattgttcgagagcagttaggattacgaataacttggggtacaagcccgttacttgcctgagtgggagcagttcctttgtttatatatatgtacagtatggggcttgcacagtcggatctcttgaacctttttgtggatacttggccgagatttcctttggtaccaatccgaagggtactaatgcaagttatgcagatatcatacaagtggtaaagaagggattttctgttggattcccaaaggacgaatatgattatagctaccataatacttcttggatattcaagacatgcctaaataattttaccaggtacttccacgagcaattgtctagcggaggcatcgttggtataactcgtgctttcttttggagtgatgtatttcttctcaagtgcgcagagagttacaatgccacaactgttattttagatttcgatgtgatatccgtagtgactggtgttaaaatcacaacgttacttgcactagcagtacagatgttccttgcccacaagtactggaaaacaacgatagcaattgacgctgtcgagaaattcctccacatgcaacaaatgcttggtcctactaggtttgcctacactgacatcactgcgatcactggccatttcagagacaagttgggtcaaggaggatacggctccgtatacaagggtgcactactctcaggcaatatgcatgttgccgtcaagatgctgggcaactcgaactgcaatggggacgagttcatcagtgaggtctccaccatcggtaggattcaccacatcaatgtggttcgccttgtgggcttctgtgcagaggaaatgagaagggcactggtctatgagtacatgcccaatggttctcttgacaagtacatattctcggccgaaagaagtttttcttgggatatgctcaacgagattgctttgggcattgcaaggggaatcaactacctgcatctagggtgcgacatgcagatccttcactttgacatcaagccacacaacattcttttggacagcaattttgtcccaaaagtttctgactttggccttgccaagttgtacccgagagacaagagctttgtgccagcaagcgccatgcggggaactattgggagggcgaaggaacgcagaccaaaatgcagccaactcaagccgagcatactacccagcctgggtttatgaccgcctagcggaacaagacgctggcgagatttctgttgcggcagacatgcatgagttggagaggaaactgtgcatcgttgggctacgttgcattcaaatgaagccgcaggatcgtccgaccatgagcgaggttatagagatgctcgagtgtggcactcatggcctgggcctgcaaatgccttctaggccattcttctgtgatgatgatgatcctaatatgcctgcagcagattcttaccatttctcatcggagcttactgcaatatctgaggaagatggttgaagaaataatacatgtctttatgcattcagatgaagccacatgatcgtccaatgatgagtcaagtcgtagggatgcttcagtgatcatatggttcatacagattcttaccatttctcctcagacctgaatgcaattgtaacacccgggtttcggggcaccaagacccaggcgcgaacataatcaccaggtgtgctgggaccaagtctcacacatatgatgaatcatggcacatgatcgaatgtcacatatttactatataataggagttctatacaaaataattaattaattacattataaggagacaacggtccagcaacccaaagttgactgggagacgacggcctagacctctcacgaacacatcaaagcatccttcatgtgcctcatcctgcggtacctgctcttgacgtgtggggggtgtgagacag

SEQ ID NO: 42839 - DNA, 1305 bp, Zea Mays
acgccccaccccgctcggcctccagtccagctccaccgctttcacccgctccgctccgtttccgtcgctcccgtcccaaggagccgcgccacgcgagagggggccacggacggtggcagttttctgtttcggtgggcggggacgtcgtcgaccgaccgaccggagcggaaggccggagatgatggaggagggggcgcccgatctgcgagagctcgtgcgcctgccggatgttctcgtggtatgctcatctactggatggacagatgaaaagcacatgctttatcttcgattattggaagaaacatttgtgcaccaattacatggaagtggttgcatttttaagggactgtttaattgctctccaagatattgtaggcaaatgaaatcatctaagcaaattgttaaatacactacgcctggtcaggggtgtgccatagttgagggtggcaaagtcaagtcctgcataaaggctgagcatgttgagtcaccttcctgttgtggaaatcagcaagatgaaaaagttcgttccctggaagataatgcatcaaccactaagcccatggaaaaagccacttcccatgcaagggcagcaagcccaggacaagcttccacgtgctatgttggcaaacacagacattctccttccagaagtgcagatttttaaaagagaactactcgtgcatttactcagaggggtcggatcagaactttgatgaggaaacccaagggactggagaatcaaaacatgaatacaacccgaagcgactgaaatctgctgatggcacaagggatcatcaggttgtgaatgcagaagctcatcaggtgggctgccttgatgtgagtgacaaaaatagcgagaacttcagtgcatcgtcaaaagtgcttgctgcatcacttgatgttgaagctgggtctccctccggcgactgcaaggatcatggaccaaaaggataatgcaatgtccaccgagtgttttctggagttgactaacacacccacctggcgcgccgcaactgaatcagagataggaagtcaatcagtgcaagtttgtaagataagctagcttgcccgttattctggtttggaagtcaaaatagttcgttcaacttagcctaggcagttgacggttttgttgtgtttctgagggactctgatacgaaaatcaaattccctttgttctgtgtttggcgctgcaacctgtaaatggagtgctttttttttgcgtaccgtgatatctgcgttttggaatactataatatcagaatttggagcgtgtttcgccatgctcgcctcacttgattgggc

SEQ ID NO: 42840 - DNA, 2264 bp, Zea Mays
cacgctttgatcgcttcttttttctctccatcatttctccccgtttcgtctcgcttcttttctgtcgcctcccgtttcgtctatctccggccggcctttctgctgcaaggaaaccaatattgtttgctggatctttcaaaaagggaaaccgaattcccgagagcgagcagcagggaatctctgctgaatccgtaggctccgaattggagctggaagtgtagtgatttcctgattggggacataaggtggggtttgtccctactccccagtgagctccacgcggtccctgctgttcttccagtcaaaattctgtacccttcggtgctggggtcaaggaactaggcgtgttgtcctgaactcttgattcctgcttcatggaaattgtatatgtttttctctgaattcaaaatcgtccctattctcccaaagctttctgagcgcaggaagaaggatattgtccctctccaaaactataaacatgggttggttgagtaaaatatttaaaggtccagtaaatagagtttcaagaggacactacaacgggaactcccatgaaggctattcagctcagcacactaaatcatatggtgtgcatggcaatgaggacgaagacatggatcatgctattgcattatccttatcagaggaagatcaaaggaagggaaagaccattgataccgggcatcatttagatgaagatgaacagattgcacaggctctgcaagaaaatattggtcataacctagctgaagacgaacagcttgcacgggctctgcaagaaagtatgaatgatggacctcctcgtcagcacattccagttgaagatgttaactcagaaagtactccagcaagcatcttgccctcaaatattttccgcacaagtggcttgagggtttgtgctggatgcagaagtccaattggccgcggtcggtttctcagttgtatggactctgtttggcatcccgagtgcttcaggtgttatgcttgtgatagaccaatatcagagtatgaggccctgctacaaggagcgtttccatcctaaatgtgatgtttgcagtagctttattcccacagataaaaatggcctcattgaataccgggcccatcctttttggatgcagaagtattgtccttcccatgaaaatgatggtacacctaggtgctgcagttgtgaacgaatggagccaaaggacagtcaatacataacattagatgatggccggagactctgcttggagtgtctgcatactgctattatggagaccaatgaatgccagccactgtacattgatattcaagaattttatgagggtatgaacatgaaagtagagcaacaagttcccttgcttttggttgagcgacaagctttaaatgaagccatggaagcagagaaatctgtgcaccaccttcctgaaacaagaggcctctgcctatctgaggagcagattgtcagaactatattgaaaggaccaattggaccaggcaacagaatcatagatatggtcacaggaccatacaaactcattagacggtgtgaagtgactgcaattcttatactgtacgggctgccaaggctgctaactggctcgattctggctcatgagatgatgcatgcttacctccgacttaaaggataccgaaccctgagtccagaggttgaagaaggcatctgtcaggttctagctcatctttggcttgagtcagaaatcacatcaggttctggtagcatgtcaaccacctcagatgcgtcatcgtcatcttcaacatcttcatcatcgaaaaagggcgcaaagacggaatttgaaaaaagactcggggagttcttcaagtaccaaattgaaacagattcttctgtcgcttatggagatgggtttcgagcaggcatgcgagccattgagcggtacggcttgagaagcacccttgatcatatcaagatgacggggtcttttccatgctgaagctggtttttttttacctcggcttggatatgggtatacatattttttttggagaacttttggttcaggttatacatacgaaaagccgaacttctgtgtcgagaagaggcataaggatttagctatactgtccattgcaggaaaaaaaactgtttcccttttcaattataaaatttcacagtgcagacatgaaggtatgtggtctttagcttggccaaccttgtggaatgctgtcacttgatgcaaaagaaatttcgaatacatatgctttgctgtgcttgaaatgcaatggttggatgctatgct

SEQ ID NO: 42841 - DNA, 2305 bp, Zea Mays
cgaaaatgagctctctctggactgaactagtgagaatacttgagaaagagcgtataccagtctagcaccgaactaccaaaaccgaccgagccgcgaacttcacccctgccttctctcccttctccgtccaggccctggtgcccgagcgttctcgtgcggcaagtgggcgccgccgccggactacgccaggtgcccagttcctcgtcgggtccttcgtcgacgacgagcacccaccaaaaattcgagtattagactctacatgtcaagaaagtatggcgccaggaagcaaggcggagcggaaagcagcactagatgctggcgcatggatgttcaatgtcgtcacatctgttggtatcatcatggtcaacaaaggcttaatggcgactcatggctttagttttgctacaacactgactggacttcattttgcaatgacaaccttgatgacgttagtaatgaaatggctgggatatattcagccatcttatttaccattaccagaactagtaaagtttgccttttttgcaaacctgtcgatcgtcggaatgaacgttagtttgatgtggaactctgttggattctatcagatcgcgaagttgtgtatcattccagtcttatgcattctggaaatcatattcgacaaagttcgttactcaagagatacaaagctcagtatagtgcttgtcctcataggtgttgctgtgtgtactgtgactgatgttagcgtgaactctcaagggctattagctgcagtaatagctgtttggagcacagcactacaacaacatgctttctagaaattgccttccccagaccacaccttgtgtgggagctctcaacattagccaccaatgttttcagacggcctaatcgtttctgatcgccagaggatcaatcagcccgttcagatcgattaatcggacgatcagcccgattaatcacttctgagtccatgctaacaattctcagtttctcatcgccaagtggtcaagcccatcatgtagcaaacaacaaggctggcaccgccgcgccggggatggaggaggggccgagggggacgatgcgtcattttccgccgtcgccggtagcgcgccggcgttgcctgcatagtgctccgctaggttcctcgacagccagttcgtgtcgtgtctcgcgtgtgctccagcctgggcgttgttcactgttggctacttggttgtgttcatgtgggaggaaaaaggaagcctgggctgggctgctgggccgaattcgttgacgaaaaacaattgaagtggtccaaaatttcaaagcatacagccgtctgattgtccctgcgctaatcggacgatcagaaacctgatcgccctgatcggctccgaagctgcgatcagtcgattaatcgctgatttatggcgactaatctgacgttctgaaaatgctgttggccacccaaccatttttttcctttccgaaatacatatgttcaccatcttcaatggaagtactcgcttggctcattcaatctcttaggccatactgctccagcgcaggcagcatcattgttaatagtggggccttttgtggacttctggctgactaacaaaagagttgatgcttttaactacacatcaatagttacgttctttatcgtgttgtcgtgcataattgccgttgggacgaatctaagccaattcatatgcatcggaagattcacagccgtctcgttccaagtcctaggccacatgaagacagttctggtgttgaccttggggttccttttctttgggaaagaggggctcaacttccatgtcgcccttggcatgcttctggctgtgatcggcatgatctggtacgggaacgcgtcgtcgaaatctggaggcaaagagcggcaggtctaccccacaccgagcgagaagagtcagaagcatggggcgctgtcatcgcagtccgagctcgatcaaaaggtctaaacgagacacacaaaggcatccgatgcttgttgagcaccggtcgacctggctttatttttagtacttatttttgagggatgagatgtttctataggattgtaggtggggccatagcagaaagagggtgcctgggtaaaatgcccatgagtttacttttgcagtgagtatgtcaatctaagctggcagatacttgatttgtaatagtctttgtgtgtgtttcgctcttcatgtggcatgttcagtttgatctatagttgtatctttcactttcacactgaaattgaaaagtaaagcgcaaatttccttgtatatgtattacaagtaattaattaggtgctatatatcgcatctgtccg

SEQ ID NO: 42842 - DNA, 922 bp, Zea Mays
aataaatgtttgcataaaatgtgaatagaaagaccataaacagacaatatataaaaagggagccatgaactgaaatatatgtcgtaaacacctattgatgctggcataaaatatgtatacaaagtagcataaaaatatgcactaccgaaatcgacggctttgccgagtgcctgaagcactcggcaaagccttaaaaacactcgacaaagactttgccgagtgtcgcacttggcaaagagggctcggcgcacagtgcatcggcaaagccttctttgccgagtactttttctcgggcactcagcaaagaaaagcagccgttacgacgccgggtgacggagacgacgtctttgccgagtatcccaggtgacactcggtaaacaaaatcgttaccgagtgcaggactttgccgagtgcccgacaaaaagcactcggcaaaccgtccggcactgggcaaagacccgaattccggtagtgatggccatcactcgtggaaccgccacctcgccttggggatccaccaccgctcgcgtctaggggaggccaccatcatcgttcgcgcctagggaagtctaccacatccgctcccacctcggatggcgacactgtcatgcgcatgccccctggatccgtcgccgcgctatcgtagccgctccaacttagtcgtcgtacgcgcctaaggagggcgccaccatgcgcgtgcccttgggatctgacacaccgcctcatccgctcccacctcgccgtcatgcgcacctcaaggggcctctaccgagcgcgtgtcccgggtatccaacgcgccaccgcagccgctcccaccttaccgtcgtgcgcacctcaggggaccgctactgcgcacgtgcccttgggatccgccgcatgcgcctcagggggcgttgccacgtgtgtgcccctaggattcgtc

SEQ ID NO: 42843 - DNA, 1326 bp, Zea Mays
gtgctccctaaaaggtacgagaactaccaatctactacgagttatggccttagacgagggtgttctctgtgttgcacactcttaggctaacaggttggatgaactatcgacgtgtttggttccatgtaatgtaacggtataggattcctgcgggtatctgatatcgttacatgtgtttgttatgggttctattggaatcaaatacattggaatcagataccgctgtacagaaaactcaaaccctccaaccctagccggaatcaacaccccgattcactcgctcaggccgctcgagcgttcctcctcctcctgggacgccagtgccgccgccacccaggcctccatcctcctcggcctcctcctcggacgccagtgccaccgccacccaggtctccatcctccccggacgccagcagccggcgccaagtcttcgcttccgtccagaataatccagatgcaaaagggttgtatggagtttcctttccttactatgatgaactttcaatggtatattccaaggacatggccacaggtgaaggtgcggaagacatgacagatgctgttcaaaacttggaagaagagttagttcgtgtaaatgctaatgatgaagaggatggagaggatatgacatctgtagagacaccaaggcgttctgttgactcaacatcatctagctccaagaagcggaagaaagagtggaaaggaaagaagacttcatcaagtgacccgcttcttgatgtgttcaatgaagtgagtggtgatctcaaggttgccaccatgtcaattggaaaaatggcgcaagctatggatcgtgaggcatccaaccaagagaaggcaagagatgaggatccacaacaaaagctaagagagaaggcgatcaatgaggtccggagacttgaatttactggctcagaagttatcaaagcagctggtgtgtttgttaggatgccagatcaaatggggatgttgtttgcacttccagaaccactgaggagggaatacattgtcgacatgctacgtgatgaagccgcaaggagagagagagagaggtcaaagtgaaggtgctggtctagatgttgaatgatggagctttggaagttgttgttggtttagttggtctcaatctgtttacctttagtgttcttcatatgttgttgttgaatgactgtgaatgatgataaaaactgaatttttatgatgttgaacgttgttgaatgttcacgaatggtattgactatggtattgtatctgtgggtagctttcaatgtggtttgttgaatgtcggtacctttcaatatggaaaaaactgaatttttatgagttttg

SEQ ID NO: 42844 - DNA, 2477 bp, Zea Mays
atgagcagaagagtggcggccgcattggtggtgctgtgtgcagcgacgacggtggcggtgttggccggtgacgaggatgatatcacgcttcccggctgcaggagccggtgcgggaacatgagcatcccgtacccgttcggcgtggaggccgggtgctacctccccggtttcaacgtcacctgcaggaggaggaacggcgatggcccagcggcggcggcggatgagctgctgttccttggcgacggcaccgtgcaggtgctggagatctccatccccaacgccacggtgctcatcaactccagcgctggctacttcgatggcgacaagtacgtttccttgtccagtccgggcacatggagcggcgcgctcgggagcggcgacggcgacggggtgggggtgtacagtctagcgtgggggaggaacaagctcttcgctatggggtacaacgtgcaggtccgcctggaggcggataacgaaacctccagcgtctgcgtctccttgttcttcgagggcaacttcgccgcgccgaccgacgactgcgccggcttcctctgctgccagtctcccatctgggatcagcgcacatcctacaggttcaaggccctctcgctgaatgggtcggcggcgagcctcgaatctgacacctatgcctggatattggattccgagttgcgcttccagtacggcgcgccgcaaaaggacgcgctgacactgccggcgttgctggactggaggatcaaccacacgacgtgccacgccaacgcttcttcgccggcgtgccgcagcaggcatagcttctgccatgacgggtccctggaagtgtgccgcagaaacgactccctttgccacaactcgactgctggctttggtagggcgcacatctgccggtgtgacgagggataccgaggcaacccttaccttcccaataatggatgcaaagatgtcaacgaatgcgaccatccagacacctacccttgtcatggcatctgcaccaacactgacggaggatacaagtgcgaatgcgttcctggcttcgcgggcaatgcttctgtaccaactggatgcaaagacatcgacgagtgtgctcatcctcatctctacccatgttatggggtttgcctaaataagatgggatctttcgattgccaatgcaaaaggggaacatatggtgatcccttcacaaaggggggctgcagttacctcacagtttgggaaatggggttagcaattggtggtggaacaggatttttgcttttggcacttggggcacccatcatatcacgtaaaatcaagctacataaggctaaaaggaaaaaagagagatttttcaaacaaaatcatggcctgctactacaacaattggtatcacaaaattcagacatcagtgaaaggatgatcattaccattggggagctagagaaggctacaaacaacttccatccgtctcatgaagtcggtggtggagggcatggtgttgtgtataaaggacttttagacctacaagttgttgccatcaagaaatcaaaaattatagtaaaaagagaaattgatgatttcataaatgaggttgcaattctttcacagatcaaccataggaatattgtcaaactccttggttgttgtcttgaggcagaagttccactattggtgtatgagtttatatcaaatggcactctttcgcaccatctccatgttgaaggaacaatttcactctcatgggatgaccgactaaggattgccctcgaaatttccaaagctttggcttatctacattcatcagctacaacaccaatacttcacagagacatcaagtcatctaatatacttcttgatgataatttaactgcaaaggtatcagactttggtgcttcaaagtacatcccaattgatcggactggagtgactactgatgtgcaaggaacctttggctacttagatccaatgtattattatacatcccgactaactgacaagagcgatgtttttagttttggtgttcttcttatagagttgcttaccagaaagaaaccatatgcctacagatccgatgatggtgatggtctcgtttcagaattttcatcattgctagatcaagggaccttggttgacattatagatcctcaaatcatggaggaggataaacaagtcgatgaagttgccaaactagcagcaaagtgtacaaaattgagtggagaagatcggccgacaatgagggaagttgagatggcacttcaaaacttaagagccacagagaagcatgctcataataatacaacatcaacgaataaatatgaaaaaggtaaaacctctcagtacatgccatttggggggctcgccatagaaacaagtagacaatatactatggaagaggaaatgttgttgtcagcaaggtatccacgatgagatcctcttgtggccagaagaataatgccgctttttgtacccgtttactttccaaataaatgcatgtatcaaac

SEQ ID NO: 42845 - DNA, 3751 bp, Zea Mays
gagaaagaaaaggggagaggtggcaagagagagaagagaagagaagagaagaggggagtcgaggtcgagagcagcagggagagggaaaatccactaatccccccaccccggctctctcgaaacccgccattcccctccgccgcaaacacgcgtcggagctcgtggcgagcgccgccaccccgcactcgggctggggggcgtccctccgcccccttcgatctagagccggcggccgcgatcccgccgcgggtcctcgcggccgccgcgaattgggtttgtactgacgttaccggtgggcggaggcgctttgatcctgtagctgccgggttgggttcagtagatggcgggcaaggagcagggcggtggaggcccgccgcagaggcctcccatgcccgcagcgtccatgcagccgccaatcaagaagctggtaaggcagctggacttcaactcggcggcgttggcggggaaccccgcgatggcggcagcggcggccgccgtgtctagggctcttcagccgagggcgttgcccgcggggttccagcatccgcagcacgtgagggctgccgtgccgatggtggtgccgcagcagctgcaccagcgggcgctgccggtgatgcgcccgcatccggtggtgggtcatgtgccgcggcacgcggtgccgctggcggtccctgtaccgcagctccgtccgatgccgccacagccagtccagcgtcccccggtcgccgttcccttgaaaccagactcaccaaaaccgtgggcaagactttacgaagggaaagatagcactcccacgaagaaaaagtgctgcaactgcaggaactccagatgtttgaagttatactgtgaatgcttcgcttctggtactcactgtgatggttgcaactgcaccaactgttttaataatcctgagaatgaggttgccagacgtgaagctattgaagctacattggagcgtaatccagatgcttttaggcctaagatcgggagcagtccacatacgaataggaataatgaggtgtctagtgatctccctttagtagggaagcataataaagggtgccattgcaagaagtcaggatgcctcaagaagtactgtgagtgcttccaagctaatatactatgctctgaaaactgcaagtgtatggattgcaagaattttgaaggaagtgaagagagaagaaatcttttccaaggggatcataaaaatgcaattaacattcagcaggcgacaaatgcagctgtaaatggtgctattggaaccacaggattcccttctccctccacgtcaaggaagaggaaacatattgatccttcacttgaccattcaaacaaggaacatgcagcgcacaggaattgtcacatacctcagaaaaatgcagtgcctgatggttcaattccaataagccagtctgcacatcctccaactctgggcccctttaaagttacctacaggccccttttagcagacattgtccaagcagaggacgtaaaggagctatgcaagcttttagtggtggtatcaggagaagccgccaaaacatatgctgaccggaaagcgaaggaagagagggttggcaagaaggaagatgaaagggcagaacaaaaggaagatgacagggcaggttccctagcattgacaaaccatgacagagaaggaaataatcaagatccagataaaaaagcatcaatcgatgaccattcaagcagaggaactcatacgggcaaagctaatcaagaagaatccagacctaactgcgctgatgatcagaagtccaatagacctatgtctcctggaacactagcactgatgtgtgacgaacaagcgttcgagaaaatgtgtgacgaacaagatacagtgtttacggcttctcaaaatgctgttcctcagcagacagttactgtcaaccaaaaccaatctgcactgtacgcagaacaagaaagaattgtgctgacagaattccgtgattgcctccgcaaacttgtgacatacggaagaatgaaagctactcaaatgtccaaactgggaaacggaatcggctcgagtgaaaatggtccacgacttccgcaaattactggctcaacagtatctggagctaccctcactctcaagccatatgatgttcaaccagccatcggaaaagaacataccgtggtatcagaaaacgttgaggacaacccaaggaccataagaaggtcattctcttttagagcagaggatgttcacgttgttctaggcgatcacaaaaagaagggcaaccatgggagtaacatcttgtcatttctcaagaaaaccaggcgataagcataagaactttgctaaagaaataaacataagaatcaatgcaccaacgggatagagtggaactgtagaggagtaccttttcccccctttggatagtcttttctttcgtggtactattggtcctaccggtcatgcagcgctttcactgtttcgcaataagtactgatatactgaaagcatttcttcaatgatatgtctaggttatcttcaacaacttatcaattctcatactcatatttaaactctactctatcaatattgcaacctacaatataaaacaatgttttgggtgactatattagtgaaccgctggacacggtcgatctaagtcctagggtcccttatgtcctagagtgctataaagaatagctattcaggacagttgagcaacattttaaggtattaggaccataccattttatttgtcaatcgataaggagaaagaggacacatgatacatacacactgcaatctggacctctctaactatgcgcacgctggctcccactcgtgtccaggtttagcatgaccatcaacttgtgtcatgctccctcttaactctctttctagtactctatgtatcctgatgttgttacactacaataacattcatcaatgtaaaagaagttttgatcttttattggtgtgccacacaatttaagaccatagttccaaggaagacatctcatacaatcatacagaacgtgattgttgaaaccacatatgtcacatatcattctatggtagtctcttgtatgatttctcaaaccacaaataagaatcaagtaaaaagtcttacttgcttgaataaatgacttgaccaaataagaatctggagctactgttaatgatatatatcaggggtaccaagatcaacctttatgaagaaggacatgtacggatgagcctatgggcttggccgagagcccaaagactcgatgatcaagactagaaggaggcctgaagtgacaaggatttcagaagcgtatatatggaaaagatcttatcaaaatagaagatatgccaaatgttctaacacttgtaacgatatagttcgattcacatacaaatttgggaccaactcggtcacatgttcaactaggtaccgagtctgtgtctatcctataactgatgtcgctccttagactataaaggagggtcaatgagtgattacgggcctgtttggttcactacctcagttgccacactttgcctaacttttctgtctaaggttagttattcaattcgaacgactaaccttaggcaaagtgtggcatatttagccacaaaccaaacaggcccatatatattctttgtaatctcacatgtctgtatatatgtgaggtcgaagtcttttagctctaatttttctctgtttatcgatggctttgatacaatagtcaaagccttggaatcgtacatgagaagaggaagtctacaaaattt

SEQ ID NO: 42846 - DNA, 2503 bp, Zea Mays
cccgaatgttccttccgaaagcaccgcgctcgcctacagatcacgacacctcgcaccgccgctcccacttccggcctcgccggtgcgtgcatgtgcgcgccagggacgccaattgagctcggctccagcacgcaatcggctgcagagtgagctcagagctcaccctctccctctgccgctgctccgctggcctcttgaattctgttcatggttcggggatcaagaccattaggccagactatttcaaagaaattttcagacatgagatactccaatatttcctggccattccttctactgctatgttttgtttcgatggcagatgcagagtacatgaagtacaaggatccaaagcaacctattaactctagaatcagggatcttatcggtaggatgacccttgctgaaaaaattggccaaatgacacagatagaacgccaggttgcatctgcaaatgtcatgaaacagtactttataggaagcatcttaagtggtggtggaagtgttccttctccccaggccagtcctgcaatttgggtgaacatggtcaatgaatttcagaaaggtgccttgtcaacgcgtctaggaattccattgatttatggaattgatgctgttcatggtaataacaatgtctacaacgccactttattccctcataacattggacttggagctacaagggatcctggcctcataaaaagaattggtgaagcaactgctcttgaagtgcgtgcgacaggcattcaatatacttttgctccatgtattgcagtttgcagagatccaagatggggtcggtgctatgagagctacagtgaggatcacaaggttgtgcagcagatgacagatattatccttggtttgcagggtgagatcccagtcaatcataccaagggagttccatatgtagctgggaaggataaggttgctgcttgtgctaaacactatgttggtgatggtggaactcataatggaatcaatgagaataatacaatcattgatgagcatgggctgctaagcattcacatgccaccatattatgactctatcataaagggtgttgctactgttatggtttcttattcaagcttgaatggtgtaaaaatgcatgccaatcatgacttagtcactggataccttaaatccaagctgcattttagaggtttcgtgatatctgactggctaggagtggaccgtatcacctcacctcctggcgcaaactatacttattctgtgcaagctggaattaatgctggcattgatatggtgatggtgccatacaattacactgattacattaatgatctcacttctctcgttcacaagggtgtcatcaatataagcagaattgatgatgctgtgaagcggatccttcgagtcaaatttacaatgggcctgtttgagaaccctttagctgatcttagttttgcagagcagcttggaaagaaggagcatagggaactggctagagaagctgtcaggaaatcacttgttctgttaaaaaatgggaactctcccgatcagcaattcctacctctccctaagagagctagaagtatcctggtagctggaagtcatgctagcaatttggggtaccagtgtggtggatggtcaatccaatggatgggggacagtggtaatatcacaactgtatcctgtgcagggacaacaattcttgatgcgataaagtctaccgttgctgactcgacgtctgttgtctactctgagaaccccgatgacagtttcatgaagcacaatgacttctcattcgctatcgtcgttgttggcgagccaccatacgctgaaacagttggcgatagcaccgacctcactatgctagaccctggtccagacacgatcagaactgtgtgtgctgcagttaaatgtgcagtagtcatcatttctggtcgtcccattgtgattgagccgtatgttccattagtggaagcgcttgttgcagcttggcttccgggaaccgaaggtcagggtgtcgcagatgtactctttggagactacggtttcacaggcaagctcccgcacacctggttcaagtctgtcgaccaactgcccatgaatgtgggagacctacagtacgatccactctaccctttcggcttcggtttgatgataaattcatcattgccagggttctctggtgttgacaatctgggatataggaagcaaagagtgctatttgctgtgctgtgttctctactgtcattggttctaatcagttaatgaattgggcgtagatagtatttcaacacatagctgcccttttgtagttctcatatgattagagtgttactaatctagctttagcgattgttagctgccaaatgagtcactggacgtcaatcaatctattatctatctatctactagatgattccccgcgttttgccgagatgctgccattgattatattcctcctgctctgattatcactttggttaccttgtgcaaattgattgttcatgatgatccaactgaggtcccc

SEQ ID NO: 42847 - DNA, 1217 bp, Zea Mays
acgactgacagtgaaaaaataggaaatgactcgtcaacgcaactaccccaagtcgccgctgagccactctctccgtccgcgaatccgtaaatggaaggggacgaaatgctcagggtgaagctcggcaggcagggccttgaggtgtccaagcttggcttcgggtgcatgggcctcactggagtgtacaacgcccctgttcctgaccaagctgggatcgacataatcaagcacgcgtttgaggccggcatcaccttcttcgacaccgctgatgcctatgggccacacaccaacgaggtcctgctcggaaaggtgcaaattgccaccaaatgtggcattgcaggatttgatgcaagtggcatgcgtgtgaagggcactccagattatgttcgagcttgttgtgaagcaagccttcagcgccttgctactgactacattgatatatactaccaacatcgcattgatcagtcagtgcctatagaggaaactatgggagagctcaagaagttggttgaagaagggaaagtgaggtatgttggcttatcagaggctagtgccgataccattcgacgggcacatgctgtccatccaattactgcggtgcagttggagtggtcactatggaccagagatatagaggaagatataattccagtctgcagtctaaacatccaagatattctggggaaaacttggagaagaataaagttctgtatacacgacttgaaatgttgtccaagaagtatgggtgcacacctgctcaactcgctctctcctgggttcttcatcaaggagaagatgtggtccccatccctggaacaacaaaagccaagaaccttgacgaaaatatcggtgctgtaaaggtaaggctgagcaaggaagacctcgaagaaatctcaggcgcattccctgctggtgaggtggctgggtctagactccttggagtcttggagcctttttcctggaggctcgcaaataccccgcctccaaaatagcgagttcagatgcaaattcttggccatcctaccatttaggtcatgttatgttagatcatatctacatgatgcaaatgattgttcctgtgctcgcgcgtgaaaatgcatgtacctgaaacaaagagatgtaacagttggttctctgtgtggaacgtgctgattgctatagttgatcaaagaaatacgttggaattaagctaaatgtccttcatggtgcactttgat

SEQ ID NO: 42848 - DNA, 723 bp, Zea Mays
cggtaaggtacaataaactacctgtggcagaacctcccaagttatcgggcccacatgcacctgtccttgtctcaaagacctcagacggctatgtatgtgcaccagataacttaacaggatctgtccgagtgtcccagggaccccggataaaccacgaacaaccaggatcacaagattaagtaaacacaaatcacacaccaacattttgcagcggaaatctttttaccaaattttacaagctacatcaagttttacattagatttatcggagtggttacagaagtggttcaaaggaataactttaaactattataaattatttatagttttgaaatatatgctagctcaagtgaacattctcaataagaagtatagaagagttacttagacttataagaaggccgagcccaccggcacttaacaccatcaacaacagcacaaagttagaacctgaaaaacaacagggaataaaaccctgagcacggaattactcagcaagacttacccaactaaagaaaagactctcaagggtatgctggctagagggattcaaggtaaagctcatcaagtttcaaggactctttttgcagaaaagcttactagaagtgggtccttaagccaaaattttacatcacaagttaagtacttttcctgaatctagatttgcctaatctagagcattcacttgtcctacactagctttcttttaaaatctaacttttg

SEQ ID NO: 42849 - DNA, 115 bp, Zea Mays
tttgtatgccaaatttatgttgatgatatcatatttgggtctactaacaaatctatttgtgaagagttttgtaggatcatgatacaaaaattcgagatgtctatgatgggggagt

SEQ ID NO: 42850 - DNA, 890 bp, Zea Mays
ctttcccagcgagcagtcagcagcaccatcggtctcctccacgacaaaaaacagatattctatcgtcaggaatcaatcagcaatcctgcgttgcctgcccgacggagctgcttccctcgttgctgcattgcactgcggcggcctcgcgcttgttgtcgattccagctccatgcgcccatgatttactttacttgtaattgccaagaacctgatggagaaagctggccaaagatttcgcacgttcgttggaagagctttctaccaagaccgcaccactttgaaataaatgagaaggcaccttgacgtcacccctcttctcttgaagctccagagttcaggctcaagtcagaagccaatccgtcgttaattctgccgtccccgcggttccctgtttttgccgcttgtattgctccgctatttcagttgctatatcattcattccttggttgtgcacaattgccaatatgtatttctctgacagaatggagtaataactgtggccagagcttttgttttcatgtgcacaattgctatatcattcatgtggcaattagtataaatactccaggcaatgcaatagagaagatagctcattttcctacacttgtgcttgtggatggtgtggcagagaagttcaccatggaaccagttccagtaatgtgtgtgctacagtcaaaataggtcttaattctctgctacgtacagtcaaaatgtgtctgctacagtccgagtgtttctggagattcgttgttggcggatgatgagctacatttgtacagtatggattgagctcgaggacttgttcatctccttgctctattaccagttaaaaggtgattgcttgttctctagtaccaattggattcgttgttggcggatgaggtgcttgc

SEQ ID NO: 42851 - DNA, 2377 bp, Zea Mays
ctgcaacaagtctactacgagcgggcacggcgcggcgcctccgatttttttcacgggggagcgcccggggcgaggctataaaaaccgtctcctccacgccacctccgcaccgcagagagaggagcgagagcgagcgacccccccgagccgtgccaaccaagaaccatccacccaccaccaccaccccggccgcttccttgtccctgcccctccgttggtctcctttgcccatctcatcctctctctctctctccctctctctctctctggcggtcggcgtggctccgggggcgcgaagcgcgggctcggcggggcgactcgccggcggcgacctgcaggtttgggtatgagaggggtcacccacgcggcgcccaccacaagcgccccccgcccccgcggacgcctcatggacggcctcctcatcttcgtcttctacctctcgctgcccacccgtgccggccgcgaccactcgtcaatcgccgcctctaattgttagccgccgccggcacgccattgctcggcccgcctcccgagaagctcgatctgcggcctagccagccagcctcacgcgggatcaggatcgatggaccagccaccgaatggattcgccgccggaggttttttcacgcacattgatgggcaaaaccgttctcccccttctgtaattgtcattgggggagggatttcaggcatcgcagctgcacgtgctttgtcgactgcttcatttaaggtcacactcttggagtccagggaccgacctggtggccgtgtgcacactgactattctttcggttgcccaattgacatgggagcatcatggttgcatggtgtttgcaatgagaattctttggcaccactgattaggatgcttgggcttaggttatatcgcacaagcggtgataactctgttctgtatgaccatgatttggaaagttatgctctttttgataagcatggtcagcaagttccccaggagatagtaagcaaagttggagagacatttgagagaattcttaaggagactgtcatagtaagagatgagcatgcaaatgacatgcctctttttcaagccatagcgatcgtgcttgacaggaatccgcatatgaaggcctggaatatgaagtactgcagtggtgcatatgtaggctggaggcatggttcgctactgacatggacaatatatctctgaaaacttgggatcaggaacatgtgcttaccggtggacatggtcttatggtgaatggctacgaccctgtcatcagagctctcgctcaaggtctcgatattcacctcaaccacagggtcacaaagatcatacaacgctataacaaggttattgtctgtgtggaagatggggcgagttttgtcgcagacgctgctatagtaaccgtccctctcggggtactcaaggcaaacatcatcaagtttgagcctgagctaccgaaagagaagctctcggcaatcgccgaccttggcgtcggtatcgagaacaagatagctctcaagttcgacactgtgttttggcccgacgttgaagtgataggtagggtggccccgacgtcaaacgcctgtggctactttctcaaccttaacaaagccacaggaaacccggtcctggtgtgcatggtggccggaaggttcgcgtacgagatcgagaagctgtcggacgaagagtccgtgaacttcgtcatgtcccagctcaggaacatgctgccgcaggcaactgacccggttcagtatctggtctcgcgctggggtagtgaccccaactcacttggctcctactcgtgcgacctggtggggaaaccagctgacctgtatgaaaggttctgcgctccggtgggcagcctgttcttcgccggggaggccgcctgcattgaccactccggatcggtgcacggagcttactcgtcaggcatcgctgccgcagaggactgccgaaggcgtctgtcggcgcagctaggcatctcggccggcctgttccaggtcgggaaggctgccatgagggaggagatgacggctgaagccatggtccccttccagatatccaggttgtaagagagaatctattcaacaccgtctttgtgtcaccggtttgttgcttgatgtaattgtaaaatggtgtaagaccttgtttgttggaatattcgatggtggatgctgtttttcgtcaggtaaacgtcagcgtcagctgggccagatgaatgaatattcgcattgcgcgctgaacggattccaatccacgagctctcgctgcactgcagcttgccgaccactccaatccacgagctctcgctgcactgcagcttgccgaccactccactccacgtacacaatgcaaaagcccgagagggaacccttccacaatccacacccg

SEQ ID NO: 42852 - DNA, 1257 bp, Zea Mays
ctgcgctcgtcgcggtaggctccagctccttctgccggccgctcgttccacctccctgcaccgcgccgtgaaggtctgtgtctccctgctcggtttccggcccccgtcagcagctcctcaaatccctgctccgtttcagctttgccgcgcccctggacgcctgcttcttctctgctcggcgcccctgcgcttgctcgctcggttcctcccatggccagctcgccgaggatgccctgccccagccgcctctagctccctctccctgagctccttccaagccgcaccctctctctctcgtctttgtgctgcacgtcctggcgtcctctgctcgccatggccgtgtgagctccagcgccgtgctctgctcgcggagctcctccagctcgccggagctctctgccgcgctccatctcctcccagtgcacgcgctctgcttcttcctctccagctccagctcgctgcgcgtcctgcttcctgttgtcgcgagctccagcccagatttcgccttgtcgcccagctcgactctgccctctgctctagctcgccgtcgcctcttcgtgctggccgactagtctgccatggtcgtgtacagttccctgctcggccaggatggtcgcgccgtcgatcccgcttgagccccttcgcgttcgtggaagtggctcgactctgcccagttcgcgttctgctcgcctttgcgtcgcgcgcgtagcgttccgttgttcttgcgcgtgctgccgcgaagctccctgttcagttcgcctccatcgcgttgtcgtgcgcgcgaaactgctcccagtcgatatcaagtcggtgacgctcgtgttgggcatggtaaaacgctgcgtgtgctggtgtccgaactcgtcctagtcatggcgcttgataccgtgtcgtgctgtttctctgcgcacgtcctcctgttcgctgtcgcgactgccgtcaaatcatcggagtcgctcaactcaccaatcgtatcttggtcggtcatcgatttcatattcgtcatggtcctcacgtcagcagtccctatccgaacttgccagctcgccgactgaccgtagtgttccttgaattccctcgtcggccgacctcgcgacttagtttgtccgttgtgctggtcgctgtcccatactgtacctattagcttggatcctgcccagctcgtcgtcgcgtcgttcacagtcgagtcgtcgaacccgtcatcccctgctcaatccccacttcaccagctcgctccagacttcaattgaaggtcgt

SEQ ID NO: 42853 - DNA, 312 bp, Zea Mays
agtggatttgaaagacgaaccttgtgaagaggtggattcgtcgtttggtctccatcgatcattttcttcttcttcaatacttttcttcgcctcatcttccttcattttgaggaacatcctttcggcaattctcatggcaagatctattgccctaggatcaacatctgcaccaaaagatgaagtcgagacaatctcaactttttcaagcttagaagcactttcgtttcttagtccccccgacatgatctttcctcacgcggttcagcgttagaacgaggattaggctctgataccaattgaaagttgccttga

SEQ ID NO: 42854 - DNA, 2744 bp, Zea Mays
tcagtttttcttgtaggctcttagagttttcttacgacagtgtggtgtcacacccgattttggaaggcaaaccgaatgtgaaccatgtacgtgccaggatccgaaactcacgtacacaacaattacataattggacatcatcacacattgctcaaaataaatagcgaaaatagtactttattaagtcaatatgtccaagacatccatagagtcattaacttgacatagtcatcaacataatcaaagtgtggaacacgaaacatagaggataaggccttcacaggcagctaactgggggtttgccacgaaacacgactagaactcatcgtagttctgaaactcttcaaaatcctccatccttcatctcctcctaagcactgattgcaatgggacaacctagggttaggggtttttaaagcaagggtgagtacacatcaacatactcagcaaatgtcttgtttggctaaagtggactagttgtatgtggggttaaggttaaagcagttccttttagttggtcagatatttattactagtagtaagccaagttttagtaataaacccagttattacccaaaagtactccctccaagaggaaatataaaaaaccagatatataatcatcaccatttaccatcatcataaaagtaatccaaagttattctaatcaaagaggatcccaaggctgctcttaaccgtgagcacgactgatataccagtttctaacactctagagaggttgcacactttacccacgagtcgtgatccctttccagcctgggtttgcaagacccgatcttcactaccaaggtgaatggccagagatacactacatagcctttacaaagactcccttggtgcatagctgctcgttaggtttcgccagtcgtacaaacactgtactcctccctaaggtgggtgactaacaaaaccaaatcgaatgaacctcaacacacacccttagcagagcgagcactatgccccagcccccattgatggccctacggcaaagccaactacacccccaagttcatctaattaatcaactaagggcgtaccattccaccctcatgtttgtactattatcccgggtggtcactcaacgaacaggtccttacggagaggtgctcaggaaacaacctgagtcccctaaagtgacacaagaacatcatcagaatcatgataacaacattgtatcataaatattcgtatcatgttcgttgattaaagtggagcaatagcatgaggctaaccatgataacccaaaaaggtaaacaaggacaaggtaaatacagactagtcaatccttaggtcttaattaagtaatgcgggacagtgaattataaagtaagtaggacataatgggtcataagacacttgccttcaccaggttgttgctcatgaaggtcttcgccaacacactcaggagccacgggctgctagttgtctacagtcacacccggtttagaaggcaaaccaaatacgaaccatgtacgtgccaggatcagaaactcagtaccacaaagtttgaatttaaatggaatttgaattttgaatttgtaaataaaaataaagaaaacataaaagaaaagaataaagacaaaaaaggggaaaactagttttgggcccaatctcttcgccacggcccattccaacctttttctgtgcggcccaaatggcatgccgcgcgcgcctgatgagtgccgacaagtgggccgctctggctgcgcgcgcataacctggctgacgtgtggacccgtcgggtcagtgccgatcttcaagccgccgtgggtgcgcagatggcgtaccagccaccgtgatcctcgcgggcgtgggcgcctttccaccatcccgtgccagggtccgcgggggataaattagtgccctctgcgcccctctacacttctccgtcgacctcccgactcctctctcgcctcagccgcatgcacatcgtgctcgtcgagggaaacacgggtccaccgccgtcgaccacgtgaaccacgtgcactgggcaatccgtggagcattccagtgttgcgccgcgaccccttgatgcttcggcagccgctaacttctccattggtgtcacggctctagcgcatttgctcatcggactgggcactcgctgctcgtgccgtggaccgcccgcctgcgtgcatcatcttcggtatggctccctcaaccgcattcgctttcgtgctcgcatcgtgtaaagccatttgggttaggttggggcgctgggaccttggactcgcctcgccggtgaagtcctttgcctaggttgtcgttcggcgccgctgtcgggctagaggaagaagaaggtgcctgtgtccgtcgattggcacgcacacggttaggatcaggcgactgcataccccccttcgcgtaaggtgatcgtggcccttcagtgtcgatcgtgcggtcgagagttgtgctcggagttgtgcgttgtgggccacggatcttggatccaatggcctgggtcggatgtgggaaaatagtctagctggggtctaatctggcgcgcaagatcgggatccaacggtccgaatcttcccgtaccccttcgcccgagaatacttgcaaaagaaaccccctgttattttaaaaacaacccgcagtccatccggtatatccctctgtctcggtttcttttacgccagaacccctgcgctttctggaatttggtgcccagtccagagggttataaaaatcaggtaaatgaattagaaaatgagtttttg

SEQ ID NO: 42855 - DNA, 223 bp, Zea Mays
ctgtcaaaccctagaagctcgagaccgactaggacatcagtgatgagacggattgcattggagaacggctacacaaagatcatgctgccaacactggttctggaatagcatgccctgtgctatctgcaaccgtgaaggggcaaggctacgctttaccagccaatgtccagtatgtcgatgtacaatgggaggtacctgtggttcttccacttcatggttgtct

SEQ ID NO: 42856 - DNA, 886 bp, Zea Mays
atgatgaaaagctccgtgacgcatgggtcgtcgcaacctgtcatcttcccagatgatacgagcacctctgagcttcgatcttttttttttttgctttctttttttctccggccttgcagacaattttggtccgttgatttattttaagtagtccaaaatgccaatccaccgcagtcgcaggctcgcagctgcccttgcccgccatgatgcctccaccgccgctgcgccttcacctcctcttccgctccgaaaccctaatccctctactccggcaacgacccagctgcgacgcgccccattgccggaccaggaggtacatctccgttcgcgcctccgctgcacagctcgccgccgcggacgtctcgacggcgcagcagcctgcacttgaacttgggttggaggcagcggcggcgggcttcgtcaccggtaagaggaaggccaccgaggttctggagaaatattgttcagaaaggggatacggtggtggatgccacatgcgggaatggcaatgacacgctcgctctgctgaagatggtggctgatgaaacaggccgtggacgtgtttatgggatggacattcaagattctgcgatagagaatacttcctcttttctgaaaatggccgtggatgatgaacatcagcggggactggtaaaactgtttcctatatgtcatagtagaatggaagagattgttcccaaagatgctcctgtcaggcttgttgctttcaacttgggctaccttccaggaggagataaaactgtaatcacagtgcctaggacaactgagttagcattgcgagctgccagcagaattctcagttctgggggactcataagtgttcttgtatacattggacatccaggtggaaggtaaacaccagttg

SEQ ID NO: 42857 - DNA, 638 bp, Zea Mays
aagcaagcagcacagcagctatagatagcgcgcgctcatcaccaaagccgagagccaagcagccagctaattaagcagccaaattcagtgcgatggcgtcgtccgtcaccagaaccgcatgtctcctcgtgctcacactgttcgtcgtctccgcggcggtgatcttgcccacctccctgtgccatggagcccgtggcgtcgggttacgtatcggtttggaccctaaccatcctgcgtgcatcggggcatgctcagttcctgggggctcctacactcaccttcccccctatcgcggtggcggccctgtgaaaccgcttcccccaccgaacggagggaacccgtgacgccgcctgcctcccatcacgcgcgctctacgatggaacgatgcaccacgcacaactgtatcttagctgtgcttgtatagtactccctccgtttctttttatttgtcgcttgcactatccagcgacaaataaaaagaaacggagagagtatatgatgatcaataaaactggagtagtactggaatggtgagaatttcttctgctggatggcatgaacatgtcattgaatcttttttttttaaaaaaaaatatgacatgaaaatgaatggactgtgaaggtctttcagctcataa

SEQ ID NO: 42858 - DNA, 743 bp, Zea Mays
gcctcctctgtgcttggatctatgtttccccacccccaatgctgatccttctcgcctcgatgtccaagagctccgatatgtcgtccaccgagccccggtgctcagatcacaacacatgccaaaggatttggcgggcgtagcagggtgtcgttcccacgggcatccctggatcaggattgtggaagtgagtgccatggggcaggagctagacgtgaaggtgccattgctgcatgatgagggtgtggattccatgaaagcatatgactgaattgagcttcttctaagcatttttttatgatggggcattcaaagctggtgaattggactagatattgagtttacaggagcagtcagggataatatgcatggttctgtaattagtgtggaaacctgagcaagacgtaaggcgtgtttctaaaaatgttcttaggaccagtaaatctacggacaacaaggaagattgtgcaacagaaggtgaaggaggatagaaggtgcatggcatgtgctaaactgtattattcatggcagaagggggatggacgggcgacaacgacattggtgcggcgataaagttggtgagcacagaaggggagctaggtgtgccagtgacactggggcaacacagaagggggcaggcgacaaagtcaggtgtccactggcgaaggagacatctggaaactggaatcatgtagcctctgttctgcaaggtcgctaaatcccttcctggactgtatgcgccttca

SEQ ID NO: 42859 - DNA, 1870 bp, Zea Mays
tttttttcagcgcccttatctcctacgcgcgtgctcatcgatccatttcagctgccgcgcgtccctgcggtcttccagctccagcgtcggctgctcctccctggccacccgcgccccttgcttctcccttctcacgctccccgtcgagctccctggtcgccgcgcagtcgagctccctcagctcgctcctcctgtgccgcgcgccagcccctggttcggctctactcctccctgcttgccgttcctatccccctgccatggagtccgtcgtcagtccgagctcgcccatcctctgctcggtttcaacttggtcgtgcctgcagcttctcccatagtgagctccctccactgccctaggttcccatgcaacagccatgaaaccccttcgtgtcgcgccctcgatatgctcgatgaaataccgcagcgagctccgctccggatctgcgcagccccggccttgttgtcgacctcagtacgataagtgatcacgtgatgtgaaggactagagctcggtcgaccacaagatggtgttaagtattggtttcttcgcaaggtgatgctaatgaacaaacttaaggatggacagactgaaccagtgccaacacacaaggctggtcgccaagtggtcatcgtctaacaacactaacctagtgttatcccaggcaagccccagtgcatttgccacctccttgctgttttaaaaacattttatcacttatatgctgcattaggtggtaggagttgaatgggtaaacctttgctgcataacttccttgaattattgattatcatccttgatacctgatttgaaaatctagatatgcttagcctgcttatagacaaggaacaaaatattttgatgtatgaatcatgtttttacaaagaaaaaggggctggaatgatgaaggtatcaaaggtcttgatgacttcatcatttcggtagggtacctctaataggttccagattttcagaattattttaatatgagaccagacgttgagcaggaaaggtcgcccgtttgtgtcgattaaggaccgtaccgaaagtaggcttgctgatctaggaccctttaactggccacatgcctcatcatgggtaagcttagcctcggtcggaccaataccagaaaggccggcctgcaatgggagtggagagatggcgagagtatcgtgtatccacctggcaagaggctggatggtggggtactgagctctcggttagcggggacctgttctggtcttaagaaacccgtgggcgagttgacatatgcaagggttaagtgctacatatgtcgtgtggttggagatcctcagctgagtattaatcgattcggatcgctgttacttctcggatatgaagactagatcactgccctgcatcataattaacaagtgaaactaaagatgttaaaatgaagctagtgtagaacaattgaatgctctagattaggcaaatctagattcaggaaaagtacttaatttgtgaagtaaaagttggcataaggatccactactagtaagcttttctgcaaaaacgagtctttgaaatttgatgagctttaccttgattcccaacaaaccagcatatccttgagagtcttttctttagtcgggtaagtcttgctgagtaattgcgtactcagggctttattccctattgtttttcaggttataagtttgttctgttgtggatagtgtggatggtgctaagtgccggtgggctcggcctttttatataagtatatcacatctttagcttctttattgaggattgtcaattaagctagcatgtattttaaaaactataaatattttattcattttaaattataattcttttgaatcactctcttttgtaatcactccgata

SEQ ID NO: 42860 - DNA, 2394 bp, Zea Mays
ctaaccccgtgcgtctctcttctttcgctctgtctaccgcgcgcgcccgccgctacctgccagtcgcgcgcctgccgccagcgccccgccgccaccccacgcgcgccccaccgcccccgcgcgccggctcgtgtactccgctgtccgctcccattccactatggcctagctgcgtgctgctctggcatcggtcggtggataagcccagcaggcaagcaggcaggagactaggagagctcagcactgcacgcacgctcccctccccttactggccaaatcgatcgtccccttcaggttccaggctccggagcttgctttacttcaggttgtctagctgcatgttgaagtataattccggatagattcacagtttttatccgctaggaagggtggtaaaaggctaagtttttttttatgaattctctgcgttcttcactaatccccaccctaatcagtaaacacgcttacgaatcgtttcctaatcgtgtgacagggacaacaatgacctcagggacaacaatgacctccaagacgagcggcagcataaccaccaacctgagcaccacggggaagctctcctccgtgggcagcagcttcatggcgtctgccggcagccgcagcaccagcggcggggtttgacaagggggccaagtactccgacgaccagatcctcgaggcgcccaacctccgcaccttcacattcatagagctcaagacggccaccaagaacttccgtccagacagcgtcctcggcgaaggagggttcgggagagtctacaaagggtgggtggatgagaagaccatggcgccgaccaagaacgacaccggcatggttgttgcggtcaagaagctcaactcggagagcatgcatgggtttgaggaatggcagggttgcaattttcagagatcgtgagtcagagcgcaaggatcctgattatgacagaagctatgacagggtttccaggccagttatacatggtcatataccaccccgcgtgccccgcgccgccagcccgcgcctccaccccgtgcgatctctgtttagatcaatcgagttgagtttgttcattccaagtcattattgcatagagatatcaagcctgataattttctcatgggtctcgggaaaagagaaaaccaggtttatgttatcgattttggacttgcaaagaagtacagagatacatcaacacaccagcacattccatacagaacaaagccggagggatgacatggaataaaaaacaaaagtattcgggaaggttggtttaatacactgtcagccttccatggtagggcctgaaagctgggaacaaaaaacaaaagtatgaaaagatcagcgaaaggaaaattgctacttcaactgaggctctctgccgtggatatcctaccaaatttgcttcttacttccattactgtcgctcacagcgtttcgaagatgcaccggactatcagtacctgaagaatttgttcagagacctttttattcgggaaggttttcagtttgattatgtttttgactggaccattctaaagtaccaacaggcatagatgaccactgcaccacctcgtgcaattgtctgtacaaggaataaacttaccctcctaccttaagtagtagtagagattgtattgggtatagaaatgtacttcttttgttatgttatatttcattgccccctctctattttggttcctggccttggtttttgtttcttgtattttttttccatgtcgtctagctactgtagttgcccatcgtcaaagttttgtagagtggacatattgctaagaatctgccacattatgtttgcttgaggtattaatttatccaggtgtttaatgctggagtacagttagaagatccctaatcaattgcttctcatttcagtcgtgtaactttattcatgctacaacaacgactttgagcgaacatgagaccactgagctctagagtgaatgaaggacgtcgtctttggaagtcagacatcacctagagctagggtgtccattcttgacatgtttctcttagtgataggtggatactgtctagttaggaacagagtcttgagggattgatggacgcatgcatcttcaattcctgtgtgttgtattactactggtacaatctccaattcttgtgaacttatgtatttggacttgtgtgaatttgtgatatgaacatatatccatgtgtttgaaatctatattgtatgtgatattttgtgttgcatgtgatattatgtttgtctaaattttcatttctgtattttttattttttctagaaaagggttaagaacgtgggtacccacgttcttaacgttaagaacgtgggtaccgtcgaacttattgtgcattcctcgcagacccacgtaggacacataaggtcgacg

SEQ ID NO: 42861 - DNA, 1260 bp, Zea Mays
cgtgcctactaatattctacttggtacattaattcagctaattaaccaaaatagcgaaataactcgctataactgaacctggctcgataatcgcaagaactgcgaagtcgacgagagtttcgtgacttacgcaatttatcgagcaccctaatgagcctcgcactaacatattaatttattcaactatcgaactatactgaataatttatcagcttaccgtttccacagccaacatgaatccacgagatcggtagcgattttccgattgagacaatttatcgagcgcttgaggaatattgcgccgctagcttcgtcttcacccgattcttgggatttcttggggatgcacgaacgacgacgaccttcgattgaagtctggggtaagctggtgaggtggagatcgagccggggatgacgtgtttgacgactcgacggcaaacgacgagatcgacgacacgattgggaattaaaaccgagcgagccgagaggacacgctggcgaacagaaaaccgcgcgagcaccgaatagagaaaacgacgatgctgtcgcacacagtgcgaaggcgaacgacgcaacgacgaggacctaagatgtgcgacacacgacacgcactcagcatgtcgcgcgaccgagcgacgacgacaacagccgagtgcggtaaggggctggaaaacgacgacgggccaaacagaggacggaccaaacagaggagctcgcgtaggacaaactcggcacgacggccatggacgaggtgagcgagcttagcacgacagaggactcggcgcgcggcaggaaaagggctcgagcacgaacacggcaggcgagcagagggggctggggcagaggggatcttctttgaccagagccgagcgacgcagtccaagctgaggcaggggcgagctccatggcgagctcgagggagatgaagaaagggggcgattgggcagggagatgcgcacgcggtgatgggaacagggagcgcgctgagccgggtccaagcaccagggagctgctcgcggccggagctgagcagagggacatgcgccggagctaggagctgagcgtcggccacagagaaatacaggaggcgcgcgacgaacttgagaaaggctggagaacgagctgggaaggtgggcgcgctggaagagtaggagccagggagaatcgacggcggccgcagagaccaaaggcgcacgcgatttttatcccgcgatggctgaaaaaaatcaacagggcggcgggattctcttccacgagctt

SEQ ID NO: 42862 - DNA, 316 bp, Zea Mays
tataacgtatctgaagacgaaggttcgaaccaacttaaagatgaaatgactttttagcccataagggtctgagtcataattgtaatcttttgtaaggggcatgattgtaatttcttacaggctgcgtcttgtgcctataaatagatgaacagtactcctttactgttcacgcaatcctgtaatcatcgacgcatcacactagaattattgtctttgccaaggcaaaggtataaatgtacctaaatattatgttttaatacttaagtttgtataataaaatatatgtataataatatttgtctttggtataaatttc

SEQ ID NO: 42863 - DNA, 3009 bp, Zea Mays
ccgccacaacgctcctcctacgtttctttcttcctccacacgcctgcttgttcacctccatggctgatggctccatctcctcctgtccctaaccccctccggccctcccctcctccaaagccctaaaccccacgtagctcggtgtgtcagtccactcgcccgcccggtcggcgccgcacccatctttcggattctaccctaaaggcatgaccttggtcttccaatctggaaattgagtagcaatcaagtatggctgcaagagcaatcacgaggagaaggaagtatcttttcgaccatgttaaaacacctaacctctcatcttcatcctctactttccaacatggaagaattggttctgaagatgagccaaaaataacactactgtttctggagcaaagctctagggattcaagatctgagaaggagcaatactgtgtgaatttgactaataggaatttggcaggtattgctaatagatttctgcgacgtccagctcatgggatatctctttcatattatggaattggaaagaatgactttgggttgccactgggagctagatctatgctgcagtcagttcgtgcatcatcaactgcaaccgcagggcaacctaagttggatattgatgacgaacagagtggggatcagaagcaaaatagaaagaaaaaagagacatccccagaggaatgtgatcaggctgtggaaggcctaagcactgcaaaagctaaagccaaagctaaacaggtccaagaatctctcaaggctagccaatcggccatgcagaaattctgggcaaggcttttgggtattggtcctgctctgcgagctgtggcttcaatgagcagggctgattgggctgcaaagcttaagcattggaaggctgaatttgttactacactgcagcattactggttagggacaaagctactatgggcagatgttagaatctcatcaagattactggtgaaacttgctggtggaaaaagcctttctagaagagagaggcaacagctgacacgcacaacagctgatatcttcaggctggtaccatttgctgtgttcatcgttgttcctttcatggagttcttactgccagtgttcctgaagttatttccaaacatgcttccatcaactttccaagacaaaatgaaagaagaggaagcattgaagaggaaactaaaagcaaggatggaatatgcaaagtttttgcaagatacagcaaaagaaatggcaaaggaagtccaaacatcacgtagtggggatataaaacaaactgctgaagatctggacgagtttttgaacaaggttaggagaggtgaacgggtctccaatgacgaaatcttgagctttgcgaagcttttcaatgatgaacttactttggataacatgagcatatcacgcttggtaaatatgtgcaaatatatgggtatccggccttttggtacagatcactacttgaggttcatgcttcgcaaaaaactgcaagacattaagaatgatgataagatgattcaagctgagggtgttgaatctctttctgaagaggagcttcggcaagcctgtcgggaacgtggtcacctaggtctactgtcaactgaagagatgagacagcagctccgagactggttggatctctcattaaatcatgcagtgccatcttcacttctcatactttcaagagcttttactgtatctgggaaagtgaaacctgaggaagctgttgtagcaacactatcttcactaccggatgaagttgtggatacagttggaacagtactgccatctgaagattcagtttctgagaggaggagaaaacttgaatttcttgagatgcaagaagaacttatcaaggaggaagagaaaaggaaggagaaagaagaaaaagcaaaacaagaggaagaggaaaaggcaaagctcaaagaaacgaagggttctgctgaagatttagctttgaaagaaatgattgaggctactgctagggaagaggaactgcgaaaggcaaaacaacacgacagggaaaaactctgtaatatcggccgagcattggcagtgctcgcatctgcatcatctgtaagcaaggagcgtcaggagttcttgggacttgtcaacaaggagaactatacaactcaatgcttgaaaaggagggtgcagaagaagctaagagagcatacatagctgctagagaggaatcagaccatcatgctgaggctgctgcagaagaaaaaatttcatcagcacttattgagaaggttgatgctatgctccaagaattagaaaaggagattgatgatgtggatgcacaaattggaaatcgttggcaactgcttgataaggaccatgatggcaaagtgacccctgaagaggtggcggcggcggcagcttatctcaaggacaccatagggaaagaaggcgtgcaagagctcatcagcaacctttctaaagacacagaaggaaaaatccttgttgaagatattgtgaagctagcatcccaaacagaaaacaatgaagaggaagaggaagcacggtagatgggagagtatatggaaacatcacactcgttcagcagtcaaaactcatgtattgaaaggcaatacgtccatttcttgtgtctcttgactgactttgatagtgacttccaattagcaaggtagattttctgtagaaaggctcatgctgacatgcatttagttagccgccgtgttgtgatttggcaggtaaaattgcaaccaaaatttagaccggttgcatggacgtggataatacagatcaattgtatttgttactactatgcaatcccgaaatattggatctgtttcaaattctcaagtaatcattgatggatgctatttattgaccataaagcttacggaatcattattgttttagctgattttatcgtgaccagttctgatcaatctacgtgcctgcgtggttgctgcattattctgcttggagtcaattttcattagttaaaattaaaggctgcgattttgcaccgaaatgtttctg

SEQ ID NO: 42864 - DNA, 2110 bp, Zea Mays
aggcggtggagtatgccaccaacttcaactggaaactcgtaagaggaaaaaaaaacacacccgccccgccgtccacctctccgcctcctccggtgccggcgctggagcggccgacccacgcaatctatgggcaacatgacccgctcaaactcgcccgtctcccgccgcatcgtcctctccttcctcgacttccttaactccgtcgaattagctcctggtgttgatcctgaagctctggaagttgctaaggattgtctggagtccatttttagtgttaactcaacagccactggtgacgcaatacaaccaggactgttgtttgagctatttgcttctctcgaagcaaatgaaagagaccagagcgacagccaggtggaggatacatttgaactagatcattcaggagatgaactatttgcaaaattttatgctgcacttgatgaaatcaatttctttaagacatcacctgctggagctgaagatcctggtctactttcaaaagcaacacaatactttgatgatgcattactgaagttgggaaagaaaagggcaagcttagtagacattgcagagtcctttaaatcaagagggaatgaattcatgagatcaaaccaacaccttaaagcggtagagctgtacacctgtgccattgcattgaaccaacaaaatgccatttactattgcaacagggctgctgcatatacccttcttaatatgaacaacaaagctattgaggactgcctgaagtcaattgaaattgaccctcactacagcaaagcatatagccgactcggatctgcttattttgctatggggaattatcacgatgctctgtacaagggatacttgaaagccgccgagcttgatcccagtaatgaaaatgtcaggcagaatattgaggtcacaaaaaagaaactggctgaacaacgagtcccaccagaagagcagaacacacatgcaggccaagctcaaggaccacatccaatatttacaagtggtggtgttcctttcaatctgtttccaccaggtagttctccagttcaagaattcttcgctggctggtcgtccgatgttggtgcaccaccaccaggacattcgataagtataaatttgaatgatatttttggccaagcaaatgtcaatgctagcggtcaaggatcaagtcaaacagggaattcaaataaccatactccatctgcttctttctcaactggtgctgctgttcctcctccctttgccttctcgggctcaggaaatgaaggaacgcaggcacgccaagcttctaatggacttgaaggggaacatggtgaaccaggcatacacagggatgatgacgtccatataaatttggctggacccgagcaggctgcggaggctttgagagctgtgatgcagatgcttgggccacagatgggtcaacatgagggtgcacctagaggaccaggttaagcgtgggaggtaggaaaatgtgttacgtggcgtattgtggtctgcaggagtcttatacgggacattattttgtcttctccatcctgacgaagaatggagattctcgtgcgccttattattatagcagcttatctgtgtgctacaacaattccaccgtaatggttaccggcgttcaacttatctgccctgttcatattggcgtaggtgtgtcattagctgtgctggggcctgggtcttgttttgttgagacttgtctcgtaatggctgtcggtccatcatgtgatcttaaattaaagcctttttgcccccctcccctgcttttccgctgcttgtcggttcccagttgatacttggaaaatatttgcaaggttggtgaaaaaaaactgtcactggaatgaagttcatcatcgttattggctggctggcttgctggataaatcataaatgttggaattggtaaatcatatcctcttggactggagggaagttattattacgttactaagctgggtatatctaagatgtttggttcacatgtttataatgtgatgtttataatgtgatgggtaactgataacggtaaatcatgtttgtttaaatccaacgtaatgagataccatgctaagaaatgatgttggtttattcaaatttgttaccgctg

SEQ ID NO: 42865 - DNA, 3634 bp, Zea Mays
taccttatattgacttttattgttattttttttgttgtaataattttttttgtttctacgtcttgagcttcataataattattttatgagatatcatattgcacacctcctacatctaccacactaagggtctgtttggttcagctttctgaaacagattcgctgtcaaaaatctggaatcccaaccaaagaggtaggtaacattggtggtaaagaattttctgagtcactagccccagatgtccagaaacttcttatttcaagcagttgccgtcctgttgtcagaaagaaggctgctctatgccttctgcggctttataggaagaatcctgatgttgtgaatattgatggctgggctgaccgaatggcacaacttctagatgagcgtgatttaggtgtgctgacatctgtcacgagtctttttgtttcactagtatccaacaatgttgaagcatattggaattgtcttcctaaatgtgtgagaatattggagaggttagcaagaaatcaagatattccacaagagtacacttactatggaattccatctccttggcttcaggttaagacaatgagagctcttcagtacttccctaccattgaagatcccaacgcaagacgagctttgtttgaggttttacagcgcattttgatgggtactgatgttgttaaaaacgttaacaagaacaatgcctcacatgctgttctctttgaagctcttgctctggtcatgcatctggatgctgaaaaggagatgatgtcacagtgtgtggctcttcttgggaagtttattgcagtccgggagccaaacattcggtaccttggtctggaaaacatgactaggatgctgttagtaacagatgtgcaggatatcattaaaaggcaccaggctcagatcatcacatctttgaaggatccagatatcagcattaggagaagggctcttgatttattatatggcatgtgtgatgttacaaacgcgaaggaaattgtggaggagttgttgcagtaccttgatacagcagaatttgcaatgcgtgaagagttgtctctgaaggcagctattcttgcagaaaaatttgctccgcaactattgtggtatgttgatgttattcttcaacttatagacaaagctggagattttgtaagtgatgatatatggtatcgagtggtacaatttgttacgaacaacgaagacctacagtcatacgctgcaactaaagcgagagaatatcttgacaagcctgctttacatgagacgatggtcaaggtgagtgcctaccttcttggggagtatggacatcttttggcccggagacctggctgtagccctaaggaattgtttgctattataaatgataaacttcctacagtatcggcaagtactgtagctattcttctctcaacctatgccaagatattgatgcacactcaacctcctgatgttggactgcaacaacaaatcctcacaatatttaaaaagtacgagagctatattgatgttgaaatacaacagagagcagttgaatattttgaactaagcaggaaaggtcctgctttggcagatgtgttggctgaaatgccaaaattccctgaacgtgagtctgcactgttgaagaaggctgaagacgctgaaattgacacagcagagcaaagtgccataaagctacgcagtcagcaacaaacatctagtgctcttgttgtagctgatcacccccctgcaaatggatttgcaccaccagttaataatctcactcttgtgaagatgccaagtcaaactgtttctgacactcaggagagtggagtaagttatgaagaagctcctaagcctcctgttgaagctcccaaagaaaatgggactcctgtcgaagtgcagaacagggacacaaacattactgaaatcaacaatgagattaaagctgaacctccctctacatcccattctacctctcccggagacctcctcctggcagatcttttgggtcctcttgcgatagaaggccctcctgctgtagagcaaaatcctgcccaaggattgaatgctaatcaaagtccagctggtgacttggcacttgctacccttgatgatcagtccaactcagttcagccaattgtcaacgtcgaggagaagtttcatattttgtgcacaaaagatagtggggtgctgtacgaggatccttacatccagattggcttgaaagcggagtggcgtgcccatcatggccgtcttgttcttttcctgggtaacaaaaatacttcagcccttacgtcagtgcgggcgctgattttgcctcctagtcatttgaaaatggaactttcgtcagttcctgatactattcctccaagagcgcaggtgcaagttccccttgaggttgcgaatctccttgcaagtagagatgttgcggttctagatttctcgtatgcttttgggacttcactggtggatgccaaacttcgactccctgttgtattgaataaatttttgcagactataactcttacccctgaagaatttttctcccagtggaaagcgcttactgttcattcgctgaaggttcaagaagtggttaaaggtgtgaaacccatgcctctttctgagatggctaatcttttcatgagccttcacttggcggtcgctcctggacttgataacaacccgaacaatctggttgcatgcacgacattcttttctgaagcaacacgtgccatgctttgtctgatacgagttgaaacagatccacaagacaggacccaactgcggctaacagttgcctcgggcgaccaatatttgacattcgagttgaaagagttcatcaaagaacatctggttgatatcccaaggactcaggtcgccccacctcgcgcagcagtccagccacagttgcctactacagcacctgccacatacaatgaccctggtaccatgcttgctggattgctatgagaagtaacccgaaggaatagtgttttgatgtacatgacagttatttaatacgaggatctaacatctccacaagcatcttgctgccaagacgtacacgtggagcaaccaagaaagagctggcggagtgtagtctccatgaggattctaaaccgagaaagagcttagattctttttgtgcggtttgaaggccccctccctctccatgtagcagttgccgtattgtgtaagcgtaacttgttgtttctcattattatcatccccttttggtccatttgtataacctgtatcgcccatgtctggtggtggacaatcggtagtttttgtgtgttaatataaggtgctaggttttcccaccatgccgattgtaaagttgccctggtgcgcattgcactgcgatttgtacggaatagggaaggaaaaatttataggttttgctttgtgcatgttctatggtttgcatagctcccatctcttgatttcctttttcttctgctgctatgtggtggtgtgtgatggttcacgaggctcgattgtataatgtaacctggttggaaccggtgctccttttcttttggagttcccaattcatggatgtacacctgtgtctctctctctcacgcacgactcaatgatggtgcgtgcttggtacgataacaacagctgctagagtagacaggtgatggtgtggac

SEQ ID NO: 42866 - DNA, 3341 bp, Zea Mays
cgagtaacaaacgacgagccgccgagaccttgacggggtgagatcgacgcgtcactgcttgttaagacgtactactagtttattactgcaaggtccacatggactatctggaagctggcgcaaacattataatcacagcatcgtatcaggccactattcaagggtttgaatcaaagggtttttcaaaagaacagagtgaaaacttactaacaaagagtgtcgagattgcactggaagctcgtgagatgttcttgaaggaacatctggagaagtccactcctatacagcacccggttctggtcgcagcgtctttagggagttatggagcttatcttgccgatggctccgagtacagtggggattatggtgaagctggtacgaaagagttcctgaaagatttccatcggcggaggctccaggttcttgcggaagcaggccccgatttgattgctttcgaaacgattcccaacaaactggaagctgaggcgtatgtcgaacttctcgaggagtgcaacatcaatatccctgcatggttttccttcaactcaaaagatggagtgcatattgtgagcggtgactcgttaatcgaatgcactactattgctgacaagtgtgcaaaggttggtgcggtcgggataaactgcacacctccaagatttatccatggactgatactctccattcgaaaggtatccctagtatccaccacactttgcacagtattcaccgcatgtttggccccgccctcggttatggatgactgttccacttatccctgcggagtgcatataccatggtctccattcttggtttaccttggcacgaatcactgtgttggagatggggaaggctgctgttatgtttttacctggataacttttgttgcgttaccacaggtcacggacaagcccattctgatatatcccaacagtggcgaaagatacgatggtgaaaaaaaggagtgggtggaatccactggtgtgtcagatggtgattttgtttcttatgtgaacgagtggtgcaaagacggggctgtgcttatcggtggctgctgcaggacaactccaaacactatcagggccatacacagaactctgaacaaaagccccaacaagcagcagttacctgctgtagaataagagctgtgctctactctgatgcgcccgccttcctcctagcagtacctcgaggctataactccatgattccgtaaccgtacgtgttcgttctcttgcaaacgagatgtttgtaaataacgctgtatttctgggttctgagatatgcaacttggatggaggtacaaccggtgaaggggggtgaggaagcagcaacaatggtaagagttctactactgagtgggggaaaaacaacttgcggctgggttagtgaagcttagtagctaccactattcaagagttaaagggagttcgtatgacagttcctctggagatgttatcttcaaagtcttatatcactgctacttgtgagctgtgttaaaacctatatatataagttttgtttgacgtgactgcattaaagatagtacaccaagcttctccagttctcctagctatgtatgttcttgtccattcctccgcttccacaattctaagcaataaattaagggctagcttctccagttctcctagctatgtatgttcttgtccattcctccgcttccacaattctaagcaataaattaagggctagtttaggagccacaaactggagggaattagagggattaaaatccctagcttatttaattttgaattagttgaataactaggagattttagcccctccaatcctcttcggtttttgaactcctaaactagctctaagggtgatgagatgtgacaatttattaggtagcgacaactaaaaaaaaacggagggagtataaggttgtatggttctggggctgtctttcgttgtcctgtaatcgaacacattataagtgtctagctgggatatgctgtggcggcagtttataagatgtagcgagttagaccctatttgtttcggattataatctctttaaattatataatttagtgtaaataattcagtaagtaaacaaatacctagattatggttttagattatataatctaaaactcagattataataatctcataatctactcaagagtagcttatttgagattatttttggcaaaagtcccactacccatagttatataaatagaaattataatatatgatatcttttttcctcacatcgaataaataaataagggtacccttgtatttgtaaataatctatatttttataatctagactaccaaatatatacatgtagattataacctgtctaaattataatctagattatataatctataaattgaaacaaacatacccttagcagccgtttcatccatcgatccatcaccaatgcccaataatgtcgtcgttgggccggcgtctcgtctccggcttcatcaacgtcgcgcggcgggcgaacagcagccacgcatgcatgcgccggatggacgcctattcacttcgctagcaggcgatcaaacccggcaggcgcggtcactactagctatttcgccgtcggcggccgcaggtggcagggcccctctacggctctaccccaacgggaacgacaccgaccaccgtgggttcgtgcccgccgacctcacgctcgcactcgacggcagtggtctgccagaggccacggccacgtaccgcgtgagcatcctcgattacgccaccaacccgttaagtggcagtggatatcgagccagctcaactcgttatagctcgttatactaacaagctaaacatctggctcggctcgactcgttagaaagttcgagccagctcgttaggctcacgagctacacgattaaatacaaatatatatatatatatatatataaccgaaaaatcatattttaagtgtttaacactacaaaccctaaacttttataatattattatcatatcatcgtcctagcttctaacttttaatattaaattaaataaccaaatatgtattaacctacatatttacaaacccttattataataagatagcaacaagcatcattataaagcaatttatcatccattccacaaacatttaacatttcatcgcacaacactaatatcatatgctgctagaaacaaagttcacaaaatcataaccaataatcaaatattaaatatacaatgtaggtatgtagccatgcaataatacaaatatttaagcacatggcacgtctacacatgtccatatcatagatcataactacgagaaaacaagactatgagagatgagacgacaccaacgactagacaaact

SEQ ID NO: 42867 - DNA, 1285 bp, Zea Mays
acgccaacccatcctgtcgtcgccgctgccggctggacctccttgagtccttgtcgaccactggactggatcagttagtttcagccttcaggcttccagcgatgtgttcctgcgcctgcgcgcgcctcctccccccgctcttcagccccgctccaagccccaatctcagacccgccttcccgcacagcccgacgccagcccgcagccgcgccgtcgtcgcgctcgcgggcgcagcctcccgggacgacgcgcctgcgccgttgtccagcttcgacttcctcgcactgaagcgggagcttgatgaggaggaggaggcagtggtggctgtggatgcgaaggaaggtgctggagctgtcaatgaggacgatggagagttgggggcggaatggagtgcgggtggtacgaggagacggcggcggaggcagatggcgaggcgatcggctctgcttgcgaagcagtgggctgttgcattggttgaagtgaagccaagcttactttcaggtgaagcggagaaattcctttttgaggacatatatcaggttggagacgtggtgcttgttgcgaatgaatctgtgatcgataatgaacataaactggttggattgcacagcttggtgggctacaatgtcgtaacttcccggcgacgcaatgttggcaaggtgagtccatgtggtctttaaggagaggtgctatggagtctctcgagcttgactcttttgggctttcgattgtcccttctagcttggtaagcacgtactgtttatttgtcgaagacgtgctggatatagtctccgatacagtcgtggtgcatgaagacgccgtctcacgggttcaacggttaacacagggcattttgggcactcaaaacatccacggacctggtggtgagattgacgagtacggtagatttggggggagggggaggaggaggagagcaaatggccagggaaagtctggtggccgagaactccgcagcgaaccgaagcatccggatgatgaatgggagctgccgatggactactgacacaaactcgccatgatagcattctgtttagtgctattgtattgccagaaaagtacatgctttgtacatataacataccagaggattgcgaattcagaaaagacgaaaggccctttcagccttgtcagagtttgatcgctttggcccgggtgggttagtataaaaagcgagattgtgttgccatgcaatgaccgtaaccccctttgtcttccccgacactgattgcactacactactactactactactaatcattcaaag

SEQ ID NO: 42868 - DNA, 3089 bp, Zea Mays
gcactcggcgcataacagcaccaccgcgccgcgccgccgccaccccctttcccgttcgttcccaggacgagtcgcagcagccggccagccgcacagagtggtggagcctaggaacagaggaggcgccgagccatctccgcagcctgctaccggggaacgggcgggaacggactctaacttagagagagcgcgggcgagagaggtcaaccgcagccggaggcgatggaggtggtggcgctggtgagcggcggaaaggacagctgcttcgccatgatgcgatgcatggactacggccacaaggttgtcgctttggctaatcttatccccctcgacgacaccgtcgatgagctcgacagctacatgtaccaaactgttgggcaccagattgtggtgagctacgcgaaatgcatgggcttgcctcttttccggaggcgcattcgcggatccacaaggtgatgaggtagaagatatgtttgctctgttgagcgaggttaaacgtcgaatcccatccatcagcgcggtgtcgtcaggtgcaatcgcatccgattaccagaggctccgggttgagagtgtttgctcgaggctgggcctggtctcgctggcgtatctatggaagcaggatcagactttgctcctagaggaaatgataaggaggggcattgtggcaataattgtgaaggttgctgcactggggctgaaaccttcttcccacttaggaattatggaatcaatgtctgtggtgaaggtggagaatatgaaacactaactcttgactgccctctatttcgtaatgcaagaattattcttgatgactctgaagtgatactccactctgctgattccattgcttctgttggaattcttcatccacgggcgtttcatcttgagcagaagccagattcatctgatagaattggggatggttctgccgttcaagagagttctagttgtgtatatgaggttgatgaagttaccactcacgatgatgtgggagaaaaacaggccctgagtccagctgttgatgcttacaccaatgttgacctatgtatctcaaagacagggaacaatttgcgttcaatgagctgttggattcaggatccatccagagcttcggaaggcctgaaggcagaccttatagcagttttgagcagaattgaaaatcagctcaaggaagaagggttaggttgggtgaatgttttgtacgttcacctctacatttcaagcatgaaggaatttggattggccaatgaagtttacgtcagctttattacggaaaagaaatgctacctgggtgttccttcgcgcagtacaattgaattgccactagttcaggctgggttgggcaaagcatatgtggaagtcctagtttcaaatgaggtggtaaagagagttctacatgtgcaaagcatctcctgctgggctcctagctgcattggaccttatagccaggcaactctttatgaagatattctttatatggctggtcagctgggccttgaccctcctacgatgaagctctgtcttggaggtccaagagcggaactagaattagcactacaaaacagtgaagctgtggccaatgcctttagctgctcaatctatatctcggcaatacactttctggtgtactgctctgctcagttgacgtccagcgagaaggaagaaattgaacagacattgaagagttcttatattactcgtttggatcgctcaaaaggtggatcatatccaactgttctgtacgtattcgcgtcagaccttccgaaaggggcacgtgtggaggtaaagcctatactgtatgtcccttccactgatgattgggttgctgccgaagagacggagaccggagttccactgccagcaccgagcaaaacctggactgattgtaccgcaccatactctgcgttgcgcgattcgtgttgccaggtccacacaaccggcgggagaatttgttccgccgtggtgtcgatcacagatgacatcgcatcgaagatctgctctgcagctggacagctgcaccacggagaggagaatctgaaaataatggctagattctgtgctttccagatcgcgaagaccctggcagacaacagattttcctgggacagcgtaacgatgttgaggctctactactcggtagatctcgccgtggcggcagatgcagtgtccggagcattttccgaggccttggccgagcttgcccaagacaacccttccatgagaactgacgttcctttctacaacgttgtgcccgtagccggagctggccgctctgcgtgtgccaacgacataatggcgtgcgagttactggcatccaacgtctccagtgcgaagtccataccagccgaaccgttcgctgtgacgcctgcttgaatgcagctttccttcggaaattggaggtgggcgcacgttggaatttctgccagaggagccggtggccagtcaactgccagttggacgacgacggttgaccagcttctctagggctggcggcggtagcttcgtttctgtgctggcggtcgattaaaaaaaaagaccgtacggtgatcatcacagatgcacccatactgtattattctgtttcagcgtcctatacaaagtatacattgggtctgaattctgattagcctgtgctgatgcttgcaatgacattggttcttctgtgtacagactacggacagagtcccggtcagtaacgtgtgtgtacttgttcttcctctgtgttgacattcttgctcgatggtggaacctgtcgcagttggcggaggtgaagccgcgtagctcacttaggtctgccaaacacttcacttcttagattgtttctgtggaaatcgcttctgatgaatgcaaaatcaattaagtcgtccggttttgatgggaggaatcctacgcttcttaaactctaaattgcacatatttctttatttttctccgcatacaaatttgatgttgaatgcaaaatttatcaagtcgtcgtgtcttgatgagaggaacccgacgtttcttaaatcctaaattgcacagatttctttatctttttccacatgcaacattgttgacatctagattctcgttacagctagatcttt

SEQ ID NO: 42869 - DNA, 326 bp, Zea Mays
tactaggtcagtacgctggaaaacggattttcctgccccgtatacctctgtgtccctccgatgacgagatgttccctttccagttcaaaagaaagcagtttcctatacggcttagttttgcaatgacagttaacaaagcaccgggtcagactattcccaatgttggcgtgtacttgcccgaaccagtgttctctcatggccaactatgtgttgctctatctagagcgacagcccgctcgaacataaagatccttgccatcccagccgtcgatgggaagaagaggtcgaggaagggtgtaagaaagaatcccacactagattgtggg

SEQ ID NO: 42870 - DNA, 2553 bp, Zea Mays
cttttattcccattacaacgtgcgcacaaaaagtggcaccaaaactttgaacggtggccatgctggagcgcttccctgtggccaactggccaatggaggagaaatatgaaccaaccaatgacaagtcggacccactggattgacagcctctgacgccgaaaaagccacagatcggatcgcggcgggcagaggccacctccggattcgggcgctcggcgtagccgcgcagtggtgtgtctgcctccctccttgtatcctcctcgaattcgagcggcggcgacggcgggaagggagatggaggcggttagaggcgatgggaggtggtgcgtggtgactggcggccgcgggttcgccgcgaggcatctggtgacgatgctgctccgctccggcgagtggcgggtgcgcgtggccgacctgggccctgccatcacgctcgaccgcgacgaagaagagggtttcctgggtgctgctctccgcgaaggccaggccgtctacgtgtccgccgacctccgtgacaaggcccaggtcgccagagcttttgaaggggcagaagtagttttccatatggctgctccagattcatccatcaacaacttccaccttcattatggagtcaatgtcgatggaacaaagaatgttattgacacttgtatccgttgcaaggtgaagagactcatctatactagttcacctagtgtcgtgtttgatggagttcatggaatttttaatgcagatgaatcaatgccttacccagataagaaacgaaagcggatgcagaaaagcttgtgatgagagctaatggtagggaagggcttcttacatgctgtatacgcccaagtagcatttttggccctggtgataagctaatggttccatctttggttgctgctgcaagggcagggaagtccaaatacattattggtgatgggaacaactactatgatttcacctacgtggaaaatgtggcatatggccatgtttgtgcggagaaaactctatcatctgaagatggtgcaaagatagccgctggaaaaacctatttcataacaaatatggagcctataaaattctgggagttcatgtcattgattttagaaggtcttggatatgaaaggccttcagtaaaaataccagtctctgttatgatgccggtggctcatgttgtagaatggacttaccagaaatttgccaagtatggaatgaaagttcctcagctgaccccttcaaggatcaggctgctttcatgtaacaggacattcagttgctcaagagcaaaggagcagcttggttatgaacctctcgtgtcccttaaggatggagtgaagagaacagtagagtcgtactcccatctacaagctcagaatcataggagtatatcaaaggcttcaattttcctcgggaatggaaatcgtatgaaactgccttcatcccttgtgcccacacataccctgtatattcatagtacttttgtacttcatttgaaatccttaccaatttatctattcatatgcagttgcaaaaacagtactttgggaagatgcgaagcaaactgtgacagtgcttctactgttggctgttatctactaccacttatttacatgtggttacaccttcatcacagcgatggcaaagcttttgtcactaactgctctgttcttattcattcatggcatgctgccatcaaatctgtacagtcctttattatcccttttcatttgttgtatttacctactatcaaatgattaactggtattttgatcttttttccatcttttccatcattccattttgttgagtgtcctaatttactatatatttggtaatactttgcaggttcggtcacaaggttgagaaactcgaggcctctaattttcacatcacccaggcacaggctcatcatattgctaattccattagttcgaattggaactctttagtcagtgcgctaagatctctttgtagaggaaatgattggctattgtttctcaaggtttcactatctctgctggttgtcagcatccttagttccatgtcttctcaggctgcatttaaaataggtactgctctggttttcacaggcttcaaagcgtatgagaaatgggaggacagcattgatagtatggtgggcgacgcctgtaccattcttctgcactttggttctgccaaggaatcatctagctagaaacaaacgtaggtgtagcttgcagactgccagttactttgtttactgatattatcttcagctccagctgtttctgggtttcgttgacctaaattttcttctgtattcatctgatggtgttgtagaattgcctagcggcacatatgcaagttttggactcttttcctcttgatagttgatgtacaatatgaaattgtacattttccccctttcccctcggagtggttctcttcccatcaacggtgacaataggctctagtaaagatcgaattggattatgattggactctatttctattcatttttgaactaaaatttatttagagtccaaagaaattgtgaagaaacatttggatcgcgatccattacca

SEQ ID NO: 42871 - DNA, 2645 bp, Zea Mays
caacgtgttggttatttaccccgtttaccactgagtcctccgcaagccattcttcccgacatggcgatacccacggccacgcacgcgtcagagatgaggacgacgacaatcaggatgagggtttgagcacggacgaccccctctccatcgtccgctctaatttcttcctcccccgtcagcaacccttgtagtctctgctaccgtcagcccgtacgcgatcaaagccccgctgcactgcggccaaccgtttctggcaccggcaccggcaccggatccgccgccttcgtcgtccaggatggcgatgatgagccggacgcgggatctgctgatggaggggttcgaggggctggtgcgggatgggtcgttcaagtggggcctcccccgccgcggggacacggccatggacgacggcggcgacgacgacggctccctctccgtgcagcgctcctccatcgctggcctttccttcaaggccaacgccgtcgtcgcccgctgctcccgaatccttggcgtttctaccaatgatctacaaaataactttgataagcaagcatctgattccataaagcagccaaaaagctacgcaagaaattttttggagtactgctgcttcctggcacttgctcagatatcacaagtgacagggtatcttgctgacaagagctttcgccgcttgtcttttgacatgatgttagcttgggaggttccctattcttcaagccagctcactgttaaggctgaggtagatagcacagttagctcagaagcttttacaagaatagcacctgccatcccaaccattgctgatgtagtaacttgtgcaaatctctttgatgtactttcatgttcgagcggaggccgtctttcattttctgtatatgagaagtacctttcagaattggacagagcggttaaaaagatgaagacacaatctgagtcatcacttctatcaaactttcggtctcagagaggagaaaggattctggaagttgatggtacattgacaacacaaccagtacttgaacatgtgggtatttcaacgtggccaggaagattaatactcacagatcatgccctttactttgaagctcttcgggttgttacctatgataagcccaaagtttatgagcttgcagaagatttaaagcaggttgttaaacctgagctgactggtccatgggggtcacgtctctttgacaaagccgttatgtacaaatcaacaaccttaacctgtgatcatagaatttccggagttagctggccattctcgccgagattattggctggccattatatcagaagtactttatgcccatagatttgttaggaagtttgatataagcggaattgacaaagaggaaacaattctgaaagcagtacttggtattatgaggttacaagccattgaagagttacattttgaagttccaaatcgttatgaatctcttttgttgttcagccaatgtgacaaacttcctggaggtgatgttatacttgaaacattagccagttctatagcatcaagaacttcagatcgaactaaccaacctggcacaagtagaggaatgcatgctgtcctgtcaaacctgggcatggtatcaccagttaatagtggtgagcgtttgtttgttggtgagattgttgttggggaaattagtgccttgcagaaggctgttactgattcaatgaacaactataagaaagttgaactggcccaagcgtcggttgatggagtcaaagttgatggtcttgatacaaacttagcagtaatgaaggaattgttatccccggtaagtgagctttggagggttttgctattgctcacatcatgggacgagcctatgaagtccatgttgttttgcttcctattctcttatattatcatcagcaacttttatgtttctcacaagattaactaatcaaggaaagcaaatgagtgaggtaaaggtggtatccccacctccactgaacacaatggagcagctcctagctgttcaaaatgccatttctaaaattgaggagcttgtccaagatgcaaatattgttcttctgaagataagagctctattgttggcttttccatcccaggcgacggacagggctattctggcattggtactgatggccctgagccttgccatcgttcccacaaaagtgcttctgctgctggtgtttctggaggtatccacgaacaactcaccactacgaagagcaagcacagaaaggtgtaccagaaggttgagagagtggtggttcagcatacctgcagctccagtggtggtggagaaagagaaagaggacaagaaaactagatgatacatccaatgtaatctttatgttgcttggctgatacgttgtgtaacgtatcagccaatgcccacctttgtacaaagaccgcaatatcaacaacgaggggcagtttcaatgaagatttcatctcacttgtaccacctgccctgtttacatggctcttgatgctttgttgcaagttgactagagctgaggccggtgtcaatcgccgctaataacacaaatccctttctctgggttggacatatcgccgtgcggacctgcgccccttcgtttgtaacatgaacagtattgattcttcgatattatgggattgcttctctaatagactatgt

SEQ ID NO: 42872 - DNA, 2954 bp, Zea Mays
atcctgcccacacacacgtgctcctctcacctagcgccaggccgagccgccgccgcgccaccgccgcgccgccgccacgccaccgtgagccgcgctgccaccgcgaccgggtcacgtctccgccacgccaccgcaaccgggtcgcaccgccgccgcgctgccgcttgcaaaagatccctccagacttctgcaagcacatcccctaggcggcgttgagcaaaagacctgctgctccgcgccgcggctggcagagcaacaagcggcggcgctatcggcgcgcgagaggaccgggccctcgcgtgatgatgacgccagtctgaagcgtgcggacaaggattattccgttgggaaggagctggtgcggtaccgtgtgcgctaggtgagcacgcagaaggtctcatgctccaatcgaacgccgccagaatcggacggtaagctgcgtaaccgcccaatgtatgtgctcgcatcgcagactcgcagtgaagaccgagatcaaggacatcgacgaggtagtgttgcgcttgatgatccccacaccccaccgccgtctaatttcttcgtatggtcctccgagaatttctgacccttttttatatcactacattttaatgctaaggaataggtttgtgctagtaatctgcctattgcttgtttttctatgtaccggaatggaatagctggtttgaacatgttagcatttcttccatgccttgatgtctgcaaaatatacttctacttagcatcagcctagaagtatgttcgcttcactggtttttttcgaacacactagggcttctggatgtactggttaccgttatagtacaacaagtgtaccacactttggttcttttcttttatgtcttaaaagacctaaccttccacagtgttttagtttgtttgtggttgatttgtcagttcagaacatactttagtatcccagtaaatgctaaggtttgattacaagggttagtataattcatgaatgaggactcatctgctatactggttgtaaaatggggctgccagctcttcagttgttgctcgcagattgaatggtttaacatcaatgtcactatcttttcactaaacaggtttcttttcacaggccagcccaaaagacacctgctgacaactggctggagtgtgtttgtcagtgctaagagacttgttgctggagattatgtgctatttatatggtttgttacattgtttcaatgctgtaaccactaaaaattttctgacgagtaggacttactctttcctcactaatttaggaatgataaaaaccagcttttgcttggaatcagacacgctagccggccacagactgtgatgccctcttctgttctttcgagtgacagcatgcacatcggactccttgcagcagcagctcatgctgctgcaacaaatagccgcttcacaattttctttaatcctaagtaatttgaactgcttgatgagcaaatggcaattatatgtttcctatgttccacttgattcgaaaaatgtgcttgcagggcaagtaaaacagaatttgttatacccctttcgaaatacatcaaggctgtttttcacacgcggatatcagttgggatgcgattcaggatgttgtttgagactgaggaatcaagtgtccgcaggtacatggggacaataacacaagtgagtgatgctgacccagtgcgttggcctagttcctattggagatcagggaagtcatgttgacgagggtgatcagggggtaaatgccacacaattgctgcataacgaacctgtacttgttactgtaagtggtgatggcagtgttggaatgtgggacgttactttaggtcaaccttgtgtcagacatatcgttgcccatactcgacgtgctaatgcggttgttgtggcccttaatgacaaatacctctgcacaggaggaagcgaccagaaagttgttttatatcataacagaagtgggcgtacacatcttaattggcatctttcacatcctctccaaggaaatgattgatatgctgccagaaatcatagaattgttccgctaacatggtaaatcacatttcctttctgtgactttgattcggtgatctctgttagtacttcagcactgtaacaactaaaaatagaatcatacatcaataaatatatgaatatggtataaactgcatgcgaacatacttctcttcacttttctaatagcttaaggggttgttgcaacttcacgtcaggcagacttctgttttatcctcattggagattgaacagcttctgttatttcccaacacgccctgcatacctctgttcctaactctttttgtgtgcatatctttttcagcagggaagttctctaaggcaggcagttgaactttggcagaaacttggttatcatttcttccatgccttgttgtctgcaaaatatacttctacttagcatcagcctagaagcttgcctaagggagatccatgcttctatcctaaggaagcatttacatcgattggaacatcctggtgctgttgaaccggatgtggaatctgagaaagaagttgataataaactggaggatgagatgcacgaggatgaagacagataaccaatttcaagaggaagatggatccttttctccacatctaatgcatggcaacaaagatgaagatgcaattgatcctgaagaagacaaagctgagctggtagagttctatgtttctattttctaattattagtttagaaacatgattggaagttcagaactgtaatagttattcgttcaagtgcagttaactgagtagtttaattgtcaagtacagattgttagaaagtggattccaaattatgcaacaaaaaggcttaaccaacaatattagggcaaaaagttctactgagattttctttcattcggacaaactttcaagcttctgcagacctccatgtgtgtcttaccctaagagaggacat

SEQ ID NO: 42873 - DNA, 203 bp, Zea Mays
cttggattcttccctttctccttccttcttcctccctccaaactccaattgagatcgccacacgacggagaaaccacgcggaagggcttcaccttggagagaggggggggggctagggttttgggtggtgtggctgcaatggtttgagggaggaggaaatgggagggggggcggcggccaagggtgtgggggaaatggagaag

SEQ ID NO: 42874 - DNA, 1153 bp, Zea Mays
cttgaccgcgtcagctcgccagacctacaactctatatacgccaccctctcgtatcgttgtcgagcccgtcgaacctcgttcttctctgctcgctctcgtcgaataccaaatcccggatattagataaaaataagcgaggcccctgtgtatcgcttatcaagtactcggttgaagacatcaatcgaagatcatcgttgtttggtgcgtcgtcaagaaatcccaagacgaagctagcagcgcgatttttcccaagcgctcgacaaattgcttggatcagaaaatcgctaccgatctcgcagattcgtgtcagctgtggaaacggtaagctgataaattattcagaatagttcgatcgttgaataaattaatgtgttagtgcgaggcttattaaggtgctcgataaattgcgtaagtcccaaaactctcgtcgacttcgcagtttttgcgagtatcgagccagattccgttatagcgagttatgtcgctattcgggacaattaactaaattaatatatcgagtagaatattagtaggcctgtgtgataaagaactgtttgattaattgtggacatgtaaaatatgtgaggagtaaaataaaattaaaatagtactttgtgaacgatgtagtatcatttataaaacgagggataattttagaatttaattaattagctgatgagttgagtaggctaattgtgtttcatgtgtataatatgttgctcgtgatgtttgtgttagattcgtttaatttagagaagcgtaattattgcgtgtagtcgtatattaataactagtgattccgtacgattgtacaacgcctcgctgctaggaacgttaattaatcgcgtgatgcggagaaaaagacgacccaagtcgaccccaagcgcgggctaacccgcaggatgatgttgatggacagaaccgaagagggataatctggcgaatgtcaagacagaagatgatcgccaagtggtcgcctaacaaacactaacctagtgttactcaggcaagccccggtgcatgcaaccccttccttgtgtttttaaattatttttgcacactttaagtctagtgaaatgtgcattaggtttatagaagttgcttggaaacccttcgatgcattgcctaccttgaaatccatcccttttatag

SEQ ID NO: 42875 - DNA, 2346 bp, Zea Mays
agtccatggcaggccagtcctcaagcctccacctcgacctacggcctgctgctgtctgttgggccgaacgggaggcacgaggcggagagcggagaggcgttccgttccatccaagctgatggcaacgagttctccagggcggcggcgcacgggcacctcctgcctaccagaaggcctccgcaccgagctcttctcatcgccaccatcaccagaaggcttccgcccctctctccagtgtctctttctctctccatcgcatggctctcgcgtgcgccactcacgcgcgccgcttcctcctcgctggcccggcgagatctttccacgcccagccctaccaggccaaggtcggcgtggtggagttcttgaacggcgtcgggaagggggtggaagcgcacgccgcgaagctggaggaggctgtgggcggcgacatgcagaggctcctcgaggcccgcacgctgcggctcaagaagcttggcatcccctgcaagcatttctgaagtaatgtgctgagcaatgtttggagcagtagcttctacagttacatgtgtacctactgaagtttcaaatttactgcacatatttagattgcgttgtttgggccctcaacatttcaattggttttggattgattggtttaggaagacatgttttaccttctaacaaaactatatatatatatatatatcttacttactgaaagtttttaggtttgccacatactgttttttaaatctaaaaatgatactattaagtcttcatctcactgggatattgtttttcatgtatattttttgtatctttaaaaaccagatagaaatgggttagaacaccttattttactacttgtaaaaacacatggtaaacagttggccacctaatgtttagccattattcgggttaaatggttgattaaatgggttaaacagtaaattaaacaggataaatggatgattaaacagaaatggtgtaccatcatgtagcgttagtatagtgttttaagagactagaccatttagactaacaataggaaaaacaggcttttaatgtcaatgtttcttcctatctatgtttaaccaaatcttgttttacttggaccctaggttaaagcaaaatccatttaacatgttgctatgtgctaatttctgtttgcaacatttactggtggattaagacatgttggatctttattgcaaacattggttcttgatttaaatattgtttaccgtttagttatgtaaatattgttttataaagcatcaatgttaagattgagaacgagcatctttactaatctaaattattaattattcccctacaatgcagaggaagttgattttgagttttgctcacaagtaccgtcttggtctctggaagcctcaagcagaacccaggaaagttgaataaaattggtttgttcttgaaagctagtctactgttggactgaggcttgtttgggacattttgaatatttccttttgtaatttaggagccacaaatctttgttctctgtctctggccatacttatttgcatccattgtgcaattttttctagaaaatttccaacttcgcgtggaataacaaaccgcaacaggtgcagccccctgtgataatctatcacttattgtctgtattgttcctttggattcttaccaacaacattgcagttgtattaatgtaatctaagcaaattgattaggttcagattctcagaaagatacattactgtgcattagagttccagtcaatttatatgtagacaagtcaaacatgttgtaatgctatggttgtttctgtggttctacactgccctttcaagatgtaattgcattaccttttttgattatgatgctttttagttgaatttcatgtggttggcagacgcaacaaagtgaacactcgagcttggaagtttgtcctggttccagtgcggaaggacaagaaggtcatgtaacagacggctgtaaaacgaaaaatgcagtgcccgtttcattttaaatatgcatcacaagttgccttgtttttcagtgagaatatcttcagtgtaccatggtaaataggggttttacattgtagatgacattatttgcactttgcagtgtttgtagagtgaagattaaggtagtgtttggttgaagagctaagtagaacggaaccgttctgtcccagttttgttgttgtttggttacaaagtaactagaacggaatgactctaattagagaatattctcctcagatccggaaccattccgctccaaaaaatcaatgggacggagccgttccgttccaatcccgctctcacagtcacgctccgttccattcactctgcaaccaaacaaaaaacagaa

SEQ ID NO: 42876 - DNA, 187 bp, Zea Mays
aagtgatgctcgatgaaatcataaactatgtgcagaccttgcaatggcaaatcgagggatagttacacatcgaggcttttcgaacgctactcttctggctccctcctgaagaactacttatatgccaagctcgccacctcatccatgtcaagctcgcccccgcatccatgccaagctcgccgccgcg

SEQ ID NO: 42877 - DNA, 2229 bp, Zea Mays
gaacctgttgtaatcttctttgtaaccccactgggggatgacattggccgctcctggcctctatgcaatacatgcaggggggatgactgaggagaaaaagataatgaggaggaaagttcttgccaagtggctaaaggagagtcttttgagattaggccccacattcatcaaaatagggcaacaattctcaaccagggtggatattctcccacaggaatatgtggatcaactatcggagttacaggatcaagttcctccatttccttctgagacagctgtaaaaattgttgaagaagagctgggggcatctgtaaatgagatatttgatcgatttgattttgaaccaatagctgctgctagcctcggccaggttcatcgggcacgtctgaatggccaagaggttgtgatcaaagtgcaacggcctggtctgaaggagctgttcgatattgatctgaagaatttaagggtaatagctgaataccttcagaaagtggacccaaaatcagatggcgccaagagagactgggttgctatttatgatgagtgtgcatctgttttatatcaggaaatagactatatgaaggaagcatttaacgctgaaaaatttgctgaaaacttcaaaaaattggattatgtgaaggttcctgaaatttactgggcacacactactcctcaggttttaacaatggagtatgtcccaggaattaaaattaacagaataaagcagttagataagttaggagtcgatagaaaaagattaggtcgttatgctgttgagtcctaccttgagcagatcttatcccatgggtttttccatgctgacccgcatccaggaaacattgctgttgatgatgtcaatggagggagacttatcttctatgacttcgggatgatgggaagtatcagtcaaaatattcgggaaggattgcttgaagtattctatggagtttatgaaaaggatcctgacaaagtgcttcaagcaatggttcaaatgggtgtccttgttcctactggagatatgactgctgtcagaagaaccgctcaatttttccttaatagctttcaagagcgcctagcagcacaaaggaaggagagagaaatggcaaccgcagaactgggattcaaaaagcaattaactaaggaggagaagtttgaaaagaggaagcagagacttgctgcaatcggagaggatcttttggcgattgctgctgatcaaccatttcgcttccctgccacatttacatttgtggtcagagcattctcagttctagatggtattgggaaaggccttgatcctaggtttgatattacagagattgctaagccatatgccaaggaattgctaagatttaatgacgctggtgttgaaatagttgtgaaggatgcaaagaagagatgggaaaggcagtcccgtgccttttacaatttgttccgccaacccgatagagttgaaaagctcgcacaaattattgaacgtttggagcaaggtgaactcaagcttcgtgtcagaacgctggaatcagaaagagcatttcaaagagttgccgctgtacagaaaacaattggatatggagttgctgcaggtagtttgatgaaccttgcaacaatgttgtacttcaattcaatccggggaccagcaaccattgcatactccctctgcgcatttttcgggctgcaagttctgatcgggcttgtcaaggttaagaagttggatcggcaggagagactgataaccggtactgcatgagctatgagttattcacgatcaatcggattttgtttcacatgctacctgattggtttgctggctgcgcatacccaggctatcgtcagacttgtggcgggtccgatatggacatttttggcgtaggcaaataacttcaaaaggacttattttgtatccgctcatggtactaacgtctctcgcgtgcaggcaattaaatatatgctcggccaaagtcaatgcacattggcgcataatgagatggtatggataaccaaactgatggatgatgattcaaggtgaaatgatcgatttggaaagtgatttttctatatctttctcacaactttattgctgacccgagtgtttgagattcgaacctagagcatatgatgacgtcgttactcaacatatcatcaacactactctagcctaacattgttgtgaatttaatctacaataactcttcgtcaaattgatatgttcttgaccttgttgaactatac

SEQ ID NO: 42878 - DNA, 1655 bp, Zea Mays
cttttctccaagggacccagaggcaaagttgctcccatcctccgcctacaaatacgcaggcgcccccacctctcttccactctcctctcctctccgcctcaccttgccctgcccgcacacaccacctgtccccgcacggccgcaccgctccgctcccgaggcttagggctccggccgcgctcccttcccttcccggcattcccgatctctcgccgccgcccgcctggccttgatctcgatcgccctcccctctccgctctcgctccggcaggccggcccgggtttgtctcgccgctattgggcctcggcacgctgcgatggtgtcgggcgtgtgcgtggggacggaggggcaggtggaccctgaggcggtggcgccggctgtcgcggaggaggcggtggtgccggcgcccgcgagggaggtcgtggtggggtacgcgctcacgagtaagaaggccaagagcttcctccaacccaagctccgggggctcgccaggaaaaagggaatcttgtttgtcgctattgatcagaaacgcccattgtctgatcaaggtccatttgacattgttcttcataagttgactggaagggggtggcagcaattgctggaggaatatagggaggcacacccagaagttactgttcttgatccacctggcgcaatagcaaacttgcttgatcgccagtctatgcttcaagaagtatctgaattggacctcacagattgtcatgttctcttctgcaggtaaagtacgtgtgcctaagcagctattcgttaatactgatccctcatcaataccagctgcagttaggagggcaggtctctctctcccattggtggcaaaacccttggtggcgaagtcccatgagctatcccttgcttatgatccaacttcactgaccaaacttgagccccccttggttcttcaggaatttgttaaccatggtggcgtcatgtttaaggtgtacattgttggggatgcaataagggttgtacgtcgattttcactcccaaatgttgatgaaggcgatctatcgaacaatgctggggtatttcggtttccaagggtctcttgtgctgcagccagtgcagatgatgcagatcttgaccctcgtgttgctgaacttcctccgagaccattgcttgagatcttggcacgagagctgcgccgacgactgggtcttagactattcaacatcgatatgattagggagcatgggacgcgagatcggttttatgtcatagacatgaactactttcctgggtacggcaaaatgcctggatacgagcacgtgttcaccgacttcctgctgagccttgccaagaaagagtacaagagacgacaaagctatagctcgctaagctcaggcgaatggtgataagcgaggagactactcggcggggcatgtatatgtctatcatccacgatgcgtgcgtacagatgtacttgtgcatgacgagagataatgggtcgtagaagcggagggctgttgtcaggctataactaactgttgctttacatgtgctaactgttgatgcttcagaataaattttgtttgggtggatgatggctctgctgaaatcgagctacttgtagaacttatgactggaacctcgaaataaacggagaatttggattacgtaccgtactacttgc

SEQ ID NO: 42879 - DNA, 3414 bp, Zea Mays
ccgcaattcaacacgcgaagctaaaaaagaaaaaaacaattcgaaacccccgacctacgcgaggacaaaacagcaaaaccaaagcgctcagccgctcgcgaggagcgaaaggcgagcgcgcagccgggcgcccgtggcggaggcgaaacccccgccgccgcatcgccctgagaccctccggttcggcccgggccgagctcgagcccgcgcaatctcgccgccggcgggcttgatctgatccaaggccaccgcgcgccggcgcgggcggcgaggaatggggagcgtggacggccgcggggtcgaggggatccacgaagctaatcggcgcgcgcagttgattggatggatgaatgccttactcccggaattcagtttgcctccggattcatcgagtgaagagctgcgagagctgctcagtgacggcgtggtcctgtgccgtcttgtgaacacactcatcccgggggttcttgagggatcctgggagggttatgcaccgtcagatcagaggttaggcaacgtgaagaaattcctctcggtggtctctgatatggggctgccaggcttcagtttgaaagatcttgatgagggattaatgtcttctgtagtggaatgtctcttggttttgaggggcagtgtggatcctagattaggtgatgatattccaccagatgttaccagaactcctttgagaaaacaatggggagttcaggaaatggacaagcctcaagttcccgctgcagcactagggaaaagatcccctgcagaggacatgagaaacggcgttgcagattccaaaacccatcagaaaacttctgtcttttctggacaaaaggttcgtgaagttttccaattaaaacgcggatcatattcagatcttactgctgccaagatttcagagatgatgcactctaatagcttagataatgcaccgacacagtcgcttattagtgttgttaatggtattttggatgaaagcatagaaaggaaaaagggagaaataccacatcgtgtagtttacttactgcggaaagtcgttcaagagattgagcaccgtctctgtattcaagcagagcacataagaagtcaaaatgttaccatcaagacaagagaacaaaagtactgttcaaaaattaaagcacttgaaatgttggtaaatggcacaaatgaagaaaaccagatggcaataaacaggcttcagatagtcaagaatgagaagtcacaaatcgaagagaaaaaagaactctgtgagaaagatgttcaacgattaatgaaagagaaagaatattccaaaagcatcataatgaacctaacaaaagatatggaagccatgaatagattgcatgagcagcaacttgagcaaattggaagaaaggcaaaggaaatggaggaacaattaaccaccagggtaaaagaagtagagtatctcttgctacaatcgaataagaaagttgaagaacttgagattgcttctaggctaaaatcacagttatgggatcagaaagagaacatttttcagagttacatggataatcaacaattagttatcaaggacataagaatattgtcacagtcatatgaaaatgatatgtatgcacttcaaatgcagtggagaaatgaaatctctaatttaggatctgggttaaaatgtttggttgatgccgctgaaaattatcataaagtcctgacagagaaccaaaagttatttaatgaagtgcaagaactaaaaggtaatataagagtatattgtcgtgttaggccatttctttccggtcaagataaaaagtccaccacaattgactacatgggggaaaatggtgagcttcttatatcaaatccatttaagcaagggaaggacggacatagaatgttcaagtttaataaagtgtttactccatttgcttcccaagctgaggttttttctgacatacaaccactgatccgatcagttctggatggattcaacgtttgtatttttgcatatggccagactggttctggcaaaacttacactatgagtgggcctaccacatcaaaacaagattggggtgtcaattatcgagctttaaatgatttgtttgatatttcactaagtaggagaaatgccttctcatatgaggtgggggtacaaatggttgagatatacaatgaacaagtccgtgatctgctatcaaatgatattgcacaaaaaacacttgggatttggaacacttctcaacccaatgggcttgttgttccagatgcaagcttgcactcagttaagtcgacatctgatgtattagacttgatggagattggacaagcaaatagagcagttggttcaacagcgctaaatgaacgaagtagtcggtcacacagtattctaactgtacatgttcgagggatggatttgaagaatggatcaacctctaggggttgtttgcatcttattgatcttgctggtagtgagagggtagagaagtctgaagtaaccggcgatagattaaaagaagctcaatacattaacaaatcactctctgcgttaggtgatgttatttttgctttgtcacagaaaagtgcccatgtgccttatagaaacagcaagttaacacaagttcttcaaagttctttaggttgcgtctttgaaagacacaattttgcgcaaagatatggaaatagagcagatccaggtcatcaaagacaaagtaaaatccccaaatttgttgttagatagaaatgtgcctggcttgacgaagactacagcaaaccaacctagccaactattatcaggcgaacgaatgcttaagtctagtgacagagttctatcggatcgtcagagttacggcgaggtgaatgtagatcctaaccaccatgtgatggatactgcaccagtgagcatagatgaagcaggatatgagaacaatgcatcggatgatggtttatcgggtgaaaccgagaatgataattcagctgctgagatgacagcggaacggctgcatagatttccatcaagaataagcaggttcactctcacaaagaacgggcagccatctatgtctagatcgaacccaaaggatgctaagactccaagcaatacgaaagctccatcgagccggttgacaggaggctcttcagccaggtctaaaagacggcagtagagcacgatcatgttgctcgttttgatgtgcattgtagttgaaatgtgaatttgatgggtagttgtaggaccgttttatgattgtaactttagaaaatgtcagacactgatggcagaatatttgaggcatttgtttgatcatttgcttatgccgagcaaaacagcaaacaatgctcgattgtatgtgaaacactctgacctgtgaccatttgaatgtcggtgcgcctccggaagtccggagttgtgtatataccaccaaattgccggcctaaaatttccag

SEQ ID NO: 42880 - DNA, 1236 bp, Zea Mays
atggaggttactctggaagcaatctgcagtttccttgacgcgcgcactattgagcttgagacgaatgcttacccagctttggatgaattgacatccaagtttagtgcagtatttgttgttgttagcgtgaacgaggtcgaggcattgtacaggttgttcaagaagattggcaacaccttcattggcaatgggttgattaacaagaaattttcagtaattacaacagatgtgcaagacctgtacttagttcagcaacctcagttcctctctatcgacaaatgtaggtcatggttatctgcatttcctgttcggtgcgttatctgggtgcctcaagttttacctgagggggcactggaacagccggtgttgtccgacgaggccatgatgtcgcgtctggttggcgcgctcatcacgttcaagccgctctactcggtattgaagctcgcctcccgcgaggtcatcatcagttcttcacttgttctccttggggatggcagagatgtcgactatctcaacccgtttcatgcctatgacaaagggaatctatcatggctggctgcagcagaggccaagcctgcaacaatgtcgatcgcaaagagggccatacctgaggctacatcaatcgaagaggccaaccaaatcgtccgcggcaactggctgaatgtaattgaggagcatcatctgaagtacttggggagctctcaggtaaatgacatcctggacattggctgctctgttggagtaagcaccagatacctcgtcgagaagttcccatcagctcaagctgttgggctcgacctatcaccgtactttcttgctgtggaggcacaaaaggaagaaaaactgtcacggccaaagcctattcgctgggttcatgccaatggtgaagcgaccgggctgtcttcagattcatttgaccttgtctcccttgcttatgtgcatgttgtatttgaagagcaatttggcagtgggagattgttggcctacatttctgctcgtcctgggcagtgtggccgagctgatggctacatccttgagggtaaagagctcgagttctacatgaagaagctccagagaaagtagagttaattattggcattaaatctttgatcaaagcttgaaaaggtaaatgtggacgagacaactaactctcatgcacatgaaggagctgatgagtgcctaatgtttctcggggtaactgtttcatgttttttcaattctatgtctggacgccga

SEQ ID NO: 42881 - DNA, 1927 bp, Zea Mays
gataaatagcaggccgcggacacagccgagacctttccatttccagagttccaaggcttcccttttaccccttcgcttcccatggcgccgtgggtgtgggtggcgttgcaggcggccgccgtggctgcgtccgcggcggaggcgctgagcctggacgtccaccaccgctactcggccaccgtgcgggagtgggcggggcaccgcgcgccgccagccgggacggcggagtactacgcggcgctcgccgggcacgacctccgccggcgctcgctggcgggagggggggaggtggccttcgccgacggcaacgacacgtaccggctcaacgaactgggattcttgcattacgcggtggtggcgctggggacgccgaacgtgacgttcctggtggcgctggacaccggcagcgacctcttctgggtgccctgcgactgcatcaactgcgcgccactagtctcacccaactacagggatctcaagttcgacacttacagccctcagaagtcgagcactagccgaaaggtcccatgcagcagcaatttgtgcgatgaacagagtgcatgccggtcagcaagcagcagctgcccctacagcatccaatacctgtctgataacacatcatccaccggtgtgctggttgaggatgtcctgtacctggtcacggagtatgggcggcaacccaaaatcgttacggcccccataacgttcggctgtggacggactcagacgggttcatttctgggcactgctgcacccaatggtctacttggcctgggcatggacaccatatcggtccccagtttgctagcaagtcagggagttgctgctgccaattccttctccatgtgcttcgcacaagatggccatggtagaatcaattttggggacactggaagctcagatcagcaggaaaccccgttaaacatgtataaacaaaatccatactacaacataagcatcactggtgctacggtggggagtaaatccattcacaccaagttcaacgctattgttgactctggcacctctttcacagctctgtctgatccgatgtacactcaaatcactagcagcttcaactcacaagtccaggataagccaagccagcttgactcttctctgccctttgaattttgctactctataagtccaaaggcttctaccaatcctccgaacataagcttcacggcggaaggtggaagcgtgtttcctgtcaatgatccaataattaccattacggactctgtatctaatccgatggcatattgcttggctgttatgaagagcgaaggtgttaacttaataggggagaattttatgtctgggctgaaggtcgtgtttgatcgagagaggaaggtcttgggctggaaaaactttgatttgtgggcaactcaagaagcaaccttccagtgaacccaaatccttctggtgttccccctaaacctgccttgggacctaacagctacactcctgaagctaccaagggcgcctcgcccaatggcacccaagtcaatgtcttgcagccttctgcaagtttttcgccgaagctgcgttgcaacagaaacgtcctcgtcgccgctgctctgctgttcctcgtgatcctttgatcacctcaactccccatgacaatcttttcagaaaccaaatcgacagatatgatagattttagttaaacttggtttacgttgtatgtattgagttacgtatagtgtgatagtatcacattcttttggcctgtgtccacagttccagtaggagttaggatagaacacgggatgagtccatagccctttttttttgcacgttcataatgtacctggtggatgtactgtgtacatattagatatgacttcaggatgtattgattttatagaataattgaataacgatgctcgcatacacagatatatatacttcgcattgcttc

SEQ ID NO: 42882 - DNA, 952 bp, Zea Mays
ccctttcatcttcccaccgccgcccctctccctggcatcttcccaccgtcgctcctctccctagcatcttcccaccgccgcacgccctctcttgggtgctgcagctcgccccccccctctgctcaccatctcctccctcgttcccatggcgccctccccttcttggtggctgacgcccctccctccatggagctcgcctctgccatgaccgccctctgcccccttccttgctgttcttattgcagcccctctccatgccaagctcgccctccttctgtgcccagccctagctcgccccagcccctctccctggctgcccttgctctgttttcccccagccctagccgagctcgcccctgccctaagttctcaaggcagcccctctgtttttccatggtcggcaccctccccatcttttgtagattggaagaaaggattcttgtgagtgtgagaagaagcaaatcccagcataacgcatgctaggtgttcgacgaaatgttcgaattgggattgtcgttgatattgtggatctgagtcgcgctttgtattgttccctttactttcaaaaagtgcctttcttgaacggtcaattgaagaaaattctgaccaagaagaatgcatcatcaaactaaatgacattcctgggggtgccaagtcatttgagctagttgcaaggttctgctatggtgtgaaaataaagatttcacctgcaaatgctgtctacctacggtgtgcctcaaagcatctagaaatgactgaagaagtagctgaggaaaacctgattttgtgaatatataattgtgatgcttttgtgaatatataattgtggtgcttttgtgtttatgtgatggatctatgactgtggtatactgattaactgtgtatgtctttatgatttgtgtataaaaatatgtgatttgtggtgcttaattaaatgtatattattattaat

SEQ ID NO: 42883 - DNA, 334 bp, Zea Mays
aggggagccgatagttccatggaacttgttagggatttgtaagtgatacttgatgaaataaattctgaggaagctcctttttattttgtagattctagaatctttttatgaattatctgaaatatgaagaatactaattagaatttaaggtcatttgtttttaaaccaaatgctatgtaagctaacttctttctttcactcactcatataaatgttgagattaaactatccatgccagcacttacttttggcaggaaacttttagttgatgtcagttcttagttaatgttgtttggtgatgtataaacatgattgttatggaaactgaatgccc

SEQ ID NO: 42884 - DNA, 1171 bp, Zea Mays
aaaaaaactccgtgtgctgggaatctttgcatgcagctgtgtgctgaactgaaacccttcgctctatctatctatctatataaacagatgcccttcgctctcgtctcagcaagcagcatcgaccgacgccaacgacagagaagagagtccatctgctcgttgccttgattttgtggaacgaagcgatggctcgcagcggcgccatggtttcctgcatgctgctcctggtggtggcgcagcatcgtctcaagttttgttctcctctcctagctagccagcacctgcagatctgctcgttgccttgggctactgattttgtggaacgaagcgatggctcgcagcggcgccgtggtttcctgcatgctgctcctggtggtggcggcgcaactgctcatggtgatggccacgcagacagcggcggcggcggcggcggcgggcgaccaacgcggagctggacgccggctgctgtggcaggtgacctgccactacagcaactgtaattgccgcacttgcccgatatatggctgggcgtgctgcagcacttgctgctagctagctagctagctagtgtgagttcttccgcgcgcgcaagcagcctttgcataccacccctcttgcttagctcatgcatgtccagcagtagccggttgctgggctcgtcgtcgtcgtcgtctgcggcggcggcggcgggggcgggggcggcgtcatctctggcgtggttacgttctcatcagcgacttctaatggcgctcgctcgatctttatttcctgcagtcctttttgtaataagaagccaattgatgtgtgtgcacgcgcaatcctaataataaatagatcttctttgtgccttgctttgtttgatatatataataaaagtcttcgttgcaaacgtacatcttttttatttaggaaattcattttttactaccgctttccggacggcatgcaggcctcaagtgtgctgtaaaaaaaagtgcaagttgagagagagccgtttcatgtcacgctcgaaatccagtggactcgttttgagacaatttattatccaccaaccatctaaagttaacttggcgccaccttttttccgcgatacgtagtattagtagagctgggcatctttgtactaagaatacgaaaacatcgtacaaccaaacaaaagaatagaacaggc

SEQ ID NO: 42885 - DNA, 265 bp, Zea Mays
cggagcctcttcatcatctaattcatcaagatcaaattgctctacttgagagccattagtctcatgaaacacaatgtcacaagaaacttcaactagtccagtggacttgttaaagactctatatgcccttgtgtttgaataataaccaagtaaaaaaccttctacatccttaggagcaaatttagattttctacctcttttaacaagaataaaacatctgctaccaaagactctaaaatatgaaacattgggctttttaccggtg

SEQ ID NO: 42886 - DNA, 2280 bp, Zea Mays
atcctccctcgtctacatcctgtctctcctcgcactctccgttctcccgccgcttctggtctcggaggtcgcagcgttcctccacttgtccgttcgcctactcgcctgcggctccgtccacagtacgctacgcaaaagcgaggtggcgaccgctgttcgccggagacgatcagtttgtctggccttggatgggtgttctagttaatgtgcctactgagtggaagaatgggcgccaagttggagagagtggaaatcggcttaaagagcaactttcacgcttctgccctcagaaggttattcctttatggagttatagaggtcacaccggcaatgctattgttgagtttgcaaaagactggactggcttcaaaaatgcgcttgcctttgaaaatcattttgaggccgagggatatggcaaaagggattggaagctgaagtacagtgggtcagagatgtttggatgggttgcaagagctgatgatcatagatgccaagggcctataggagactatttgcgaaaaaatggtgatctgaaaactgttggtgatcttgaaactgaagggacccgtaaaactgacaagcttgtggcaaatttagctagtcagattgaagtaaagaacaagcatgtgcaagaactggaatccaagtgcaatgagacgaccgcatcacttgacaggatgatggagcaaagggagcagatactccagaagtataatgaagaaattcgcaagatgcagcaaattgctcgtaggcattcgcagatgatcattgatgataataaaaaactccacaaagagttggagtccaagatgcaggaacttgacttaagatccaaggagcttgatgacatagctctgcaaagggattgtgacagaagaaatcttcagcaagagaaggaaaagaacaaaattaaaactaagcatctcatgatggcaacaatggagcaacagaaggccgacgagaatgtgcttaagcttgtcgaagaacataagagagagaaacaagctgctctagggaagattctcaggttacaacaacaattggacgccaaacagaagcttgaactggaagtacaaacgctggaaagcaagatgaaagttatgatgcatatgccaggtgatcaggattctgagtcaaagaagaagatggatgaacttgctgaggagctgaaggaaaaggtcgatgaattggaagcaatggagtctctgaaccaaactctgattatcaaggaaaggaagagcaacgatgagttgcaacacgctcggaaggagctgatagatggctttatggagcttgctgttgttggccgagctaacataggtataaagagaatgggtgagcttgatctcaaagcattcggaattgcttgcaagaaaaggttaccaaaggaggatgcagaagtcatttctgctaccctttgttcaaagtggcaagaagaaattagaaacccaagctggtacccttttaaggttaaggtggtggatgggaaagaaatggaaattctcaaagaggacgatgagatgctccaggagctgaaagaagagcacggtgaagaaatttatgggttggtaacaaaggccctgcttgagatcaatgagtacaaccctagtggccgctatcctgtaccagagctgtggaactacaaggagggccgtaaagcaacactgaaggaagccgtccagcacgtcatgaggcagtggaagtctcacaagagaaagcgctgagcaaattggttgctgggttcttctgcctgccccctattaactcgatagtcgatactgggtagcattaggtcgtagcttttaattaactcctaatgatgagtgggtaacagtggctggctaatattaacgttaagttgccggaggttcggtctggattcttttgttggtagtgtatacgaatgctgttagtcggtctggattctcctgtcgttgcatgggcatttgtatgtccaggatattgaccgcttcatggatcagccgtcaaactttggcaaaggagaggcatgaacgaccttccagttcctccatgatacgtagacgtgatgggcaattcttggttgatatttggccgtgcagcaccattgagcggctataacttgtacctgatgactctgggtatggattactactaaacttccatgtgcctaaaatgtgttgcagttataaattatgattttgtcaagtagaatctaatattttacaataccgatcattatgatcttgcagtctgatataagcgctattttttaaaagtgtctaactcaaggctccgatg

SEQ ID NO: 42887 - DNA, 4405 bp, Zea Mays
cttacttttattctctatccccttcatttatccttcttataagctttctcacccagcgaatctctacaacattcaaatttactatgggtgagcaaagatttagagattgtggcaatcagacacagtgagaccttaagatgggatgagtctatgaatcctgtgttgatgccaaagggcgagagcggatatggcatctatgatttggaggcgatgagttgggatctcaacgaggtagcaggatgagatcttgatgaggtagcgagctaagagcttgaagtggtagcaagatccttggatctcacctaagcagttcggtgggaccatagagaggaaccaagcgaagatcctaaagcggtggcagtggcgacgagcttggatctggacaagacaccactatggaatctcaaagaggcaacaagttggcattctagagtgatagcgacgattttggatctcaatggggcatcagggggggttgaaagaggcaacaagcctagagatcgaagcaacgacgatgagctcggatctcgataaggcagtaggatgggaccttccaagattagagctcaaagcaatggtgttgaggtgggataacaaaggagcaacatgtctagtgccaaaagaggcagcaacaattcagggtcttggtgaggcgacatgtcgagctcttaaaacatcgaggatgagttgggatttggacaaggatgacaaggggaatctcaacgaggtatcaggcttagagtcgattttgggtttggaggaggacgttgaatggaatctcgatgaggtaccgggcttagagcattgttcagatttagatgaggatgttgagtgggatctcgatgaggtaccaggcttagagacaagttcggatttggacgatgatgcagagtggaatctcgatgaggtactaggcgtagagtcgagttcagatttagagggtgatgaatggaatctcaatgaggtacgaggcttagagtcgagttcgagtttggatgaggatgttgagttgaatctcactgaggtaccaggcttagagccaagttcagatttagacgaggatgttgagtcgaatctcgacaaagtaccaggcttagagtctgaagaaatagaggaccattatgaaccaacacgacatgtcttcgttttttcttcgattcggcgcgtggcaacctggtcagtccaatccgtccgtgaagaatttatccgtattttcgtttgcgtcgcatcgtttctgcgaaggatttcctgttcgttttgggggagaaaggcgtcgtccttgatgtctactatcgcgaccccgccgccgccgattgcgcaagagaaggccgccagccggaataagcgcaagtaccgtgccgagccaccttccgccgagttgggcccatacgggctggagtacccgctgacggcggactgcatgggattcgagtttatgtcgcctgagaaggctgccatggcagcagcggtagccgctgccgagggtgtcagccttgacctcctccagaactcgtgcgaaaagtgcaaagatctccaccctactgcggaggagttactggactgccaacgatatgtgaattggagcgacccaaacgagacgcagctggaggagatccttctcaagagtctgggcaccacctttgacaatgctgtgagtctgatcaccacaatgggctactctgaggcggttgcacgggctgctgttgtgcgggcagctgcgcaatacaactggagggagagccttgcagggtttggagaggcagcagttgaggttctcaagacggaaggggacatgttgccgagggagggtgcctctgttgaagacatgaggaggattgagcaggctgtgcttggtagtatggttatgtgggtaaatgaggctcagccactctgcaccacaggcgatgtaatgttttgcttgcttatgtctgacatgaacgtggcaaatgccagtgccatggactacaatacttcttccctcccatctgttgctgctcaagttattgcccaaccagacgcggggaactatgttactggttcaggttcaaatttatcagtttctattaccaacccacagactggcgttacattccgtggaaaacttaccccaatgccaccgggctcttatggtgctgtaaaagctgattcgtcaatggcaccagcaagcctcaatgtgtcaagtaccaaaccctcggtgccgggcaagactcagtgtgtgataccaaatattgagccaaaagaacaacctgttcctatacatgatcattcagaggaccaaccatttgttgctgctgcgacacaatctgtgaaaaatgacaagccatccccaagcaagagggggggctctaagagggactccttgcatcgacagaagttgacaagctttgataaaagttcccgagcattgggttccaaaggttctcttaggtctggcaagcatagctattcggccagtgcggtattggagaggaagtgccggtcattttcagattctactactagcaacttgaagggtgcatcaagagttgctaaagggtttgctgcaagcatatctggatcagaagtatcagctgacctttcctttactggtaccctttccccttctccatcatttgatgccaagatagttagtaactcaaacccagcacctactgctagcacagatctttcattgtcattgccctcctcaagtgatagtttaacaccatcttcgaatcatgattccattaccgagggagtggactctagtagcaaaattaatttttcgtatgatgaagaacagaaggtctggatcccacaagataaaaaggataaaattgtcttgattcttgttcagaggcagaaagaactgcaagcacatatgcatgactggacagactgggcccagcagaaagtgatgcaggtcgcacaccgacttgcaaaggagaaggatgaacttcagtcactcaggaaagagaaggaagaggctgaccgcctgcaagaggagaggcaccatttggaagagagtactcggaaaaagcttctggagatggagtctgcaatttctagggcaaatgctcagctggagaaagcagaagcttctgctcgcagacgtgaggttgagaatgcacaactcacgttacagatggaagctgcaaagcgacatgcagcagagtcagcaacaaatatttcagagcttttaaagaaagacgagaacagccgtaaaaggtctcagcgttgggaatctgatagagccctattacaagaggaacttgcagcacaaaagagcaggttatttcgggttcaagaacaactccagcatgctaaagagctaaaggatcaagtgcaggcaaggtggaaacaagaggaggctgcaaagactgaggcaattgcccttgtaacctcagtgaggaaagagagagggcaaattgagacctccatgaggtcagaagagaatttgctgcatctcaaagcagcgaatgacgcacaaagatacaagagtgagatccgtgtccttgagcagcgtattgcgcagctgaaggtgtcattggactcttcaagggttgctgcccccaagtggggagccgacaataaatcctatgcattgcatctttctgaagggagaaagaacaacaatgcccaagttttgtccaacacagcagtaccccaaggtctcgattttgacgatatacagcgcgaccgggagtgcgtcatgtgcttgagcgaggagatgtccgtggtgttcctcccctgcgcccaccaggtcgtctgtgccaaatgcagcgacctccatgagaagcaaggtatgaaggaatgcccttcgtgccgggcccccatccagcgcagggtgcgcgcccgccccgccggttgctagatttcacatataccatttggattttacttttcttctttttttcaccttgattgctcagcttaagttgatggaagattggagggaataatcaggtggtgtgagtggttgaaactgtgacaataatacatcgttaaacaccaaacaagccccagcagacagtgggtactggtttggtttgttatatggctataccggccgcttctgaatgctttggttttgctgcactctggttccaagtcccgtactgttttgtaaaaatgtcgatctgtgactgtaatgctcggtaggaaatctgttgatcgatgttgttatgtcctgttgcattcatctgtagctattgaagtcttaaatgaagtcagcttccatcgtctccttgggccactctcaataggagtttcattagatatttcatgacattaattagtatgtcacatagtatttcttttgatgatatgactataggtgacaatgtgttctaaatctctactaatccgtaagacaatagtgtagactaggcacaaccatgcccccgtctccatctcgaccgtccga

SEQ ID NO: 42888 - DNA, 2555 bp, Zea Mays
gcgtatgtgttggaaatgctcagctgctagtttttcctggaagtggttgtgcgtcaagaagggaaacatatttttgcggaaaaacgagaaagattactttgcttcgagtatttgcataatggaagccttcacaagcatctgacaggggttacatggcacccgagtacttggatgatggagtgatcacaatgaagacagacatctatagcttgggtgtgataatcagacacatggtgaagggacgtaactcggcagacaccactgatgaagaagtactggcaaactggttgattaggctggaaaaggatccatcacagatgatgaggcagcagacgacccgattattatttgaaacagagtacaaagagcaaataaaagcgtgcatggatatatcatggaggtgcacgctgcgtaaaccaatggacaggccaacgacgcagcacatcctacttacactggaggaaacagaagcaaagatcaaatcggtcgttgggcctactccaccaaatgccgggcagcttcagattgccaaatttgggccgtggggtggagatggagggaagacgcgagacataagaatgacgccttgccatttgcatagcgtaacaattagcagtggaactattatcgattctatcgggttttcattcactgatcactatggtcagcaccacacaacagggccttggggcggtaaggagggtacgaataagattgaactaggcccttcggagtttcttacaggagtatctggaacaagcggcccattcaaaaatctaacaaatgttgtaacgtcacttacgtttgtcaccaatactcgtagttacggaccctttggaaaagggcgaggaacaccgttccacatccaaacgcagaacaacggcaggatcgttggcttctttggccgttctggccagtatctctatgcgattggggtctacacgaaccaagatgtgctgcaaatctagctagtccatactagttttatcgatcttatttaatatttatgttttcattcaaacatttgcttattagtccggttcacttccaggctagggtcgcaaggatcgggcgacctttgggtggagatgaaggggttcttcatggcatcacagacctcagtgggcagcagcgcagcagaggtggaggtccatcgggagaatgtggagacagcgacgacgagcccaacggtgatttcgccaaattcggcccgtggggcggcgacggaggacagccgcaggacatcggaacactaccctgccgtctagacaggatcaagatcagcagtgggcttatcatcgactcgatcgagttctcgtacgctggccctgacagccagtaccgcaccgcaggcccttggggtggtcatggaggagacaacagctcttttcagctagctggttcagagttccttacaggtgtgtctgggtcaatcggcacattcaacggccatgcaaacgtcataacgtctctgacgttcgtcaccaacgctcgtagctacgggccgtttggaagagggcgaggcacatccttccacatcccagtgcagggcaatggctgcatcgtcggtttctttgggcgctccggacggtacctcaacgcgatcggtgtctacacggcgccgaaacccgaaccaaaagcagttgggaaacaagatggtggtgatgaggccgtcgtcgccaggattgggccttggggcggggttggaaatgctctccatgacatcgcagagaggccgcatcgcctgcacagagtgacgatcttcagcgggacgatcgtaaactcgctggagtatctgtacagcgatggcgacgggcagcagcacaccaccggtccgtggggcggctgcggaggaactggtcgaaagattcatcttgcccctgaagagttcatagtggaagttactgggacattccatccatgcgcgtgggacagaacaatacccagtgtcgtgtcctctctgacgctcgtgaccagcacgggcaaaacacacgggcctttcggaacgcagctgggagccgcgttccaggttccggtgcagagcgacagcaggatcgttggcttcttcgcccacggagacaattacatcgaagcaattggcgcctacgtgaagaaattgacagaatccagcaaccgttaactcttggaacaacttgcagctgttcacactgtttcttgggccattgctccttaaatttagtccagatggccaaggagcaaccaaacagaaatcgctatggcagggaagatggactaaactggactgtggcacctccagcatagcctgctcttagattagtgaccagacatcatcgagatatttcgatattataataaatgaggaacccatctcagatgtttatgttagctcctcagtttttgcttctgaatgattaatttagatcttccttatttttgcaataaatgaggattcttttctgtctcttctgaatggatacgaatcatgcatcacgtatcagtgcacctattgcagtgaggagatgaggacaaggtgctgacgaacttattgtcctgagctcccacttgagtttctg

SEQ ID NO: 42889 - DNA, 604 bp, Zea Mays
tctgctttcgctcatggttaccacaacttcacccagaatcataaaaaaaaaatatccagtgtggcaactgaaccatcaggatgtctgtgccagcgttagcccaggtgcctgttggaagctggtttgggctgcatcaactgtccgcgcagaatttggaccgatatcgcagatggcgggggactggaaagaagatggttccttccgctgctcgtggtgtgcttgaatccagtagtggtacacattctggtggctttatgatgaaaagttgacgacttcaggctgttcagggagagcatggagtacaatgatgtaaaagaactctactctactctactcacatggatttcatatttttgagtttcctgcatgccacatttcactaaaccaagtaaattgaaactagtagggaaaaatacaagacagtagagatttacatacagaatgaagggttggattccagctctgaactgaagcaggatagcaaaagtacagggcatttgcctgaatctacgctccacaagtatataactcgtatgtttgggctgtgagttgcagatgtggtcatccaagttccacccgatcgtggagagatccctccgcctgc

SEQ ID NO: 42890 - DNA, 1823 bp, Zea Mays
ctcacctaacccactcagcctaagatccccacaggtgtcaggtctcatccggagtcgtcgccaagaaccacagccaccgcgatggcgcagatcatcgatggcaaggccatcgccgccgacgtccgccgcgaggtcgccgccgatgtggccgcgctctcgtcggcccacggactcgtgccggggctggccgtggtcatcgtggggagcaggaaggactcgcagacgtacgtgaacatgaagcgcaaggcgtgcgccgaggtcggcatctgctccatcgacgtcgacctcccggaggacatctccgagaccgcgctcgtcgccgaggttcatcgcctcaacgctgaccccgccgtgcacggcctccaggcttgcggtccagtggatttggtctgatcctgtctccatcaagcgtacatttctgtttgatgtttgggatttgaatccttgagcgctttctcatagcaggatctgaaaatgcaactagtcaataaaattggcatccgctctgtacagtatgtcttatctgttaaccaaggggatttcatgtcatatcccaatgtcgcttctggtttggctgcgctaatagtgctttcggagctgttgcatactatgaactccccccagtagcaaattcgcacagataagtaaatggagctcaaacatagcattgttttgatcgtaaataagaatccatagctaaaaaatctgggcacgatcaatctaagctcaatgtcctccacaaaatttgaactttttagctctgtttgtctttacataactatgtagacgagtgccatgccatatggaggggttctaaaatggacttgtctacctccccactggattcatagaaaggcagcaagttcagttttctgacgcttgtgtgagacagttcggtttcatttgattcatgccctgttctagcttcttgaaatactgactatttgatcatactggtttcatagagcccaaaaatccttgttccaaattatgaagagaagctaagtttgctttcagggatccttgtccagcttccacttcctaagcatatcaacgaagagaagatactgagcgagatttccatcgagaaagatgtggatggcttccatcctctcaacattggcaagcttgcaatgaaaggcagagagccactgttcgtaccatgtacgccaaaggggtgcatggagctcttgtcaaggagcggagtcactgttaaaggtaagcgggcagttgtggttggtcgcagcaacatcgtcgggctacctgtatccctgctccttctgaaggcagatgcgaccgtatctgttgtgcactcgcggacccctgatcctgaaagcattgtacgcgaagccgacatagtcatcgcggcagctgggcaggctatgatgatcaaaggtgactggatcaagccaggtgctgcggtcatcgatgtcgggacgaactccgtcgacgaccctacccggaagtccgggtaccggctcgtcggcgatgtggatttcgcagcggcgagcaaggttgctgggtacctgactccggttcccggaggcgttggcccaatgacggtggcaatgctgctgaagaacacggtggatggggcaaagcgggggatagtcgagtagctacgttcatctcacttctcgttgctgtacgactgtgttgcaaggatgtgagctgactcgaaaagcgtgtgttggttggtgtaacaatctgtttcccaagaataagaatgatagtcacagctgctttcctgtttaataaatgcagtgaagaaagaattttggctttgctgctgcaattacagttgaaacaaagcttatggtttt

SEQ ID NO: 42891 - DNA, 1733 bp, Zea Mays
gtctctccccccgtcgagcacacaacacaccctcctcgtcctccaatccaatcaacctggtagactcgcttcgcttctcccccagccgtcggacggagctcctcgcagtcgcagcagccgccgatcagcctgcgctcgggctcagcgctggaagattaagcgtgaaatttgtatcatgaaattagtaaggcaccctaatgttgttcgactgtttgaggtgatgggaagtaaagcaagaattttcatcgttctggaatatgttaccggcggagagcttttcgaaatcattgctactaatggaaggttgaaggaagacgaagcacgtaaatacttccagcaactgattaatgctgttgattactgccacagtaggggagtgtatcacagagacttgaagctcgagaatttgctgcttgatgctgcaggaaatctcaaagtttctgactttggtttaagtgctttaaccgagcaagtgaaggctgatggtctgcttcatacaacatgtggaacccccaattatgttgcccctgaggtgatcgaggatggaggctatgatggtgcaactgcagatatttggtcttgcggagtaatcctctttgttcttcttgctggatatttacctttcgaggatgacaacatcatcgccctatacaagaagatttcagaagctcagtttagctgcccctcttggttttcagctggggccaagaacatgattaccagaattcttgatcccaatcctacaactagaatcacgatttctcagatactggagcatccttggttcaaaaaggggtacaagcctcctgtttttgacgagaaatatcaaactagcttggatgacgtggatgctgcttttggagattcagaagaccggcatgtgaaagaggaaactgaagatcagccaacctcaatgaatgcattcgaactgatttctctaaaccaggcactgaatctggagaatttgtttgaagcaaaggaggagtataaaagagagacaagattcacctcacagtgccccccgaaagagataatcacaaagatcgaagaagctgcaaagccgcttggctttgatgttcagaagaaaaaatacaagatgcggatggagaacccgaaagcaggtagaaagggcaatctgaatgttgcaactgaggttttccaaatagccccatccctgcatgtagtcgagctcaagaaggcgaagggggacactctggagttccaaaagaagcctgtcgacccagctgaaggatgttgtgtggaagtgcgacggcgaggtggacggcaacagcgcggcagcatgaaagtgccctttgaactttccactggacggcgccggttttcctttgtacatagcttctctttcggatgatcccgtgtccattgcagagtcggttttgcaagcaagttctttggtttatttgtagtaagcccggtgaaacaaccgccctggaggctgttgtggatgagcttactggcgtgtttagttcgtttcatggtcgggaggttggatggaatggaaaccacaatcaaggctgtagtagtgtgtgtagtaacgaagtagatacatgcatcagatggtgtaagggagtaccagctgttagttcatggtttcaagcttagccccccttcaatttgttcgatgatgtattacttcacaataaacattattacttagatgtatgaggtgagcacacttggtcttttgtcctctttgtgctattttgcgtgat

SEQ ID NO: 42892 - DNA, 2026 bp, Zea Mays
gtcaacacaagtacacaccacaaacacccatctcctccgcctctgctcccttctgctcacccgcacgatggcgccggaggcgcgaggtgaggcggcgctggtgtacagagacgcattggcgccagtggaggaaagggtgcgagacctgctgggccgcatgacgctgcgtgagaaggcagcgcagatggcccagatcgagcgcaccgtcgcgacgccgcgagccctcacggagctcggggctggcagcgttctcaacgccgggggaagcacgccctgcgagcaagcctcccccgccgactgggccgccatggtcgacggcttccagcgccttgcgatctcctcccgcctcggcgtccccatcctctacggcactgacgccatccacggacacaacaacgtctacggcgccaccgttttcccccacaacgtcggtctcggcgcctgcagggacggagagctcgcgcgtaggatcggcgaggcgacggcgctcgaggttcgcgccactggcatccactggacctttgcgccgtgcgtcgccgtctgtcgggatcctaggtggggcagatgctacgaaagctacagcgaggacccagagatcgtgcgctcgttgaccaccatcgtcagcggtttgcaggggcagccgccagcagaccatcctcatgggagaatgtacttgcttgtgctaaacatttcgtaggggatggtggcacggacaagggggtcaatgaggggaacgccatttgctcctatgaggatttggaagcaatccatatgacaccttacccggattgtatagctcaaggggtggcaacagtaatggcgtcctactctaagtggaatggggagccattgcattcaagtcgctacttgttaacagatgttctgaagggcaagttaggctttaagattgggagggcattgacaggatctgtgagccacaaaagcctcgagggtctgattatcgctattgcattgcacaatcagtaaatgcaggaatggacatgattatgatacctcacaggtttgagaaatttttggatgatattgtgttcttggtggaggcgggggagataccaatgtctcggattgatgatgctgttgaacgaattctgagggttaagtttatttctggagtgtttgagcatccattttcagaccaatctctactggacatagttggttgtaaggaacatcggttactagcgcgtgaggctgttcgcaagtctttggtacttctgaaaaatggcaaggatcagaataagccattccttccattggccaaagatgcaaaaagaatactggttgcaggaacacatgctgatgatattggatatcaatgtggtggctggacgatagcatggcatggagacagtggaaaaataactcttggtacgagcatattggaggccatacaagaattagtgggagtgcaaactgaagttgtgtatgagaaatgcccaaccgaagctatgattgaaactggggggttttcctatgcggtggtggttgttggagaggttccatatgccgaatgggacaggagatagaactgaccttagtattccgtttaatggctctgaccttatcatccgtgttgcaagtaaaatccctaccctagtgattgttatatctggaaggccattaattattgagtcacaagttttggaaaagatagaagctctagtcgctgcctggctgcctggaagtgagggcatgggaattaccgattgcctctttggagatcatgattttgtgggcacattgcctgtgacatggtgtaagtctgttgatcaattgcctatagatgctggagactctaactatgacccgctattccctgttggatatgggctaaaaatgtttcgaagcgataatgattcaacataactttattatttattgggtacatttgaatctttgtgatgttaaatactctgtatttattggctattggaacttaaaatgaaataatatattgttgtagtatgcattgtactgttttgaatacattattcttcccttagat

SEQ ID NO: 42893 - DNA, 2703 bp, Zea Mays
caaggatggccttcgcttccgtccgaagtctcctcgctgccggggtgtcaagggagggcggccccagcacaagcgccgcccattgatcgctttcctctccttccctctcccctcccagtcgctcgcctaaacctcaccagcgaccagtcgccatcaccatggatggacccgcctccccctccgccgccgccgagactgatacgcggggaggagaagctccatccaaagccaagcgaggcaatgccgaggagaaatatcaacatggacaaccggtttactttcctgaggaactaatggacaattgggtttctttttctcttcgtggcttgtattattgctacaacatctcgttgcaagggtcttgcaacacaactgctgatccaacggacataattttagctgtcaaatgtgacatggggcctgacttctttcggtactcttttaacttgggtggtactgatattaccattaagtacctgtacaagattcatctgaatcaggaacaggtactttttgctagaagattccagatcacggttctttctttgctcattaacagtaacagttcggaggtcagcaatgctataaaatacttccgtgaatggcaggtagatttgggggttgtctatctacttctgcccacagcgtcaggcaaaattgattggtgcggtatcaagttctcaacatcatcagcatatgatgtgactgataaaaatatgagacattgccattcttgtaaagatgctgatatactgcagacaatggatgacccttgctgcaggtgcatacttcagaattctgttgtatatgcccctcgtgaacgaaaattttatattattacaggacttgacttaaatgcaaaccaacctctggatttgaacaataggagtgctgttagctgcaaaagtaaaccactgttggtcgccagtggattattcacagtgcaaaacttcctctacaaatgctacggaaaaaggaaagaacctacgagtgttaagttgccacctgaactctgcaaaatagtcatggcaccggtgtcagcaaatactttgttcagcttctcatttgtgccttccataatgtaccgtatccagtgtctgcttctttctgcaaagttgaaaatccagttgggcccaagaatgcaacagttcaacataacagctatgaagattctggaagcacttacaacaaaggaatgccaggagaaattttcaatggaatcattagaaacacttggagattctttcattaagtatgttacaggccaaaatctttttaacaaatacaaacatcgagaggacatgctaacctctatgagagaagaaaaggtctccaacccagctctatgccagctagcttgcaaaagcgaaattgtgggatacattcgaggtgaactatttaacccccaaaaatggaccattccagggttcggttatgactcacgcggtaacaacaaggttttcttccgagcaaccaataatatgtacagtctgaagaaaatatccataaaaagcaagagaattgctgatacagtggaagccttgactggggcctacctcagtacttgtggtgaactggctgcagttcattttatcaaagcactaggaatggatgttgaactgcatagtaaaatgcaagttgaaaggactattacaacaaaatctgaagaattaattgacgcggaaagcttgcagacaatgctcaaatatgtgttctatgatacttcactgttagtagaagcattgacacatagttcttacaatattactggtattacagcttgcaatgagatggctttttatgggtcaacttaaagttcgtgcctgtgtgcagaggcttgaatttctcggagatgctgtattggactacatcttaacttattacttttacagaaaataccccaattgtacaccagcactgttgacaaatctacgaaaagcttctgtgaacaactgttgctatgcacatgcagctgttaaagcagggttacacaagcacattcttcattcatcgtcaaaacagatggttaacgatcttgagaattcagggcggtcattttcaggcccatcacatggttgggaagctggcattagtctcccggaggatctcgcagatttgtttgaagcaatagctggcgcaatttacgtggacagcgggaacgacaaagaggttgtctggagtgccatcaggcggctactggaacctcttgccacccccgggaccatggagcctgaccccgtgtcggaactgaaggaattatgcgagcacaaacactaccctaagccatcgtactctccaactcgtgacagtgtagctggagtgacaagggtggttgcacaggtgacggctgcgcggactgtgtactccgggactggaacaggccgcaaccaggatgtggcagaggttctcgctgcaaaggctctgctcaaaaagataaaggccgcagcaagaggatgaagcttggacttggcttggaccgggcgggcatttgatatttgggaatttgcgcacatgatagctgttctcgcagaggtaacaaaacaaactactgtagtatataaatgttgtgtatatgaatcaaggacagttgaactacccttggtttcgatagctgcaaaatacaaaacaaaaaaaaactcgaatctactatgcacagtggcttcatgtggtggacccttaatgaaatgatgaattctacgtggc

SEQ ID NO: 42894 - DNA, 1012 bp, Zea Mays
gttttctctgttgtgcttctgagaagggatacgggtctttcacgacttctgacgggagggaagggtgtatgatgatgcgtggtaacgtaattctcaacaccgccgagccatagcaatcatcaccgtcgtagtcgccacctcctctcccggcgtggagtggaagagaacccgtctgcactcataggctggttttgttcggtgggagggcaacttgagtctaagatattcaggtattgctagagatgttgggtcatgatctagcaaccgatccctctagtactttgcgtatggttacctcaagggtatcaagtgcaccgttggggcttgtctgttcgttgagttttgacaggggattcaaggaaaagaacaatatcttcatcaacgtggatagatgcatgaagtacagtactttctgttatgcacccagaaatcccaatatcacaccactggcaactgcatcgtttggggacatggctgattcttcaatttttacctttcccagaatccatgtgaaggatccatatcagcgcctcggaatcagcagggaagcatcggaagaagaaattcgggctgctaggatttatctgataagcaagtatggaggccatagtcaagcgctgatgcaattgagtgtgcccatgataggattatcatgcagagtttctttgataggaaaaaaaccaaaaacgaacctcaagaaaaaaattagagaacttagtcagtcacgtgccgtgaaggctattcaaggcagatttcaaacaccacgtagcaaagtcatttggcagacagctattacttttgtcttgcttggagtgcttacccttgctttccctactgaagaagggccaaccctccaggtggccatctcttgtgcagcaaatatctatttcatttatcagagggtcaaaagtggatggcgagcattcttttatgggctgtacaagcagatacgtggtggctcatattttctcgtcgcatatgtatgtaccataaaaggacctttgcgttctca

SEQ ID NO: 42895 - DNA, 2902 bp, Zea Mays
tatatatcccaattttgtgcttcaaatcatctttattcatctctgtgaggcttttcttggagttgctcctcatttcggtttgtggaagtacctataccattgcaaacctggtatgtaggataaaaggcgtcaggtagttggaggagcaagtcttgaactccgtcgtggttgaatggttaactatctagacattcctctcaaggataataatatggcgtgatatcatgagcagtttcctatggaaaaccacaatagttccctccctcctgatttagggaagttgcccgatgtgagatttccaagttgggtagaggaccaaccgacttagaatccactaagttactgccatgatttagggagtggtttgatagctcaagttgtagtgattgactttgtgtaccacaacattcaacctttgaaatattgggtcttccctaccttcttgtacactggaatcaaagatcctaccagtatatctgattaagaaatcacacaagaagatgttctgtcccgagtttatatgatgttgaaaggaaatatttgtaatgaagttgctctatgccctattctgtatggaatcctcccccgaccaatgtttatgttgatagttatgttctattggttcagagtaacattcccaagttcttgtccgacccccctcaacgtgtagagaactgagtcttcaagagaaatgcacagctcaccgatgaagaaatggatgctatcatagaagctagtcagtgtctggacaagagggaaaattgacccatatagtgatcaagggctctattggttgttttggtgctgaaactattccgagcacacataagggggagccctcgagcttcaagatgttgctgcaagtagtgaagccctcgagcaattgagcattgctagggaaaaggcagcaagccaagtgaatataaaatgtagatgcttcagtaagcctatggtaaaggttgaggctcccaaggagaaaaagaagagtctctgatgtctatcaagcataaagcctgtgtctgccctaaccaaatcaaccacagttgagaaaagccaaaacaaggtgatgaagaagaggttagctagcaaggtcactactaaagacccaactcctccagtggattggaagaataagaagaagaagaagaagaagaggtgctcccccttattcgacgcaagaaaggatcaaaggcaatagaatgatccagtcaagcttgccttaccagaacatcggaccaagctttaaagcttagacttgtcattaattgatgcttttctagacaaaatttctactgaagatgccttgaccaaatcacccgatacccacgttgtggatgtggctgagagtcactcaggtgagccatcagagagcccacaagcatcagcagctccttcctatgaagtataggtggagggggaggagatttgatccttggagatgtgatgcttcctatagccgagctggttactaagccataggtaggccccgcttctgcatcagaggccaaagagtctaagtttctgactgaaatagtggctgagccgcgaatcgactcaaccccagcccccgagagtgaaggggatgaggcatctattgcaatggttgtcgttacatagcccgacttgaccccagccctcgagattgaaaatgttggggtgtcggttgaggcatctgtcgaaccgcagcaagtcactttaggcactttggaggtcagcataccaagtatcactgaggactcgatggctaaaaatctaggtactactccttcacaaacagttggtacatggtacattgaaccaaccaagtctgatcatgatggatccagattcagtgccttagccaaggcaaaacaacagaggagactccaattaataccgagccaggacgcggtcctcactcgcagcgcgcgcaggcacacgttttgccgcgtttcgcgcgcttgttcttgcctgccgcgcgggagccctgtgccgcgccgcccgagagccctgtgcgccgccgccctggtacccctgcgcgctcctcgacccggtgctgcgcgtcgtcgatccagtagcccaaccctccgatttcagatatgctatatcaactcgctgtttcacttctcgatgctggggcaagttgaaggagcagtcgtccatgcttcatgaaaagctttctcctctgcttggatctgaggttgcagtgctttgcaaacagttggctgacttagaggcctctcatgctacagaaaatgccgcttctacggataaattttctaaactcgaagacactaagattcgctacgagcctgacctccgtcgggttaaaacaactcttgatggcgaccgagaggccaataatgcttcactacgacagaaatttgacatggagaagaaaaatcatgaggatgaaatgcataagcgagaagagaagatccaaagcttgttgagtgaggtgactcagcagaaggaacatatccaaactttgtcctccacaaagtctactctcaaaatactacgtagcttgtcagaagaccaatccaaaaagtatatggctgtgaagtccttgagaacaactgtaaggtgttcaaatttcttatgataaagccatggacaggctgaagcatgttgttcggtaaaaaacagtggtctccaatattgatgcttacagagaaattacgatagaaacaactcaaaaattagagtctaatgtggctagaggtgagggagctctcccccaagataaaccagtatctccccccaccatgtagagtagctatacttagttctggagtatgttagtttgagaacttttggttgtattgtgttgtgaactatttgatgcctttctcaggctgttgtatgcttgtcgttcctataatgagaacacctaagtggattttcttttgtcaatgtcaag

SEQ ID NO: 42896 - DNA, 2912 bp, Zea Mays
ctgagggttatgacaccatcatggtagtagtggacagattcaccaaatatgggcattttcttccactcaggcaccctttcactgcccagggagtggctcaaatatttttggatcaggtggtgaagttacatggacctcccaagtccattgtgtcagacagagacaagattttcattagctctttctggaagcacctgtttcaacttatggatgttaagttgctgttttccactgcctatcatccacagactgacggtcaaagtgaacgggtgaatcaatgtttggagacatatctaagatgtgcagtaaatgctcagccggctaagtggaagttgtggttagcattggcagaattttggtacaatactacttaccatactagtctgggttgtacgcctttcaaagcactatatggatatgatgccccgatgttggcgttacctcaatctggtgtcccggaggaggggtcagtaacagattggctggctgacagggttgctttctcaactcatctcaaagaacaactcgctcgagctcaaaatcggatgaaacaaatggctgatcggggaaggacagcaagagagtttcaggttggggagatggtgctgctcaagcttcagccatatgctcaaaagactgtggtgaaccgtccttgcccaaagttggctttcaagttttttggtcctttcagagtgttggctaagattggtgcggcagcttacaaattggatcttccagccgatgctcaagttcatccggtgtttcacgtttcccagctgaaaccttattatccatcatatactccagtttttacttctttgcctccattggtggacctctcaagaactggcattgttcctgaagaaatcctggatcgacgtctagtgcgcaaaggccatcaagctgttccacaggttcttatccgctggtctggtgtgccagtggaatcagcaacttgggaagattactatgtgttgaagaaccgttttccagacgccatcgcttggggacaagcggattctgaggcccggggaattgtcatgtctgagcagtaagtactctctagggttgggccgtgggccgggtttagtgtcctaatctggtgttatgggtttatttggagtctgtaatggcctgttaagagaccggatatatactctgtacttggccagttggcaaacgacgatcagaataatccagagaatcatatccgtaacaaactcacctcggttgttgcgactcgctgacgctccgacgaactcacgtcccggcggtggcgcgccggcggccacgggttgtctcacatcagccctagctgcgcttgccctggttccagcagctcgacgccagcccctctcaatcttccatcgctgccgctcagcttgtcccagccccaacgccgaccccctgttccctctagcttcgacgtccgtcgagccctgcccctaccccatggtcggcctacctcgccggtgaggccctggcgctacctctcaactcgccctcaagcctagagtctcgttgttcccctcctcacgttgatgctgcagcggggctacgcctctcccttttgcagtacctcaccactatttcgtttgttgtcggagcgaaatccgtggaatctgggtgaagaagaaacagaacacgtccgtcgcttactagctactaggtgaaaggattgaatcggctgtcgttgtcgtttagtgccgatcgagtcaactttagtcgtggatgttgacaattggaaatccatgtagcaaataaatgattttggaactgggggcagacattggaggtggatttccctcaattggagatattgacaaattggaaaaaaaatgtgacttgacctgtgctgcaacaaccttaaactaggaggggattctaattcttcatctctaccaacaatcctctcctgttactttttaaaccaataactttttcatgtttttgtgcagatgcacacatccttgagccaaaatagaaaaaaatcatagaagagttctttggctgtcacgtgattcaagagtattaatgatatacaaaagtttgctttatggcaagttaggtaaccacaaattttgggcaatgacagggacgtgcagtggtggtctcttaaaagaattttgtgtccagtgtagctatttccactgcaaactatcaaatcattacaaactgctgggaacatgctccatcttatcgaagcatgtatcttgagaaagttgatcgatacatctgcttatttatggcctggttatgttgtaccatctgggactttaaaagatacagctttgccccaagaatccccttggttaaactttatgaaagtgtctcgactttcaggaccccttattgatgctctggtcgcatctcctgcttcaaggtgtttcaagctctgcaaggtgaggtctgttcagtttggccagaaaggcatctcctacctgaacacctacgacggccgcacaatccgctaccccgacctgctcatcaaggccaacgacaccatcaagatcgatctagagaccaacaagatcatggacttcttcaagtttgacgtcagcaacgtgttcatggtaaccggcgggaggaacaccaggcgtgtaggagtgatcaagaactgggagaagcacaaggccagcttcgaggtcatcgacgtgctgcttggagctttttgcatgctatgtctagttttctcctatttgttgtacaagaaaacataaaatggaattcaaatttggtggtcgcaaaagtgtggagacttgaattcatataaagttaggcttaacattagtgcaaaaagttgtattttagtttagatttagagtacacttatgtatgccttgtttgacaatacttatttatgatatattgaatggtacctattgtaattgtctattattgtaggatattcg

SEQ ID NO: 42897 - DNA, 3127 bp, Zea Mays
aggaatttgccctcctggtgttcacagctgttcgctgttgctctctccagtagtcccgttgagtgacctcccctgcgcgacaactagggcgaccgccgccgccccacgcctgctggccaggtcttcggcggaccctttgccgtcgacgggcatccaccacaccagggttttgcacattaatgaagacttaaaagttccagaacaaagcactaagggtgctcgaaggaaaaatgctttagatcccagaaacattgctatgtctcgtccgcttgattttgctgtgcttaattacaaaaatcaaaggcttgcggaacaactggaagtccacaaatttgagttccgtgctcttgagagtagatttaatgatttaaaagagaaacagaggacacataatgagacacttatcctagtagaaaattattgggagcgagtgtttgtagttctctgctcctttcgaaattatatttatgatgacaagagatttacatgcatatctccagaactagctgtttaccaattgatgattgttaaagggcaggctttgtgccggatgctcccacacaagtggggtatggtgaaagaataaaccgaggcaagccttttccccacaaatgcggagaggatgcttcaaacccgtgacctggtgactcagtgagatagttctcaccactgcaccaggcctgccttctcaattgatgattgttaacaaataaattatttattcgaatagcagactactgtatagccttgcttatttatgttgtctactttagatgtgtcttatttttcattttgtccttcatataaatgcacatcttatttgtcagatggtatatgctttcgcctaggagcaggctttttaaatggacttttagaggctggtgccagtgccacagaaagttcaggtttttccaattgtcaactaggaaatgacgtctcttcagaagaatcaacaacaattgatattctgcagaagatgttccttccatcaagtggtccatggcatgcgaataacgagttagcagggaactatcaaaaacaaagagattcgagtgcctggaacagagctgaacagaaacgtctgaaagaggagttgactagtgttgttgccaagttggaagaaagcaaacaaaaactggcagtactgaaagcacagggagacaataagcaagcaacaccgatccttgttcctatgctgggaaagaaaactgcagaaaaggtgggagataaacaaacagaactgcaagatcttgaagctacccacaaggagttaatggaatcgatttcaaagcgtctggaggaaattagaagactgcatacagagagaattggaattttgaacaatttagcgacttttcagaatatactgacggatttcaaaagcattcactcttccaaagcttttcaacttgtcaatgaccaacttcagaagtcacaagcagaactggatggtcaccaaacattgttagagaaattacaggttgacatggatacctttgtttggagagaaaggcaatttaatcaaaaagttgatttggctgaaatctcccagaaggtttctgcatactatgtatctagaattgctgatcttgaaaaggatgtccagaaactatgtaatgaaaagaatatgcttgtgctgaaacttgaaggggctttgagagaacctggtcggaatcaggttatctcagaatttaaagctctggtgtcatcgctaccgagggaaatgggtgctgtgcaaactgaactgtccaaacacaaggatgcttccttacagttgcattctttgcgagcagaagttcattcactttctagtatccgaaccagaaaggaacaagaaattgaagaaacatcaagatctgctcatgctggatctgatataagccaacttcaatctctggtccatgagctgagggaaaatacacaggagcttaaactatttgtggagttgtataagcatgactccgctgattccagacagctgatggaatcgagagacagggaacttgctgaattggctggagtccatgttctcagatattctcttaatgaaagtaaattagagcagcgtgtaattgcagccaatgaagctgaagcaatctctcagcagagactggcaactgccgaagctgaggttgctgaattagggcagaagctagaaacttctaggagaaatctagtgaaacaatctgatatactgaagtctaaacatgaagaatgtgaagcgtacatggtggagatcgagagcattggccatgcctatgaagacataatgtcacaaaatcaacaattgctacagcagattattgaaagagatgatcataataccaaggtatggcgacatggcgttgagattttcagtgggcttttaaaacttttcatggagggtgttaaagcaaaacagtcacacgatgctttgcatttggaagtgtgctcgttgcaaagaaatttgcagcatgcaagcactttgatggatctgtgcaaccagaaacttatccacctggaggacaagctaagaggttggtcagagcggttgaggagactgtcagaggatggaatgcagcaatctatttcattgggcatttctcaaacaaagcttaccggtatgcatggggaagctccaaagctcgggcaggcattgaatgttctacaagcgaaggttgggagcaatcggctggaagttgctgagctgcttatagaactagagacggagaggtttagtaaaaagagattagacgatgatttggatctaatgtcaagcaaagctagttctctaagagagaaggcggataattctcaagtccttcaaaaacttctccatgaggctaaggagtacaggggaatactgaagtgtggtatttgtcatgacaggcagaaagaggttgtgattgccaaatgctaccatctcttctgcaaccagtgcatacagaagtcgcttggtagccgtcagaagagaaggttggcgcctgtgtcgcacacaccagaactgcctggtgctctactgattcccggtatatgtgcagcatctcagaggctacgttaccaaaaggttcttaggtctactgagaagcattcacagttcagtagtagatcacagttgccagagacattttccaacaagcagagatag

SEQ ID NO: 42898 - DNA, 746 bp, Zea Mays
gggcagggcatgcaaacctgcgtggagctgaagacaggccacgtatgattggtccatgcgttgctggcacccttggagtctctcttcctcatgctgtggttgagctcggtgacacctgctccttattcaatgatataaaacttgattcagtgaggatgctccctgtccttaagtctggtccgtgtttatcaccagagtgacacagctcttgagttcaagtcgatatacatcctctccccagccaatagctcggtctgcccttgtgcttagcgctccaacactcagtctggtgaccacgctcacccaactgctcacctcaccgtggccgagacgcttggagcaattgcatccccgggtggtcagaacagtgccacgctgccgcagaacagagtcgtggacagctccaccgctggctttccaatccatgttgatctcgaatgatcttgtgcgagcactgaaggtgtggtgatgaggagtattcaaggagttcctgaagctaggagggcgtttccagttctgggggaggattagttaggtttgggtataagctttggagggttcctaccttcttgctattgtaataagttatgcactttgagtatatcaggacttgtaataaatgtaactcttcctatgtaatgaccttcagttttagaaatgaaaataatattttgtaaagtctttcgctcttatctccgaagtgtgtgtatcgaatgtgattactgtaatatacatgaatgtgggag

SEQ ID NO: 42899 - DNA, 401 bp, Zea Mays
ccaatttcaaaactttttgaaacaagtctaagttttaaatgttgttttcaattggtatctttgaaattagtattcctctaagaaattctatctcaaactatatctatcttaaggagtttttcaaaatttggtatctaaaatatttgacattctttcaatttaaaaaaaactcttgaacactaagaggaagagtttcattaatggggagttttgtttagtcaaaggaaaagcatttgaaacaagggggagaaaatttcaaatcttaaaaatgcttctcgaaatcttattcttatacctttgactatttgcaaaaagactttgaaaagaatttccaaaagatttgcaaaagcaaaacaagtggtgcaagcatggtccaaaatattaaaagaaagaaagcaatc

SEQ ID NO: 42900 - DNA, 291 bp, Zea Mays
ggaagattatcgacagctgctcagactaaaatgatgtccacagtctcagaagatgcaattctcgttggctcatctttcagataccaaagtagccttggtaacaacaataagagggttgggctttttgatatgggtgatggaagtagtgagcctgctgctgaggacaacaatcaaatgcatcaggttcttctacatgccaccattcaatggcagatgttcaatgtactatccactagagcattggtgagatgaccatccagggtgacgatgtacatgaattcttcatttttc

SEQ ID NO: 42901 - DNA, 2199 bp, Zea Mays
ggttgatttgcttgaacgctcaggttctgtttggtcttcataaagtagagcactagctagaagacatattcacacgcatcagctatcaaattgcaagcttagaattgacctcaaagttgggacatgcttgtcttaccacaagcaactgatagcttggagttgtagtccggactgtctgcgctggaccagtatggctgacactccaacgtcccgcatggtgcacccctttggcgacgccccaaggcagactcccaagcaattcctgtattctggtaacccgcagcacctctgccatccgtaccagtcagctccggacacccatgtcgtgctccagcgccgttacaccgtgaggtctcagtctcactcaccaaataatgctggttctgaagaccatgagactcacaagcagtacacgctggagtcctcagcggcttctggttgttcaaggcatggttctccctccagccaaagcgtccatgccgggagtggcagccctgtgtctcacgacgacagccactccggctccacgaatggccatggatcacctgtgagcgcgtcgtgtgtcaccggcgaggaccctactgatctcaagcagaaactgaaggatcttgaggctgtaatgctggggacgtctgagactgaccccgagatagtcaacagtctcgagatctccgcggcaaaccaactctcgttggagcccgaggagtgggagcacatggtgagcatgcccagagggaacctgaaggagctgctgattgcctgcgctagggcagtggaacgtaacaacagctacgccattgatctgatgatcacagagctgaggaagatggtttcggtgtccggcgagccgcttgagaggctgggagcctacatggtggaaggtcttgttgccaggctcgcggcctccggcagctcaatctacaaggctttgaagtgtaaggagcccaggagctctgatctcctctcctacatgcacttcctgtatgaggcctgcccctacttcaagttcggctacatgtcagccaacggcgcgatcgcggaggccatcaagggagaggacaggatccatatcatcgacttccacatcgcgcaaggggctcagtgggtctctctcctccaagcccttgcagccaggcctggcgggccaccgttcgtgagggtcaccggcattgatgattcagtctcagcttacgctcgaggcggcggtctggagttggttggcaggaggttgacacatattgctggcctctacaaggtgccctttcagttcgacgcagtcgctatctcaggcagtgaggtggaggaggagcatctgggcgtcgtcccaggcgaagccgtcgccgtcaacttcacccttgagctgcaccacatccccgacgagaccgtgagcacggcgaaccaccgggaccggatcctgaggctggtgaagggcctgtcgcccaaggtgctcacgctggtggagcaggagtccaacaccaacacggcccccttcgcgcagcggttcgcagagacgctggactactacacggccatcttcgagtccatcgacctggcgctgccgagggacgacagggagcggatcaacatcgagcagcactgcctggcccgggagatcgtgaacctggtggcctgcgagggcgaggagcgggtggagcggcacgaggtgttcggcaagtggaaggcgcggctgatgatggccgggttcagcccgtccccgctcagcgcgctggtgaacgccaccatcaagacgctgctgcagagctactcgccggactacaagctcgccgagagggacggcgtgctctacctcggctggaagaacaggcccctgatcgtctcatcggcatggcactagtgttgacttcagagaatgttgacctgatggagaatgtttcttgtaaccttcgaagtacctcttagtggtttagatatgtttggctggtcactggaactatctataggaagcctatggtgatagatactgagttgtagtagaacacatatagcctaaatgcctaatgctgtgatggcagtcactaccagcctagcctagaacaggttgatgatgtgtagtagtaagtttgggtatatgtttcagttaatcagttttgcttgggtgcattctgaagggtggcctcttcaaaaaggacatcaaaccttctaacttgacccttcggaaatcttcactagtgagggccg

SEQ ID NO: 42902 - DNA, 2761 bp, Zea Mays
aaaacgaagaggaaaatgatacggatcgagaggcatagcacaacggaaagcaacccgaaagcctctacttttccgcccccagcaggccaggactcttcaatcgctcgcgccgtttcttcatcccctcgccatccttccttcgatccagcgttgcctgtcgtcttcgcctgcacggctgcacctaaagctctgacctttttccccactttcccttggcatctactgccttgtccggtgtagaaaacaacggatttcgttgtgttgttttgctgcggtttttgtcccctcccttctcactcggcgagctttgttgttcactttggattccacgggtttgtttcggattaggaaggctcggtttttggtctgggaaggccccccttccgaggcgatgaatttggtgcgggttgatggcgtcctgtcaggagtccgctatgcaatgatgggttctttgaagccgaggtgaatctttgacctgcctagtttgcgattccaaattccgagctcccaccgcttcttgatccgccgggcgccatgggcctctgctacggcaagtcggcggcggtccaggagccggcggtagcggaggagaacaacaaagccgatggcgcggcggcgggccgaggcgatggcccgccggcgtcgccggtgaaggtgcctcggacgcccaagcagcccaagttgtccttctacttgccgagcccgctcccgccctccagctacaagggctcgccggcaaactccagcgtcgcgtccacgccggcgcgcggcgggttcaagcgcccgttcctgccgccgtcgcctgccaagcacattcgtgcgctgctggcgcggcgccacggctcggtcaagcccaacgaggcgtccatctccgagggcggcgaaccagaccttgggctggacaagagcttcggctactccaggcactttgcggccaagtacgaccttggtcgagaggtggggcgcggccactttggcttcacctgcgctgccaagtgcaagaagggcgagctcaagggcgaggacgtcgccgtcaaggtcattcccaaggccaagatgactactgctattgccattgaagatgtcagacgggaagttagaatattgagttctttggcagaccacaacaacctagtgcagtttcatgatgcttttgaggatgaagaaaatgtatatgttgttatggagttatgcaaaggaggtgaactgctggacaggattttggctagaggtggaaaatattccgaggaagatgctaaggttgttattcaccaaattctaagtgttgcttcattttgccatcttcagggtgttgttcaccgggatctgaaaccagagaattttcttttcatgtcaaaggatgagaattctgccttgaaagtcatagactttggtttatctgactttgttaaaccagacggcagacttaatgacattgttggaagtgcatattatgttgctcctgaagttctccatcgatcttatggcactgaggcagatatgtggagcattggagtaattgcatatattttgctttgtggaagccgccctttctgggcaagaaccgagtcaggaatttttagagctgtcctaaaagcagatcctagttttgatgaaatcccatggcctaccctttctgctgaagcgaaagacttcgtaaggaggctgctcaataaggattaccgcaagcggatgactgctgcacaagccctctgtcatccatggatccgtggtacacaggaagttaagatttatctagacatgataatctacaggcttatgagggcttacataagttcatcttctctacggaagtctgctttgagggctcttgcaaaggcactgacgacagatcaactcttctacctaagagagcagtttacattgttagatccaaacaagagtggccatatatccttgcaaaatatgaaggcggccttgatgaaaaattcctcgggtgcaatgaacgattctagggttcttgactttgttaactcaatatgcaatatccaatatggaaatattgattttgaagagttttctgctgcggccattagtgtatatcaaatggaaggcctggagacctggcaacaacatgctcaacaagcatatgaattgtttgacagggagggcaaccgaccgattgtgatcgaagaacttgcatcggagctcggacttggcccttcggttccacttcatgttgttctccaagactggatcagacattcagacggaaacctcagtttcctcggcttcataaaactattgcatggagtttcttcacgcacaatccctaaagtccaagataaccgtttgcattgaccaatccctaatctcagggccagtgcatgccatgtctggctgtagaagttgcatgagaccatcagaccagtacaaagattaacagatcagctttgtaactttggaatccttaccacaagaaggattatgcgacctctaccgtataatgacgaggctatgggaggtgatttgaggaaaaggccagaagctgggacatcttaggaaacagattccatgagaagaaatccaaatatatggtgaaatgcagatttgctaaagtcgccgagcttttgtatgcgttcgagatttccagtgagcgtggatcctttgttagcctgtttggcaactcacttttcaataccatagcattacagtaccatggtttactaattgcaatgtacaatctaacatctgtttggcgacaaagtattttgacatgtatagttttgatcaaattccg

SEQ ID NO: 42903 - DNA, 3280 bp, Zea Mays
gtagtgccgtgctcgtgctcgtgctcgcgaggtacctcgctctctcctgacttcccgcgtcggcgtcgccggcctcctcgtataagaaccgacatccgacacgccgccttcgcactcgtcaacctctccgctttgcctccctccctcgcgtccgcgttccctcccgcctccagatctcgatgcggcagcggctcccctgacagcggaggcgacgccggcaccatgtcctcctgcgacgacgaccacgcctcgctcctcagatcccacgctggggcctcgtcgccgtcctgcccctcgccgcgcggttcggcgggacatcagcaccacgccgacgtcgaggcggacgaggccaccgtcaccgcctccccgaggctcgccagcggcggcgggggtgtgcgcggtctcctgcgcaacctcgagcgccgcatgtccgcacgcggatctgggcctgggcgtcgccagcaccagcattatcagcagctcgatcgctccgtggcgatcgagtcgccgccgtctcagcggcagcgggagagagcggcggcgggggatgacgacgagctcggggacggggcgccgcccgagtgggcgctgctgctcatcggctgcctcctcgggctcgccaccggcatctgcgtcgccgcgtttaaccgcgggctgtcttgatgactttgctaggttcatgtcatccatgaatgggcatgggcagggactcccaacgaaggtgcagcatggctccgcctgcagaagatagctgatacttggcacaggatactgctgatcccggtgactgggggtgtggttgtaggaatgatgcatgggttgctcgatatatttgagcagctaaaacttgtgaaatcagggcagaggcaaggaatcaactttgttggagccatcttcccaaccataaaggctgtccaagctgctgttaccctagggactggctgttccctgggacctgaaggtcctagtgtggatattggcaaatcgtgtgcaaatgcatgctcagaaatgatggagagtaaccgggaaaggcgtattgcacttgttgctgctggcgctgctgctggcattgcttcaggcttcaatgcagcagttgctgggtgcttctttgccattgaaactgtattaaggcctcttaaagcagaaaattcacctccatttacgactgcaatgataatattggcatctgttatatcatctactgtttcaaatgttttacttggagccagaccagcttttatagtgccagcatatgagctcaaatctgctgccgagctaccattgtaccttatcttaggaatgctatgtggagcggtcagtgtggtatttgatagattggttggatggttttcaagattctttgggcacataaaggaaaagtttgattttcctataatagtgtaccctgctttaggtgggctgggagctggtatcatagctctgaaatatccagggatcttatactggggtttcacaaatgttgaagaaatattgcataccggtaaaagtgcttctgctcctggtatctggttgttaactcaactggcggctgcaaaggtagttgcaactgctctctgcaagggctctgggcttgtgggaggactatatgctccaagcctgatgattggggctgctgttggagctgtttttgggggttcagctgcttatttaataaattcagctttacctggtaatgctgctgttgcacagccacaagcttatgctctggttggaatggctgctacactagcttcagtctgttcagtcccattgacttcagtactgcttctctttgaactgacaaaggattacaggattttgcttccgctcatgggagcagttgggttggcaatatgggttccttcagtagtaaaccagccaaacgacagtgagccttctgggtttagaacatccagacgaggttattcttcaatgtcaccagaagaaagaaatggcagcttaaggcaaggtgatgttgtggatgatcttgagctcagtattatacaaactgacatgagtaactatggaacttataatgcagaaatgcttctggatgatttgaaggtcttccaggccatgtcaaagatatatctcaaagtgttaccatctgctacagtaacagaagttcttaatctgttgcatgatagacagcaaaattgtgccctggttgtggaccctgaagattttcttgaaggaataattacattaggggatatacggcgcatgggatatgggttacatgtggaaagtttcatcaatggagatcaccccaaggctgacgataactcttcttccatttcattgtgtcttactcgaggattccagtatcgtgggagcgaacgtggattgttaacatgctttccagatactgatttgaccactgcaaagagtcttatggaggccagagggataaagcaactgcctgtagttaagcgtggtgttgcccatagaactgcaggaaagcgcaggccgattgcccttctacattatgattctattggttgctgcgtgcgggaggaaatagagaactggaagaccatatatcagagactggcttgttaataatatgaaactacttggacgatatgattattcgtttgattgccgagggagaatattgtgaactgaaggtcatgtatcagcgaaaagcaggctttcctcttgtagcaattgtgcactgaaaaactacagtgcccttatgacaccacaacagtaagcaagactacaggacatctatgcgaaatgcagctagccagctacactgatgtagagatcattcaggcagtttaacctctatactgtatcattttgatttcacggtgatctgcaggggcaagcctgataaattctgcaaagacctcccattactgcaagtttcatgtggcatccctgctcgtaccacttatttgttcttgttacgacctggacttgtactttacgcgggataggaacgaagtacagacctagtgtaagaaggcggtactttttaccctcgtactgcttgtaaattgtaatgtgtagcatatattagagcatgataacttctgctgcatatattcgtcagtgtgatcactcaaggaatttgtgcagcagaattttgtcatgtcgatgttgtaagttgaaggatcacattgcttgtaaaatttggcagcatgttgtcttatcctcggatgagtatgttgttgtagaaacttgcatttggcctttgctctgcacactcttgtatgttgtgacgtattcaatccgttctgatttattgatcgttttaactttttcagat

SEQ ID NO: 42904 - DNA, 573 bp, Zea Mays
tggagatcccgagctgggtattaatcgattcaggatcgccgttacttctcggatatgaagacttggtcactgacttgcaatctaagtcatgggtggaatcataatgagcaaaaattgtgttgtatggattaatgtgatgatgaaattagactagatgcaaacaaggtctattaatacttaatctagcattaaaatgttgaaagtaaggatccactcatagtaagcttttctgcaaacagagtccttgattcttgataagccttaccttgaatccttttaaaaccagcatacccttgagtgtcttttctttagtcgggtaagtcttgttgagtacttgcgtacttagggttttaaccattgttgctgcaggttacgagtcacttgattgtgattggtgttaagcgccggtgggcacgaccttctataattataagtatttcttctatacttcttattgaggatggtaacttaagatagcatatattttaaacttataaagaatttataacaattcaaagttatttctttgaatcacttttgtaatcactttgatcatgtaaattgtaaaacttg

SEQ ID NO: 42905 - DNA, 1140 bp, Zea Mays
aaagaaatggaatcagcatgttgctgcggaggcaagtcttccagaggtgcttactgttgagaatctggttgaacgtgcaatgacaaggagccgagctaatggaactgcatcccctgatttgccaaaacctgaagcgaactctccaccggattcctcaaaaaggcaacggacagtctctccagttgactgtgtgatgcctgcggaaggtaatcaaggaacaagtgatccttctaccaacagggaatctgttgagttggtatcccacattgaagaaatgaagctaaataccaccacacatgtggatgcaagttctagtggttatcctggatttcttgagccagacgatgtttccattgagtgtattaaaatttcagttgctccattacaccaatttggcagaaggtcatctatccagcacagagattgtccactgcagctttgttgtgcaggcttgaaagtacagtttggtgtcagcacgaagtttctagataatgcagggcggccaaagatgagcatagtggttgagatccctgagaacctctgtaaagttttggaattctgcgatgttcttgctagaaagctgtcccaggaatctggtagcagttctgaatggagacccctgattaagaagtatggatacattaatcgtccaactatccgtctgaacatccctcctatttccaacagcgatgcggtggccttctcaactgatatatgccagagagagcctagtggtaacattcagaagcttgctttcggcaatgtgggcgccacggaattggactctctgttcgttaaagggagcaaggtggacgcatttttttcactggagttatacgattaccagcaaaatgctggcattcggctggttgcaaagaggctggttatacactcgaattagcaccaggctcatttattaaaatactagtactagaaactaacccttgcactgattcaggggcctttagaccaccatatgtatttaaccaattgtagtttgtagattatgccgagtgcgtaagatctcgccacaaggaggtattgagctgttgatggtaaattaaaattgaaatgttgcaaaatgttttaacaatctgtgctatttatttgtgaatagaatgcacatttgttgctactaca

SEQ ID NO: 42906 - DNA, 3800 bp, Zea Mays
gtcagccgccgtgcacgctcatcatatggcatagccccaagcccccaacggatcgagcgcctccccgagtccccgttcccctgccccagctgaccgccgccgagacgtgccacaccgcctccccctcccgccgccacaaccttcgcctccacgcaattggccgcactcctttccacctcccgctacaggatagcgtgggccggtcggcggcgccgacgggtggagaactggagatccacccgcacgcggactgcttccttcgctagtcgatgggaagtaagcgttgttaggtctcatgatttcttttgggagatccggagctgtggtgcctgtctgactcatcatctctgggacactgccaaagaggctgcgtcgaatccaagacctttggctcagtgggaagacttctcaccactgcatcagagattcagaagaacttttgcaagaagggaggtcttgtactttggaactactcgatagccatatttttagagaggcgctggacatgagaaggaacatgctgatgggtccaatgaagatatgaaggaaatgcaacataaggcaccctctgaaagatcacaacctcttagaatggttgatgagcgtgataataatgagtggagcaaggcaactggtaaccaaggcacaaacagatatgcagatgacagaagacgtggtgatggatggggtacagctcctagtcgtgattattcttctgctagggcgccttctgatccagatgcatggaggcagcgcagccgaagtccatctccaagaggggtttggaacaaatcacgcaggaacaggagtcgttccagaagcagaagcagaagcagaagcagaaacagaagtaggagcagaagcaggagtatagggcgaggcagaggcaggagcagaagtccatatattgctgaccgtggatctgagtggagggttgagagaggcagaacatctggaggacctgttcggccctgtagggattttgtggctggtaggtgcagaagaggctcaaattgcaggttccttcatgaagatggtgggcacaggccatttgatgatcactatcctgctgacccaagggaaaggtatggttatcagagcaaggagtttatggatacaagaggaccaaatgactatttgcggagtaggcaatctcgagatcgttatgatgataggccttgggagagatctgaacctcgaagggattaccggtatcctgaacaatgctttaattttgccaaagggaaatgcatgagaggtgctagttgcatatttgcgcatagtaattctgcttctcatggtagatggagagatgagactagggaaagtgcccatgatagatttggccctgattcatcctatgggaataggactgagcaccgtagggtaaacaaaaacccttgtaagttttttgctgaaggttgttgtcgccgtggtgaaaattgttcatatctccatgaggaagctccccatagtcagataggagtgagtgcacctgatgaggctttgaattacagtgatgggcatgcagcaagaggaaactattcaaactggggtgaacaaaataatgctgtgcatgcaacctctcagattttatccagggatgacagggaaagtcctatttctcagagtattggcagaaatgattctcgcaatgattatgaaaaccagcattcaaaagatgctggaaagagccagtaccaaattattcatcaggaagattttggttcaccagggcaaaagaaacatgaagatgctatttcacaacagccacagttattgactcctgtccagactactgctcttagcatgcataatgaaaaggtatctgaaatggacagtcagaatgctccttcaagcattggaggtttgagcatgcaatcaggggttcgtagtgctaacattatagcagagcaaagcctgggtcaaatacttcagagacatgatccaattcctcatattcctgggccacaaacgcttccgatcaccacacaaccacagaatgttacgtcttcattcccatcaaatagccacgtgcaacaaaataactttcctatacatcagaacaggcaagagcagtttgtagttccacacgcagctgcaaacatctcaactcccagcatgcagagccagccaattgcttctcacatggggcacatccaacgtggcggctatggtatagagccacaggcattgcccaatatctccacacataacgggcataatttcaatgttgccagtcaagttccaccaaacattccaacagctgtgcatgctgggcagactcaggtgacaattgacatgccaaggttgggtcaagacagtggtcctcaaagcatacacaacatggagatgcagccaatgtctccaaacgtgcaaagccaatccttgcaggggttaccccttgtgccggcttccagctcagctgatatggccggagttcctgttcctcacaacgctgtgaaaagcgaagaagttagccgagttactgcatccctggcacaatactttggaaatactgctttcggcgctggtacggttggattacaaccgtcgcagccgaatatgaatgcaagcctgatggccactccacctgtggtaccaccacctgtccaacccaatccgtggccctgggcgcagcaacagacagggatagtccaacccggtctccctgttccacctcagcagcagcagcagcaacaacaggctccccagaggcagcaacaacaacaggctccccagagcttccagacgctgatcgccgttggtggcagtaatggcaactctatgctcatacctaacgcaggcgcatcggttggtcccgccaccgtggcggcgaaggaaaccgcgcctccagagagcaagaaaggagagaagaaaaatgcagacgcagaaaagaaaaatggcgacgcggagaggagaaatgccgaagcagaggcacaggaagacggcgacaagggtaagaagggcaaggactccaagcagctgaagatgttcaaggttgcgctcgcggacttcgtgaaggaggcgctgaagccgacgtggaaagacgggcagatgagcagggaggtccacaagaccatcgtgaagaaggtcgtggacaaggtgacgagcaccgtggagaacacccctccgaccaaggagaagatcgacgtctacatgacctactccaaggagaaactgaacaagctcgtgcaggcgtatgttggcaagtacgccaaggcgtagtagcgtttggccaagaacacactgacgcccattttgtgccccgaggtcggaaggatggaaagcaccgcgtgcatccgtgctcagaggtttaggatttgtgaaggcgcgcgaggttggggggggggggtgcctgggcttgtctgcagtttcagagagtttagcgtgtggtttgtgggcaaatggcgccgttccaacatctggctgtaacttttgtagaattgttttattctgggatttagaacatggtgtagcggaatcatgcatggcgtggatcattttttatggatagactatataggaggcatgcatggtgtggtgcccatcgacgtgctagtgttatagtattgttgatcggaggaccagaccagtcaaggaacgcacggtgtccctcttgatgagaagtgagttgcttgctcatcgttcctcatgcatggtgtgcagcagcgtgttttatcgtctatctatgagtagtaggtggaaagcatgtggaaccaaaccaagtaagaacttggctttctctgcctgattctgtggttgtgccgacgactagccggccaacacagattggtcga

SEQ ID NO: 42907 - DNA, 1635 bp, Zea Mays
gccgagtggaatgaagaaagagtgagaagcagcacaaggcgggaagccgggaacggataagataacaatcaacaaacaacaagcccgcgcgagactgttctttctccatttcccaatggccgccgccgccgccgtcttctttccctccaccccgaatcctcggcaccgcctcgccgccgccgcccgccgccctccacccagcttcaccggcgccaccgacgccgtgccgctaccggaggacgaggactccagcgacgacgatgccgacgacgacggcgcgccacgcaggagcgggcgcagggaccggcgccgcgcggtgcgcgtcgcgtgggagaagctagtccggtggtcccgctcctggcgccgccgcaaccgcagcgacgtcctcgagaccacgcgcaaggtggtggttctcgggggcgggtcgttcgggacggccatggccgctcacgtggcggccaagaaggccgatctcgaggtggccatgctgctcagggacgaccacatctgccggtccatcaacaacgcacatgtcaattgcaagtacttatcagaacacagattgccagaaaatatcgtcgcaacaactagtgctgctgatgctttagcaggagctgatttctgcttccatgctgttccggttcagttcatcctttcttgaaagtatttcaacacatgttgatccaaagttgccattcatatcacttagcaaagggctggaactcaatacccttcggacaatgtctacaatcatcccacgagcattgggaaatcgccgccaaccgtttgttgttctgtcaggaccatcatttgctgtagagttaatgaacaaattgcctacagcaatggtggtggcatccaaagacaacaagttggcaagttctgttcaacaactgttagcatccccaaatttgaggataagcacatcaagctgcaggtatagtggaaggcatgagtctcgggaacaactgtatggctgcccttgttgcccaaggctgttcagagatacggtggttggcgacgaagatgggagcaaagccaaccactctttctggcttgtctgggtccggtgacatcatgctcacatgcttcgtcaacctttcgcggaatagaacagtgggactacgcctcggttctggtgaaaagcttgacagaatcatgggttctatgaatcaggttgctgaaggcgtatcaactgctggggctgtcattgcgttggcgcagaagtacaaggtcaaaatgccggtattgacagcggtggcacggataattgataatgagttaactccaactaaggcggttttggagttaatgaatcttccccaggttgaggaagtctgacgaggctagcaacggagttctgcatttttccacttggctccgagtgtagcttgggcccatggccgaccgtatgaaaaatctgccaaagaccgttacttttttttgggtagcattacattattaatgaaaaaatgatatccagtaacggtggtatttagcatttcctaaatttcgaaacacattttcctgtccttgtacaccggcaaaaacttcacgatgacgtttcttttgaaagaggaaactgttctcaagctctggcatttaaattggaaacgtttctagcactcactggtt

SEQ ID NO: 42908 - DNA, 335 bp, Zea Mays
gggacatggaaattcaattcccgtgctggggatctttcaatggttttactgctgttgaagtttctgttttcgttttaacaagaaactgcaggtgaactgaactgacagtcttatttaccatgccgctgctttgcactctgttcgcctgaagagaggttgcctcggtgctgccagcaagtccctgagactccccaggtagatctcaagcatgctcatagagaaagagtaggcacatgagccgtcctccaaagcgcgagagaacagctcttggatcgctcgaggcacgacgctgagcttattaccgtcagttccttcctgcaatgcaacccacctat

SEQ ID NO: 42909 - DNA, 2185 bp, Zea Mays
tttccttcagttcttcttccctcaatccattgcaagcaacaggaggagaaaaaacaaggagcgagacctcgcagctgacgcgcacaaggcaaaacccaatcggagccgtggaccgggccggagatagggctcgaggccatggcaagcggaggcgagggcgcagggagcggcgagtcccctcccgctgcctcagtggaggcggcagcgggggaggcgacgctgcacatccggtgcgcgaacggctctaagttcacggtgcagacggacctgggcgccacggtgggcgggttcaaggaggtcgtagccgggagctgcgacgtgccggcgccgcagcagcgtctgatctacaagggccgcatcctcaaggacgagcaaaccctagaaagctacggcgttgagacagatcacacaattcacttggtgcgtggtgttgccccaccagctgcatccagtgcacctgctgctgccagctcccttgcttcatctactcttagtagcgtcccggcaggtggcctgggagatctatttccaggtgttggtgctccaggaagtggcaggtcatcaggtatatttgggccaggatttccagagttagagcaagttgagcagcatttaagccagaatcccaacttgatgagggagataatgaatatgccagcgatgcaaaatctcatgaataaccctgatttaatacgcaatatgattatgagcaacccacaaatgcgcgagatcatggatcggaatcctgatcttgcccatgtgctcaatgacccaagtgtcctccgccaaaccctcgaagctgctaggaaccctgaaatcatgagagagatgatgcggaacacagacagagctatgagcaacattgagtcctctcctgaaggttttaatatgctccgtcgcatgtatgaaactgtccaggagccatttctaaatgcaacaacaatgagcggggaagggaacacagcctcaaacccatttgcagctcttctcggcaaccaggggtctaaccaacctggtcaaggtcaacctgcaacatatactccaactataggttcggagtcgacaactggaaccccagctccaaatactaatccacttccaaatccctggagcaccaatgctgggagtgcacaaggagcaacacggtccagtggcaacacaagaactggtgcttctggtcatgttggaggtactggtgccactggtggattgggagggcttggttcaccagatttgagtagtttgcttggtggtcttgctggcagtccaagaactggtgcttctggtggtttaggaggtttgggttcaccagatttggggaatatgcttggtggttctcctgatgtttctcttttcagtcagatgttgcaaaaccctgcaatgatgcagatgatgcagagcattatgtctgacccacagaccatgaaccagttgcttagcttcaacccaaatgcacgcaacctgatggaatcaaaccctcagatgagggaaatatttcaaaatccagaatttcttcgccagctgacatcgcctgagactttgcagcaattactcttatttcagcagtctttattaggacagcttggtcaacatcaacctaaccagggtagaaacaattcaggcagtgccacaggtacgcctggaaaccctagccttgacaccttgatgagcatgctcagtgggcttggttcgggagtgccaccggaggagctctatgccacacagcttactcagctccaagaaatgggtttcattgacactgcggagaacattcaagcactgctcgctaccgctgggaatgtacatgctgcggtggagcgtcttctcgggaaccttgggcagtagctaaaacgagcgagccacacaccgccagtaaatcttaaaatgtcgcgcatctgcaggagtgttcggcttaacgttcttcaagcccttgaatttgaagggggtggcgtccataatcccgaaaacaaaataatcaaaaagtcaggcagccattaacttttctcatacatggtggtcatgtctttgttttacagtgttgtatttgcaatttggattggtgtacatacatatcggtcggatattacctcatagaatgtatgtagttttgtgttttgaactgttgattcttgattcccaatcaatcaaatcaaactatctaatccaactgttggctttctcattc

SEQ ID NO: 42910 - DNA, 1322 bp, Zea Mays
ctttcccgtctccgcaccgcacacgcatcgagcggctcggcggctccgtctcatgagagccgtcgctgctgccgcctcgcccccgctccgcgccctcctcctcctctcccgccacccacgccgcgcaggcttcaccaactggccgtcgctgcctaggggccagaacgcaggacccacagccccgccggccgccaccgcccccaagcctgctgcgccgtccaggaggcaaggccgcggcctcactgccagcctgcctcgccaagtcgcccggatctcgacgccccacctgcggccgccggcgaccccgccaaggtgccctgacagacgccatcagagccacggagttcgtgcgctggctggttgtccgcggaagacggtccgccacctccctgctccaacctcgcacctccggttcaccatgaacccttcgtcgtcctcctcctcctctggcgggtaccactccagggccgctgccttcgcttccccgcagccacgcggcggtggcggcagacggcgtggtggcggccgcggccaagacgggagcgaccgcatcgacgcccttggccgcctgctgacgagggtgttgcgccacatggcggcggagctgcgcctagatatgaggaccgatggatacgtgcgcgtccgcgacctgctgaagctcaaccttcagaccttcgccaaggtccctctcaagtctcacactgttgacgagatcagggaggcagtcaggcgggataacaagcagagatttagtctgttggaggaagatggcgagctgttgatccgggcgaaccagggacacacagtaacaactgtcacatcagagagcctgctgaagcccattttgtcccctgatgaagtgtcagtttgtgtgcatggaacttacagaaaaaatcttgattcgattttgcaatctgggctaaagcggatggcaaggttacatgtacatttctcaagtggcttaccatcagacggagaagtaatcagtggtataaggcagaatgtaaacatcttgatacatctagatgttagtaaagcacttaaagatgggatgaagctttatatttcagacaacaaagtgatcttgacagaaggttttggttttgatggcgttgtccctgtgaaatactttgaaagaatcgaaacatggccaggacgagctccaataccgttccaaagataacaggccatgtttcagcattgctagttcgtacgtactgaaaaatgatttgtcatgatgtatcccggagaaccattttttttggtaattcacatacactattttggggggttggcttttttttttggttcaaaaatgaata

SEQ ID NO: 42911 - DNA, 632 bp, Zea Mays
ccatgacccaaatttgatttttccgttatcactccatgaccaaacacataaaaaaataaatgcctagataatttctttgttggacctaaagtgtacccggacttgaaacaagaatctcgagccatgtctccaacctaaaccatatccttattcaattggtgcaagctgatgtaccttatccagttcgcatgttcttaaggattgctatgttgctttatcaacctagaaaagacatgcccgatcaatttcttgaatttgatgcctttggttttcttatatctctcgaaggcatactaatttgatcttatcatcattttcctccgtatctaatcagataccaatccttgaccttgtaattgttgcgatgacatagaaatatgcttggggctgaagttgcagtctcccatcgtactccctcaccaaccaatttaggttctggccatgccttgttcatttcattgggccataatctatttggctctctacttgtaaccattttgacaggtagagtttctttgtatattgttacccttgctcaatctattggcgtggcacgagatttcttattggttacgtctggtaatggtgttgtgactaaaaccgatggtgccgcgacgaaaccgagggcctcc

SEQ ID NO: 42912 - DNA, 489 bp, Zea Mays
agcccatggccgagctcgccctagcgccgtccccctgtttctttctgccgcgagcagctccctggtgctcggacccagctccgcgcgcttcctgctcccatggccagcggtgctctagcccctgcgtcgcgcgtctgagtcgccctccagcgccgcgcccgactccagccagccttgctcctctttctccctgccgtgcgcttgccagctcggattttgctagccgctgttctctaacccatgtgctggtcggtgtcgtggagtttttgtttgatcaactcgtcatcgcgtcgtttgccgtcgagtgtcaaacacgtcatcctctgctcgaactctacctcaccagctcgctcccgacgtcagctgaaagccgttgtcgtttcgcgcgtcagcaagaaatcccaaaaatcgggtgaagacggaattagcaggccgatattcccaagcgctcgacaaattgactggatcagaaaatcgctaccgatctcg

SEQ ID NO: 42913 - DNA, 2287 bp, Zea Mays
gggaggggggagaaaggtgtccaaccaaccttggttgaaatcgttttgtgacacctagcattttacatagcctatataatataacagcccctagaggagggggaggacagacggtgtgtggcatggcataagctatagcggcatcaagtggtgggcacacggagagctggtgactggaacagggcatcggaaccgagcaagcaagcaagcagaagcaggattccggcagagggaggaggaaggaggaaggaaggcggtcgatcgatcggaagcgccggcgccggcgccgccgcaaaggatcgggcagacgagacgacacgagctaatgcctttttctaggttatctgaggcgcagagctcagggtgaaagaagaatctagtgaaagtggaaggatccgcgcacgggctccgtccgaagatgctgccctactttgatccggagtacgagaacttcaaccagcgcatcaaccccccaagggtttgcatcgacaacaccacatgcagcgactgcaccttggtgaaggttgacagcatgaacaagaatggcattctgctggaggtgctgcaggtcctgagcgatctggaccttcacatcttcaaagcctacatcacctctgatggtgggtggttcatggatgtgttccatgtcgttgataagcaagggcagaagatcactgatgacaagaccatcaagtacattgagaaggctttaggtccggagagcaatttgctgggcgcaaagggcagcaactcagcggggaggtcggtggggctgcactccatcggcgaccacaccgccatcgagctcaaggggcccgacaggaggggcctcctctcggagatcttcgcggtcctcgccgacctccagtgcaacgtgctggccgccgaggtgtggacgcaccgcatgcgcgtggcctgcgtcgtgtacgtgaacgacgtggccacggggcaggccatcgacgacccggaccgcgtggcccgggtcgaggaccggctgcgccacgtgctccgcgggtacggcggcggcggcggcgcgggggacgacgacgacggcagcggcgcgcacgccaacttcgcggccgcctcttcgacgccgcaccacgtggaccggcggctgcaccagctcatgcacgccgacgtggacgccgtccacggcgacggcgcgcacgcggcggccggcggcgagggcgaccggccggccgtgacggtggagcactgcgaggagaagtcctactccgtggtgaacgtcaagtgcaaggaccggtccaagctgctgttcgacatcgtgtgcacgctcacggacatggagtacgtcgtgttccatgccgccgtgtcgtccgaagccaactacggcatccaggagctgtacatccgccgcaaggacggcaaaacgcttctgaaagacgaagcagagaaggtgatcaggtgcctggaagcagccatctccagaagagtatccgagggattcacgctggaggtgtgcggccgggaccgggtgggcttgctgtcggacgtgacgagggtgctccgggagcacgggctcacggtgagccgcgccgacgtgacgacggcgggcgggcaggccacaaacgtcttctacgtccggaacccctcgggccagccagtggacatgaagaccgtcgaggggctcaggggccagtttggccagaccgccatgctcaacgtcaagagcgtgggcgtgcctgctgcggtggccaaagcggcggagccaagctccggcagcatggtcaggagcagcttcttctccttcggcagcctcttcgcgaagctccgggcctgacaactggtcaggcgattcgaactccagctgtgtgtagaagaaatgaactcagaactagggtagtggactagcgggggtgggcgggggagagaaacagggagcaactgtatctctatgtggcagctgtggttgttgtacagttcataaggagcctctaccagaagaatggtagttctgtggaatgcaggctgcggactgcttgttaaggtaagggtttatcccatctgcgcagaatttaaaaaaaaaacatcgatcctgtcatctgtcgaaactgtctctgattgttcagccccacacaacattccagcatttgcctctgcgtcactgcatgacttgtaacttcatccaaccattctctaatggctaatgctaaaaagtcttagtaatgagagcaagcaactattctccgtatattctgacaaaaggggcagccgtgtatgaacttgcaaactatttgcagacagaatgcaggcaatacgccggcaa

SEQ ID NO: 42914 - DNA, 2779 bp, Zea Mays
cactgctatcgcacgtgcttcccgaccaaccgccgtggtcccctcactcgcggacactctccgggcgcccaccacctccgcctcttccgccgccgtgtgtgccggcgacgatgccgcgcaaggcctcctccaactcagatgcgcgggccaagtcgcggaagcggaagcgcgccgccgccagcgcctccccgtccaagcagccggacgaccactcagacgactccgacaccgccgcggcggcgaacggcgacgatgagacgtcccgcgcagcatccgttaacgggggcggaggaaccctagccggcgtcggcggcgatgacgaccccgtgctcgaccttcgtgcggcggaggtgctctcctcctccgccgagcccgtttccgccttccccgccgccgtccgccgtgccgtgagccggcctcacccctcggtgctggctgtaatcgccgccgagcgtgcggcggccagttccgacgatgctccggtcaccccagcctcggtacccgttctcgagaatatttcgcacgggcaactccaggtgatctcggcgatgctgcccgaccatccgtccctgtcctacgaccctgacaagccgtccacgtatgtctgcaccccacctccactgatggagggatgcggagtgcacaaacagttctatgacaaacttcacatcgtgcccaggcactcagattggtttgtgccacagacagtgcacaggttggagaggcaggttgtgccacagtacttctctggaaaatctcaggggcaaacaccagagaagtacatcatgttgaggaacaaggtgattgcgaaatatttggagcgacctgggaaaaggcttgtgtttgctgagtgccaggggcttgtcacaagcacacctgaattgtatgatcttagtaggatagttaggttcttggaatcttgggggatcattaattaccttgcaacagggtcagtgtaccgtggcccgaggacggcatcatctctgatcaaggaagagacaacaggggagcttcagctggtctctgcaccaatgaaatcaattgatggtttgattttgtttgatcggcccaaatgcagtatccaggcaaatgatatatcttcgttggtgtcaacttcatctgctccatttgtggttaatcatgacggtgattcagcaaatttggatgagaagatttgggagcgcttatcagagagttcttgtagtttctgctcacaacctttacccagcatgcactatgagtcacaaaaggagacagacattgctctttgttcagactgcttccacaatgcaaaatttgttactgggcattcaagcttagattttcagagagtggatgcgatgaaagatggatcagacactgatggggacagatggacagatcaggaaactttgctgttgttggagggcatagaaaagttcaatgataactggaatcatatcgcaggtcatgttgggacaaaatcaaaagcacaatgtattcaccatttcattcgtctcccggtggcagatggtttgttagagaacattgaagtgccagaagcatcccttccatctggaatgcaaagcagtggatttttgcattcagattccaatggcagtacttcaggtagccaacctggaaaccagattccattcattaattctgctaatccagtcatgtcactggttgcatttttagctgctgaagtaggaccaagagttgcagcatcctgtgcaagtgcagcattatcggttttgacaagggaagattccaggatgaatgcagaaggcattgatgctatgggccatggtactcatctcaactatggaccctcatcatccatttcttctgaaactgtgaaaaatgctgcaagctgtggcttgtcagcagcagcaacaaagtccaagctttttgcagaccaggaggagcgtgaaattcagagattatctgccaccatcataaatcatcagcttgttactcatttttatggacatgcagttaaagagactggagttgaaactgaagcagtttgcggaggttgagacaatgctcttgaaggaaagtgagcggttagatctgatgaggcagcagctggtaactcagcgtatccggatgttatcaacccggttcacttccacaggtggtacaatacctggaggcagcagcggtatggtttcaaacctgatgaatcaggccagcggccttagaccgccgctgatgatgccaggctcggtgacccagtccagcatgccggcaatgtatgcaaataacatgcaggggcatccccagatggctctgctgcaacagcggcaacagatgctctcgttcggacctcgtttgcctctctcggccatcaaccccggctcatcctcgtcggcacccaacatgatgttcaaccatggcatgcccaactcggcagctcctaatcatcaccctttgctgagatcaccctcaggggacaattcaaatgtaggttagtgagatgagtttttcatttttttgggtcttagattcctgagctgtagcccttgactcgtgatcattaaccattgtaattcgattgcacaatcacatatagaggttgttaccagcgataggttctcattttctcttaggctgtggaccgtgtgtgcgtgactgtttgctcggatgagattgatgttgctagtggcttaggcgatgcacagaggatgtagagtttctttcaccctgactaattgttattactgcgccaccttagaatgatgtaaaaaatgaatccgcatgaattccccattcttcatcttggtttgcatct

SEQ ID NO: 42915 - DNA, 1748 bp, Zea Mays
aagcactcaagcccagctcgatgcacccgacatcgtgggtgggtgggtgtgtccttcgcacccatgcggcgttagctgatgacgacctcgcctgagaggggagaagcaccacctgcgccgccacgcgattcaccgtgcgaggacgccgccccagctgccgccgtcgttgcctcttcctcctctggctccgagcgcgaggaagacggcggctccaggcagcccaaggcatctgtcctgtccggcgtcttcgcgccccctctcgccatattcgaggggcagcagcaggtctcctcgacgccgtgcgacgccagctcgacaaagccgccctcggggtcctatgcttggtccaggattctgaggagggtgtcgcccgaggaagaggagtctggcggctcggattctgacagcggccatgctgcgtttctggaagatttctcttccaggatatggatcacttaccggaaagggtttgatgcaatacctggttccaagctcactagtgatgtgaactggggatgcatggttagaagtagtcagatgctggttgctcaggcactgatttttcaccatcttggaagatcttggagaaagccatcagagaagccatacgacccagattatatacgggtcttacacctatttggtgactctgaagcttgtgctttctctattcacaatttacttcaagctggaaggaattatggtctggctgctggatcatgggtgggtccatatgctatgtgccgggcatggcagacccttatccgcacaaatagagagcaagctgatgctgtcgatgggaaggaaaatttccctatggcgctatatgtcgtttcgggtgatgaagatggtgaaagaggtggagctccagttttttgtattgatgttgctgctcagctttgctccaatttcaataaaggacaatgtacatggtcacctattcttttgttgattcctctggttcttggccttgacaaaattaatccaaggtacatcccattactaaaggagacgtttaagttcccacaaagcttgggcattttaggtggaaaacctgggacgtcaacatacattgctggggtacaagaagatagggctctctacctagatccccatgacgttcagatggcggttgatattgcaccggataacttggaggcggacacttcctcgtaccactgcagtgttgtccgagatttggctctagaacaaatagacccatccctagccattggtttttactgtcgcgacaaagacgatttcgatgatttctgttctcgggcatctgagttggcagagaaagccaatggagcgccactctttactgtcatgcagtcagtccagccatcgaagcaaatgtataaacaggatgatgggctgtgctgttgttctggcagtagcatggccaacgaggactacgaccttgacgcctctggcgaggcaggagaagagtggcagatcctctaaaccaggggaacaccgatgacatgttgggttgaaaaactcatggaacatgttgcctgaatgccctcgtttgcgtgtgaatacaggggatgatttgttgtctctgagtgtcgttgggtgccaacgtctcttaggaggaaaatgttcaaaacgtgacaggtggaaatgttcaaaacatacacttgtgaatgatcatagataaatgtatttaacattccatttgctaacaccatttcaccacggcgtgttcgcttttcaattgcttgctagaaatgcacctgcca

SEQ ID NO: 42916 - DNA, 505 bp, Zea Mays
atcaacgcatgctacccgcgaccgagcgtgagagagagatcgggagaggagtgacgcagtcggagctcaggagcggcaagaagagagaaaagcggaggagcgccgtcgacggcttgcgtccagagtcgctctatcctcgatagatggcttaggagggtcatagaggtgtcccaatggtgtcatgaccttaccccccagaacttgggcagttgcgcagcaatttctcgccgaagtagaggaaccaccgcaattccgccctccgccgtggtcagtgctcctgcttgtgtggcgcacggtaaggacttctccatgtaattcgcattggtgtacacatagtgtatccgcgttcgattatgggattagggcgagtgcgtgagtcaggagggctcaccggcgttcatcgccgtcgtaccggtggcgcctcctggtctactaacgtgggtggaagagggtctcttggccgttgacacccagttggacggctcagattgagcatagcagtaac

SEQ ID NO: 42917 - DNA, 1728 bp, Zea Mays
aataacgtaataatggcaaaatagcaaatgcccctatcaccgcctccgacccatggacgtcgagggcgaggtccccgccgccgctgcagcggcgatggcgaacggcctgggcggcgccgatgaggcctctccggcgccggtctcgcccgagcagctcgacgtggaggcgtacgcggcgcagtactcggggcggacccgcctcgcccgaggcgtcttcgtcgcggaccggtgcggggtggaggcgatacagctcgaggcgctgcggatggcgtacgacgagatcaagcgcggggaggacgtgcagctcgaccgcgacgtcgccgccaagatcggcggccgcctcggcccgcgctacggcctcgaccaggcgtgggtcgacaccatcacccgccgcgccgatcagcgcaatgagaagctcgagaacgagctcaacggatacagaactaacttaatcaaagagagcatcagaatgggctacaatgacattggcgatttcttctatgcccatggccaactttcaaaagctacatcaggactcgggactattgcaccacttccaaacatatagttcagatgtgtatgaatgtgattcaggttagcattgagctggggcaatatgcacacatgtttcaaactatgtcagcaaagcagagcaaaccccggactctctggatcctatcattgttgcaaagctgaaagcagctgcaggcttggccaacatggaaacaaagaaatacaaacttgctgcacgcaagagccttaccaccggcctcgtcgatcgcggagtgcgccctagccacatcgccgccaccctcgccctcaacaggtgttgctctctacctacgaggaggaagtggagcagatgggtggtgggtcaggatctcaaggtggcggtagcaacaacgacagggggagcaaatcgatttctgacagaaaaaacagaacgagtgggtaaaccttgcgatttttcattgccgcaagttcttggatctaaacaagcctggaaaaaataaaggaaaataacaaggcgttgttgggatggattgatgaggacaattctcacgaacgattgaactgccgctcagctcacctgacagatctgtctgtgcgtaagtgccggtatacaaataccttccaagagtaccacccagtgcaggcaacgttctcggtcaaataaagcgccattaaggaatcacttgcataaattgttgccttcgaggtgccatacttgataaagaatggaactggcaaagcttttggatcgtgtgccaatacctgtgaaagagggcttggaggaacccagtgcaaagatcaatggtctgctgcaagcgtatatttctaggttgaaactagaaggcctttctcttagttctgacatcgtctacattagacagtcagtggcgggcttggacctaaatcgatcagaggcccatcattaaagaacaagtcatagctcctcaagaagtcaagatgtggcggtctatggtgccctttgtgcacttgcttcttttgaccgttcagacctgaagaacaaagtcatcgacaatatcaacttccgtaactttctagagctggtgcctgaagtaagggagctggttaatgattttaatgcaagtcgctatggatcttgcttgggtcatctggagaagctaaagcctaacctgctcctggatatccatttgcacgagcatgtagagagtctgtatatggatattcgccacaaagcga

SEQ ID NO: 42918 - DNA, 2513 bp, Zea Mays
tccaagaagtgctaacctacattgtttcagttaggggcatgcctttgagaagtctctttacaatgcaacgggcaaaatgcccccaacgcaaacccaaggatgatgccggatccaagtgagacagggcagatagtgggaggggaagcgatggcggcatacctgacgacgtttgagaggaagagggcgaggaccttggcgacggagccgggtagtaggttgacaatgtacttggcgcagagactagagacggcgcgaaggagagctcgccctcccctccgtcgcgggcaccacaggcaaactgctgcagtgacgacttcctggcgatggcttcctctgtcgctcggagccgcagccgccgcgcgctcggcgcatgtcctcggccgggctggtgtgaggaggtccaggatggtggccgggttccgtcgcacgatcttgttcccaatgcccaggtccccgctgccgccaacgagaggcgcggggccgagcggcgccaacaagtatggcgcctaccgcgcgcggttggcaagcctgccgtgccggttccacctgctagtgctccagcttgacgacgatgtcgccgacctgcgggagctggtaggccgcctggcgtcgaaggcctccgcggaggccatggccgaggcttatgaagactattcttcggaaagggctgaactattgttcaaaacctgccaagttgtcctaaaattctatccttgcgggccccatggtccagcctttgatggaggtttttcaggctttcagctcccaatagcttcccttttccttttcgtcgctcactggctgtctcgctctcacacagaagcagcaggcggtgttgtacgtcatcggtcagtcaacgctggaccaacccaaacccaagagaaggggcaccagaaacacctcaacaaaatcgtgagcagccttggggtctccctgaagtctgaaccacactcaacaaaacccatggtagtttcagaacaaacaaacaaacatggaagccatgggcgagcacacccagcgctcaaaatcctagagagggggaggaacatctcttcttcttcttccttcccttcctactcgagccggtggaggtcagcggggattgaggaggaggaggggaagaggcgaggcaggaaatcaagcgggaatccaagaaccgtaaggatgaccgtggtggagaggagatgaaggattaccagctggagaatctgtaccacaaataatcagtggtcgcctcataactatgaacagcatccacacctctgcagttgacttcgtgaaggcaatagaagcagtctccaaccatcagaacatctttttgaagaccagattctgcacctactacaaggctgtaatgcctaatggctcaacatactctgtaaaaaaacttaattctagtgacaagattttccaaattgggagccaggagaagttttctcatgaaattgaggttctagggaaactgaccaattcgaatgtcatggttccattggcctacatcttgactgcagattgtgcctacctaatctatgagcatgcatacaatggcactgtatctgatttgctacatggtggaaaatcagaagttatagactggccgtcacgatatagcgttgctttgggggtggcccaagggctgacatttcttcatgggtgcactcagccggttttgcttcttgatctgtcaacaaggaccatccacttgaagtcaaaaaatgagcctcagattggagatatcgagctttacaagattattgacccttccaggagtacgggaagcttttcaaccattgctggaacagttggttatattccaccagaatatgcatacactatgaggctgacgatggctggcaacgtctatagctttggagtcattttgcttgagctgctgacaggaaaaaaatcggtcagtaatggcactgagttagccaagtgggctctcagtctttcaggcaggcctgatgaaagggagcagatccttgacaccagggtctcaggaacttcaattgctgttcatagccagatgctgtcggtcctgaacatcgctctctcttgtgttgcattctctccggacgctcggccaaagatgcgcaacgtcttgaggatgctcttcaatgcaaagtgaatcagaagcagcctgcaatcagatcatagataaattttgggtgcagttccagcctcgcgtagtttatggatgtcagtgataagtatacaggctgcccttatatagttccataggagatagaaccctagcttatagtagatcattatatgttttatgaattgtgtaattaggtatctgctttgcagtgagtggctatatggtttataagctgtcaaatgtagaggtgcttataagcaaagttgggtattgttctcataggtagggctaggaaaaaaaagctcgagctcgatgagccggcttgcgctcgtgggggcttggctcgtagcggctcgacgcttagaatgagctcgagccgaacctgtttttgtggctcgagaaaagagcg

SEQ ID NO: 42919 - DNA, 741 bp, Zea Mays
gtgattttcaatgtctccccttgtctggggtcttctctgcaaccactgtcctgcaagaaattttggtgatttcatcagcctctcaaggatcactaatgatgatctctttgtcttttcccttatcggccacactaggccgaactaggacctttttattatcaaaactgatcaacttcatccgaaagggttatgtgtccacctacatttcttgaaacttcaattggccctcgatgatggttgattggacctatcaacgaaatatattacaatcattagtggcatgagagaatgaatcatgccacttacaataaacatgacgtttaagctcgccagcagatggaatagtatgatttattttaatgttaccgctcttgagtaactcatcaaatattttgtcatatttgccaacattaattgtaaatttaacctcttcttgttgtttcttttgaaccgactacagagaggaacaaactaaaaatttggtctgctttgggcacaccatttcagcagcgtacacttcttgtggttcgttgtctgagctactctggtcacattctactacatggaaattatgacgaaccgctttagacgtgtcttcgcttcggctttcgcaagccaaagctctctggtgtaattgagctagcgtaaaaaattgaatgccttctaatgtttcttttaaatagtatgacattccattaaaagctaatcttgctagctgtttttgtacaaggtgaatttgaa

SEQ ID NO: 42920 - DNA, 331 bp, Zea Mays
tagggaattttgtcaaggcaccagtgatcaagatggataacctgtctgcgatttctctgagcaagaatccagtgtttcacaagagaagtaaacacataaaactgaagtatcattttatcagggagttcattgatcgaggggagattgagctggaagttgttggcacctctgatcagttggccgacatcctgacgaaagctttggcaaaagtgcgatttcaagaccttcggggaaggattggagtaatcaaactgcattcgactctgaactaagggggagattgttagttagtttcagagtttagttaagtctgcatctttcatttcagtgt

SEQ ID NO: 42921 - DNA, 839 bp, Zea Mays
cccgctagaatcgccgccatgacaggatgaggggcggcgcgtcggcgcagaagaggtcccaagcgacaagttcggtggcgccgcgtgcggtcccggatccagttcaagcctgtgtcgtcggtcgccgtcggccggccgtccgtgtccgccaaccgcgtttcccccaagaaccggccgtgggccaagaaggcggtgatgttcccgaaccccatgttccacgcctccacctctgccgccaccgacccgtgcgcgacgccatcgccttccaagaagcagaagcggctctacaagacacggtcccctatcgtggcccggcagacgccgcacaagttcctggtcaaagtcgtcaccgagcgcgctgggatccaagctcaggatgcacgggaaggccctgcccgcgagactcgccgccgtccgtgaaggcgcaggcgtcacctgcaaaaacgcggtgctgctcgttttcgccgtcaaggttggcaacaaggctcatgtcgcctatcaaagcgaggttgtcgctgggcaggagccgggacagcggcgtcggtgtcggcggtggcccgatgagcgggctgaagcagcggccaggtgttagcttgacggtgcgggtgttgagcaagatatcatcgaggtgatgatcttcgtttgtcttcagtgtcatgtgaagacgaggggtacagattggagagaagagaattgcgttgatcttcttcagaaataagatattctctgctgggaaagctcctgtcttggggtgcttgtacacacgctcattacggttatcgtaatttttgttgatccttggtgataatacaggggtggtctccttgaccctataatcg

SEQ ID NO: 42922 - DNA, 2812 bp, Zea Mays
gttatcctcggtgtcgttacccccaccatggccatcgtgctgctggcccttctcctcttcccgtccgcctatgcccaaccatggtcagtttgcggcaacacgggcaactacacggcggccagcacctaccaggacaacctcagccagctcgcggcaagccttcccaagaaagcctcttcgaacacgagtcccctcttcgccacgggtaccgcgggtgcagtgccggacctggtgtacgctcttgcactctgccgtggggacatcaacgcctccgcctgcaaggactgcgtcaccataggcttcgaggacgcgcagcagctctgcgcgttcaacaaggaagccaccgtgtactacgatagctgcctcgtcagcttctccaacgaagacttcctgtcgactaccgtcaacggcaacgagaacgaggtcaccgtcctcatggacgcccagaacttcacggagagcgcggactacatcaggctcctcttgttcactctgctgaacgacacgtccgagtccgcgatcaacagcatcaggaggttcacgaccgcgcggatggacattagctccctgccgacgatttactgcgctgtgcagtgcacgcctgacctcaccgccgacgagtgcgccgcctgtttgcaagacttcccgcaggtgacgctccagtacctcgacgggcagcgaggaggtcgacttctcggggtgcggtgtaacatgaggtacgagatctacaaattttaccaaggggaccccatgcttcgtattatctctttggcttcggcagtgccaacgatcggtaaaacccctcccggaacaccagtcacggtgtatccgcagcctccacctgcagcgccaccagcgccgcagatgataaccacgcctatcgcagcacaagaagagacaggaactgatggtggatatctttgtgcatggtgcgagagtaatgaattgggttgttggcaagttttacgatgcattattatcacccaaaaggggtaacttttcaagaattacaccacaatctagaaggttttgcttcatgtaaagaatttatgcatgacaggtacccatcatgatgtactctatctcatcggtggacatggcaacactatttttcttggggaaattccctgtatgccatcggaaaatatacttattccttgtgtgccactggccccacatgtcatacacacaaaaaaattacgtatataccactcagtggcacacaaggatgagtataagatctgatggtgtacagggattttttccatttttcttctagatgtgagatgcccttgacactagtgatttaacaagcatatgacaccctttggtagtgcttttcctattaatcttgaaacccgtgtaatccaaattgaaatagccaacaagttggaaactagctcctttaggacaccaaaggcaatgtttggtatgggtttaaggcaccaaaagaatttattaactacaactaactgaacctctttaggatttgtttggaatctagcacatatacacacactaaacattatgttaggcatagatacagtcaaatataacaagctactaattataaaatggttgagagtttgatcaattaatttatctcctcatctaggtcgagattagcattgatgtcttgattggcttacattgatccatgcatattgaacctcttggaaagatccttgttatacattttttttagagatagatatttggaatcactgctgacttttcatttattatgcgtaggacgcaaaggtaaactgtggattattggtatagctattccactggtagcaattctgctatgttcaacctttacctttctgtggctgaggaggccaaagaaaggagtgctgagttcgcaggacagagctggtgctaataggattgaagaaaacgccttggtttggacaattgaacagaagagttcagagtttactctttttgacctttctgagttactggaggccacaaaatcctttgcagaagaaaatagacttggacagggaggtttcggccctgtgtacaaggggcaattatcagatggtcaggaaattgcagttaaaaggcttgcttcgcattcaggacagggtttcacggagttcaggaatgaagttgaacttatagctaagctacaacacacaaatttggatatggaccctaaaatttcagattttgggttggcaagaatctgtagctccaatgatgctgaaggaaacacaaagagggtagtcggaacatatggctacatgtctccggagtatgcctctgaaggcatctactcggtcaaatctgatgtgttcagctttggtgttctacttcttgagatccttagcgcgaaaaggaattcaggttttcaccaatatggagactttcttaaccttctcggatatacatggcacctgtgggagataggaagatggcttgatcttgtagaagcatccatttcgaaagagatgcatgaagcagaggctaggcggtacattaacatcgcactaatgtgcgtccaagaaaatgcggacgatcggcccaccatgtccgacgtagttgctgcgctaaatagtgagagtgtggttctacctgagccaaagcatccggcttacttcaacctcagagtatctaaatctgtggaatcagcagttgttgttgaggcgtgcagtctgaatgagatgaccatcacccaagatccccaaggcagataggtcttccacctgatttcgtttcgctggtcattattgtacatgataatgtggacgtgaatggctatccttgttccagctttgaaactaatcattatggtcttcat

SEQ ID NO: 42923 - DNA, 1375 bp, Zea Mays
tcgtctcgtttcagttcctcgtcgccctcgccacttcgccgccgccgctttggctccacccagtccgcttccggcatccgcccatggctgcggcccccgcccgccacctcgccgcggccttcacggccgccgctgcgcaccagcgcgtcgcgttcaggcgcgtccaggtccgggccccggtgtccgcctctctctccttcccgccgcgccatcccgcgacatttcgcggcagggccagcctcgcctgccccgccgccgcctctctatccgtcccctccggcgccgcgcctccgggctccgtgccattcaacctcctgccgcccgactccgaccctttcatcgagtgggacccgcccccgggcgactccgccccctcgccgctcgctggcggcggtgctgccgggggtgccacgctggtcgtgctgctcggctggctcggcgcgcgccagaagcacctgcgccgctacgccgacctctaccgcgagcgcggggtcggcgcggtgcggttcgtcgtgcccgtgcgcgagctcgtcggcctcgacctcggccgccgcgtcgagcgcagggtcgccgacctctccgagcaggtcgccgcgtggtgcgacgccgatcggcgccgcacgctcctcttccacaccttcagcaacaccggatggctcgcctatggtgctgtactggagaatttacaatcaagagctgacctaactgagagaataagaggatgtattgtagactctgcaccagttctagagataagaccagagttccatgactggtcctacgactgaatctcttgatgggcctgttgtaaatggcaccttgaacagagttggctccaatgtgacgcaaccttcatggggtgaatgttttctcctgtcaactctgcggaaattcttcgagattgttctttacgtacctgatgtaaacaagcggctgtgcaaggttctctcggtgctttcagagcagcagcctccttgcccgcagttctacctgtacagctcggccgaccgagtcatcccggcggagtgcgtggagcgcttcgtggagtcgcagaggtccctcgggcgcagcgtgttcgcccacgacttcgtctcgtcgccgcacgtggaccactaccggagcttcccccacgtgtactccgccaagatcgacgagttcctcaaggtctgctccacggtcgaggtgtcatgaccaacaggcagggccgtcgaatctatctgtgtttggtctgttactctgttctgagaatggataggtgtttctttgccactcagaaaatctgatggtaggctcccaaagatgtttgcctgaggttattgagatactgtatgcttgctttgtttgagcctgttcgctggctggttgcagcgctgtg

SEQ ID NO: 42924 - DNA, 2851 bp, Zea Mays
cccaaccgtctcgcctccctcgcgccaaacccaatccgacgagccgcacgtgcgccactcaagctctcctcccccctcccactcctctccttcccacggtcgggtcaaccacccccaccggaaaccgtgctcgcgccgcgtccgttcccgtaaacaattgctggatccccatttccccaccaagaaaagcagtagaaccgcgccggcccacgccccgctgtacagttgtcgcgctcgggcggccgagtagtttaatcctcgaggaaggaggggggcggtcgccccggatggccgtgtcctcgtcgccttcctgcagacccactcccgggtttgaggcgtccctcctcctccgccgccgctctttccggttgcgtttgggaggaatggttgtggagttggtggattctcattctccgctggggttttaggaggattccgggctcttggccggggaagcggagatcggaggttctgccaggcgtacggattgggcgctggagctcctgtttgtttgaattgaattttggggaaaagcttccacctttcttctgcctttaaaaggagatggctttttcacacgacggaaagatgaagggctgtcagacaaaccttttccggacaaaggataagaaagtcgtcaagatgacagatagtgcaagctgctccacagctaagtatggatcaagcaactcaaaatcaccatcttcatcccccttccggaagctttcagaagttaggagcatacgtctcaaccattttctaagtcactcttcaaatgctacaaaatatgaacatgtcaggatatttgtctccacatggaatgttggaggaaaagcacctactgccgagttgaaactggatgactttcttcctgttgatgaccattcagacatttatgttttaggctttcaggaaattgtgcctctcaatgctgcataaaccatatccctccctggattcaacctcatcccggtcaacaccatgccttgatggttccttctccaaccgttcaagaacagccagtggttctataatcttccaaaagtccttgaaatccatcaagaaatcttacatgccatcccagagaaaacaactcaaattctgcaattgcccagtggaaatggccaagaaatcctacaaagatgcttgcttttggtgtccacaagcatatgccaatgacatggactcctcagaagaggatgaattggatgacaatttgaatgatatttttggccttaatgatgatggcgttacttcgtctgtttctgcctccagggaccagctaaagtataacctcatatcttgcaaacaaatggttggtatttttgtcacagtctgggcaaagaaagaattaatgcagcatattggacatttgagaacgtcctgtgttggtcgcggaataatgggatatcttggaaataagggatgtatatcagtaagcatgacactataccagacaagcttttgtttcatctgcagccatttggcttcaggtgagaaggaaggtgatgaattgaggcgaaatttagatgtgttagagattctaaggctcacacaatttcgaaggatttgcagaagagctgggcgaagaatccctgagaaaattcttgaccatgagcgggtgatatggttaggagatctgaactaccgaatttccttgagctatgaagataccaaaaaacttctgactgaaaataactgggatgccctttttgaaaaggatcagctcaatatccagcgtgcttctggaagtgtgttcaaggggtggagtgaggagaagatatattttgctcccacatacaagtactcttgcaattcagattcttatgctggagagactgccacatcaaagaaaaagaggagaaccccagcctggtatgtactacaatgtttgagatagtttcagagagttcagatctcattctcatatgataacactcgtcagtggctatgaagtatcctagagtccacaaacctctttgcaacccgaaaaccttgtgtttcccctttctgtaccatcttttgagatgagttaaatcagatttggacagcaaggtaagttgtaagcgtggggaaacacaaaagaggaatcattctcatgtgcaataaataaacaaatcaagatgattcacatattctgaattcaggaatcacacttcccaaaccatgaatacataatactattaatgtccggtttgttgcaaatgttcaggtgtgatagaatactatggcatggagatggtattgcacagttgtcctacttccggggggaatctcaattctctgaccatcgtcctgtttgtgggacatttattgttgaggttaaaaggctagatggtcaatcaaagcggcgcccatcaaacaccaacattaaaatcggtgctgaagagttgttaccgacaagagacaggcataactaaggtgctggggcggggcccaaatcaccgattaaagctaggtttttgtgtgacttgggaacacaacaccgcggaaccttcgtaaggacgctaagctatctgttcctcgaggaaattacctgtgaccatagaaatatgattaaagatcatatgcttattattatgttgttgttattgtacatcatatagtcgcgtacagttttgaaaggaacattagtcattagtttatattgtatacttgtaaaacttcctcacagggttgttttggttttcatttctacttctttcatttgtgtaatttccaaagttcaacagagtagccaaagcatgttcgctttctttgttgtactgtacaaagtttgtattttgacctttgtaggggtcaagttttgaatttgtgtatcagccttgctggaaggagtttaattgtacaa

SEQ ID NO: 42925 - DNA, 2389 bp, Zea Mays
cgagagcaggagacagaggggctccccccccacccccgagcccaaacgcagctagctccccattccacccaagctcccgcagccagatgctctcccccgctcgagccccaccgccgccgcccgtccccgccgccgggtagaccgcccgatccgacggcgcccgccgcacccatgggccgcggcggcgcgcgcgcggcccccgccgccgcggtgccgccctggcacgcgctcccggacgaggtctgggagcacgccttctccttcctccccgcggactcggaccggggcgccgccgcgtgcgcctgccacgcctggctccgcttcgagcgccgctcgcgccgccgccttgccgtcgccaactgctacgccgcgtccccgcgcgacgccgtcgagcgcttccccgccgtccgcgccgtcgaggtcaagggcaagccccacttcgccgacttcggcctcgttccgcccgcctggggcgccgacgccgcgccctgggtcgccgccgccgccgccggctggccgctgctcgaggagattagctttaagcgcatggtcgtcaccgacgactgcctcgagatgatcgcggcctccttcaggaacttccaggtgctgcgcctcgtctcctgcgagggcttcagtacagccggcctcgctgccattgccgctgcttgcagaaatctaagagaacttgaccttcaggagaatgagattgaggattgctctattcattggctcagtctatttccagtatctttcacttctttggtaactctaaatttttcatgcctagagggggatgtcaatatcactgtacttgaacaattagtaaccagatgcagcaacctcaagactctcaagctcaacaatgctatacctcttgacaagcttgctaacctccttcgcaaggctcctcagattgtagaactcggaacaggaagattctctgcagattaccatccggatctcttttcgaagcttgaagcagcatttgctggctgtaaaagcttaagaaggctctctggggcttgggatgccgttccagaatacctgccagcattttattgtgtatgcgaaggcctcacatcactaaatctgagctatgctactgtgatggacttgattgaagaccatggtcttgctgttgtggcatcgtcttgtaacaaactgcaggagttgcgggttttcccttctgctcctttcgaagcagctgagcaggtctctttgactgaaagaggtcttgttgatgtatctgccagttgcccaatgctggagtcagtcctctacttttgcagacggatgaccaacgaggcccttattaccatcgcgaagaaccggcccaacttcacttgcttccgcctatgcatcattgagcctcacacaccagattacattacacaccagcctcttgatgcaggttttagtgccattgtggaatcatgcaagggcctcaggcggctttctgtttcaggccttctcacggacagtgtatttaaatccatcggggcacatgctgaccgtcttgagatgctctcgattgccttcgccgggaacagtgatttgggcctccattacatcctatcgggctgcaagagcttgaagaagctagagattagggactgcccatttggtgacaagcccttgctggcaaacgctgccaagctggagacaatgcgatccctttggatgtcgacgtgctcaatgaccttgggcgcatgccggcagcttgcgcgcaagatgccccgtcttagtgtggaggtcatgaatgatcctcgacggggattccccttggactctctaacagatgagagccctgttgagacgttgtatgtctaccggacaatttcaggtccaaggtccgacacaccagcttgtgtccagattctctaaggggcagctgtggtctacaaaggtactatggaagcatccattttcaatcacatcatgtaccttcaacaccttactagcataacctggatcgtctccttgaagtagcaaggctggtgacctcggtaatcctgtcataatctctgcttagctgtacaactgtttctgggagtttagggtgagagactcagggtccctttcaggtgttaataactgtagggaggacactcgatgagttacaggaactactagatagcgtcttgaggaaacttgggtttgttttcttagcgtgcctagttcttttcatgtataaaaaaatatgggatcattccaatgctgccacaatgtactgtactattggaacaattgtacttggagcctctacttttttgagttttgaccccctccccccccccccccccccccccccccactgattatgggttgctgttgctcccgcctgtgatttgtgaatgctatataaaagcttgtacgtggctctgccttc

SEQ ID NO: 42926 - DNA, 4998 bp, Zea Mays
cggtctcagcttaatcatttcaaacccaaagtttggtacctggcagaggtacatcttttccgatgttgaacccatcatggccatgatggatccaccatcaagttttattttcaaaaacatccctcccactttgcaacatcatcttttgtaaaaacaaaacattttgttttgctagagcaagactaagcataggaaaaaccttttgtaaaacagggattcaaaggaaggtaatcaaattcaaggaaggaaatgatggaattgttttagcactcaactcctatcacctaatgcatcaagcaagtgagaaagatttaaaaaggaacaaggaggtggcaaatgcaccagggcttgccttgtgttactggtgattcaggctcggacccgcagatatcaaaatagaaacagctgcctgcctgatgttcctcaggtggtggtggtgatgaagtcctttcttcttcgacttctacttcttcttcgtttgctatatatagccaaatacaataatgaatgttcatgtaatgctcatgaagatgcaaaaataataaaagtttgttatctaaagtcttgagtacaactttccttcacggatctacgacaaacttagggtttccggagtcaatagtgaagttcaaagggcaggggctagggttttgggttttaagtatcaaacatggtccaaatcataccaaattctacccatggcttctaaatattatttagagattatcctaaaaatttagtaaattttggatttgttatttattttctaaaaatccagaagcaaagtcttaggctgttttaaatactctataatttcctgtttgaattaaaaatcctaaaactatttttattaaattttatggaaaattagaaacctagcaaaattggttttgtatttttatcatttttctacaattttctagaattgttttagctctggcagaaaaggaaaaagaaaaactgtgaatagttttggaccgaatctggcccaggtcggcccaactacgtgcgggaacgcgcgcgcccgcgcccgcgtatagtttttgcaagaaagtccctgtattctggcataactcgaaagaatccaagacactattttaggcagtcactgacattttcataatagcccctctacttctaattctttacactccgaagacctcgacggtggacggcgacgcgcagagctccgacgagctcgtgtaccggccaaatcgctcaaagattggcgtccttctttggtcgatgccaaattcaagacctaaggaccgtttcccctaaatcaatttcactaatggcgcactaaaacgccctgcccactgtgaccgtacgggcaacggaagaacacgggcgttcacggcaacccagggcagtctagttcaatcaaaggagttgtgaaacttgaggaggacctaaggacgctagaacaatcgaccagagcgcttgaacgaacctggggcaagctgggcacgacgagggaaaaccgtgtggagttcttgggtggattgggggaaatgcgaaattgaagctctctactggaggatttgaggtgcggacgggtgcgctagctgcttgaatacataacgaagtcgatggtgcactcaatttatagactccgggggcggtggctctcaatttgatcacatcgtgttggcggccggagatagggaagaccacggtggctgtaaccgtggcgttcactggtgcaacggcgcaagcataatactcctaagggtgccacgattactaccgcatggtaacaagctagggcatggcgcaaccgaggtcaccggcgcttccacggcgacgtcggtagtccgggcacgttgccatggctaaaagcacggtgataatctccaatccgtgatcttatccattcccctccgtgagatctttaccttctcgtagaaatcttctgcgtgcaaagcacgaatcccgatgaccagcacaaatccggtcgcacggatcaccggcgacgagctgaccgagctagcagtctgatccagtcactgtaccatggaattcatcttcagtgcgcctgaccaagcgagtttgagcacgatttactctcaaatttcgtatgacaacataatcacttacctatatcaaagctgtggagctatacaccaactgcaattcgactataggaactaaaatcaatcgagcactagatcctttataatcttgatcccaaagtttggtcaataacactggcgaccacttctgctttttagattcaaattcagttcttcaatacaagtctgacagagcaactttgggcagcaatttctttaattttttgtataacaactaaagagactgtctgcatcaaagttattctcctataatagctctacaaaattgatgtggtgacctagggcaaaaacttcataatttgaaagttacaaggcccaaaatttgagccaattctctgaaattcagacttagcctatttgagtataagtgtgtctttttgcaaataagtccaaaacttaggatttaagttgcaagtccacattcttgtgaaccatatgacttaagatgctctaacctcatggtttttgcactttagtccaaaagtgcactaattttgcacttagccccctagggtttaagttgaggctttctagggtcttatttagggttttgatacttctagggtttggataccccataagtctattcaaggtgacattctatgatcatcttaatgagttttgaagttttctcttgtttaagtcttgtttgctctattaaacccattctagggttgagtaccctactttagggttttattcacaaaatgtcatgtcaatacaacttgtttgaaattttttgcctagtgaatgcactctaggtgtgacaaacacatgatatgccaatgcttatgatgttatgctcaagttttagtaacagtaacaccaggggtgttacatccttccccccataaaagaatcacgtcccgagattaaaagtcctagggcaagtaatggaaaaggaaacacgacacatctttatttccttatttttggtacaaggcaggggtggtatggggctcattcctttattacatcaattgtgtatactttacaaattacatgaggctaaaaagcctaggaaattcttttctaaaaagtcctgagtttcccatgtagcctcgtcttcggaatgttggttccactgtaccttgtaaaacttgagagtttttctttgggtagttctgtccttttgatccaagacccgaatagggtgctcagaatatgtcatgtctggttctaaggcaacatccgttactccaatggtgcgatcgggaacccgaagacacttcttcaattgagacacgtggaacacattatgtactgcagacaaggtttcgggtaactgaagtcggtatgccactggtccatatctttcaaggataggaaaaggaccaatataccagggtgcaagcttcccttttaccccgaaacgtgatatacccttcattggtgaaactttcaggtagacataatctccaactggaaagtacaagggtatccggtgtgtgtctgtgtaactcttctgacgagcttgagctttcttcaaattatgaattattcgttgaaccttctcttctgtctccttacaaatatcaggctgaagaaatttctttcaccaggttcagaccagtttaacggagtgcgacatcgtcgtccatataaggcttcgaagggtgccatcttaatgctttcttgatagctattattatatgagaactccgctaatggtaaacaatcatccaatttctgtgggaattccaaaacacaagcccgtaacatatcttcaagtatttgatttaccctctcagtctgcccactagtttgaggatgatatgccgaactatagagcaacttggtacccagggatttgtgaagtgcttcccaaaacttggctacaaattgcggtcaacgatctgacactatagtcttgggaaccccatgcagacaaagaatacgagcaatgtataattgggcatagacagtaatcgagtgatctgttttgactagcataaattgggctatcttaggataggtagagattgtaatggaccagcagtcttcatgtgtatggccttcacacgtctacaagtgtcacatcttgccacatagcgtgcgatttcaatctccatctttgtccaccaataatgctgttttagatcatgatacatcttagtgcttccgggatgaatagaatagcgactaagatgtgcatcatccaaaatttgctggcggatctcatcatttttgggcacaactatgcggttgttaaaccatacaacaccttgatcgtctcttctgaagcagtcggctttaccggcttctattttctcatgaatgtgcttcattccctcatcatttctttgtgcgtcaattatttgttgcaggatgactgactcaagcttcaaatgatttgaagtcccatgctgaatcattcccaggttcaacttctccatttcttggcataacgtattgtcagaagtcttcatggtaagacaatggcagaaagctttacgacttaacgcatctgccactacattagctttgcctaggtgatagtgaatctctaattcataatccttgatcagctcaagccatctcctttgtctcatattaagctctgactgggtaaagatgtacttcaaacttttgtggtctgtataaatgtgacagacattccccagtagataatgacgctacatttttagggcatgaaccactgcagctaactccaggtcatgagttggataatgttcttcatgccggcgtaactgccttgaagcataagctattactcagccctcttacattaaaacacagctgagaccactgcctgatgcgtcacaatacacatcaaagggcttttcaatgttcggttgaaccaataccggagcagtggttaataatacttttagctgctcaaaagcttcattacaattcgaagaccaattgaatttaatat

SEQ ID NO: 42927 - DNA, 1620 bp, Zea Mays
ttgtctagaagcttcgatgcttatagcgatgcccaccaccatctgcagtttgagcaagcaacataaatggaagatagcagtctctgtgatgctgttctccgtgctcctaatagcatgtgattcgccattcagggccttttttagcaagtacctcagctccattgtaccatcatctggatcatcacatgacactgcactaacccaggagaatcgacatttatactcagaggtcagagcatgccactaacctgactaacagcaaggcagcgaaacagatcgaacatggcatgtacaacatgaacaccagttcgatcaatgcagcttccagttggagcattatgaaggaggagttcacatttcaagcacatgatcgccctttcaataattgtcatgcttccaccattgtagaggttgagaaagaaatttttttggtttcatattttggtggatccatagaaggggctcctgatgtcaaaatctggacacagagatacagtgatggctattggcatcctccagtagtagctgatgaagaaaatgcgacagcaatgtggaatcctgttttatttcagctcccctctcatgagttgcttctcttctacaagattggtgaacaccctcaaaactggagcggtgccatgaaaagatctctcaatggtggtatgtcctggttagagagggagcaattaccacctggtattcttggccctattaagaataagccctttttgcttgatgatggccgtttactatgtgggacatctgttgaaagttggaactcttggggtgcatggcttgaggtaacagaagatgctggccggacatggagcaaatatggtcctatatttatccaaggcgagaaacttggtgtcattcagccagtaccttatcagaccaccaatgggagtatacgtatgttgctgaggtctcaccaaacaatcggttcggtatgcatggctgattcctacgatggaggattaagatggagttttgcgcgcaagagtgtgcttccaaaccctaattcagggatcgatggaatcaagatgaaagatgggagagtggcacttgcctacaacaccgtctccagaggcacgctcaaagtggccgtctccacagacgacggcctctcatggcaagaggtggtgacgctggagaacgcggaaggctgggagttctcgtatcctgcagtgatccaaacccagggccggccctgagggtatgcaggatatacgaccgctcaggaccctcaaggtttatagggcccccgtttattcaacttatatccaaatacatatacattacagataaatctatattctcgttcttttgttgtgtctctttaattttctggcaatcatctcttcgaggtcgcgcaacagtctgcttgatgacgaatactaaatattgattaacgtgggaaggacggatggtgttgtacacttatgcgtgtcgcgttgcttaattctagcctatccgagggtcaaccctaataacctatgttgcttaatcattgtttagtttgttgaactttgttttcaaaaaaaattgctcgaatgtatatagatttggtttactgtgcattttaaggtttaggttagtttgacaaattaaaagtaaaaa

SEQ ID NO: 42928 - DNA, 3205 bp, Zea Mays
gagtaaccaaaccaagcaccacgcgcggccatggccttccccgccgacgcgctggttctagagatcaccgacacatcatcctccgccaccgccgccgccgcccgtgctccatcctcaccttctcccccgccgctgtccatctccgacctcgcgcgcttcgacccgctcccatccccaaccgttgccgttcgcgtcgaccggcacaggctaatcgagagctcctcctacttccgcgcgctcctcggcggcagcttcagtgaatccggcagagagcatgtgcgtgtgggctgcaatttggaggctgctgtgcaagtgctgcgctacctttttgagccttccgagagctttaacatcacgcacaacaatttcctccccctgttggagggagctttgtttcttgctgttgagagccttctagtggagtgtcaaagatggttcggcaccatagcctctcaaacttctgccatgtcagttccattagatttcataattgaagtctggtactttgctgaagagcatggtgttacttttgttcaagacatttgccaaaaatttctagctcagaattttgcacatgctatctcaggaaggtcatttaataaaataccttatgatttgctatgttcagcgatcaaatgtccacatctgacagtggatagtgaaaaacaattgtgtgaagcaattttgtattgggtttcagaaaatatgaaagcctgtgaacaatcaaaccccaactcagtagatggccacctcttcattcttagcaagcaggtgaagatatgccttttaccattaggatttgcggcagggacaatgaggcattggtttgactttggaaacaagatcatatgcactattcttgatcttctcaaagacagtttgaaaactttattggatgctgttgatgatggtaacttggatcgatattgcattcgaataacagaatattcaaagaacatagtgctttcaggatgtccccaagtaactacagcattcttgtacatatctgttctccctaatgatctgagtgtttcattgaagagaaggatagtgagttcatacacccaggttgatcatcaaaccttcgttctttatgaggaattagagaaggctactaaaaccttatcatttaagaatgtacacatggtggatatttcaaaatgtccaaacgttcattttggcgcagcaattgactggttgaagttgggttttccagaattaagggtattcagggtttcacattgtttatcatttcaatttgatgatttactatatctgttaatgagatgtccatggattgatgaaattgatatgactattgatacaagcactgtaacacccagacattcagtaatctcgtctagttctgaagtcctaagcaaggcaaaaccaaatcagaaaagatatggcatacattgttcagcatatgacaggcaaccaaattcggttttcttaaatatatcaagattgacattggaaggcagaaatgatattgatgatatggacttgttggagatatctgtcctgaaaaattctctgtgctatataaacattagaaactgcttcctgttgacggatgatggtatttctaaccttctgatgaagtgtacaaagatccattcgatggttctttcttatacttcttttggaaatcgatcaattcaaatgctatgcgctgccaatccttctggccacaacagtggacatgctcatgttatggcatcttatatgcaagaattacatctggatggctgcaaaggtattgactctgttgctttgtcgcagctagtgagcattataagtatcacaaagtttttgagcttaagggaaacatcacttacagatggtgcactctgcaagtttgttggctctagtctggagtatcttgacgtttcagagactgtgatttctatggtatcattagcaccagttattcaaagaaactgtaaattgaactgtctgaaaacagctggatgctgtagtcttctgttgcaatgtgctaatgtagaacatatcaatggtaacaagtatggagattttctacaggagttaggaactacctactgtctggaggatgttgaaatgggctggggattttgccctattcgaatcgaagaccttgttccttcttttagtaaagtaaggaagatgaaaattggtctcggcacatcattagcggagaatgttctgtgtgctcttcctatgatttgcccattcctcgagtctttgattctaaggtttcaggtgatatctgacagagttgttagacgtctattggaatcagcaacaaatcttcagagaattgcaatttggctgaactttcactttctggttgcaaacttcttgactccagctctcaagacattatctcatctgggtggccaaacttggcacttttacaccttgaggaatgtggtaaagtaactgttgaaggggtttcttcttttttcaactgtaaggctttggaagacgtcctactacggcacacgtccatctgtgcatgtcatttccaggacttctaccggtgtaacttttctccgttgaaaaagttgaattgttgattcacttgattggttatatagtttctgagagttgggaaccgcagggtaggggcatcggaaggagcatcatagacgatgctatcagagagttaccactactgcggaagctggctttggatctttgcgatgcctgtgaagacggttacgatagcccaaacgatgcggaagggaagatgattagaagtgtaaggatgagtcgatgcaagaagatggcggggtcgtgtttggaggtccccagacaagggtcttcaacttcaaggccggtgcacaaggacactgtagtgctggaatggagcagcagaatgttcacaaccaccatagtgaaagaaagagtgtgatgagcctcttctgtagttttgtccctgatgaagaacacaagagcaggccacaatatatatgacttgtatgaatggtctccccgcttctgattttgaatgctttgtatgtggacatatcctcgtgtgtgaatgtatttgtatggtatcaaacgaagatcatcttttgcagtcgtactgtacccatgcactcttatgttgatccacgaacaaagtttggaatttttaggtgaccgtgttcatgtttgaaaattattgttgtactagtccttggtaaaataaaggaggcaaggcaggagccaaaaaaaa

SEQ ID NO: 42929 - DNA, 1397 bp, Zea Mays
atagagttgttctacttctattctactggagtgcattaccacctgtctttttccttcctcttcaacgtctcgaacaagcaggaggaggtagaccgaacaactccaggtcgcgggagcggccatttctctggggcgggaccgcgggagagctctagctcttgcagcagtagaactctactgcagccagctatttatgacagagttaagagaaatggataaggatggcagctccgagagaagtcgcccagatcatggtgatgtgaagatgctcaagttcagaccaaaggtgcctcgacagaagcaaaagccaaagcaacaagaccctaagccaattgatgaagatgtgatgaagatattgaggactcgccaagtggctgcaaaaagtgcaccaaacacagaagatgagtgctcaccacagaagaccctctcgacgccaccttctgcagatgttgtttgcttgtcaccagcgcaactcggagtgcaaaaacaaaatcaattgccactccaaattcctagatccttccctgttcctgttaattcaggtgaatgtgaagattcataagctcctttgttcttctgaacaatactttccactaagaatttttatcgaaatattcaactcttgacaggattggtttatgaagaagagagtagtgatgacgacgacgataatgatagtgacaatgttgggttgctggagactcagccagattcaattgaaagtgaagctttaacatgtccggctgaggagcttgatttgcttcaagaaggtagcaaagaaagaatgttcttcttccagttcccaaactctcttcctttacccaaaaggtcgtccagtgccggcaaggaggtgatggaaggatccaacctgcagcagctgcctcagggttatttgggcaaaatgctagtatacaagagcggcaagatcaaaatgaagttaggagacatcatctttgatgtgaacccaggagtagaaagtaggatgctgcagcgtgcagtagctctcaacactcgagacaaacactgttgcttgcttggagagattgagaatcgtcatgttattgtgactcccaatgttgattctttgttgaacgacaagtagggaccaactgtagcagctttgtcacagattgtgtgtagacctgtagatatgcagggttagtgacatctgtagaaattatatcagctctgtcaaatgatgtataggattttagttgtgtagtgttgtgaacgttttattgtgattgcagtgctatgttagttttagaactgcatgcagctccctgtggatgaatgtttgtaaggatcggtatttgaccttgattgtattggaaggcaaatataataaaaatcacgtcgttcttgtgggcaaggccttctgctagtacaggtttaag

SEQ ID NO: 42930 - DNA, 735 bp, Zea Mays
ggtaacttggcacagccttatcaccccaaggataggattggagatgtgaactctatcctatgtgttagctgtctgtctgcttggtggtgtgctgtccctgggcgttttggccaccactgctgttccactgtgccttgcccttgcgtggtggtcatgcagtagggaggtggagcatattagttttgttttcccatgtgataagtcctattaaagccacgaatagcccattgcttgtaatgtcttgccatgacagttgaagcctagaactgaaccttgtggtgctctcgtagcttccatgacctgctcactgtgccttaccattcttctatacctgtgttaacttcttcagccactcatgtcgcccagttgctttgttcaagacagatgctcgacatcgtcctcctgtgtagtgaccttggccaccagccccttcacctcacagtagccagaatgtagtcgcgccaccgcaaatcatcgccgtgtttagtttcatcgtcgaccagccaacgtgcgtcttccccaagcagtttcatgcacccaccgagaacttggactgtcagcagaaggagtgtaaattaaagatgaagtggtcgtggaagagaagtttgctccagtgcctgttcatcaagtggatggagctatctaactggttattgggtagaagatctagaacctcttcactgcaataaggcaagccccggtgcattcaaccccttctctgtgtttttaaattat

SEQ ID NO: 42931 - DNA, 2545 bp, Zea Mays
accttggtgttttccttgagcaaccgcctctcctcctcctccccttcttgctagtagtatataacatcccccgatcccgtccctcgcaaaatttcaggcctctcgccgcgccatttccaccttaaaactgatcccttcgcttgaatctcccttcttcttaaaatagatcgcgcgcgcatgatgacagtcgaccttggcctgcaggcggcgccgccgccgtcgtcttccggcggcgtgccgagcagttgcacggcgctgccgccggggttccggttccaccccacggacgaggagctcatcgtccactacctccgcaagcgcgcggccgcggcgccgtgcccggcccccgtcatcgccgaggtcgacatctacaagttcgacccatgggacctgccagccaaggcggttttcggggaggcggagtggtacttcttcagcccgagggaccgcaagtaccccaacggcgtgcgccccaaccgcgccgccgggtcaggctactggaaggccaccggcaccgacaagcccatcacgctctcctcctcctcctcctcctccgccgccgccgccgccggcatgatcggcgtgaagaaggcgctcgtcttctacagggggcggccgcccaagggcgtcaagacgagctggatcatgcacgagtaccgcctcgccgaggcgctccacgccgtcgtcaacgcctacagacccacgcggttcaagaacaacgcctcgtcgtccatgagggtacgcgcgcacgccactgcacctccacagtcgtcgtcactgcctagctagctcgatcgtactcgtagcgtggactccgagagatccgaatccgatcgacgatccttcaaatctccatgcacaaaaccagtttatccaaaaactaacgactagctagctagctacaaactgtatccaaagctaactataaattgcgagaaggaagaagaaaaaaacaagaacagaacagaaaaacacttcgtgcatatgcgcgtgtctgtcttcttgcttttggttttagatctggcgtacgtaattactcgattagttttgagttttgagaggaggacagccgtgcaaaattgattctgtctttattatatggttgatgacgataggagagctagcctgcacccgcatataactaggaatctttttttttctttttttccctgttacttttgaaagttttcttcctcctgttgcttgtgtgtggatgccagtttaagcaagttcccggggtcaatgaaccactgcgtttctttaaccccttctctccttgatagagagagacgtcaactcgctcggctcgaccgagatatacacagcgaccagattaactgatccatcccaattcccatccgtgtgccaattattggcgtgttgatcgcgcgcactggtcactttcgctcccgagctaattagcttccagtcaatgacacgtgttcggcgtacgtcacgagatcgaaagctagctagctcgagccatcactgacacctactgttggtcgacaacacccgcagctggacgactgggtgctgtgcaggatctacaagaagaccaccccgcagctggcgtacagcatgtcgccgccgccgcacgaggaggtggaggcgtcgtcgacgtcgttcatggacggcggcggcggcttcgacctcagccgcctgcacccggcggacgactccgcctccgtctccgccgacgacgacatcatggcgttggcggcggcggcggccacgtcgtactacgccgcccggccgctgccgcgcccggcgtccatctcggactacctcctcgactactcggccgtgtccgagctgttcgaggccaccccgctaacggagacgacggcgcagcccgggacggcgacggacgcagcaggcgggttctactacgacttcggtaacggcggcggcgagcctgctgcagccgcctccgtagtagcgcagcagcatcagctgagcccactcaagaggcggtcttccgtggacgaggataactgcaacggtggcattactgacatgctgcacgcttcgtcgtcgtccagcagcaagagggtgatgggcgatcatcactcatcgtcgtcgtccatggctgcaaacagctccgtgtttgagcccggacagacttcttctcatcagctgcacgacagaatatgacgcagcagcatgcatgcatgggtggtcgctccctcgctgctgattatgctagggctagctaggaaagaataccgctgctgattattaatttcattagtattcatgattgataaggaaggaattcaacatttatggattattagtatatattatatatgtagttataaataatatatatacttacccaagtttatattgtaactgtgtaaaaatagattgattagagcaaaaggatatttacagtgacgatttcactggctatagttagatctgattgtagctagatgtaatgcacctaggtagctataggttgtaacatgcatgtaagaacacatttgttgaataagatcccataatatgtataaaaatctgttttccattatatata

SEQ ID NO: 42932 - DNA, 1636 bp, Zea Mays
atcggacacgtcctcgcggtagtggcgcggcactcgttctgcggtcagagtcagagtggcctaggcgctagccgataagccccgcccaccgcgcgcgcgccgcggcaccataccgggatgggcgccatgggcatcgtcgtcagagcatgcgcgcctcccgctcccgccgccgcggccgcgccggcaccctccggctccagggacgccggtcaggcccagcggaggagcaagccctcgaggaccggccgtgtgcgcgtgctcggcggcactggccgtgtcggaggatccacggccaccgcactctccaaactctgccccaagctcggcatcctcgtcggtggcaggaaccgggagaaaggcgagtccattgcagccaagcttgggggccagcctgagttcgtccaggtcgacacccgcaacgcaggcatgttggaggaagcgctgcaggtggtagctgttcgcggagttgccaaaccggaggcagctgcgacgccggcgaggcgctcgcgccccatccctctggcttccgtggccgtgtggagtctggttgccactggcgccgcaaatgctgccgagctatgggaccccttggccctgcacggatcatcaggactcgtcttggctgaccttggtattggagattggtttgggggtttgctgttttcagctgggcagcaggctaatgaggctgtccaagatcagttgtctgctcttagtttctctagcctagcagttatttttggtgctggacttgtaactagtttatctccttgtacactaagtgttctaccactaactctaggatatataggtgcatttggctcagggaaaggccgatccgaggttgttgggaattcaattgcattttcactaggactagcaacaaccttagccattcttggtgttgctgcttcttttgctggaaaggcttatggtcaggtaggacaagggctcccagtggctgcttccggtttggccattatcatgggattgaaccttctggaggtacttgaattgcaacttccctcatttttcagcgattttgaccctcgagctgctgcagctaacctcccttcaggtgtacaagcataccttgctggtcttacatttgcattggcagcatcaccttgcagcacacctgttcttgctacccttctgggatatgtcgccacttcaagagacccaattattggaggaagtttattgttgacatacacaacgggctatgttgcgcctcttcttattgcagcttcatttgctggagcactgcagtggtgcatttttacttggtggaggtgtttataccctactggacagggtgtttccagcaacatcaatggtcatgtagaccatggttggacaagaattgctaggcaccagtctgtttggcgtgcgaatgatatttggatgtgaagtagtgaaatgatggcaacaaagtttagccagatctctcagcgttgtataggcacgcaggacattttgatcgggacaagcaaagcaccttgacctaagtacagtagtctgcatcactgtatctgtatgggcctcgatacttggggccggtctaccctactaaaatgtatttctgggacagattgaaagagtatgaaatttatataagaccttgttcggttaa

SEQ ID NO: 42933 - DNA, 2395 bp, Zea Mays
acaaatccaaagcagttcccacctcatcgccttcctccttccaccgttccctgcccgccaaccaggacgtacacgccggacacacgtcacagccttgaagcctccctcccacacaaccccaagccccaacacaaacacacacacacgatcggtctcgtcgcagcgcagcgccgcgccgcgggtttgatcgtcacgagtggcgacttccttcccctccctctttcgccgatgaccacctcgtcctccgggagcatcgaagcaccggcgaactccagacccggctcgttctcgttcgcgagcacgagcacgagcttcacgaacatgctggggggatctgcggacgcggccggcggggcgtcgaggtacaaggccatgaccccaccgtccctgcccctgtcgccgtcgtccttcttcagtaacatccccgacggcctcaaccccgccgacttcctcgactcgccggcactcctgagctccagatcttcccctcgccgacgacgaacgcattcgcctcgcagcagttcagctggctggtgacgccaggcgcggagcaaggcggcaaggacgagcagaggcagtcgtacccagacttctcgttccagaccgcgccgacggccgaagatgccgtgcggacgacgaccttccagccaccggttccagcggccccaccggttgaagaggcgtacagaggtcagcagcagccatgggcctaccagcagcagcaagctgcaggcatggacgccggatccagccaggctgcctacggcgggccgttccaccaggcagcctcgtcggacgccgccgcgatggcgccgcacgtgccggcgagcggcgggtacagccaccaggcgcagcagtcgcagaggcggtcgtcggacgacgggtacaactggcgcaagtacgggcagaagcaggtgaaggggagcgagaacccgcgcagctactacaagtgcaccttcccgagctgccccaccaagaagaaggtggagcggtcgctggacggccagatcaccgagatcgtgtacaagggcacgcacaaccacgccaagccgcagaacacgcgcaggaactccagcagcgcggctgcggcgcagctgctgcagggcggcgacgcgtccgagcactcgttcggcgggatgtcgggcacgcccgccgcgacgcccgagaactcctccgcgtccttcggggatgacgaggtcggcgtgggctcgccgcgggccgggaacgccggcggcgacgagttcgacgaggacgagccggattccaagagatggtgcgtgctttggtgatagatacagatgcagtaccttttttttttttttgcgccaagctgtttctgtcgcatccttggaagaacgaacaagcggaattgaattcctgttgcttctgtcaggaggaaagacggcggtgacggcgagggtatctccatggccggcaaccgaacggtgcgtgagccgagggtcgttgtccagaccatgagcgatatcgacatcctcgacgacggctaccggtggaggaagtacgggcagaaggtggtgaagggaaatccaaacccaaggagctactacaagtgcacgacggtcgggtgccccgtgcgcaagcacgtggagcgcgcgtcccacgacctgcgcgccgtgatcaccacgtacgagggcaagcacaaccacgacgtgcccgccgcgcggggcagcgccgcgctctaccggcccgcgccgccgcccgcggacaccgccggccaccactacctcgccgcggcgcggccgggcgtggcctaccagacggggcagcagtacgggttcggtgaccagctgggctcgttcggcctcagcggcgcgccggcgcagagcggcggcggcggcttcgcgttctcttccggcttcgacaacccgatgggctcgtacatgagccagcaccagcagcagcagaggcagaacgacgccatgcacgcgtcgagggccaaggaggagccccgggaggacatgtttttcccgacgtcgttgctgtacactgactgaaggacaaggacggcaggacatggcgtggtgtggtgtccataaactgttcctttggcacacggattgttgttgttgttgttgttgttgtatctaggataggttgaacagatttctttatttgtttggaggcctccatgttggcagtggcagatgcttgccgtgccgcaggggtgtctcccttaacacgtgaaaggggggaaagaaagggatttaggatactagagtctaggacacgtggcaattacacagaaggggtaaagaagttttgttcctcaaagacaaattcacacatgagacttgttgtagtcaggattggacataatttcatgtcacagaacatttgttaagattcaaattgattgttctctggtacattgagg

SEQ ID NO: 42934 - DNA, 3318 bp, Zea Mays
ccaccccacaccctctcccatctctctctccgtgccctcctcctcccccccagtccgccccacccttccggccctccccctcttttatatccagtaccatggtgatctccgagctcgggtgagctgatgagaatgcggccgatttgaggaaggctgtgggcgcgatggatgcggtttcgggcggattcgctaggaggctgtagaggttaggttccggtgtcccccggcccggccggtcgtgggagatgagctcctcgtccgcggccagcatcgggcagccgccgccgcccgcgccgccgccggaagaagagaagaagtgcctcaactcggagctgtggcacgcctgcgccggcccgctcgtctgcctccccaccgtcggtacgcgcgtcgtctacttcccgcagggccacagcgagcaggtggcagcgtcgacgaacaaggaggtggacgggcacatccccaactaccccaacctgccgccgcagctgatctgccagctccatgatgtcacaatgcatgcggatgtggagacagacgaagtgtacgcgcagatgacgctgcagccgctcaatccacaagagcagaacgacgcgtacctgcctgccgagatgggaatcatgagcaagcagccgacgaattacttctgcaagacgctgactgcgagcgacaccagcacgcacggcgggttctctgtgccccgtcgtgcggccgagcgcgtcttccccccgctgtgtggtttgtaggatttcacacagcagcctccagcacaggagcttattgcacgggatattcatgatgttgagtggaagttcaggcatatcttccgaggtttcttttcacaggccagcccaaaagacacctgctgacgactggctggagtgtgtttgtcagtgctaagagacttgttgctggagattctgtgctattcatatggaatgagaaaaaccagcttttgcttggaatcagacacgctacccggccacagactgtgatgccctcttctgttctttcgagtgacagcatgcacatcggactccttgcagcagcagctcatgctgctgcaacaaacagccgcttcacaattttctataatcctagggcaagtccaacagaatttgttatacccctttcgaaatacatcaaggctgtttttcacacgcggatatcagttgggatgcgattcaggatgttatttgagactgaggaatcaagtgtccgcaggtacatggggacaataacagaagtgagtgatgctgacccagtgcgttggcctagttcctattggagatcagtgaaggttggttgggatgaatcaaccgcaggagaaaggccacctagagtttctctgtgggaaattgagccactgacaacctttcctatgtatccatccctgttcccactgcgagttaagcatccttggtattcaggacttgctgctcttcatgcaatgctttgatgtggctgagaggagtaaccggtgaagggggctttcattctttgaacttccagtcacctggtataggttcctggggacaacagagactccatccatccttacttagcaatgaccatgatcagtatcaagcagtggttgctgccgcagctgcctcccagtccggtggttatctgaagcagcaattcctacaccttcaacaacctatgcagtccccacaggagcagtgcaatctcaatccgctgttgcagcaacaaatactacagcaagcgagccaacagcagatggttagttctgatgctcaaaatattcagtccgtgctcaacccaggtgctattcagcagcagctccaccaactccagcagatgcagcatactcataatgaccagaagcaaaagattcaaccagatcaacagtaccaagttgctagcagtgcggttctcccgagtccaacatcattaccaagccatttgcgtgaaaaatttggcttctctgatcctaatgtgaactcttccagcttcatcagctctagcagcaacgaaaacatgctggaatcaaacttccttcaggtaagttcaaaatccgtggatttgtctagattcaaccaaccagtagttagcgagcagcagcagccgcaacaacaacaggcatggaagcaaaagtttatgggctcacagtcaatgtcttttgggggctcggtttcgcttaactcgcccactagcaaagatggttctgttgacaacaaagttggtcgtgatgtgcagaaccagtccctttttagccctcaagtcgactcttcctccctactgtacaatatggtacctaatcttacctcaaatgttgctgataataatatatcagcgtttccctctggatcaacatatctgcaaagtccaatgtatggttgtctggatgactcttctggtttattgcaaaatacaggagagaatgatccgacaactagaacttttgttaaggtaagtataatcgagtctactaaaaacaaatttaagcccttcctcatgtaatcattttttaaaattcaggtttacaagtcaggatcagtggggagatccttggacatcacccggttctctaattatgctgaacttcgagaggaactgggtcagatgttcggcattaagggtcagttggacgaccctgatagatcaggctggcagcttgtatttgtcgacagggagaacgatgtgcttctccttggagacgacccgtgggagtcatttgtgaatagtgtatggtacatcaagatactttcacctgaggatgtgcataagatgggaaagccaggaaacgatccacgctacctatcttagctacctatcttaaatcgatacatggagctctttctggctcccatgacgattctgcggcacactgcagcactgttcacgacggccctgctctactgtgctcgcatgttcgcccgtgtcatctctactctctagcatgcacaccgtgctcgtcttcagaagacgaactccccgtcgcttgtatccggtgcaggtcacccgctcctggactgatattttgtaggttccacgtaggaatcagtatcagcaactctatcctagtttgtggtaggctcgcgcggcgctcgttcctgtgtcgcatcaggatcttcggactaaaatgcgtagtcgaaaccgttctcgtgattcgtaagctattcatgtatttgaggattcctcgacatgctttcgacgatgaactgcaataatctgaatgcaggaggattgtttgagatttgtacttcagttttgtgtctgccggtttgcagggttgctgtgatgacgtttcaggtgttctctgtctgaaactattttttatggattggcgagttggtg

SEQ ID NO: 42935 - DNA, 1379 bp, Zea Mays
attgtaccgggggctcacctttcggtccaagacaataatttgctgtcttcagaaacttgtgtccatttcctcctcaaattattaaaccctccggtgaatgttgttgatgccaaagcaccatcaataggttccaaacttcttggaatcagtaaatttcagatgcttaacggttccaataaggatgtggactcttgttcagaggacatacttttaaaagttgaagaaatcctcttaagctgcaaagagatcaaaccagcagacagggattataagagaacaacaaggccggaactatgttcaaagtggcttgctttgttgacaatggaaaaggcgtgcttgtctgctgttgcattagaggatacatctgacatggtcttagaactcggaggaaatttcaaagaaacattaaggcagttgggtggccttgatgatatttttaatgtcatggtgaattgccattcagaattggagaaacttgtaaaggatgcctccactacggttgtggagggaaaagaaggtgctcctctacaaagcaccacactcctcttgaaatgtttgaaaattttggagaatgccacatttctaagtgacaacaacaagacccatttgctcagcatgagtcgaaaattgagccctaaatgccgctcactttcttttgttggtgtcattctcaacattgttgagttactatcagcagacagtagaggtttgagcttattgaatcatcattgcaagtgcaataactcaaagaaaaagagcattttactgaaccgaaggtgccagtattgttcatccaccaaatcagaagcttctcatgttaccctctcttctagtagtgatgtcagtcagtcagaaaggatactcaattgctcatctttttcaagcaatgggacatcaagtggttcatttggagtgaaacatattaatggtgctagtttgaagctcaatgtaagaatggatcgttctaaagcttatccagtcagaggctcaactggttggatttctatgaaagcacaaacttctgattggaactccagagaaatggcaaaaaagcggcgcctatctgaaaatgtacgcactgatttgagtaatggtggtgatgatccatttgcatttgatgatattgatcaagaaccttcaaattgggatctatttggtccaaaaaggaaatcaccacagaagcgagcgaaaagaactaatggagaagtgttggatgattgtggaactgcattaatgggaagtcctaaattatgtcaacctgaagatatttatcagtcagttgcaacttctggttctaaggttgtagatgagtccaatcttttggaggattgccttttggcgtcagttaaggattatgcttgagcagtgggtgagcttta

SEQ ID NO: 42936 - DNA, 311 bp, Zea Mays
ggcgttcctccatatgtccatctctgatcactatgcagctttggtagatgcttctcttctcctgtggtagtcgtctagctcgtcactatttgaaactggccggcgttgttaaaaagaagaaccaggtagtacgatagcatacatggacatggatagcggcagctggctccatggctatgccaccaccaacgccagcggcaacaacggcttcatgtgcggctacgctgccggcagcagctgcagccctgcagagcagcagcagtgcatggaggacgagcagcagcagtttctcgtcagctcgcagattcagc

SEQ ID NO: 42937 - DNA, 1763 bp, Zea Mays
cgtgtctgtgcaacctgcttagtcggtgtagatgacgagctcgactggtggttgtaagattaaaggaagttatgcatcaactgcagcatacaaaaagactaaagtatcttcacatatctctaaggcagtgtgtgtttctgccttgctttagcttgaatgcaatttatcttgttcaaatttcttatcatctgccttctatatatctctttgcatggatattcaatcatttctttcttttgaaaacagtgggcctcctggagatctctttgtttgcctcgatatagaggagccatcagatatcaagagggatggtataaacttgtattcaactgtgtcaataagctatcttgaagctattttgggcaccattaagaaggtcagaacagttgatggaaccaatgaccttcgaatacctccaggtacccaacctggtgatgtaattgccttagcgaagcaaggggttccatcattgaataagccgactatacgtggtgatcatctgttcactgttaaagttgcaatacccaagcgcataagtgggcgcgaaagggaattactggaggaacttgcatctttgagtaatggtggctttgttcgaacagatgccaagccaaaacctgcccagccaaaacgtgtacatctagagaaagaagttggtgctagccaagaagatacagacaaatctaaagcagcgggtgattggttgaagaaacttacacattttgctgggtcaattgctaatggtgctgcaaagtggctgaaagaaaacctgtaggctgtaaatatttactgcaggatagaagatttcttcagttaccatggtgctgtagtccaatctccaattcttagattcattggggtccccaagagctcttacatttttgttttgttttgttggagagtttcaagattttcaggctgtgagtaacaaccgagggagtgagaattgtctactaatactgtcggcatattggtcccttgtcattcttgcaaagcaattattttttatgtagttggagttattttcagtttggcaagtgcatgcagcagtctgaaagagtgaaagttcgccctgaaagttatgggatgctgctgctggtcccaaaccttgagacttagacaacactgtaaatatgtctctgttcctgattctgtacttgaggttttgggttaatcaaattcaagatcaacgggcgttctttttctgatttcttctggagctgcaaagcttgcatcgagcgatgccaaaaaaagatcattcagcagagttcaaacattttcatcttacaatgaagctatcattagaaacaagtttcagtaatctcgaattctaggtttcgtggagtcctcgcgtcgtatcactatcaatccaccgagctcgctttgagcaaagccaagactgcggctaccacgggcagggacaccatcagcagagctaccacaatgtttggcctcgtgatgtccgggagcaggatgcttccgtacttgataaccgcggcgccaccaagggacccaagcaccaatgtccacagatagccggagtcatcaccctattcatcaacacatcataacaaaggaaggaaacggactataaaattctttgcatccaaataaatgttgctatcgaactagtcgctcacaaggatgaaggatctacagccacaatggttgctgttgctgaatgttgacaagagaatgcagaggtaccttgaggatttgccccacgcccgcgtcggtcccggcctcgccggggtcgcgcccgg

SEQ ID NO: 42938 - DNA, 2346 bp, Zea Mays
tcccccgcggaaggacgacgacgcaactggcagtcaccgacgcgacgcgggtcgtctcctcagccctcctgttcagcctcctcgccagcgatggcttcgggcgccgacgccgcggcgctggtgacctccggcgccgacgagtgggcagcggcgtgtccgccgctgcggcggaacctgcagctgctcgcgcctgacgaggttgagctagcaaaaatgctgttgaatgagggccagattcacctatttgaacactggcctgaaccaggcattgatgacgacaagaaaagaggcttctttgatcaggttcgccggcttaattcaagctatcctggaggtctggtatcttacatcaagaatgccaaaaaacttcttgcagattcaaaggcaggaaaaaacccatatgatggtttcaccccttctgtgccttcaggggaaattttgaacttcggcgatgacaattttgtttcactggaagcagctgggataaaagaagcccacaatgctgcatttgttcttgtagctggagggcttggtgaaaggcttggttacaaaggaattaaggtagcacttccccgggaaacaacaactggaaaatgtttcattcaacattatatagagtctatcctggttttacaagaggccagctgcaaaacggttgatgatgggtgccaaaaaaagattccatttgtcattatgacttctgatgatacaaatgcactaactatcaagcttttggagtcaaactcttactttggaatggaaccatctcaagtgaaattgctaaagaaaaagtagcttgtctagctgacaatgatgcaaggcttgcattagacccaagtgacaagtacaaaattcagacaaagccacatgggcatggagatgttcattctcttctttattcaagtggcttgcttgagcaatggaagagtgaagggcggaagtgggttctctttttccaggatacaaatggattgcttttcaatgcaattccgtctgctttaggtgtcagtgccaccaagggttacaatgtaaattctctcgcagttcctaggaaggctaaggaagcaattggaggaattaccaaacttactcatgttgatggtagaacaatggtcatcaatgtagagtacaatcagcttgatccactccttcgtgcaactggttatcctgatggagatacaaattctgagacaggctattctccataccctggaaatataaaccagttgatactggagcttggaccatacattgaggagctaaagaaaacgcatggtgccatttctgaatttgtaaatcccaagtatactgattcgaccaagacatcatttaaatcatccactcgtctagagtgcatgatgcaagactatccaaagacgttgccaccctcaacaaaagttggattcacggtgatggatacatggcttgcttatgctcctgtgaagaataatcctgaagacgcggctaaagttccaaaaggcaatccttatcatagtgcaacctcaggagagatggcaatttacagggcaaacagccttattttgagaaaggctggtgcgcagatagctgaccctgtcgttgataccttcaacgggcaagaggtagaggtctggccacgcgtaacctggagtccacggtggggtctcaccttccagagcgtcaaggagaaagtgcatggcagctgttcagtttctcagaggtcagctttggtcatcgatggccggagtgtcttcctcgacggactttcattggacggcacccttattgtcaatgctgtggatggtgcagaggttaaagttactggtcatgtagaaaataagggctggactatccggcatgtggactacaaggacacctcggagaaggaagaggtcaggatccgtgggttcaagttcaacaagtctgagcagctagaggtgaactacaccgagccaggaaagcatagcttgagtgcgtgaaaagaaaacattcttgacctgactagcttcgtaccaaaatggaaatagctcacatctgggtcgcctcccagattctgggagggaggccaatgccagcgtagctgaaaccgttcttctccttcccccacgtacaacaaggagcaaagtgcttcaccaagcactcaacattctttatgtatatcttgtacagaactcctcttcagtgcaatcagagttcattgtttgtttgggatctgatgtttatgttacaattttttattttagaaaacttggcactgaatcaagtaataagtgtggtagtgtgtagaagtatagtaacgggctataagcctacttatgtggcattttttgtctgtgtggatgagagacattaaaaagtggaggtggg

SEQ ID NO: 42939 - DNA, 870 bp, Zea Mays
ccgcagagcaccaaatcgcacgtcattcgcgtagagctccaaaatcgtgcgtcgaactgggagccgaggcgagtgtggcaagtgagctgagggggcgcaccagggaactcaacggcggccggactgggcaagcgctgatgaggaagcaggaagccgcgacgagggagctcggcgcgcagactgggcgagctgggcacgcggtcgactggagcagcgcgcgagcagaggacagggagggagaagcaagggaattcgatgagctggagatggacagaggaaactccgagctgggctacggtcggacgatggggagaagacaagggcgtgctacaggggcacacgacggccggcctgtgtcgccatggcaaggtggtttctgcagctcgattcggcttgggcggtggcgcacctcgtccaccactcgacgagctgcgtgaaccccgcgaggaaagcgcccatgggaagtaagaggaaggagccgagagggaggggcgtgcgccatccgagcagggacagagagactcgactggcggccatggacgaggtggagcgcggacgggcgagccaggcatgccagggagatgcgtgctagggagtttgcaggggagaccgacgcaaggagccggccatagatggagcaggtgcgtgacgagcagaggggagctgacgcgcgcgcaggtgatcctggaagcaggcacgccatggctgcgtgcaggagcttgagtgagatgagcacgctggaggagggagctcgggggaaagaaactgtgaccgtcgctgggcatcagagagacgcgcgcagggacgagctagagccaggcgcgcacggggaagtgactagggagagggagaattcggctgggagaagaa

SEQ ID NO: 42940 - DNA, 728 bp, Zea Mays
cgcgcgtgggcatggcaaaccgcacgtcgtgccttgtggctgcgcctggaaaccaccatcgttctctctccctttcccatcttctctccctgatgctcgcaactgccactacacctatcacctggtggttgccgatcccagcgcccaaatccaaagcaccccggcgagcgcccagacgcccagcttggctgtctcggcgcggcctcttcttctccgacgagtccttcgaccaggtgagttctcctccttttctttgtgttggattgaaccttcgtagcgcgttcttttttcgtcctcggcaaacttgccatgcagtttcgtgaccgaattgtcctgcgcgcgttgtctagctaagttgtcgcgcgctgctatcctcgctccatcgagcttgcgcctcccacgcacgcagccgcgccctgcttctccgacctggcatggcagcctgttgctcggccccggccgacgtgtccccccgtgccgcaggccgctcgacctgctcctccggcctccgcatacatgctccccagcgtagggcgtggcgcggcagccggcctgcgcggtagacacgccagcgcggcggctcgcccgcgtgctcaggcatccggccctagctccctagccttggcgccatggtcggccactcggccaggctccagccgcagcgtgcctaggtgcccagcgccctcacctcggctatggccatggccagcccccagcctagagcaccg

SEQ ID NO: 42941 - DNA, 2870 bp, Zea Mays
tgggcttccttgttcgccggcccatcacttcatcagttcctgctctcctgtcgtcccccaattccaggttctggacggacgtgggaggccccgcggcgcccgtacgtatatctagcggcgagacggcaagctcccgccccatctccgccgcctccgctccccgtcgtccggctgcgctgttgctgctcatacggatcaagctcggctacacccgtttctgcgagcagatcagaggacgccatcgtcgggtcggtagggatgggacatgttcactccgatcaaaaggcgaagaaattggcgagtgagtctttctctctctctcctatcccgcgcctctgcttcgtcctcagccagccttggaagagtggccaagggtggggatcagcgactcgaagcacttgaagacgagatcaatggagcagaagggccgaaacgctaactgggatcgctggaacccaagagggggcggcaaccttctcctgtttgggggagaaatcgcaatctaagctggcgcctaaggactccacatgcttcgtcggaagcaaaagtggaccagctgggatcttcttctggagacggtagcactccagttatttgcgaacaaagagttataattccaaacgggcatggggagaagcttgttggtttattacatcgaacaagttcaaagaatcttgtgatcctttgtcatggattccaagccacaaaggatgacagcatcttggttgaccttgctgatgccatcacaaaggaaggaattagtgcttttcggtttgatttttctggaaatggggaaagtgatggtgaattccagtatggaagctacagaaaagaggcagctgatttgcgctctgtagtattacatttctcagaacagaaatatgacataattgctcttatcgggcatagcaaaggaggaaatgctgttcttctttatgcttccaagtaccatgatgtccctgccattgtgaacatttctggccgctttgcattagagcgaggtatggagggacgccttgggaagaatttcatgaggagaataaacgaagatggatacattgatgtgaagaataaaaaaggggagttgcagtaccgggtgtcgaaagcgagtctggatgaccggctgagcactgataccctattctccagccgtgccataagcgaaggctgcagggttctcacgatccacggcgccaaagacgagatcgtcccggcggaggacgcccggcagttcgcggcgaacatccgcaaccacgagctgcgcatcgtcgcagatgccaaccaccgttacaccgggcacagggaggagctggcctcgctggtgctgggcttcctcagctcccatccctaccagatcacgtcgcgcttgcgtccgagactctagatagagtagagcacacccacttgaccgtttgcgaacaaaaaaaaatcccctgtaccaatctaagagttgtgggtgtggtgatgtgtttatccagaaccagaacacgagcacctgccgtccaaatcagcgtgactcgctctcgctctagaatttcaaaaaaagtcagtgccaggcatctaacagcaatctcctcatcattgcgttgcgtccaaaagaagtgacaatggcaggtgggccccgcatggcaggccatccgctctctttcatcgctgccccaaggaagaggaggataggatcgatggaggcgtggggactggggacacgcaaggttgataccgcccgcgatagccgatagccatcccgatgcgctcgcgcccaaccgacccgactctacctgacccgggccgaaacagaaaggcgccgtctggtagtggagataattgccattgtagacgaagaggggacgggattcgacgaaatggaggccatgccgttggtttctctgttctggagacgcagacgacagccaatcgccaaattggaaaggtgacagcgcttgtagctgcgtaaacaggtattactctgctgtccaagattaccgttcgcctgcgcagacggcgtcccttgtaccccttcatgtatatcttccgtcgccgaattggactcatctgggggtcgacatcgccgcctgctttcttcttcctcttgcggctgcttgcggtctgctattctcagagaaaccctagccgtaatttctctgctactgtgcggatggattttccaccgagcaaagttgttgccgatgctgtggaagctgctcgtgctgctgccgttgcggcctctgaggcgagatgcgcggtatttgttgctgagaaggaggccaaggctgcggttcagttcgccgccattgccgtggacaaggttgaagcagttaaggcctcatcgaatgtgaggtacaaggtggcaagataggaaaggttcgtgggcatctggaacatgtgtgcaaggagctagagaaaacttcaattatctgtgaagaagatttagaaacaaagaatccaacttgggatctttacgacaacccttccgtagatgatgaacatcctctagatgatgatgaacttggtgatggctacagtacagaagatccagagctatgggaaatggcttttgaagacttcaagtgggaagagattaaagctaatgtctcattcgaagagcacaatcgtgtcataaactacaggttcgaagagataaacgaccgtaacatgtagttgtcgacatgaggttgcctttggtgggttggtttcactctggtgtcattttggtctgtctaggatatattttggaaggacggaactgatatgtgttgtatgaagtattatctgttgtatgaaccctagtgtttgttgtcgtgttcagacaagatgaatggcgtttgtaagaacattagtgttctatgttttctgtgttgtggacatgcggt

SEQ ID NO: 42942 - DNA, 1705 bp, Zea Mays
atggccgtgcccagccagccggccctccccttcccccctcgccctctctcttccatggatggaggaagaatatggagggaggaagaagatggctgttttgcaaaaacacacctagcagatttcgaaacccaacaatatgaaggtagaaaacgtgaacaacttcgcaggggcattggattggaccgcactagcaactttttcttcatggagaaagtggacatgatcatagctcgtgcatggcgaaggttccttgagaagacaagactgcaaaagctgttctcaagaaagaaaactagtaagccaaagatagattccaagaagaatgatgatttagctagtgaaatagaagacaaggagctttatgttgaacacatacgtcttgaaacaatggatttaagctttgggaatttatttggcaaggtcacaattcaagagcctacatttgaagaggtgattgtcttgtataggagaaaatgtccaaagggccaggatgatagagcaattcatgtaaagcacttcaaaaatatcccaatggcagacatggagttggttctgcctgagaagaaaaacccgagcctcacacgtatggactgggttcaatttattgtttctgttgtcattggacttgttacacttgtcagttcactggaaatgcctaaagctgatttctgggttgtaattgcaatcctctctgctctggcaggatattgcgcgaagatctatttctcgtttcaacagaatatggcaacctaccaaaacttaatcactcaatcaatgtatgacaaacaactagttagtgggaaaggcacactcctccacctctgtgatgatgtgattcaacaggaggtcaaggaggtcataattgcctactacattttgatggagaatggaaaggctactagtgatgatcttgacttgcaatgcgaggagttaatccaggaagagtttggcttgcaatgcaattttgaggtgatggatgccgttcagaagctggaaaggtttggtgtcattacaagagactctattggaaggatttgctgtgtccctctaaagcgtgccaatgagatcatcggcgcaaccacggaagagctggttatgaaagccaggcaaagctagcaatctattattttgaacaatgtagccgcattgtagattcttgcctgatggcgctgtaacgtttatggttactccagaaagtccaaacactgaactcttgcacaccaggtgcaaacatgtgatctttgggaaggtggtcagtggaattgctttgcttaaaaagcttgaagcagttggtagtgaaactggaaatccttcttatcaagtgaaaattgtagactgtggttaagtttccaacacaaattctcaggatctgctaaagggagataaaggtttgcgcgacatggcttttcatagtgctcaattggatctatcccctgagcataggagaaaagtatcaatttgtacagtggatccaagtattctataaagcatgcatcctccaatttcccacaagcgagaatggcatgatctgatggatgaaatggctgttgtatcaataaaataatatctgtcaattgcctttcaaggatcaattgtgtttcaagaaccacgctttgttgaatacttcagatcgatttggtactatcttgttatgattgatgtattcatctttgcatcacaattttcttgttttctcactctttac

SEQ ID NO: 42943 - DNA, 1828 bp, Zea Mays
aactttctttcgtgcgcgcctgtcatcgtccggctcagagccgccacagcctcgccgtcgattctctcccctccccttcgtcctcacgagcgacgaacgtcacgaacccctcctccacctcctgctactatcggcgccggagccctcctctggtctcaccgtgcaaatccccaaccccgaggcagacgcaggccagcccctgtgatggcacagaccaacggcaacgaccccttcagtccccgttcagagttggggcttcaagtggatgttgttgttctatgtggatgtgcttggaactgcacagtgtgggggtatataactgaatagttttgaagctacaggaacgtttccttcaagctgcagtgctattttggcgcaatgtattgtacacgagtgttgagtatactctgttgaactgaactttgaataacataaccacctccgcacagctgtttcccaagaaagggttgtgataacaaacaagcatggtgagaggcttgtggggctgctgcatcacaccgcttcaaacaagattgtggtcttgtgccatggttttatagctaccaagaatgacagcctcattcttgacctggcggaagcgttgacaaaggaagggatcagtgtcttccgcttcgatttcagtggaaatggagaaagtgaaggccagtttgagtatggcaactacaggaaggaggctgacgatttgcattctgttgtattgtatctgtgtcaaaaaagttatgatatagcagctgttgttggtcatagcaaaggaggagatgtggtgattctatatgcttctgtccatgatgatgtgggcacaattgttaatttatcgggccggtttgatttaagaaaaggcattgaagaacggataggggaagggtctatcgataaaataaacaaagaaggctaccttgatgtcaaggataaatctgaaaatgccagctacagggtaaccaaagaaagtttgatggaacggcttaatactgatatgcgcgctgcaagtgtttccataagcaagggatgcaggttcttaacagtccatggctcagctgataagaccatacccgtagaagatgcccatgagtttgcgaagcatatacccaaccatgaactgcgtgtcatagaaggagcaaatcataactacacctcacatcgcaaagaagttgctgatgcagtagtagatttcatcacgtccaatgtaaccgtataataaggctgggggatgaatgtcattccagaccacttggtcatgcacctatcgatcccctccatcatggggcaatactggtactaggtgtctattatcttctgaaccgaaaaccccatgtcatgcaggtttgatatgatgatgttgctcgtatgtgctcttaagaattactgtaaatattgaactcctggtagacttgtatgccgcagctcgcagtttatataggctcatatctctatagtttttttttctttcttctttgttcgagggctctattcccttgctcttttttgcctggttcatgtaagttttcttccttgtaccctatagttatttaatttatttaaatttggcactgtggactattttgtacaagaagtcttagtacaaacgtacaagcaggcctattggttcttttagatcgtgatctaatcatagttgtacattttagtacttaaaacctgccccaccaacaggtatataagtattgggcaacaatctgcgtgagctggtggaggatttaaacacacaagaccatttcaacacacgtgaataaattttactctaaaccatttcgacatggtttgttcactagtgcaaaaagaaaagaaaaga

SEQ ID NO: 42944 - DNA, 1126 bp, Zea Mays
cttaggttcttggacatgtatgttatcacatcatagcagctggtttgaacggctacatggcaattgtgaccaaccttaacagtccggttggtactacgtctctagaaccctcaggctgctgtgggaggatttcatcacagttgacggttttgtcatgctacctcaggtcatgtggttaacgtttgttcccttcatccacaatagcttactgcatggcataatttctggttctttggatgttgctgatgttgcgatggtgcaagaggaggtgaacagataatgaagacttcaagtaaatggcgagttgaatccattgaacagataataagaacagttttaagtgtcattaacggtgcaatctactacactaggattttaaacatggtgaacagatcggccgacagacgctatgtagatgtgtccagccaagggaacttctatttgatgtgggagcttggataggtctggtagaaccaccaattacctggtccttagtctacatgcctttgttgttctgtttgtatggacctttgtctctatgtgtagccattttggcaaccccacatcagggtggtggcatgtagattctgaacatggggtggagagcggacattggactttggttgttgttgcgcggtggtgggctcttccttagtataggaacagtcatataactgaagactttgaggaggtgcaggtgcagagccgatggtttggaatccttgacgtgggctaccgctcataggaggaggcttgggctgcttgtggcagcaacatgttgcacaagaccacaaacaagggaacagctaggtgcacgacaaggttgtcgccgccaacctctactctgtcaagttccttgatggcaacaaagaatttgtgctaggcaaagacggcgtgttgcttcggggtcttggctgaacgatcaaacatcctatgtatatatgtgtacaacaaactacatctgttgctactactaccataaaagactgccgactgtgcttgtgttctctcttctgtaacacaaatgagtgtaaagagacatgtgctacttccttggaacttgaaaaccttgtaaactcatgtcttcatacgtcgtgcttcatgtgcgaaaacacttaggtctctt

SEQ ID NO: 42945 - DNA, 2727 bp, Zea Mays
ggtgaacctagcccaaagcaacggcaaagcccgtcagccggtgtgtagacccaatacggcccggccgatttgtcgctgacgtcacctcatcttcaccaccggagtccggagtaatgcgcaggccacagggtcgggttcgctttttcttggcttcttctctcgtccatccacagggggaaggagcaggagggagggagccatggttgtcagcacattcactggccccgggattgggatcgggttcggtgtcggctgcgggttcggcgtcgggtgggggttcggaggaatgcctcttaacacgttcggcttgggtattggtgggggctgcggagttggtcttggactaggatggggctttggaaatgcttttggttgtcagtatcgatcttcaagagtccagttccagggcattgaatttcagaagaaggctggaggagatgaatcacaaaaagttgtttcacccgagcttgctgaaaagtctcatccttatggctagtattcctgctaccacaaaatccacagagactgagttctgtgtgctgagttgcagtttaattacatacatgacaagcttaaaaacaaaacaaaataactgctgctataaagttacagtttagggaaggtcttttaagttgaaccaccagaaggttaagaaaaagtacaaaacaaaggcggacgttgtttctgatctgttggtgggtgctgtgactgcataccgggaatcagaacaactggtaacttcgtcatagcatgaagcatccatggacctggcatgatggtgaatgacttgcacaactgtatctcttttcttcctgaaaacacacaactgtgtctttcagtgtttttttccagtgcaaagcctctcatacatcaagcaaatggatggtcaaaggaagcagaatcgttctttgatgtagtagagcttgctggctctgcctccccagtcctgaaccagtatgactgctggaatgaagctgcgcttgtggggacatcctccatgacccattcaaagcccttggggtagtagatccctgtcattggatgtgggacccacaatgatgtttctggggacttcacttcagtaggctccagtcgcttcacaaggttcaacatggattactagttaccggagcagagctgccgatttcgcaagcgcatggcggcccatcgaatgcaggctggggcgtttgctaagatgccactggtggttatccttggtagcaaccagctgatagcagttccttcttgtttggtacctccctcatcctcaacccaggtatttatacactagctgtagccttgcagatgcaatgccacaacaccaaccaccttccgcaataaaagagacaccgtacatccattggattatagagaactagacacgcttaacatacagcaaagctaaagaggaggaggggtttgttaaaggattatagacaattttgttcactgtcgctagcttccaatggagcaactgaaatgacggttttgagcctctgattgaacgcctctggacaaaacaccaccagaactgatgctcctagaatctgaagtcagttttgccaaggagtgcagtcttggactgtactgttttgctattttgtgtaaccatgcgacagcaccaccgaggctgtagctagcattgttagcaaagtggaaccttgacattatgaacaaaagatgagagccggacacaattagaagaaaactctacagttacagaaattccacgatgaagggttgatagctgcaaattattttgttataataaagtcctcaatggcttgtaaaattagcaagctgatgtagaggctaaaaacacttatggagtatgataaaagcttagagtcctcagagcacaggtcagagacagcgttttgggtgacagtcgacattggctcttaaagactcgctagcgcggttatttttcttgttctctcatcactgggtaagatctgtactcagctgtcgaagtcaattagccattgagcacgcccattaacaggtgaactcagagtggaaatccatctggatgtgattatcatgcatatttcaagatatgtatcctcaaggtgaagactttttttttaccttactggatggatgtctccatagtttctgtgcatggtacttgttatctgatccatcttccccaaacattctacctcatctgatcagcgccatcgacgctctgtttcttgtgcacaataatggagagcatgggatctgattctccgcttccataacgcacagctacggcgcaaaactaaagacaaagcatttcaggccttccgtatttgacagactgacagtacagtcacgagaagcacgacgctgcctgcacaggagttgtactgggacatgtctgggagtggaataaagctgctgattttgttctcatcggcttcgatccgtctgttggctccattgcttttggtagaagggtaggaagtcttccagggctggatggtatgctgctatacaaggaatcttgatcacttcacaggttattggcacttgttttcgcgtcccctattccaaaagaaattatgctggcatgttttgcttgttactccctgtgactggtccgaacagtttccaagacaattatgtactgattttgtctgggcattggaagtctggaacagaatgtggcttcctaaacaaggtttcgtagagcagaggggaagagaagaggcacatgtaccaggcaagcggagaaaaaag

SEQ ID NO: 42946 - DNA, 1325 bp, Zea Mays
ctagtgaggaaagtgctcttatggagttgaagaaagaactccaggaaagacctacacaaaaactggtagatgatctcaagaaaaaggttcagattttgcaggctgttggttacaactccattgaagctgaagactgggagcttgctactaatggtgaagaaatgagcaagttggaagcattgcttctagacaagaaccgtaaaatggagcatgagctaacacaactgaaggttaaaatatcagagaaaacaagtgttcttgaggaagctgaaaaaaggattgttgaactaacttcaaaggttgaagagcagcaaaagctgattttgaaacttgaggatgacatactaaagggctacagttcaactgataggaggggctcactcttgaatgactgggatattcaagaaatcggctcaagtgaagcatctgagggctctgatccaaggcatgcatcggcagatcaagatcaaagttcgatgctcaaggtcatttgcaaccagagggatcgtttccgtgcacgtctgcgtgaaactgaggaggaactgaggagactaaaagagaagcatgagatgctgactgttgaactggaaaaaactaaagctgataatgtgcaactgtatggaaagattcgatatgtccaagactatagccacgacaagattgtttccaggggaccaaaaaagtacgcagaagatattgaaagtggttcttctgatgttgaagcaaagtacaagaaaatgtatgaggatgacataaacccgtttgctgctttttcaaagaagatacgcacggacgtttatattcttctacagcatcggattgcatctccttgtatttacattactgtacagaatgtcagctttgagctatctcaacacaacaactcagcaggatgaaatcattctggatgctggtaatcagaggctaacgcacatgctttaggccaagttccatataacagtagaaaaagaggctctctgggttttgatctatagaatctttggacaggatcgttgctgagattgctattgatttgtttgctttgtacccttaagcgccttgatatgtttctgtagataaaaagaaaaaaaaacctgttttgggggcaggcgtgggtgcggcatgagctttgaactatgtaatactgttgtactgccaatttaccattttgttggtaaatgaaagcacacttgtcacaaaggtatacggtatgccataccatcactacatcgtttagagtgaaatgcctctaaactttttctgcattctcttctagctctatgaactcatggaatggtcattcgttattttttttcactttttaa

SEQ ID NO: 42947 - DNA, 640 bp, Zea Mays
taataaatttctttctttatttgattgtttgtttgtatcgagctatcatcatctttttagtaggcaattatgagcacaacacttatcatgttattagtttttttagttgtcctaacaattctttgggttctgtatggcaggaatagaaggggaccctattaacagttcttctggaatagaagcgggagtagtattgtctgtgttatagtggacccgatttcgtccagtggtgttgccagtatttagaagcatgtgcaatgtaatgaatctgggcagatgttgcgtgtgtcttttgtactctttgctttacatgtgaaatgtaatgaagttgtaggacaatataaattaggttgcataaaggggtccttgtccattgcacgccagtaatatgaagggtttgctatctgactgcttagagtcaaatgtctgtgcaattggaaatgaagtcacacgcagtgcatcgctcccacacaagtgtggattagaatgtggattctagcgcgctagaacaaagaggtcagacttattttgaactcatatctttctttgccttttagttaagataagatataatatttgttcttaccatcctggtgaagcttctcacttcaccaaatgaagatgtccttaaacaagcatg

SEQ ID NO: 42948 - DNA, 6880 bp, Zea Mays
cacgaccacaccagcagccaggtgcccggtgccgactcgacccgaccaccacccaggccagccagaagcccgtcccgacccggccgggcgcgcgcgtgcgtgcgttcgggcgcgcgcgttcctgcgcggattgggctcggcctccgctcgtcgccttccggccccacgcgcccctccccgcgagggctcgcccctccgcccccagtccgcctcccgcgatccccttctcccgccgctcgtcgcccgcctctttcctccccgctccccgcagagctggtgtgcacttctattacattacatgcatgtggagtaatttacctacggcagattgctgactaaaggcgctgaagtaaaccttccctcagtatacttcctcggatgtcacgtctgcccctctgcgtcatttatggctcagaactcgtcccgtcttcaccgcctcctcacattactagacactggttcgacacaagcaacgaggtttgcggctgcacgccaaattggagaaatcgccaagtcccacccccaggagctgaattcgttgctaaaaaaggtttctcaatatattcgtagtaaaaattgggacacgagggttgcggcagcccatgcgattggtgccatagcagagaatgtcaaacacacatcattgaaggacttgtatgcttccgtgcaagcagaaaaacatgcttccggtttctctgatggaagtgatgatgctggctcagcattgccacggactgatagtgcagcaacatctgatcttgcttttggaagctttgacataggcagggtattggaatttggatctcctctattggcatcaggtggacaggaatacgacattgctgatagtggcaagaatccagcagagcgtctagctcgccaaaagaaaaatctccggcgtcgtttaggactggatttatgtgagcagtttatggatgttaatgacgttatcaaagacgaggatcttcttgcccaaaaaaattattggggttcacatgtacagaataatggattccattcatttaattcaggtcataatattcagcagttggtttctaccatggtccccaggtatcccaagcattctaattttcgctctagacgattaagtgccagggagttaaatatgctgaagcgtaaagcaaagagtaatgcaaaagatcatacaaaggctgtatctgaggatgatgaggttacactgaaaggatctgtgccctccaatggagcttcttctgaacaagctggtgcacaaaatggtgtatttgatacagctgtcgaagaagacaatctggagtacaatgagaacggaagatggccttttcaacaatttgtggatcagcttattcatgatatgtttgatcctatttgggaagttcgccatggcaccattatggctttaagggaaattttgacacatcatggtgcttgtgctggagtatattttcctgatctgagcttgccttcctctgacttggatggtaaaaccaactttgactcccttaaaagggaacatggtatcgatctaaacgaagatgtccatttggaacaccttgaaccagcattaaagaagcataagaaagagccaaaatgtgctgaaagtatgatggattgtgataaggagttggttgacagtgattatctaaaaacggaaggagatctgagcaatgtgcctgatgtattaactgccgaaccaaattctactcatgtaaaagttgagcctgagttctgtgttgatgattcagctgacccctctaaaggcgtttcgacatgtaaatcacagaaaaaactcaactccatatcacatctgagttctcatattcttgctccagaaagttcaaaattcatgaaactgatgaaactagccaaatactcatatatgaagaattgggaatttcttcaggattgtgcaatccgcttcctttgtgtgctttcactggaccgctttggtgattatgtatccgatcaagttgtcgccccagttcgtgaaacttgtgctcaagctcttggtgctgtgctgaagtacatgcacccttctttagtatgtcatacattcaaaatcttgctgcagatgcagacaagagtgggaagttcgtcatgggagccttcttggcattaaatacttagttgctgttcgccaggaaatgcttaaagatttgcttgactatatcattcatgcttgtaaagctggtctggaggaccctgatgatgatgtccgagcagtggctgcagaagccctgattccagctgccgactctttagttaggctaaatgaccaaattttgcatccaattgtggtgttgctttgggatatactgcttgaccttgacgatttaagcccatctacaagcagtgtaatgaacttgttagcagaaatatattctcaaccagagatggtcccaaagatgcttggcacagcagcttcaggggaaaagggagaatttgatctaaacgaagcaactcagattgctgagcaagaagacgaactaacatctattgaaaacccttacggtctagctacactgacaccccggctgtggccctttatgagacatagtattacttctgttcggcgttccgccatacgaacactggagaagcttcttgaggttggcaacactaggagttctgctggaacaaccccatctaaactctggccaacatcaatattaggtgatgcactgcaggttgtatttcagaacctacttttggagtcaaatgatgatattcttcagtcttctgaaagggcttggaaacttctacttcagtgccctgagaaggaccttgaatatgctgcaaggttatattttagtaattgggtacaacttgctaccactccatttggctcagcattggattctacaaaaatgtttttaccagttgcccttccacgaggaaatcgttcgagagctgctgcaaagattagatctgctaggctagaacatgagtacacaacaatgatctcgtttggttctacaggggaaagtatttcacatgaaaagcattcggacgttccctctattttttcgaatataattgttggctctgatcctgacaaatctgttactcatacacgggttcttacgtcaatggcccttgggctttttgcctctaagttgcccgtaagctcatggcaagtggttttaagtccactagcaaatcacctcatgtctctctcaggagtccagagacaagtggcttcaatgatcatcgtttcttggttcaaagatctgagaggcagagatcctgtatcagtgggtacattgctagcttttctatcttccttgaaagagtggctggtggacttattgacttgctctgatccagcattacccacaaaaggttctgtgcttccatattctgaactttcaaggacatacacgaagatgcgcaatgaagccaataatttgctccacttaatcgattcatgtgctgctttcaaagattatagtagcagcttaaaccttaacactgacgtgctgactgttgatgatgctatcaactttgcatcaaagcttttgttaccatctgaatctgatattccttcagaaactgagaacattttcttgaataacatagaatcagcaaaacaaggcctattgtctacatcaggttacttgaaatgtgttcagaataatttgcatgtgacagtctgttctttggtggcttctgctgtagtttggatgtcatgtttgcccagcaagttgaaccctgttattttacctttaatggctgccattaaaagagaacaggaggaagtacttcaagataaagctgctgatgcacttgctgagcttatatttagctgcattggccgcaagcctggccccaatgacaagctaaccaagaatctctgcactctaacatgcactgatgctagtgagacacctcaagctgcaataatcaactcaatgcaggttattgaggaccagaatttgctatcgattggaaagcgttttagcagtcatagatccaggggccatacaacgtctggtggcgatgaaaggtcaaaaatggagggttttataagccggcgtggatcagagttggctttcaagcatctctgtgtgaaatttggaccttcattgtttgaaaaccttcccaagttatgggattgccttactgagtttcttagacctgtaaaaacagaagatggtattccggaagatgatgcaagtattgcacagctgggcagatcgtatgaggataaggacccacagtcactcattaataatatccaggtcgttcgttccatttcacctcacttggctgagcccttaaggcctcaactgctaaatctccttccctctattcttgggtgtgttcgtcatcctcatgtggctgttagactagctgctgcaagatgcatcacatctatggcaaagtcattgaccgatgatgtgatggtactggtgatagaaaatgtcatcccaatgttgtccgatttatcttctgtctgtgcaagacaaggagctgggattctgttaagccttcttgttcagggtttggctgtggagttggttccttatgctcctttccttgtcgttcctcttctgaagtgtatgagtgacccagatggttctgttaggcagactgtgactcacagttttgctgctcttgttcctttgctgccattatcaaggggtgcttctttaccatgtggactaagtgaacgcttatctagcagtgctgaagatgtgcaatttctggaacagctccttgacaatacccaaattgatgatttcaagcttaatattgatcttaatgttgaactacgaaggtatcagcaagaagggatcaactggcttgcattcctccgtcggtttaagttacatggaattttatgtgatgacatggggctcggtaagacgctccaagcatctgctattgtagcaagtgacattgcagaagcacgtgcacggaatgatgaaaaaattctgacatctttgattatctgcccttctacattagtggcccactgggaatatgaaatagagaagtacatagacagctctatcttgaaacctcttcagtacgttggttcttctcaggacagagtgacactccgtagtcagtttgataaggttaatgttatcataacatcatatgatattatacggaaggatattgattttcttggaaatatcacttggaactattgtgttctggatgaagggcatataataaaaaactcaaggtctaaaataacgtttgctgtgaaacagctgaaagcgcaacaccgtcttatcttgagtggcacacctattcagaataatgtgttggagttatggtctttatttgacttccttatgcctgggtttcttggaacagaaaaacaattccaagctgcatatggaaaacccttgctagctgccaaagattctaaatgttcagcaaaggatgctgaagctggtattcttgcaatggaggcactgcataagcaggtcatgccgtttctactgagaagaacaaaggatgaagttttatctgatcttccagagaagataatccaggatagatattgtgatctcagtctattgcagctcaaactttatgacaaattttccagctccaatgcaaaagacgagatttcaactatagtaaaagcaaatgaactggaggaatctgcacctcaaccaaaggcaactcggcatgtgtttcaggcattgcagtacctattaaaactatgcagccatcccttgcttgtaactggggagaaccccccaaatcatcttgtggatcttctgaatgaaataggtctgggatctggcagtgagcttcatgagcttcaccactcacctaagcttgttgctcttcaagaaatacttcaagaatgtggtatagggtcagaaatatctagtcctgatgcttctacagctgttgggcaacacagagttttgatttttgctcagcataaggcttttcttgacatcatagagaaggacctgtttcaatctcatatgagaagtgtcacatatttgcggctggatggctctgttgatccagagaagagatttgaaatcgttaaagcattcaattcagacccaaccattgatgtacttctgctaacaacccatgtcggtgggcttggcttgaacttgacatctgccgacacattggtgttcgtggaacatgattggaacccaatgaaggaccttcaggctatggacagagcacatcgattgggtcaaaggaaagtggtgaatgttcaccgtctcatcatgcgtggcacccttgaggagaaggtgatgtctctccagaggttcaaggtgtcagtcgccaatgctgtcatcaatgctgagaactcgagcttgaagaccatgaacactgaccagctgcttgatctgttcacatcaacccctgcttcaagaaaagcaagcgacgagcagagtaagaggaaatctggtggcaaaggcttgaagtccattcttaatggtctggatgagctttgggatcagtcgcagtatgccgatgagtatgatctgaaccagttcctggcgaagctgaacggctgagccaccaccggctggctcgtgtacagtgtataaagcaatttggggcaggttaattttgttgttgctgttgtttgatagaggaaggaaaagattagatgctaacagatataggtggtggttggggttacgatctcaatttttttggtttccatcttcctcaatttttgttttgaggagttgtatatactctgctcacctataatcaaagctgcagctcttatcagaatttcccttgattggtcatggtgactgttccatgtactttgttctgccgcggccgtagctatatggactgctgcagctgcaattcatagaaacaaaatacttcatagaaacaaaatattgtagaagccgcatttggattaaag

SEQ ID NO: 42949 - DNA, 4028 bp, Zea Mays
ctcacgttcattccgcgggcgcagggttctctctcgtggcgatcgctgaccgtagcggccaccctccgccaggtggccaggttttcgtgtggccctccgccatgtcttcgcaggaccctccgccggcgacgagcacccaaaagaagcaatcggagagtttggtaaacctactggcagaggcaagcaggttctaccgcaaagcatataatgaactgttctcaggtttaattactgagtgggagcctgaatcatctactaatactcctgactatatgctttttgggtggcatctcttcttaacgcttcgttcgagatcaccagaattgttcaaggacctggtgtcctgcatccatggattagttgctgtattggccatactattggttcacgtgccagctaaattcaggaccttcacgattgaaggctcttctcacttaatgtgcctttgaaacattggcatctcccacaaagacaataaagaacatgttgactgttcctagttcccctttgtcacccaccaacggtggttcagtcaagattgtgcaaatgacaccaataacttctgccatgacgacagctaagtggcttcgtgaggtgatatcttcattgccagagaagccttcatctaagcttcagcagttgatgtcatcatgcgatagagatttgacaaatgccgtcacagaaagggtcagcatagttctggaagcaatttttccaaccaagtcttctgctgatcggggtggctcattaggcctcaattgtgcaaatgcctttgatactctatgggcagatgccagaaaaatggaggcttccaagttgtactatagggtattagaggcaatctgcagagctgagttacaaaacagcaatgtaaacaatctaactccattgctgtcaaatgagcgttttcaccgatgtttgattgcatgttcagcggagctagtattggcgacacataagacggtcatcatgatgtttcctgctgttcttgagagtactggtctaacctcatttgatttgagcaaaataattgagaactttgtgagacatgaagagaccctcccaagagaattgaaaagacacctaaattccttagaagaacaaattttggaaagcatggcatgggagaaaggttcatcattgtataactcactgattgttgccaggccatctgttgcttcagaaattaatcgctttggtcttctggctgaatcaatgccatctcttgatgacttagtggcaaggcagaatattcatattgagggcttgcctgctacaccatctaaaaaacgtgctgctggtcgagacgacaatgctgatcctcgatcaccaaagagaccatgcaatgaatctaggagcacagtagtagaacacaatttgcagacacctccacccaagcaatgccacatggtgttgactagtttgaaagcaaaatgccatccactccagtccacatttgcaagtccaactgtcagtaatcctgttggtgggaacgaaaaatgtgctgacgtgacaattcagatattcttttccaaaattctgaagttagctgctattagaataagaaacttgtgtgaaaggattcaatatatggaacagacagagcgtgtctataatgtcttcaagcagattcttgatcaacagacaacattattttttaatagacacatcgatcaacttattctttgctgtctttatggtgttgcaaaggtttgccaattagaactctcattcagggagatactcaacaattacaaaaaagaagcacaatgcaaaccagaagtttttttaagcatctatattggaagtaggaatcataatggggtattaatatcacgccatgttgatatcattactttttacaatgaggtctttgttccagcagccaagcctttcctggtgtcattaatatcatctggtactcgtccagaagacaagaagaatgctagtggccaagttcctggatcaccgaagctatctcctttcccaaatttaccagatatgtccccaaagaaagtttcagcttctcataatgtatatgtgtctcctttgcggcaaaccaagatggatttactgctgtcaccaagttccaggagtttttatgcatgcattggtgaaggcacccatgcttatcagagcccatctaaagatttggctgctataaatagccgcctaaattataatggtcggagagtaaacagtcgattaaactttgacatggtgagcgactcagtggtagctggtagtctaggccagccaaatggtggttctacttccttggatcctgcagctgcatttagccccctttcaaagagaaagccagatacttgatcaaatataaatggcgatctctctcgtatatagctcacagctccatagcagtctattcttctgaataagtgggttgactggagtgatttaactgtacatgtatgtgttagtgagaaccagcagtttataggcagcaaactgttttaaattagctttgaggttttatcaccatttccctgctgattgaacatattttagattgtaacatctgctttgtagaatgctaatgaatctttagttttcagtgggttgacattaaaaatccttatcctagttggctggttgttgggagacattcatcaaggttatatttggtcgtcaaatagtactgtacttgattcatatctttcatatttttcactagcgttggcaaccgtaaattgctttcctgactaggaacatattcttcacaagtatggcaactctaaactatttgaccttttatattctcatttttaagtactttctctatttctgctacttttgtactgtgtatttccagcttctccaccagactgattgttagagtgtatgctcctatattatccatgtatgtgtaaaatgggctgctagcccattagggttagggttcccctgggtctatatatgtaaccaccctctatgcaatagaagttgaatatcagtttctatcactaatgattccatattcagtgggctgcaagtgatttgacatacgtgccttatccttcaggtatgtctcatgttgactttgcttttgtaatggtactgttggcttcattgctggaatgctggttataatcaacctttactgctctatattgttctttttttggtttgcacaaccagggtggttggttttctgaatcaatcaatccatttcctcggacacaagataatttttgtatgttacacttcccaaaattgcaattaattcagaagtctgcctactttcattcagttagttctcagcaacactgaaaggatatgaatcagtcaacccgatagatgtttatctggttattccaaacaatctgacatcacatctgtttctgcaggcgagataaggaaaatctgaaatgctatcaccatttaaaacattggctcctggaagttcaggttaggtgttgctgtagaatgagatggttaccatctttacaagctcaggctatatgatttcagcagcactgtaacctggggtgcaaatgttaaggccctgcaagcactttccaggccacaccaattctgcttggttcttgaagatacattcttcctatggtgccccctatataaaagccatttctggttgttatgtttatccttgacatgtcaacagattagtgttgggttgcagtcatgcggtccttaagtctcggagaaggcgagaagtcattgctgctagcattgtgatcgtcggccacgaaagtaatcaaaaagtgagagctacttgttcctagcaaatggagaagggcgatatataggtttatgatcaaattcagtgtatgcaagcagcatattttgtttagagttagcttttgaggttcatcatttcatttcacagctgattctctatgttgtaactccttagtcgtgtagaaattagaatgctatctgcttaatttttagtgaataatttgctagtatattttttaatgtaattgcagtagctctgcctcttcattaaggaattgaccccgttttaaggaaaaaccagtcca

SEQ ID NO: 42950 - DNA, 628 bp, Zea Mays
tgacagaaagagcatcccagagagataagaaatctatcagaactccaactggttctttcagcagcactggcctcactatttcttctaaattaccaagattctcggacatgtacactctcacaatagcaagtgcggatccacagtctatctctgcaaacaagccagttcatttcactaagagcgtaacaaagtggtttacaaaggaaggagttcttgtggagggcctgttctggaaggatgtcgagaagctgattgatgactacaacagtgagcgcaagagtaaatgaattggtagctcgtgtctctggccatctggggagacatcgctgtctagagaaatccgtcaaagtttagcttaatctgaacaggcatttttgctatactgtaccggttgaccagtgaatgaatgatgttctagacattaactttggttccaagctttctgtcgtgtccatggataactatccgtccgaatcctagaaacgtggtccgtgcttgtaacctgtttgttctggtgcttccatacgccggagcagattttgaagagaaatgaaacaaatcgttaaatcacattatttcgttactgcggccacttatgcagggtttaagcgtacttccgaatagctta

SEQ ID NO: 42951 - DNA, 2328 bp, Zea Mays
attacaatgagttgccactagatatacgcgaagcctctcccacctcatctgcctcgcgtgcggcggcggcgactccacctggcttgcgtcctcccgttttccagccagcaagccagactcctcccctctccgaagactccgatcgtccggattcatccagatccgggcgttctgagtcctgccgaggctctagatcgcgtcgcgcacgatgccacgcgacctgtcgcggtcgcggtctccgccgcgccgacgttggcggtcgccgtctcccgcgcggtaccgcggccggagggggcgcagggaccgaagccccagtcccatccgtagcaggtccccctatcgctcctcgtataggtgaccacacctcccgttacacgcagaaatctggcgagtcttcgttttattttttgggggtttgtactgtaaaaaaaagaagtgaggcgatgctgaccgccttcattgaaattttgtactattgcttgcttgatggaaacggggcttggtgctcttatgattatttgatctatcaactgtttgttggtgttactgttagaggtagccagcgcggtagtatattgtgctatgtcatatctgcatgaactatggtttatgaatgtgcaaatttcataatacttcggagcgatcaagatttctgatttccaaaggaagaaaaatgcttcggattcttttgcattacagagttagaataaaaatacttcgatgcagcatggaatatatcagcagatgaagcttagatatagttatgccatgttttgcactacttgcctgtacagactaacaagagttgctttcgtaaaacgcatggaatctacaaagcttttactctgtgctgtattgctgtggaatgctccacccctgtaacagtgtctaaggtaactgcttttgcccatgttttagggcttcaggagctaatgaaggaggagccctttgccttccccaagaaggcacaagagccgttctccgtctcctaggaggcgcaagagtccgtctccatcacaaaagcgttacagaagaaagagaagtccgagtgtcactagctctccagtcgctgcatctcagagttcccaccttgggttggcagagaataagaatgttattgatacacaaaggctagaagaagaaaagaaaagggaacatgcctcagtagaattgatgaaagaaataaaagaagggctttaccgaagggagctactgctatagttccacttgttatatttgatgatgcaattggtgatcatttatctactcttgatcagttttgataattcgtttttggatctggaacgaactagaggtatgcctgaaatgcattagcttgtagtcaactatgctggaaaggcatagtagatcatagatactgtttagattttaaaccatgtgctttgctttttgctgcttttatggtcttgaagagtttgaacaaacaaatatcggctttggtcacgacttgccttaggtagtgcatttcgttaacttgctatatcaactgcaggcgccaaaaggaagttgaactgagactattagagaaggagacggcaaaaagagttgaacaagctattaggaggaaggttgaggagagtctaaattgtgatgaaatcaaacatgaaatacatcgtcgaattgaggaaggacgaaagaggatacatgaggaggtagcaatccagattgagaaggaaaaggatgcagctttaaatgaagccaagctgaaagtggaacaagaaaaaaagaagcgggaggagctagagaaaaaacttgaagaagaacgaaagaaagctgaagaggcgttgatgaaagaagcgttggaacagcagcagaaagagctagagcggtaccaggagttggagaggcttcagaaagaaagagaggaggccatgaaacggaaaaaaatggaggaagagcagcagaggcaaaaccagatgaagctgctgggcaagaacaagtcgcggcctaagctgtcgtttgcttttgggatgaagtagcgttcgattcaccgaacgaaattagtgctttagtatactgtaaccgtgtagtgtagtacctctgtatgaaactgcccatttctaactctggcagacaaattgcgatgtcataaatgctcctgatctgcttcgtaagttgccggctcttggtggatgtggtttcatctgcttcttgctgttcagttggcgttgccttgcgagaagactgccagagaagaatccggttggtttgatcttgcatgtcaccaagatactatctccgtttgtgttgccccctagttcagcctgttcatatttgaactaaaacgtgataaataaaaaaaacgga

SEQ ID NO: 42952 - DNA, 3606 bp, Zea Mays
cgccgccgcctaccccgcgcgacaccaccaatggtgcccttccttccccggcacccgcaacccgccagctccgcgcgagccgccggcgggatacccgcctcccccgcgcccccgccagctccgcgcgaggcgccagctccgcgcgtccgccgcagtgatgccgcgcgatgaaggccgcacgggagagacgctgggaaagccgctccttccggcgttgcagtgggggcgtccacagctgtgccatgcccccgccccgtccgagacgccgaccacgacccaggattctcgcttcccgtccacgtccgtgattttcccagcgaagctgaccacgcctccctgtacgcacctcccgacatcctcgccgacatgctcgcactcctgtccccgtctgagatcctcgcgtcggcgccttcggtggaagtccggaatcgcccggctctcctccaccgcgccgccagcctcactgagaagagttcatctgcctcctcctcaacgcttgaccccaccgccgctggatccaacaccctgccctcgtccttcttctccgacctactcaccagtgacgacgtgggcaccctggccagacgcacgccatggacagcaggtgggcaggaacaccttctacgtggatcctcttctcccgtgctcctcgacgcacgagagcgagctcggactggatcctctcctaccgctccatgcagggagagttctataattattctggtttgtagtccgtgaatttatagtggattgcttgagatactgggtaacaggaatgcatgtttatgattttcgttttgaccttgcattgcatctacaatgaccagaggatgcagtctatggatccagttaatgtgtatggaaatccaatggaaggtgacatgattacaacagggacacctcttgttgtcccaccacttattgacatgattagcaatgacccaatttttgcccattgctgaagatgggatgcaggaggcctctatcaagtaggtcaattacctcattaacagggacacctcttgttgccccaccacttattgatatgattagcaatgacccaattttttgctcattgctgaagcatgggatgcaggaggcctctatcaagtaggtcaatttcctcactagaatgtttggttagagtggaatgtaaaggtctggacactctatgaattcgatgatctcgagagcatcattgataggacactaaagcgcgattttgacaccgaggaagcactctggttgcttaagataggtcttgtgtgcatcccggatagccctaagatcaagccctccatgtcaatggttgccaagatgctgcaaggtgagtgtgctgtgagtgacaggatcatgaggcctggcctgatcacagacgtcatggacctgaaagtcaggatggtagagccgatttagttcagcttgacatcatgctcgagcactgccgcaccggaccttgttggggatttcctcgattaaaatataagctccttgatatggttctgtaacatagttctgcaatgctcctttatttagttctttactttttttgttaagatatgaggtgtagcgatacaatatgtctactaacagcgtttgtgttcttgatagttcatttaggattgaatgaagttactggtatgaccttgtcgagactgaagtaaggagggatagagctaaaaactctcttggcacaactataaagttcaagctatatgggcgtgtttggatggcagcctcccatgcaactgcctggcaggcaaatgatcctagccacaccacaggcataggaaatcgaacggtcggcattgtttcctgggccagctgataaaatccattgaagtgcaagaggccgataaacttaggcgtatagtgctggatgctccatccactgtttgtctcttctcaccacaatatttccaatctgactatgttcttcattttgtccactgacagttatttgactacatgcattttgtatagggacatacacttaagcttctgtcagtttctgattggattgaaatgttccttactttgagcattaaggtgagcgctttaatccatatagtgaactaacctgttttttaagtttttaactctgctaccttcatggatttcatttgcatgaatatatgtttaagcttgatacttttttttcgttatgatattagctgatgtggattatgattataaattattgagatatagtggtgaggacaagtggtatcactaacgtgattagggagtttctacaatcatgtgcttgagatactgtcagtgcaaaaattgttgcatggtttcaatttggagttttggacagtgcacctctttgagaccgtagactgtaacaccaaactgtttgtctaggttcccctgttttgagtccttttgacgttgtgttatggagtttatgtgtttaattgtgcttcattgaatccttttatccgcatgcttgagggcagtaaattctatgcagaatgtgctcatggagtcaaaatcacaacgcacttcaatatagcattttgtagtatactacttctaattctaccatttcttgctttgctgtttctaattgctcgcttgcatgcttgactagctgcattccaaattgtgttatgtttcctgggatagtgaattccaaattgtgttatgtttgctgcatatatgatacaagtattgattttttaacaatgctaggacacatgaggtgtagctattgggcctctaacttggttatcatggttttgggccgtgggtagagcaggcaatgcaagtgcagtctggcacaatcctggtggtttggcattgagttatgttttcttttacttgataaaacaatcttgttccatcacttagtcaatagctcaatatgtccaccagttctgatgatccatgtctgcgcagtgtttcttttcacagtttgcgcttgcgaacatccgaaccccgttttcatcttgaattcaacttatgatgtatatcggacagttccaccacattctggcgccgccttcgtctgatcctggaggcaattggagccgctgcaagtcggatcctggtggatgcagcgcaacacagatcgcaaccctccaaggactgagaagtggaatgttgacatctctgagacagtctgaaagcaaaccgaaggcaggggtgttcatcaactcctgcttcgcgcattgctagagtgagctacaggacacatggttcgcaccaaattctccatccatatataacaagaaaattgcagaggtggtaggtgattggtactttgaaagaggagctgacgtggagattgactgcgcctatccctgtgattcacagtcttgtcgcaaccttataccaattgataaggctgaccatcctagattaaacttcaaagaccggtaccctgagccatacagagattctcatccgactgcccccgttgctgtgcatggatgtcaggtgtcattactgtaatgtagtggtgaaataggtagattaaaacaatgaaatttatatgtggctaggatcataaatgaattgcaaaattttttctcagaacagtataacacatatttgtacataagttgttgtgttattatatgtttccgttgcaacgca

SEQ ID NO: 42953 - DNA, 1652 bp, Zea Mays
gcagcatctccaacgccacgaatggtggcaaaaataattatatataaaataaaagatgataaaatgaagaacggctagcaggtatggcacggtgaaaagattcctgctgccacctatttaagggcctccccacacgctcatcagtcatcacccactacctccattccggtgcgccatcgctctcgtcctcgccgatcgatccaagagactgggaccttcaaagagcaataggactcatggaggttggagacgcaagaaacggttctgcagcagcggcactgacaaagggaggtgcggatgatgccgcccgcaaaccgctccctccttgctgcgtcaaggccaaggcgcgggtgcctgaaaccgaggccaactgccatgatactgtggtttcagggtggttcacggaacccagatcgcgttttggtaaaacaagcaaagtgcagtacttcaataacccgatgtggcctggagaggcccattcattgaaagtggagaagatcttgtttcaagggaaatcgccttaccaagaaattttagtttttgagtcttcaacctatggaaatgttcttgtgcttgatggtatagttcagttgactgacaaggatgaatgcgcataccaggaaatggttactcaccttccactgtgctcaattcctgcaccgaagaatgttttggttgttggaggtggtgatggtggtgtactgcgcgaaatagccagacatgattcagtggaaactattgatatatgtgagattgatcaactagttattgatgtttccaaagaattctttccaaacttatccattggattcaaagatcctcgtgtccgacttcatgttggtgatgctgttgatttcctgaggaattctcccgaaggaaaatatgatgctattattgtagattcatcagatccaattgggccagcacaggcactcgtggagaaaccgtttattcagacaattgctagagctttgaagcctggtggtgttctttgtaatcttgctgagagcatgtggctgcacacacatctaatccaggatatgcttgctatctgtcgacagacattcaaaggtgctgtgcactatgcctggacaagtgttccaacatatcccagtggtgtcattggatttttgctatgtgcaaaagaaggtcgtgcagtgaacttcttgactcctgcgaatccaattgagaaaatagaaggagcagcaaaagctggaagggaactcagattttacaattccgagatccatagggctgcttttgttctgccaacatttgtaagaagagaactggaagcatataccactcctattagttctgctgaaaacgagaaaccgaaagaatcagtgtcagaaccgcagaagataaagatattgtcaaacaacgccattcttacagcttcctagccctgagccgtactcaatcttgctcgatgcgaccgggatgtgtctgttcttttgatagcttaacacagctgggttggaattggacgctccagcaagcagagcgttgcatagcagaaaagttgaacactattgcctccagaagaagccgcccgtctgccatgcggcttcctcctccctcgagcatcatcgcgcatcgcggcacgcggcccatccatggagctcctccagccatgccgacgagctaca

SEQ ID NO: 42954 - DNA, 1792 bp, Zea Mays
taccccggaggccggaacaaaacacggagtggccgcgccccgcgcccgcgcggaatcggacgagccacggtctaccagcacagcgctatacaccgccggccttcttggcttccttctaccgattccgtgtgctgttcgctgtcgcctattgcgcttgcgcctacttggtaactacagcgtcggccgccatcccccgcagcagccgttttctagctgcttcccgctggttcgcggccgccgtcctgggcgtctgagcgaggggtaaccctgcccttttgttcctgggctattcctcagctcgcgccgctgtcgcctcaccccccaatccaatcctccgcgatcgatcggcgggcgcggatggaggcgctgaagaagcaggccagcaagctccgcgagcacgtcgccaagcagcagcaggcggtcctcaagcagttcagtacgcggtatagtcaagatccttctcttgttgatgaagcggagcttgagtgccaccagaatctccaaaggctttacagtactacaagagcagctaagcggaatattgtacgaggggtggaaggtttcattgcagttagcaccaaacagatggagattgtgaaaaaactagccggggattgttgtaaatatggagacgacaatcagcattttggttttgctcttgcaagggcgtctgaggagttcggtaaatctcataaacaaatagagaaagagcgggaggatcttcttaaaattcttggagagcagatttttgagcctctccgagaaatgataatgagtgctcctcttgaagatgctcgattgctaacttaccgttatcaacggatcagacaggacatggagtctcagatagctgatgtgatgagaaagcaacttaaatccaaggaaagtagtggtaacacagataactctgtgaaactgcaacatgcagaatcgaaattatcagatcttcgaactacactggcagcgttaggaagagaagcaactgcagctatggaggctgtagaggctcagcaacagcaagttacgtacgaacgtctccttgcaatggttgatgctgagaggacatatcatcaaaatgctgctgatattctgaataaactccatgatgagatgctctatgcaaagcatcataatgagtcagcaaaccactacgatgaacagtcttcagagcctgaatcagatgcaggcccagcacaagtgcactcacgtagcacatctgaagatccagtattgactaaacctagcgaatccacagggaacagtcaggaggtgcaatttctgggggaggttattcatccattcgatgctcaggctgatggtgagctcagtctcgcggtgggtgaatacgttgtggtccgccaggtggctgcaaatggttggtctgaaggtgaatgcaagggaaaggctggctggttcccatctgcctacgtagagcagagggacagagccccggcaagcaaggtgatagagcctggacttctgactacctgatccatcccgtagttatggctgctgacttgctgtcatggtcctttttttttctacattattgtacatgacatgccccatgagtgattagcgtatggcagaaccttcaccttttctgtgcagattattgttcttctagccttttcgttggtcggtaactgtatgtaaaatgtagttctgtctgttaggatttccttccggtattataacattgtacagagctattggtgatgagatgctgtcagcttgccctttcttttcggacagtgtgcttcctgacagatttatgctaactaatggtttc

SEQ ID NO: 42955 - DNA, 1765 bp, Zea Mays
ggaccacctgttctagttctagtgatcagaggggagggaaggggaggtgaacggagggagcggaggaagatctcgggctctcagagctgcatcctgaacccatcgcgtaggaaggggcaaaggagtcggagctgatccggcagtcgctctctctcggattgagtacgatttgacgcatttgcggccgagctttcttgcacccaagatgagtgggcatggtgacactgcgacctcagctaagatggcgaaactgaaggagttgttgcaaaagagtgaaaaccacatttgtgctgactgtggtgcatctgatcccaaatgggcatcagctaatattggggtattcatttgcgtaaaatgttctggcgtccatagaagtctcggtacacatatttcaaaggtttttgtagtcacacactaaaaccagaaattaccttacatgtttctttctttctatttttctttcctttttttgtttgtttttagagtttattactgtctgctagcaatgataccatctttgcaggtagcaatacaacatgcaaaatgcaattgtttgttagtctgcagtattactccatggtaatatcgtccttaatacatataatgaacctaatgtttatctgacacaggttctgtcagtgacactggacaagtggtctgacagtgaagttgactccatgatagaagttggtgggaattctcaggcaaacgcaatatatgaggcttttataccagagggctaccagaagccacattcagattctacccaggaagagcgagaaaaattcatcaggtctaaatatgagctgcaggaatttctgaagccaagcttgcgcattgtttctcatcagcctagtgactctggaaaacatgccggaaatgcttctcattctgatggttccaagagtcaagtcggcatgatcgagttcattggaatattgaatgtcaaggtgattggaggcaccaacctagccatcagggatatgtcaagcagtgacccttatgtcgtcctgacacttgggcaacagaaagcacaaacttcagtaatcaatggcaacctgaatcctgtctggaatgaagaactgaagctctctgttccccagcaatatggacctctgaagctgcaagtgttcgatcatgacatggtgtccaaggacgacctcatgggtgaggccgagatcgacctgcagacaatgatcaacgctgccgcagcatttggcgacccggagctgctgggcgacattcagatcggccggtggctcaagtccgaggataacgctctcgtcagggacagcgccgtggtggtctctggtggcaaggtgaagcaagggatggcactgaagctgcagcacaccgagtccggcgagctggagttggagatggagtggatgccgcttaacgtgtagaaatctgctcaagttgccacctttataatgggtgtgggatacaaagaatttgttttgcttttgttgccaagagaaattgttatattttggtaattggcaagggctctcttcaaaataaagatctgaatcgctaaaaggtgtgttgtggatactaaaatttgagagatgattcacaagaaactcctttttttctaatctaaattcaaggttcaccatgcagtttataacaatcaatgtcctctcgatttgttgatatcaatgtccattacatgcaaaacgacgcaaaatagaattgtgggtttgttttgctatcttgcgggtaaaattttttgccacagtaaatggtgtgcattatctgt

SEQ ID NO: 42956 - DNA, 3268 bp, Zea Mays
gaaaaagtacttaacttgtgaagtaaaagtttggcataaggatatactagtgtaggatcccaaggccgctcataaccgtgagcacggctgatataccagtttctaacactctacagaggttgcacactttatcgaaaagccatgattcccattctgcccggggttctagcctcccccattgatcactaccaaggtgacccagcagggtctcactatgtagcctttacaaagatttcccagaggtcatagccgcccgttaggtttctccagtttgataaacacagtacatctccccaaaggaaggtgactaacaaaaccaagttaaagaacctctgcaaccagcctcggcagagcaagtactgtgcctggaccccattgacggccctacgacgaagccaactactcatctgattcctctaattactcagctaagggcgtcccattccaccctcatggttgcactgttatcccgagttgtcactccccaaataggtccttacggagaggtactctggaaacagcctgagccccctaaagtaaacacaagaacctcatcgggataacatcatcatatcataaataatcacatcatgttcattgattaagttaaagcaatagcataagctaaccatgattaacccaaaaggtaaacaagggtaaggtaaatacagactagtcaatccttaagtttcaataatgtaatgcacaacagtgaattataaagtaaagtaggacatgataggtctgaggacacttgccttcaccaggttgttgctcagagggatcttcggcaacacactcaagaactacgagttgctcgttgtctaaataaagcgagcatacattcaatacatttggaaagtaaaaatgaatatcacatcaaacatgtacaaacattggaatcacaactcaaaagaggtagtactaaataaggagaataagattaagttataaaatggactaatcttaattggggattgattactctctatgtgttggaacatagctcaaaaagtaaagtagtgattaaacaaagaaaagattaaattctaagatgaactactctcatctaggaatttaatgatcctttaagtgttatccataattacataacctaattctattcatttcattaagacctaaaggttaaaccaaaaataaattcatgtaatgcatatcactaatctcacaatattaaatatactttaactccgaggattctccttttatttatttcattaaataaataaatcaacatatgctttaatcctatattctaagtgtaaaattaaagtgtatagactacagttggtcatattttattcgaacaaagaataattttatgaacattttgcaatttgaaccactaaatttggagttcatatgaaaaagatatgaaataaacaagttttgaagtttgaaatatgaatttagggctaaatctatgattaaataaaaatatagggggatatccaaaagaaaccaggggcctgcgcgctaaaacagaggacagcgggttgatttcctaaaactagggggctcttaagcaaaactcacacgcgaaggggtacagggtaacctcggccatcagatcagagatcagcggcccagattagatcgtgcaggcgcgcgcggacgcggctgacaagcggggctagggcatcagtgggtcagggcgggctgaccaacttggcccagaggtagagatgcgggggagggggaagagagagaggcggttggatctagatcggagggctgggattagatctgctctggttatatctaaaccgcccgatctcggacggacgcccgagatctaacggccgggggcgaacatgggcgcggttgcgccgctcggtcccacggcgagggctcgccggagacgaggaggctggctacggtggggctcctggggcttggggactagcctgggcacgatcagggcgatctggcgggtttagccatggccttcacgctggtgcaggggcaccagagagcgcagaccacggcggggcaggctaacggcggcgcgggattgctccggcgagcaatcgcgggagaaacagagcggggatgaccaaattaaaggtacgggcgggttgctcaccttgaggggaagcactggagtcacaaagcaacgatggaggcgcaaggaagcgacgaggcgacggtggcggggctctggctgcgcgaagattgctccggtgagcgcagactggacaaaacagagaaagagagggcacaccgaagggtgtctcgagcagctgacagtaaggcggagctcaccgtggcacgggacagggcgcggacgcgacggtggccgcagaacaggcagcggtcgacggcagcgggtggcggagctcttgtcgcgcgcacagagcgagagagagggcgagaggatttggcagagggcgcaaatgagcgaggagaggtgggtgagtagggcgcgaggctcaaaaggggagcgagtgtgcggacgtggccggagaacgcgcggacgtgggagcgtccacgacggggagatcgtgggtgagaggttagggacgactgacaggtggggacggcgggacagagagagagagagcgtgggggaaaacgaacggtgccgacagctcggccccacagagaagcgagagggagagggggagtgagcgcgctcgggttggcgccgacaggcggggcccgcttgtcaggcaccgaatgcgcgcgggctgggcttagtgggccggtttgggctgaaataggttttcctttatccagggattttctaatttcttttctatttattttctctagggttttcaattcaaattcaactcaagtttcaaattcaaaccaaatcaaatatatgcaacaattcaaagaatatttaggctcaatatgatgcaacattccatgactcatgttttgggcaaaataaaataaataatcctccactaattcaactaaccctaattaaaagaaaaagagagggagaaaactagagagagagagaaactaaagtgagatagagaagagtaactcctgaatttggatgatcataagaaagaaattttatacccccaaattcaaggtgttacaacatatatatatatatattactatttgtaagatctaaatgttactttagttagtaaatggtatgatactattttaggaggaataataaggtcttattgaccccgtgtgttgctaataaattatgcatcatgctgagatttttgtttgtgcatatgtgttgagacaatatgagtatacacccttttct

SEQ ID NO: 42957 - DNA, 1376 bp, Zea Mays
atacgactgggtcgctttgacttacgtaggacactcccgactctagcctcctgcggcttccgcatcctccgcttcgtgtcgtctgccctgctgcccaagcctccggaggttctagcggagccggctcactctcgcgacaccgccgcggcctccggctatatatggacggcgaggaggcgccccttggcgcgctcaacctggctgagtacgcccccgccggcgcccgcaccgtcgactgctacaggcgcatccgcaagatcggcgagggcacctacggtgaggtgtttgaagctgtggatattattactggggaaagagcagcacttaagaaaataaaactggatgatggcaaagaaggggttctgcacatggaacaggcggatcagatgatcacatctataggggagatatctacatggtgtttgaatacatggaccatgatttgaagaaagtattgcaccatagtgccccatcccaagtcaaggtttatatggggcagctgctaaaaggattgcagtactgccatgccaacaatgtacttcatcgggatatcaaaggggctaatcttctaataactggtggtaagttgttaaaactcgcagattttggccttgcaaggctgttcactagagacggaactttaacaaatcatgtcatcactttatggtaccgaccccctgagttgcttcttggtgccacaagttatgctgaacctgtggatatttggtctgtcggttgcatatttgcagaatttttacttaagaaaccattatttcctggcagaactgagcaagagcagttatcaaaaatatttgaactgtgtggatctccaaacgaggaaagctggccaggtgtttccaagctaccattgtataagacaatgactatccgtcctgcgactcctaccaaacgaagcctgagagatattttgcagaactttgactgtcctgcagttgaattaattgaacggatgttgatccttaatccttcacagaggatttctgcacaagatgctcttggtgcggcatacttcatcaactaaactcatatgggggtgtggggtgtgtgtgtgtgttgggggggggggggggggtatagattcgctgttcttttcgagtgcgactaagttttgtttaccttgtcaggatgggtctagggatctctaattggtgtaagtactacctgaagactgaaagtcttgtttctcctgctgacattggatttaggactagcaagcagtttaactttctctgttctagctttaaacataatatatatagatgcattgtacattattactcatggggaaaaatgtatttgattattaattaatagcaagtgattcttggtatattttcatatgatagcgtttcata

SEQ ID NO: 42958 - DNA, 510 bp, Zea Mays
cttggttcagtggagctttcccttgccctagagttctagccagtgtttctcacgagatcgaggtagttcctgtgttcaaaccagtgttagctcctcttcttagtcaccaggttgatctgccttggtgctgcgcacgccaaccctattgtctggtgaccacacccactgaaacccccacctcgccgtggccaaagcgttccagagagttgcatgtccgtatggtcttcgttctgtggtcttcaaaggtcagtgaagctctcaagactcgatgttcgaactctactcgccgtcatggattagcactggggacagcctctgcgctgaccgtccaacccgtgtcatccctgctcgatttcacgagagcaccgtaatcatgaacaccaagaacaagaattggtccttgtgaatatggaacctactccagtgttattgatccagtggtggactccatctaactgcctatcgtgatagaagatctcagatctcctcctgtaataaggcaagtcccgg

SEQ ID NO: 42959 - DNA, 2789 bp, Zea Mays
cctgggcaggtagctgaacggctgaaccagtggtggatgctgggtctgtggttggggaatttgtgttgtgtggatgggaggattttgaggtgcaccagctcacagtcgtcggtctgtcaggtgtttgtaggatctcctaggtgagcccctgctgcttggagacagccatggccaccggcgtggctccagctcctctcccacatgtcagagtgcatcatgggggcgtcgggttcaccaggagcgtcgattttgcgaaggtcttgtctgctcccggtgccggcacgatgagggcaagctcctctagaggcagggcgctcgtggcgaagagctctagtactggctcggagaccatggagctcgagccatcttcagaaggaagcccacttttagtacccaggcagaagtactgtgaatcaacacaccagacaaggaggaggaaaactcgaactgtgatggtggggaatgtgccacttggcagtgatcatcccataaggattcaaaccatgacgacttcagataccaaggatgttgcaaaaacagtagaggaggtgatgaggatagcagataaaggagctgatcttgttagaataacagtccagggtaggaaggaagctgatgcctgctttgagatcaagaacactctggttcagaagaattacaacattccactagtggccgatattcattttgctcctacggtagccctaagggtggcagaatgttttgacaaaattcgtgtgaacccaggaaattttgctgatcgtcgtgctcaatttgaaaagctggaatatactgacgacgactaccaaaaagagctagagcatattgagaaggtgttttctccattagttgagaaatgcaagcagtatggaagagcaatgcgaataggaacaaatcatggttgagtctgctttggaatttgctagaatatgtcggaagttggacttccacaactttgtattttcgatgaaagctagtaaccctgttatcatggtccaagcatatcgcctgcttgtggcagaaatgtataacctaggatgggattatcccttgcacttgggtgttacagaagctggagagggtgaagatggaaggatgaaatctgctattggcattgggacactgctaatggatggtttgggtgatacaatccgtgtctccctcacagaaccaccagaagaagagattgatccttgccaaaggttggcaaatcttgggacgcaggccgcaaaccttcaaattggggtggccccatttgaagaaaagcacaggcgttattttgatttccagcgtaggagtggtcaattgcctttgcagaaggagggtgaggaagttgactacagaaatgtcctgcatcgtgatggttctgtactgatgtcagtttccctggatcagttgaaggctcctgatctcctttataggtctcttgcagcaaagcttgtggttggcatgcctttcaaggatctggctactgtagattccattcttttgagggagctcccccctgtagaagatgctgaagctaggcttgcactcaaaagattagttgacatcagcatgggcgtactggcccccttatcggagcagttgacaaagccactcccacatgcaattgtacttgtcaacctcgacgaattgtcaagtggtgcacacaaacttttgccagaaggcactagactagctgtcactcttcgtggtgatgaatcatacgagcagctagatattcttaaggatgttgatgatataacaatgttgttacataatgttccatatggtgaggagaagacaggcagggtgcatgctgctaggaggttatttgagtacttacaggccaatggcttgaacttccctgtaattcatcacataaatttccctgaaaccattgacagagatggtcttgtcattggtgctggggccaacgttggtgctctcttagtcgatggtcttggtgatggtgtattccttgaagctgctgaccaggaatttgagtttctgagggacacatctttcaacttgctccaaggttgcaggatgcgcaacacaaaaactgaatatgtgtcttgtccttcctgcggccgaacactctttgaccttcaggaaatcagcgctgagattagagaaaagacctctcatctgccaggtgtctcgatcgctatcatgggctgtattgtcaatggaccaggagagatggctgatgccgattttgggtacgttggaggcgctcccggaaagatcgacctttacgtcggcaagaccgttgtgcagcgcgccatcgccatggaaggtgccactgacgccttgatccagctgatcaaggaccatggccgatgggtggatcctcctgccgaggagtagggctgtaggctgtagccaagtctgtagtttatatattctgtaaagcgaaacacgcaatgcagtaactgagcatacgatgtacatccctacacattttgtacatttattgagatctgagaaataaactagaaaccgtcggtgacggcatgtctgcagcaccccaaatgaagcacatacgatttacatattagtagtagcccatgtgagcaagacataatcctatacaatcttgaagtctgcattatatattttttccaacagaggtagcttagaaagtttttcgagcaatgcaattttgttcgttactttccgtttactttttcttttttttagcgttgagggttatataaatagatttataatacaaagagaaaaacggtcgtgattacacaacaccaaaatttttattgtggtcttgagagtttgtgatgatc

SEQ ID NO: 42960 - DNA, 350 bp, Zea Mays
gatttttatggctttcataccttcatacattttcctggtaaaatatatgaattgaacatataaacgcggcatatatagctaacaactgtgcctggcaattcatgcatgacaaacaactttgcatacgctataacccaaacaactactgatgtggactaatttattgtactgtacttctataaaggatgaaatcatgtctgcaatcgagaaacacataactgcttggacatttttttctaggaggtaatttgcattgggtctttgcctcatgtagctagatagatatcctttgcctgcaagtatagatatgaaagtatgtatatgaaattttctgtcctgacattagaatg

SEQ ID NO: 42961 - DNA, 2215 bp, Zea Mays
tccttcctctcttttcttccttccacatcccttagtttacacaagcatcgcagataatggagctgaacactagaagcagcaagggcaaggccaaaaccatggccaagatcctggaggaggaggaggaggaagaggaagcggaagatgacgacgacttcttcagctcaagcggctgcgggtgcttcctttgcgccatcaaagagccggacgcccggctccgtcgagccagtctctccgccttcttcagggaactaccgtactgtgaggatgacggcggcagtaatggccaatcatgtgccgcggcggttggcgcggtgtggcgggcggccatgtccgcgccagatgaccccgaactcccctcgctcggcgcgatccggtgcatgtcccttctcctcgcccgcgcgctcgccgacgcggcgtggctccgtcgcggcgacaacgtgtacgtgccgtactacgccgcccatgtcatcggctcgtacaccatccgctcctccgcgcacgccgagctggccgtcgcggctggggccgtgcgcccgctgctggctctactcggcggcgccatgacgtgggtcgagcagcgcgcggccgcgcgagccctgggccatctcgccagctacgagtccacgttcccggccgtcgcgcgtcacgccgctgaggcggtgcagctcgccgtgcgttccgcgtccacttgcatccgcgacgtctatgccaactttgtcgcgctggcaccgagcaggaggccaaagtaccagagggacctcatgacgtgcgggctcggcggcggcgccgacgccgaggacaggaaggcggaggagtgggcgagccagctccagtgctggtcgctctacctactgagctgcctcgcgtccagggacctgtcatctcatgccatgatatgccaagactccttgttcttgaacgagctgtcccggatgtggggtggactggcgaacggcgactcgcccgccggcgtcgggctgctgcgccttctctgtaggagcccagtcggccgcgccgccatcgcggcgtgccgtgatgcactctccagtctctgtgacctcgcgcgttcgtccgatgactggcagtacatggccgtggattgcttgctcctcctcctcgacgaccgcgccgcatggcacgcagttgctgatgccacagcgccgtggctctctgacttggtcgatctccggcatctcggtccaaggcgacgactcggcgatgccattgcaactgcacttctccttgatgacgtccatgtcgtcagtgaccgtaaactaggtggggaggcaaaaagggcgatcgccagcgtgagagagctgaagggtgagaggaaggagagagaggaagcaatgcctagggatgagttgctgaagagagaaatcttagccaaggagaagaagaggcaaggcaacgacagcttcttgcaaggcgacgtggacaaggccactgatcattattccgaagctttggagctgtgccccctgagcaggaggagggagcggctggtgctgcacagcaaccgcgcgcagtgccggctcgcccggcgcgaggctgacgcggcggtgagcgacgcgacacgcgcgctggcgctggcgcggccggcgaacgcgcatgccaggagcctgtggcgccgcgcgcaggcgtacgacatgaagggcatggccagggagagcctcctggactgtctggccttcgccggagcatggctcgacggccggaggcaccctcggcgggcggcgcgcggtgcgaaccccaagctgccgtactgcgtcgctcggatgatcagcaagcagatgagcgtgacgggtctgttcgccggcgtgacgatgaaggacaacaaggttgggagtgatgattgcatgccatggtgcagcgaaaacgacagggacaatgaggacggcgaagatgatccggatgatgacgatgaaagcgaggaggaaattgctgataatgctggtttgaagatgtgcacgtcagagagctgccaatcatcacgggagatgcttggacgaggttgtcccggaggacgtaaaagcgcattctgtttgttatctatgatccaccgtcgtaagctagctagctagctagtccactgataaatgcagcgagaaactagagcttcaccgcgatttgtcagatagagtctctgatcagtgcaaatgcgatcgcttaatgttttgtgcggattgtcgcttctgtttctgtatttgca

SEQ ID NO: 42962 - DNA, 743 bp, Zea Mays
gcccgattcgtcaggcagcctctgcgcctcgatcatcaaggaagggtcagcctcgccttggcggagcccgaccctccctcgggggctaaaaagggggaacccctctgcgtcaagatctttttaaatcaaaaaaggggcctcttgcgttctcccagctacgttcttccggctatgtcagaagccgggtctcgaggagcgaacgcgggtacatgaaaatggcaaggccgattgagccgaggaactctcgtacctccgggttagggatacctcactcatcacctgccacgaacaatggcccaactcgagaagccaccctattattgacgagctaggacgaacatgcagatggaaagaaaggagagtacggccccatgcaagaaagacaaaagtgttcaggcctcagcggccgtggtgagacgcacattcaataagaaactattcaaacgagaatcaggcgccgccttgggaaggagtcgcgccttcagctccacccccaccatcggtggggtccatctcggcctccggtgacgtcgcaggaggaaggacctccgcctcaaaggtggtcgccatcaccgcgctcggacccgcggcgaccgcgtcaagccgctgcacctccgccagagcagcatcgtctttgtcaggaagacagtacccctcactaacccgctccaggtccacaacgtagtgagaagcgagcacggcgaaggcctgcctgacgccgtggtgtagcgcttcgcggactc

SEQ ID NO: 42963 - DNA, 2500 bp, Zea Mays
catcctcctagtttttttcttttctatttttcagctaaccttatcttcttcccgcgtcctttccagcctcccgtcccgtgtggcgtctggcgtgtgcgcacgcacctccccaggccccagtgccaccttccctcctcggctcgacccgcccggcgctccgccgcagctggctcatcccaatcccctcgtacagtcgtgctccgcgcccgcttcaccgcctgaacaaagatggaggccttcctagccggcctcttcagggcgcctccacgggccgtccccgcccctcggggcacgcctctccccagccttcctctcttctacggcaggcgccgcaggaggccgtcctcctccgtggtctgcatggcggagccctatctgattgccaagctggactctgcggagaaggcctggaaagaaatgtcggttaggttggcagatcctgacattgtctcggatccaagcgaataccaaaaaatcgcgcagtctgtttctgaactggatcaggcaattcaaggattgtgagaggcaacttgaagcgacaaaagctctggaaaaagagaacgaaggtgaccccgatatgttagagatgatagcttctgagttggaggctctatctaaccagctcgcagagcttgaagaaaaaatgaagtttctactgcttcccagcgatcctctagattcacgcaacatcttacttgaagtaagagcaggtgctggtggtgatgaagctgggatttgggctggtgaccttgttcgcatgtaccagagatactgtgagcgcaacaattggaagtttaagccagtttcttgctcagaagcagaaatgggtgggtacaagacatacgtgatggaggtcaaggggaaacaagtctatagtaaactgaagtttgagtcaggtgtacaccgtgttcagcgtgttcccttgacagaggctatgggtcgtgttcatacgtcaacagcaactgtagctattatgccagaggctgatgaagttgatgtggttattgatccgaaagatattgagcttaaaacagcaagatctggtggagctggagaatgttaacaaggtggagacggctgttgatcttattcacaagccgacaggaatacggatattctgtacggaagagagatcacagctacagaacagagagcgggcatttcaattgttgagagcaaaactttacgagataaaattaagggagcaacaagaatcattaagaaaccagaggaaattgcaggtacgttgtcaattcttcttaaaaagatcgtatcttccgaaggtcgtagctgttgagtccaactgaaatcaacaaaaaaaaactgtcttgtagatgataaatgctcaaattgaacagagtagcagtgtggtagacattttcgagaacagtattagtataatatccagatgaaattggcagaaatttaaaccatgacaagacaaccaaatctattgccttcagtttgtgtaggaaatagagttggcccttatgaaagattttgtaagagcatctccaacaagagccctaaatgggtcttatttaaaatatagggccctaccctaacaccataaaacaggttccaacgtgggacctattttacaaaaaatcatcaaacgattatagggttcggtctctcggattctaaatgtagtatcccatatacttgagccctatcctcattttgtacattatttctaaccttttatttcttaaataacatgatttatttcctaataatatgatataggctcaattgttggagccgcaaacatttttatggccctaaacactttaaatgaggtcctattttaattttgaggacccaaatataggacttcttgttggagatgctctaaaccgctttgtcaatgttactaatacctgttcaactgaaggttggtactggtgcccgatccgagaagataaggacgtacaactacaaggataacagagtgacagaccatcgcttaaagatgaactttgagctgacaagcttccttttaggagacatcgaatcggctattcagtcttgtgctacgatggagcagcaggagctgttggaggaaatggccagttccgtgggcgcagtaaacgtatgattcaggcaaattcggcgttgaggccaggccatcaaactgaaccgcgaaactcatgacgtgctcggactcggtgaagatgattgatagctgtacatgaagaaaactgacaagatgaactccccccataggaactttttccccccctgtagtccgcagggtacaacacacacccacccatgcatctcagcttccttgacggcagcagagttactagtagaaaatatacatggtttgtgcagttcaacgcttcaactgctccagtattcacagtttaatgcattttaggtatgttgctccagtttctcaacaattcactgcttgcaattaaatctacagagcaaagttctcagctagctacatttgaaccaatcaatcaaccacttttctttttgaaacgag

SEQ ID NO: 42964 - DNA, 652 bp, Zea Mays
gtggtctaagcttttgacatttgcttgattatcattctatacgacagaggaagaattcaaagatattttttcaccatttggcaccgtagaggaagctcgacttatgagagaccaccaaactggaaggatgaagggatttggttttgtcaaatattcatcgcaagcagaggcagagaaagctgtcaaggcaatggatggcaagattctacgtggaagattgatctttgtggagatggcaaaaggacacgaaagcaagtaggacaccctccccacgagaggatttcactgaacatgaaacatgagagcgccatcagcttatgccagatggcaaatatcccaaattctcaattgatgttgcaacttatatacaaagcacaagttaattttagctagcttatctttgataacactgctaccttgccatctgaaaggttgccgtgcattggtatccgttgacctgtgtaagaaatgttggcagctctgtgccctacgaactagcctggttgattaaccaagatctgttcaaaattaaagccagtaaaacatgaatattgttaaagatttcagcaatgaatcgttgagaaaagattgataaagacgttctaattataatatactcgttagcctttaacgagtgggtctagttagcctt

SEQ ID NO: 42965 - DNA, 2655 bp, Zea Mays
atggaggtgagagtgtgggcactgaagaggggtgcaaagtatcgcatgaagctgaagccgaaagccgagctagaagctgaagcattacacaaaatcagaagtgctggtccgagaaaccgcaatacaatttctcaagctgagactggaagtgcaaaacagagaaaaaggagttgggattttaaaaatcatgagcgtgttgctttcatggcatgaccacacgagggagctgcaacggtaccaaccaagaagggaaaggtgcagacgagggggaacctaagctagaaaccaatagtggcaattattgttcggaggccatcgccgctggtgggcggtggcttccccttcccctgtattagcagcgaggaggcagcagctgaagctctcgtctctgcctctccggacctccggtgaactccaacagagaccacctcctccatccgtcggtcatccatctgtgattccttttgcgtgtgcaagttgttaaatcggcacacggcctccgcttttggagtggagaggggcatatacggtttactggtgcgcccggggccgccgcttttcccgctggcctctccccggccgtcccattggagcgcgcaaagctgggcggcaccatttaaagaagcaaactgcactccaccattagcagcaccaaggcaccaccaccaagcgcaccgccacgccacacgatctataacgcgcaggcaggcgaggatcagaccggccggagcttgccttctccgttggggttcctgcttgccgcggcgcgagaacagatatattggatcggatttgtgccgggttcttggagcagtaggcaccaaactggtccaggttgggcaaaaatgcagtttaaccagtagctaacggagctctctcatcttgtactgtggcatttcttaagttgtctggaagctgaatctccaaggctggaagatccaacatctgttcttgaaaatttactgtacctgcaaatggcagacgatcctaacatgaattttggggcattctcccagtcactctgcaaccagcatgtagtttcatttcagacaagcgtagccactagcggctcaggaggcatgccaacatacctggattgttccactgggatggatgccagcgtggggatgctgaccacaccttcagtggttgtttccactggttcatctaatatgccagcagattccgggcagagcctcaaatatggagggccactggctgcggattggacacaggtcgagcttgaaattctgagagatggcatggagaaatatgttcatgaacaaggcatcatgaagtatataaagatagcagcatcgttaccgaacaagacagtaagagatgtcgcaatgaggtgccagtgggtagggaagaaagtaaatacaagacgaaggaaaccccaagaacaccatactgggagaaatacaaaagaaagaaaggataaatttgtagagcctgcgctgtggggaacaaatcatcctcttcaaacaggcatgacagcctcttcatttgtgccgcataatggccaaaacgctatgtttatatctggaggatatataaatactgctgccaatactagagtgactgaactacttcattttattaatgactccattgccaagtttatcgcaggtaggcaccccaccggagcttgatatttaatatataatcataatgcatctgtttttacttcctcagagatagatcgtccagtgctgcatctgctggaggaaaataataggcttcttaatcaaatcgaaacaaatattcagagatttcagcctcataacaacatcgatctcttccatcgggcaagaaggaacattaatgatcttgtacaaatcacgacccaactgcctgggctgaggaccaagatgcctccacttactgtggcaatagatgaaaatcttgctagcttcgtgcttcctggcattacaatggatcaagttcttggaagcaacgatttgaaggaggagccaagaggatggtagatccactgccagcatgtttcagtttattggtagatggatggaccatatggagaactactgcttcattttgcacaccaagtggcggtgaatagggtcaccattcaccaaggaccccctgctttctctatctgaaagcgaaaggagaggtggatgaaaccgttcagctgccctgcagctacccttagacgttggtggctacacagcgagggttttaggaactgcagtttttgtggccttgctgcacctgtaaaaaactgtgattctttctggtttccccttcagacagtagggtaaatagatgtagcggaggaagctcacaagaactagctaaatagttctctctagaagaaaaaaaatgtcgctacatagcaagaaggatcctttttgcctgtcgccatttgctgctagttcttccttcatgtgaacgtgatctaagttcctagttctctcttatccgtgctccgcctttgtatccacgaactggaaatatagatttctgagtatcctacgtgatcttggagaaaatctcgtcgagagcggagacgatgttgccgtagtgctcctgcacctggagcgcgtccttgtctctggcggcgtaatccagctgcggtcaagagcagaacacacgatgagcgttgagcaagcgcactatgccattgcccac

SEQ ID NO: 42966 - DNA, 1196 bp, Zea Mays
ttttagtgtcacatacttgataagttgtttgtgttgcatacctgaatgaccaggaaaaaaggtcagagagtaaatcgacgagccatcttcaaatcatatcttgttgcagtaccatatgcgtgctcactgtcacttgaattggtctttcttcacgcaggctagaacttctgtgcttcagctctccgcctcagtctaaatggtcaccagagcagggattcatgaaataggtgacaaaaaccggagaggaccaaaagtactggcatattaatttcagatttttagtaccacttatgtcattaacattagcaatggtaaattcctcttattttgttaacgtatctctcaacatgcttatttatatttatttgctgcagaacatattaaatctttgcttaattttgaattgttcgctataaattagaacttatatgtgcatatacatgtagtcatgtatcaaatccgccgttcagtcattcagtgctctgttcaagtgtaagtgttcagtacccaatttttaatcatgtttagtattactacatcgtggttcatgatgttcacttggaaaatgatgaccttttttgttctttgataggtggatcctgtttcccaccaagtcaaggtttgtgaattcgggagtgctagaatcttgataatgttggagtgattgtgaatcccaagggtgatatgaaaggtttctctatcactggacctatcggcaaggagtgtgctgatctttggcctaggattgctagcgcagcaaacgccatcgtttgagagcttgttggaatatgttcagacttctatatgatcatcttattatcagttgctaagagtgctattgggcttaatgggccctttatgtttgttcacttaattttgtagtaaacagaatttggtataccaaggggatctatataacgatgtatgccataaattttctgactaccatttctcatgaaatgcttatattgtttatattgctttggtgacaacaaaatttttggtagttaatttgtttcccatcctttatgtttgttcactcaatttttatttgtttcccatccaactgaaatgttttaatgtcatcattcttcctcatttgtatgaacatgtacaagagtttttttgtgattaattgtgacaatcagccgagttctttgcatttccagcgagttacaagcatgtaaaatattaca

SEQ ID NO: 42967 - DNA, 2772 bp, Zea Mays
cttggcccctccagctctgacgaattatcatccgtttggccgcttcatttctctccccgcttcggtgctgcctgctggccgaccgccgaagcgacaaccgaggccaccgatcagttgactcccgtctcctcgtcgcagggtctcctcacacgagcacacgaacatcgagccctccccgcaggagcataagacgcttcgcttgttttctaaaacattgctggggttgcagcatgtgtacttgggcatagagggattgttacatcgagctagtgctttggtctctgctgtagcagagcgcaatgggcatccgggcttgttcggtttgctggttgttctatgtgctggttcttgtctgttccttgtgtcagatactttatgttggatcagtggcggctcaaactgctcagttgactgtggatgcttcacctcagaatgctcagataatccctggcaatatgtttggcatcttctttgaggaaatcaaccatgctggtgctggtggattgtgggcagagcttgtaagcaacagaggttttgaagctggtggttctaatactccttcaaacattgacccatggttgatcattggggatgaatcaaatattattgtggcaacagatcggtcatcatgttttgctagtaacccaattgcacttcgaatggaagtactttgtggagctagtgaaactaatgcttgcccatcaggaggagttggaatctacaatcctggttactggggcatgaacattgaaagaacaaatgtctatagagttaccatatacatcaggtcatcagaatcggtggagctaatggtttctttaacaagttcagatggtcttcaaaatctagcctctcatacaatcatgggagacaaagaagatttcgttgagtggacgaaggttgaatttgatttgcaatcaaattatataaatactaattcaagacttcagcttacaaccaccaaaagtggcataatttggtttgatcaagtatcacttatgccatcagatacttatatggggcatggtttccgtaaagatcttgcctctatgctggcaaatctgaagcctcgatttctaaaatttccaggtggcaactatgtaatgggaaattaccttataaatgcattccgctggagtgaaactgttggaccatgggaagagagacctggccacttcaatgatgcttgggcctattggactgatgatggacttgggttttttgaatttcttcaactagcagaagaccttggcgcttgccccgtttgggtggtaaatgatggggccagcatctatgaaggagttccatcagcaacaatagctgcatttgtaaaggatgttgttaatggtattgagtttgccaggggagaccccgagactgcatggggttcagttcgtgcagcaatggggcatccagagccctttcagctttattacgtttcaataggaaatcaagaatgttcaaagtactattataaagataactatgtgaagttctactctgcaataaaagcatcctatccagacatcaaaatcatatcaagctgtgacagatctgctatttcatcagacaacccagctgatttgtatgatgtccatgtgatatgttttccaaatctagaatgtttgataatacagcccgtaccggacccaaggcaattgttagtgaatatgctgtaactggaaatgatgctggccgaggaacactaatagctgctttagctgaagctgcatttctcattggattagaaaggaacagcgacgtggttgagatggcaagttgtgctccactctttgtaaacgacaatgaccaaaggtggaacccagatgctatagtctttaactcatggcagcactatggatgtccaaattactggatgctgcactttttcaaagattcaagcagcgccacacttcatccgtccactattcaactaccgaactacgaccaactggtcacatctgctatcacttggaataacccacatgatgggaacacttacatgaaaataaaggttgtaaattttggaagcaaagctgttagtctgaatatatctgtaactgggttggaaactgatattcagacatttggatccataaagacggttctcacgtcgggttggctgcgggatgagaactccttccaacagcccgacaaggtggtgccggcggcaagtccaataaccaacgcgggcaagcaaatgggtgttatattgaactcgtactccctgacctcatttgatctcctcttggactcggagtctcaggttcgagcctccatccaagcttatgattagtgtgagatgtgtcgtgtgcgtgcccacaatactcaataccgagatacgggtccccccaaggctccccacaaggctttcaatagaaaatacgatatttgtgaattattgtgaagtacaggcgtacagctggctatgtgtatgagattcaacaaatggtttctacgaccctaataaaggtataaaagcacctttcctcggatatcacacatccgttgtagtctgcactcttgacattttctcttttttagagcatgtacagtgtacctaactaccgcaaactttttgtcctggtgcactacagcgaatgtgccatatataagaataaaaagaagggaaatataaccgtatccatttgtgtgtgtaaccatgtaatcaaggcgtagggatggaggttatagactcaactgatatgttcttgttgggggtttactctgtcgaaggtccttataaaattttcactttagcataaacaaata

SEQ ID NO: 42968 - DNA, 969 bp, Zea Mays
cggcactgttgctactacttgtgcacctgtagcaacagcaggaagtagtagaagcgggagatacttcatagttatggctttgagcacatgcacttattatacaatctggagaaggctggccttcttaagaggcaggaatcaagaagcaattgggttggtattacaagagcactgcagcttatagttgacgtaaatgatacagcaaaccctactgatatatcctacatcttttctggatacgcacctcttagtattcgccttgttcagcatgcagtgagatctggatggcggtctattgaagaactgttgaaactattgccaggcccacatctggatttgaaaagaggtggtttgacaattaattcatcaccggaggtacatccaggtttaggggctcaacagagtattgacagggttggtcatcgctctctggttttggttgtattcattggtggtgtcacatttgctgagattgctgcccttcgcttccttagtgcacaggaaggaatgggctacgactttcttgttgcaacaacaaaggttgtcaatggaaacacaatactcagacccattatagcaaatagcaaagaggggatgatgtaattttattccttttctgtgcatgtgttttttgtaattgcaattgcagacaaacccaagcttgtgggttttcttgtttggctgtgagttcgtgtttggtcagcaactggacgataaggctaaccacgcttgttgatagatggaatccaacagtcccattttttgttctgttctgttctgtagtacatccgctaaactgtaaatcctgggtttcatgtgttcgtctgtctttttattcaataattgcttccttgaaggccgtttatgttgtttgtggaccaatattgtgaaaaaagaaagaatgtatggaacctgttgcaaatctgcatattcttattcctcttttttactgaaggaaaatattgtcca

SEQ ID NO: 42969 - DNA, 3156 bp, Zea Mays
atggcctcgatcagtgctcccgcagtagcatgccgcgtcgcgccggcgcgcgcaacaacctcggttcttcccgcgcactcgcggcggccgggatgcaggtcggtggtgtggcggtgctgggccgcgacgagggggagacggaggcggtgggcagggctgcgggcaaggtgccgcataagctgcgacgtcagccagccgtcagccgtgcagccagattctgagagctctggggagggattggtggcgcaggacgacgggccgcggcggccgccattcgacatcaacctcgccgtcgtgctcgccgggttcgcgtttgaagcctataccagtcctccggcagatgtgggctggcgcgaaactgatgcggctgactgtcagacagtgttcctgtccgatgtgtttcttcgtgaagtatacgatggacggcttgtcgtcaggctgaagaaaggcataaaccttcctgcaatggatccatggggtactagtgatccttatgtaattctacaactgaatggccaaactgcaaaaagccaaattaaatgggcgttgcagcttgggatgcaaaccttgttaccccacacaaacgcatgggaaatgctggattataccttgaatcattttgtgatggtaacaatcatggtgttactgttgaattagaaggcctcggtggtggtggaactatagagatagaggtcaaatataagagttatgacgatatcgagcgtgaaaaacaatggtggagaatacctttcgtgtctgactttcttgtgaagagcagcctgggatctgctcttaggatggttcttggatctgaaagtataaatgctagtcagtttgtgaagtctgcatttgggcaactgagttctttcacatacacctatcttccaaagccatcatcattggaaagtggagttgatgtttctaaaagtgatgaagaatcctcagatggcccaactaattcaaatgagcttcaacaacagaatattgattctgaaatcatttcagattctcattctcatagtgaagttcaatctcctactgctgttgttaatagtgaaggaaattcatcgtctgatatgaagaaatcagatgaatatttttggagagctctgaacaatgtactaaaccaaaatgtactacagaactttggattttctctcccggaggtcaagcaattgggtggttttgacctattaagttcacttggtctgaaatcacgcaatattgctgaacaggaatatctagaatctggacttgcaatggcagatacttcaacaaatggtggcagtgaaacaacttctgaaaatacagttggtgttgagaatgaaaatagaacattgacaaccaaagaggaggtgcaatcttcctttccagatataaataaagtatctcgggatgtattgtctcaaacagaaaatatactcggagctctgatgatactttccaaaaatctctcaccacatgatcagtcagtaccgacaactggaacaaatgggaaatatgacatgattagagaagagcaaggtgcttcagctgcagattctgttcaaaaggctgatactgtttcatctgcgttactgtccattgatgcacaggaagcagaggatatgcggcgcttgtttgcaagtgcagagactgccatggaggcatgggctatgcttgccacttcactgggacgtaacagtttcatcaagtcggactttgaaaagatatgttttcttgacaatatttcaacagacacacaagttgccatatggtgcgattcttctcgaagaaggttggttgttgcctttcgtggaaccgaacaatcaaggtggaaggatttgcgaaccgacttaatgcttgtacctgctggactaaaccctgagaggctaggtggtgacttcaaacaagaagttcaagttcacagtggattcttaggtgcatatgactctgttaggaacaggatcatgactctcatcaaatatgccattggatacgatgatgaagaagatgcagaaaacatacctaggtggcatgtttatgtgactggacacagtttaggtggagcactagcgactcttcttgctcttgaactttcatcaagtcaaatggccaaagtgggaaatagaagattcgccgaagtctacaatgcgaaagtaaaggacagttggagaattgtcaaccaccgggatatcattccaacagtgccacgtcttatgggctattgccatgtggaagcaccagtttatcttaaatttggggacgcaaaagatgcaccggtaaataacagcattctagatgatgaagaccaaggtgacgtgataggggagtacacacctgatgttcttgttactgaatttatgaaaggcgagaagcaacttgtggaaaaactactgcaaacagaaataaatttactccgctcaatcagggatggttcggctcttatgcagcacatggaagacttctactatgtcacccttcttgaggtttttgagaactatttctgcttttctcataccaaattgtgtcaaaagctcctcaagaatgtgagatcaagttatcaagtggcagatactgccaatgatgaataccaattgacagcgtgatcctagtaaaactgcacagctgaacatcatggactgtgtttccctgcaaaaacttcatttctgaaggacactgaatggggctatgaaagtgtgcaatccttactcttagtggaaacatgaacaggcagaacagccttggacctcagtcaggatagaggaaatgaaactggtttcactggcggatatacttgtagcaccgtgtcaattggtagatatgttgtttgagctattttccgttgatgtagctagcacactttggaatatattgtatgatgtttgaaattctagaaaagttcatagacacctgggagaataactcaagaaatatccaagtccgttttggccaatattttttttcatggagaaacttgcacaccgtggtaggctaccggctacccaagggctgatagggtgtgttaatcgagtgtacgacctagataaaaatgttcaatgtgatggaactatatatcttgcatggaataaagtagcatcatgtaatttcggcattttttcttgaacatgcatgtgaaccgcgtcattatattaagatagaataagttatctggca

SEQ ID NO: 42970 - DNA, 3230 bp, Zea Mays
gaagcctggagaaacgtttgttgttcttccagaacacgccctcggaatcctatcgcctcccacagcacacgacgcgcctttgctgaactctctctgtcgccatgctgccggcggtcgccgctgcatcccccggcctctcacatctgccgcgctaccaccaccttggccgtcgctttcacctccgccgccaccgccttctacctgctattccggccaggctatcgtgtggggccacccacgcccgccgccttctccttgccggcgcgttcgcaaaaggggagggttcttcaggacaggatgttgatcactctgctggtgccacaaattctgggtctgcataccttggtctcttcgttcgattgcttggcttggataatgacacccgtgatagggagcatgctgtttgcacactctatcaatactcccttggtggaaggaagagcatcgatgagataatgcaattccctggttgtattgttctcatcattagcctcctgaaatcagagtccattcttgcctgcgaagcagccacaggtcttctgcgtaacattacgtcagttcacatatataggaagatggctggtgagagtggagcaatggaagaaatcattaatcttctctgtaaatctacaataacccccaagattctagagcagtgtttgtgtaccatttggaacttttctattgatgaaaaatggaggtacaaggttctgaagagcgatgtcctaatgaagattgttggttacctggatgaagaagacatacaagtcaaagaagccgctggtggtatcatatcaaatttagctttgagttcctctagtcatggagctttggttgaagtaggcgtcatcccaaaattggttcatcttttgcaaaccaaagaagatgactataagattattagaaaggaagctaaaagttcactaatacagctggccactgatgattgttactacagccttataatagaggagggtctagttcgggttcctttggttggctcagctgcatataaagcctttaaacctctccctcattcatggccctcttttcctgatggctctaagattcagcggagttctcatccctcaaagtacggtgctaccgaactgctccttggcttgagtgtcaatgagaacgatacaaaaccagatgaagctaaaattaatgctatgataggacgttctaatcagcaattccttgcacgtgttggagctattgagttggatgatcaaggacaagaggaatctggatctgaaaagaatgacatgtataccattttgccatgggtagatggtgttgcacggttagttttaatccttggacttgaagatgtctctgcaatcaaaaaggctgctagagcaatgggtgatgcatcaataaatgaacatatgcgtacctcattcaaggaagctggggctgttaaacctctacttcagctgctcaagcacaaagatgtacatgttagagaagctggtgcttatgcgttggaaaaattatgtgtaagtgccacagtctgccataatatcaaaacagaaggtggactagaattgcttgtaaatatagtcaaggatcgacatactccagtagaactactagagaagataatttatatactttctcgaatgtttgacatggggatttgcatggttgctgtgccggatactgaaggttataaggatagtgaaaacagtgcaaagacatctgttaaccaagagatgtccagtttcagcgaggaccctctttgggacacacagatctttaagacacaacttatgcagtccatggcgagttgatctttgattttgatgctatctcacacttaacggaagttctaaaggaagcatcgccaaggttgcaagcaaaagtctgttgtgtacttgaccatatagcagcttcggagcaacatgccaccgcaatgactgctgcttgcactggttcagtaattgaagctattcttgaaataggggttattcatgggaccagaagtgactctgagaactttgaaattcctagtgtagttataaaagaactcagtgaggctgtgtctgcagctgtgaggttactctcaaagttattgaactttgatcttttcatccgcagcataaacggtgaaaaaatcacttctttgctaagaagaacgctcaaatcaaatttcccccttcagtcaaaggattgtcttgcggcatgcctcattaagctagaatccagagctggcttatcaggagatcatggtgttagtagtatagatatggagataactatctatgagactattccaaggctaattgagcaaatgatgatatcactttcgtttgaaaataaaagaagtgctgtaatagagctcaacaagataatatctggtggtgtgctggaatatacaagagcagtggcagattctggaggcatatttccactggtgaaaatgcttgaagaggcggatggagatgcactggaggctatcttatctatcttatataatctgagcatggatccagagaatcacccagcaataattgctgctggagcagtgcctctgttgaagcggattgttcgtacagaagccccacaatggagtagtgcaattcagctgttgagaacattgcctgtatgacattgatgaagaaaatggccattcatcgccaacaaacattataaactgcacttagggcctgtttggtttgatggctaacttgccacactttgcctaacttttgtgcctaaggttagttcttcaattcgaacgactaaccttaggcaaagtgtggcacatttagccacgaaccaaacagccccttagtgcatgcacagccaatttcttagattgaggttgcggttgaacctagctccagctccctatcatcatcaaaatttgaattttatgatctggaagaaagcatcagcaaggcatttcctccaaagtagcgatatatgctgcccttttggctagttgaaaagcacaccggggcctgatgtgtccttttgctcacatcacatgccacggcaatagctagtaccacgaactattttggataccggcagtttgctggttgtgagaggacccaagaaagttcaaattgtagcttgctaaatcgtcgtgtttcgacactaggtgactttactctttaaaaatgctatcctttttgtgtaacctgaaatcctgaataacctccacggtgccaatatcaaaagaatctctttttgactccagctggggtaatcgtgaggca

SEQ ID NO: 42971 - DNA, 3815 bp, Zea Mays
aatccaatgccacgtgcggctctctctcacctgtctcattctcacccacgcgcttctctctctcaccagcaggccgcgccgccgccgcaccatcactctccggatcatcggccatccacctcctcctcctcctcgcccgctcaccggccatccctgctgcggtgtcgcgcgttcatgcaggaggccgccgacggcaacggcgacccgactgaggccgacgtgcggaagcgcaggaagggcccgttgtagaagctcaaggcggcgatccagggcctcgcgggatctcgctccgccgccgcggaggtgtacgggggagagtaccagttccagcgcgccgtcgagaatttgtgcgagccaaggttccccaatccactcgcgcgcgcgcatcgctgtggtttcctgtgttgcttccaccctcgcgcgctcttcttcttcatggagccatggcaggaagcggcaacaggagatttggccaggatatggtgtctagcagcacacatttctcccagtggcagatggtctgggttggagaccacgttcctggcggcagagtcgatctgcaatgtggaggtccaatctggccacctatgtcagctcgctctggagctaattccgattccctagcagtgacgacgttcagatgcagcttcagatgcagcgacgacctctctctccatccatggatttctaggcgactgggaaccaggcatcgaaatgaagggaaccaggaatcgaaacggccccgagaatcccaaagcacgagaaggggaacaagggaactaggcatcgtgaagagagcccggggtgatgaattgttacggttcatggacggagcaagcaaggagcctctccgcaaggtaaacactaacacgcaattcctcttcaatccctggtcgtttcctgagatctggtgttataacccttgtagcttcgactccttgcttcagttgggggcaataacgaattcataaattttgggctgaaagttgttccttgtgttgttgaggtgccggaggggagtggttaattgtggtgtagctctatggtgtcaaaaggtggatggagtccatgacattttctcattgatttattttagagctgttttttttgtgtgcacatgattgatactactactgtagtattgctttgttgcagtatctctagtgcacacatgttgtatggtggctttagaagtggccataattaggcttgcccaaccggtgcaggtgacttatttagcatgctgaactgtaggtagtattctagtttgtggccgtcatgcaagtacatatgtgttggctttcagttcaaccgtctttacagtattcggaaattgcttaaaattcagtgttgatcatagaggcagcacaaatgtttcctattcagagctggtaatggtatggtcattactccgaatcatagtatcagacaatggctggcatagtatttatccaccatgaaaacacacttagcttgcaggtctaaatttggcatcctctacatgaactgaaaccagttgacctcttacgaagtaagaatccttggccttgaacaaatcaaagcttccatgcttgatggaaccaaacatttcctcaccagtaacacatttgttgaaacaatacttcattacactccagcactgccggtccagtcactgttcccttatctatacttcatgggacttgaaagtggcgactggcgaaagaggagcaagacattgggttttatgctggttttgttggggctacctatttccttggaagggccatcagcgccgtgccatggggcatgttcgctgacaagaatggaaggaagccaggcattgtgatcagcatcctctcagtgattgtgttcaacacactgtttggacttagcacaacttactggatggcaattgtgactaggggattacttgggttgctatgtggtatacttggacccatcaaggcttatgcttcagaagtctgcaggaaagagcaccaagctttgggaatctctcttgttacatcttcacgagccatagctcttgttattgggcctgctattggaggcttccttgcacaggtgaagattatggaatttagatagcagtataagttaaattcgaaatgctaatgagtgccttcatcatgtatcccttaatcataactgacctctgatgtgtaaaaaaagggatagtggccgacaaaaatatttctagcatcaggaaggtaaattatttctagtagtacaatttctagcatttaactatttcattgtttttagacgactattataaaccttcaaaaattatgcatctaattttcaggtttccatacttccttccttgctttgtaatatcgttgctagcagcaggatcatgtattgcatgcatttggcttccggtatgccatatcatcttccctattattttctatcttgaatccaaatagttagatcctcttaagaaaataaaagaaaactctgacaacctatagaggtatgacagctccagacatagcatgatagagaagaccttctcacctatacgactataccaagaaaagaaccgtgcctcatccatacaaacaagatttgttaacccaacataaaattcactcctataaaaatttgaactagaaaggctactaaagggcctaaaaacgaaatatgtttggacttatgtttctccactcaatatacctattttctagttagataaaaaatcgttcttttgaatctagatagaattggcaatatacctattttcctacacatccaatggggccttggggacaccctccatggccaacacagccacttccatcaccagcggtacgttcctgattcatgctgcttgctacttttatttgctataaattggactttttttgggactactccactactgcttatacatctggcgtttgatcaagctcgtagtggacatacttgcaagtctggatattgtacaacatattacagcgtgttgaaaattttagattgtgaataatgactgaatctggaatgtagtgttgtgagagctgttttggagttcttttgtggctgatctaggaagttttaagctgaggtgttggtagagtaactctctgtcaggttagtttggtgctcagttcaacactaaattctgaattctgtcaggtaaactaacctgaacatgctttagtgaatctggaatttagtgttgtgagagctgttttgttgtgacatgctttgggctgttaggtggctgaattctgaatttttagatttggaataacgtctaagtctgaatttccaaagtagtttcttggacagttaacatcgcggatcctttgcacgatgcatcattttaaataacacggtgctgcgtcttgaaatgaagtctgttttcactctcatgttcatgttcatgcacaaatatggaagccacattttgtgtttatcatgctttcctatatctttgtgtacatgtgatttaatgccagttgtgtatttatgagaattttggtttattttgtaggattccggctctcatcaagtgactccttcccctcacgttgactttgcgaacagatgtctcaattctagtggtggagctacgaacaacaatccgatgtcctgatcgagagcgatggagctaatgtttgaacttgtgtgtttgaacttgtgaactaaaaatgtgaactatggatgtgaacttgtgtgaatttgtgaacttatgtatttagacttatgtgaatttgtgaacttatgtatttagacttatgtgaatttgtgaacttatatatttggacttgtgtgaatttgtgatatgaacatatatcaatgtgttt

SEQ ID NO: 42972 - DNA, 485 bp, Zea Mays
tctgatgcagtaatttgagttttggttcagtgtctttctatggattttggagcttgtttgtgattgatccaaggggtttaagcctaaggtccctgtggaggaatggtagagggtcatttggtcgacaagttttgttaaacttgatctccctattgctatgtaaaactgggagtaagttgtgtccgaaagttccctgtcaagttgaggttgtgctgttcagtaactgaaaattggaggtttcagtgatcttttgctgtgtttggggcatcataacttttgatccctgcatttttggtcttggactgctgcaacaaactaatagagctatagttggagaataatcttggttaaaagggatgggtgtgttgtcgaggggatttgggtgatagaggggcttaaacagggaggtatgcagagggagcaccaggactgatggagtaaattcagagttggatttagtaaactgaagaagctttattcctcct

SEQ ID NO: 42973 - DNA, 2106 bp, Zea Mays
ccccaccacagcccagaccaaccgcctcgcctgccgttcccctccacgtctccccattcccgcctcccgagacctgaaccctgttggggacacatgggccccacaacccgcgctcacttcgtctacaatcgccgccgccgccgccgccgaggcgggcggcacgctgtcgaggaggcttccgacgaggagcagcagcagatggatagctcctcctcatcctccgacgaagaaggagatcaggaagaagatgccgaagcctccggagaggacgtcgatgacgaggaagaagaggaagcggtcgctgccgagcctgcgcccaagcagccacccgcagctgcggcggcgggggagaagaggggccgaaggaagggctcgatcaccattagcctgaagaaagtgtgcaaggcgtgcaaaaggacagggcaccaggcagggttcaagggggctgtgtacatcgactgccccatgaagccttgcttcttatgcaagatgccaggtcatacaaccttgacttgcccacatagagtaacaatggagcatggtgttatcccagcgcctaaaaggaatgcaaacacttctctggattatgtcttccagagccaagtcaagggaaagattcccatggttaagcctaagtttctgatacccaaccaactagagcatggaaacataaaatttcatcagagacgtgtgacatgcttggagtttcatccaactaagaacagtgttcttttatcaggagacaagaaaggacttctgggtatctgggattatgttaagttgcatgagaaaatcacttatgattctgtgcactcctgcattctgaatagcatgaagattgataccaccaacgatggtatgatatatacagcttcctctgatggtactatcagttgcactgatttggatactgggtccaagctcttggcacatgatatacgggatggacttaaacactgacaaaggtcttcttttggtggcagataactttggttttctttacttcctggatagacgatcaaagacgagaattggacatccaattcttatccataaaaagggtagcaaggtaaccagcctacattgtaaccctgcacgacctgaagtgcttctaagcagcggaaatgatcactatgcccgtatttgggatacaaggaagcttgaagccaactctccccttgccagccttgctcatggacgggttgttaattcaggatacttttctccacgaagcggaaataagatcttgacaacttgtcaggacaaccgaattcgtgtatgggactatattcttggtgatctgcaatccccaagtagagaaattgtgcacagtcatgatttcaatcgtcacctgactcccttcaaagctgagtgggatccaaaggattacaccgaaacagttgcagtgattggccgttacataagtgagaactacaatggtgttgctctgcatccaattgattttatagatactagttctgggaagcttctggctgaggtgatggaccctgacataataacaatcagcccagtgaacaagctacatccgcaagatgacatcctagctacaggaagctcaaggtctattttcatatggaagccaaaaattgaagatgaacttactgaagaaagagccaagcatgacaatagtagtgatgacgactcaggtggtgattctggcggaaagaacaagaaagcaaagaagactcgcttcactcatgcagtaaagggaaagggcaaatccaaagtctgatgcttggtgtacatagtcggcagcattttgacaagaaagcgtccattaaccagctcctgatgcatctccttttgtaccatcttgccaactccctcaccccccccagctaaggtgctgaagacccgtatgaaacgcatgctgatagaccccatagttgtctcctgcatcaatgctcctaaggagttagccagttaggtttcggactcttttgaatcctgacatgcttatgatcacttgtcatttgtcaacgaggccttttaacggtttaatcctgtatcaacatataaatctcctgtacagttgcctgaatgcaatttgtgcttgtaaaatgtttattggtgctctcatctgtt

SEQ ID NO: 42974 - DNA, 2415 bp, Zea Mays
aaataaaattgatttcaaattcaaatctctcaacgaccaccacagcgcaccggctagatctattcctacatcgaaagaaagggaggagagccaggcaggcagtcaaccctcttccctcccacacaaaacgcaaactacccgccaccgtcggcaactactttcctttcgtcgtcgtccccggctcctccacttcaccaccacgaccggacggacccggatgtcttcgcccgcacatccaccccatacccgcaaatccgcagcaaacgcttgcagcggcggagacagttggtagccgcgatcgagaggcgacgggtaacctgccccgccgcggccgcggcgtatatattaccaccccaaaattccaggagacgacgaggcgccgatccgtagcggcgccgagggcgatatcgaggagccgctggtctcacgccgcaccgagacaatggcagaccaacgggctgttgaatataattgaaccatttcaccgttttgttggaaaagacatgatgaccgacttgagatatcctatgaagggcaatacagtgccattttgggctgttccactgattggaattatactgccttgggccatctttgttggaatttacttcaagaagaacaatttttatgatctgcaccatggcatactggggattctatactcagtgctcataactgcagtgattactgatgcaattaaggatggtgttggacggcctcgtccagattttttctggcgctgtttccctgatggaaatgatgtttatgataacatcactactggtgttatatgcaatggagtgaagagcgtaatcaaggaaggccacaagagctttcccagtggacacacttcatttaggccacaggagtgaccaagtaattccaaacaatggattctcttgcgccttgcctgccatgttccacaatgccagagatgagacctcaaaattggccttatctcacatgccttgctgaaatttaaacactgtttagtaacctgaatttagcctccccactggaagtatactgtctcttaggtactgagaattctgagccttatctaagatatgatccatgaggctaagaaaaatggagaaaaagtgacccaaacattttgtacacatgtttctgggagcaggcaggcatgaaaagtggagtatgtttgagttaccttgggacaagctgcatgcattatagagtggagtgaatttaggttgtagtaaagtatgacctatgtgcatgacgagcatatctaccggttactcttttcacttaattgcatgaactattgtaatattcccaatacacgtgtaaattattactgaagcttaaggtgtttttatgtgctgaacttaagtttcaacttggcacctcatgatattttgtttacagtgtgatggccgtatcatctaaactttgtgttgtcatttcctatttacactacctcagggtcttttgctggtctaggcttccttgcatggtacttagctgggaaactcacggcttttgatcgcaaaggacatattcggaagctatgcattgtgtttctgcctcttcttactgctgcgcttgtggctgtttctcgagtggatgactactggcatcattggcaagatgtatttgcagggggtcttataggtcttacagttgcttcattttgctatctacagttttttccatatccttttgatggcgatgctttgtggcctcacgcatacactgtccagttagccgaggaagggagcagcagaaatacaaactcctacagcgtgagaccagccgagatcgaaacagtcaatattcctggtcacggtgggatcaccctaagagatactctaaatgatatggagtctggtagcggcaggagattgtgaatgagtctggaagttttgaaccatataccatgagagctgcttgcaatatatacacaagtagatctattgtagagctgttgagtgctgccaccgtgataggagagggttgtttagatgggtctgtcactaaattacttggtaggggtgttgtatcttctgacaacctttggcctttctttatactccacctgtggttaaagtttgtttgcttacgaactctttgatgtcagcttggtcgttgcattcagcaaccatgatctaaccatcgtgaattgaaaattttgtcgccaaatataaggggattaatgctgcaaccaaatggaactctctgaggaacaaaattatagagaccggttgtgatatactttgtatccaggaaacaaaaggagaacaattcaatgaaacatacattcgtaacttatgtacaagatccttggacaaattgtatttctgtccctctaatggtgcttctggagaattattactatctggaaaagtttgtattttgatgctaagttgattcaacaaaatgagttcagcc

SEQ ID NO: 42975 - DNA, 271 bp, Zea Mays
gcgagtatcgctcagactgtagtacgtaatacccatgtcctcaactgaaattgaacaagcgctgaggcaccggcatgtaaaaagacaagctgcggttatgttttgctgcggagcggcggaccatagtggtggcagaatcgccggaggaacggcatcggttggtatctaaccaggagatgctggggatcgggcacgggagatgctggctgaaaattgggataccgtttctcctccagctcagctgggaatgagatgggaatgaaaaatgcgg

SEQ ID NO: 42976 - DNA, 2069 bp, Zea Mays
cgaagtttcgtttcaaacatatacattctatacaaggacatgcttcgttgtgtacgaaaagaagggaaggtgtttttcgccttcggctcaaaagatacaagtttcgtccacatcaaagcaacttgtacatagatgaaaaggtaaaaatatattacaaggtatggacaaatatacaccgtattgtttggttctcgattacagctttttgcaaagataatacaaatgtttctaagctctatacaggcaggactaaagagaagcttcagcagccttcagaatgtgcttcagattatcaaccttcggcaccaccatcctgcagacaaataacagtataaggtaaaaagtaattacaagagtcaaggcaagcaacaagtatatgttccgtaccggtttaagcaagttcgggcttcgtcccgagccaactctcgtccacccttagcccaaatttgagttataaatctgtttccgatgcttcgggcttcactgggaatatcaatcaaatctgttggagatagactgaaggttgatctatttaccgtttttgcgtgtgtgcaaccagccttaaaaaatgcggcagctgtgccgcgagaagctagcaaggcacaaaagtcaccatgaccggctatcacttcatcaagtgcatcaactttattttcaatatgtgcgaaggtgtttggtatgtcttcagccgaaggtgtaatatcttcagagctagccccaaccgagctgaagacctttttcaaccgttgcacgcagctgctacctaaattcaagcacgtatctcgaaggtcttccaaagatttctgtagcttcgtattcttgtcagcttcggcctcgtatttcgcttgcagatctttcttctcttggtcgaagttctttgatttttctttcaacgttgtccgactttggagaagctcctcgcttaatctaacattttcagcttggatttctgcaagcgagccctatgttgcttgaagtagaaagtctttcttctccagagaagcttcgtaatccttgattttattttccaagccctcgattatggtttcatttttcttgtcttcgaggtcttgttgcattctcagtgtcttacttagcagcatactccatagaaacaagccagcatcagaaaattttgtttcatcacaaaaataaaagaaacctagcaaaaggaattttaccttgaaattggagtaaaatagactgccgatgatatgttgtcgccggtagccgctaatattagcttcaagcttcgggaaaccaacattcttcgatagagtgccgattattttgccctcgcgcggtctcgaatgcatcctaaggcccctgcgtcgattccaccaaagagcatagcttctggctggtagccacaggaccatattcctgtagctccttcttctcagcctcggacaattcttgacccaccaggttccgaaggtcaaagtcattttcttctgtagcagcatcaacaatctttttccctttgtcaggcgctgcggccatgaccttctctgcagctgcagctgtgtggcagaacctcccaagttattgggcccacatgcacatgtccttgtctcaaagacctcaaacagctatacatgtgcactaaataacttaacaggatccatccgattgccccaaggacatcggataaaccacatacaaccagaaccgcgggattaagtaacacaaatcacacacacaacatttctgcagcggaaatcttattaccaaattttataggttataaaaattttacatttttttatcggagtgattacaaaagtataagtttgaaatatatgctagctcaagtgactatcctcaataagaagtatagaagaagtacttagacttataagaaggccgagcccaccggcacttaacaccatcaacagcagcacaaaattaaaacctgaaaaacaacagggaataaaaccctgagtatggaattactcagcaagtcttacccgactaaggaaaagactctcaagggtatgctggaattgggaatcaaggagaggctttagcaaaaatcaacttagatacttttgcagaaatagcgtact

SEQ ID NO: 42977 - DNA, 5348 bp, Zea Mays
ctcccagcctggcatcttccctctccacgccacacgcacggctccatccttctgtccacgctcgcgccgccagggcgctcgagctcgccgtcgtcatctcgtcgggccgccgcctcgcagcttcgcccgcggctctggtccgcgccccgccaaggcccagccccaagctgccagcggcctccggcgttgctcgccgctcactgcgcgccgtctcgcgctctcgcgccctcgcccagtcctgctctcccttcgtcgctccgcggctccgccggcgtctgggcatccggccttcgggctttggtggcgccccccaccggccaccggcccaccccagcgggcagcggccactgcaactctgcggctctgccaggaacaaggaggaacagtggcgattctgccagggacagggaggagcagtggcagacaacgtccttccttttgtttggcccggggcttcggaattatctggagccgctactgcccccagcgttcggactcccgggtcgcaggcagccacgtctcgtcctggctctgggctcgccgcgctatcgtctcggccattcgctccgacgtccgtattcaatagatttgccctactcgtgaccacgagaatccggcgaggagggagaccgctcgtgcggagtctataatggctgacgggcagcatattcaggcagcatcagaggaagtggattcaatccacttcagcttctatagtgatgatgaaattaagaggatcagcattaaaaagatcaccaagtcggagcgccttgatgccaaaaaccttcctgtgccaggtggattactggaccctgcaatgggacctatcaatgatattgatatctgcaagagttgtggtcagcattctgttcgttgccctggtcacttcggtcatattgagttggcaaaaccattgttcaatcctttgctgtttatgagtctgaaaaaccttctccatgtcacgtgtttccattgtcacaagttccgcctgaacaaggaacaggttgacagatatgtgaatgaacttgaacttttagtaaagggtgatattgtctgtgctaaaaatttggaagactcagtagaagaagcatatctttccaaggaagatgaaaacatgaacaagaccacttcaggtgataactcatcttctgtgaaagacaagaaaacctggacatctatccaattgaaagaggttttgtctattttttccaagataatgaaaaagagacagaagaagtgtgcaaaatgtgacatgaagagcccaacaatctcaagtcctatatttggttggctggtcaaggacacaaaggcttctgctgtaagaacaaatgcaattgctgattttaaactcaagggagatggtgatattcacaactcaggggaaacaggggtttctggtcttgaggaagagtcatcttcacctggaatggtgtctaaagactcaatcaatgaagttagaggtctttctgatgatacaattaaagaattggtagcatcatcaggaaaaaaacatctattgcctacagaggttgaatctattctcaaggacttgtggaaaaatgaagctaggttctgcatgttactttgtgatttccagaagaatatgtcaagtgaaccagaaaagagaaggggctatgaaatgttcttcttgagtagtctccttgtggcaccaaatagattccgcccatcaactagctctagtcttggaattatggaacatcctcaaagtgttctgctaagtaaagtgcaagaatccaatcttgcgctacaacataacaatgcatcttctaaccatatggatgttcttcaaagatggatggatctacaacggagtgtaaatgtgctatatgatagtagcaaaggccttgcaagaagcgagaagaatgctcatggtatacgccagctattggaaaagaaagaaggaattcttcgacaaaagatgatggggaagagggttaattatgcatgccgatctgttatatctccagatccgtacttggctgttaatgaaattggcattcctcctgtttttgcgacacgattgacatatcctgagaaagtaacaccctggaataccaaaaggctccaagaagctataaggaatggtgccgatatacatccaggtgcaacacattacagggacaacaatagcatgtataagttacaggcagtccctgccaaacgccgttccattgctaagatgctacctgcatctagaggatcaatttgtcagccagggagagatcctaattgtgagtttgaaagcaaggttgtatatcggcatcttcaagatggtgacattgtacttgtcaataggcagcctactcttcacaagcccagcatgatggctcattttgttcgggtgttacctggagaaaagacgttacgaatgcactacgccaattgcagcacctacaatgctgattttgacggagatgagatgaatgttcatgttccgcaagatgaaatatctcgtgctgaggccatgaatattgttgacgcaaacaagcaatacattggtcctaggagtggggatgctgtcagaggtctcatacaggaccacattgttggtgctgtactattgacaaaaccagacacattgctaagccgtgaagaatatagtcagcttgtctttgggtcttgtgtgccgtcctcaaattgtggctctcatcaccctgctaaggtgtctgctattgaggattacgatacacttgaacttgtccatcctgctatttggaagccaaggcccttatggacaggaaaacagaagggaaaaataccaaaagaatatctgaaagaagatccttccgctcaaaaggaaaaagaagatccttccgctcgaaaagaagctcattctgctaaaaaaggaaaacgagaagatccttccgctcaaaaagaaaaagattcttcagttaataaagaaaaacaagagaagatacaaaaacaaaaacaaaaagatcgttctgaactggtcttatatattcacaataatgagctcataaagggcataatagacaaggcccagtttgggaagtatgggatagttcatacagttcatgaactctatggtgcatatacagctgggatactgctctcgacattcagccgcttatttacactgttcttgcagttgcatgggtttacttgtggggtagatgacctgctactattgccagagaaggataaactgagaagtaaaattcttagtggaagcgaagtgcgtagtaatgaagtccactggaaatttactggagctgacgaagatcataaaggtgatctggtaaaattgcatatggaggttgagaaggctgtaagaagtaacggtgaatcggacacggctaccttggacaatgatatgaaaaatgctctaaatgggataacaaccgacgtcaataaaatattatttcctgatggtctacaaaagccctttcctggaaattgtctctctcttatgactacaactggagctaaaggtggtccggttaacatgaatcaaatatcatcattactaggccagcaagagctagaaggaaagcgtgttccacggatggtttctgggaagactttaccgtgctttccgccatgggatatttcttcaagagctggtggctttatcagtgatcgatttttaactggtctgcgtcctcaagagtattactttcactgtatggcaggcagagaggggtaactgttacaggcatttcaagttttgcattacatgggtatccaatatccatgcatcttcacaccctaaactatatgtatatggattggttggctacatctttctgaagaataaatgattgtcatatattcttaaattggttggttgacacagcagtcaaaacatcccgtagtggataccttcagcgttgtcttatcaaatgtctggaatcgttgaaagtctcctatgatcacacggttcgggatgctgatggatcaattgtacagttctgctatggagaagatggagttgatgtgctgaaaactagctttctgaacgagttcaaagaacttgctgataacagaaaagctgtccttgccaagctcggtggctgcagtaaggatcccacattatcaaaatgtaatggatacattactgaactgcctcctaaattgattgataaagcggaagagtttcttaagcattcaaaggaatgctgtcgttacaacattgaggcaaaggaattaaaggagttacttaaagtcaagttcctatccagtcttgtagatcctggtgaggctgttggtgtggttgctgctcagtcaataggagaaccttctacgcagatgacgctcaacacttttcatcttgctggaaggggtgacatgaatgtaactcttggtataccccggctgaaagaaatactgatgactgcatcagataatattaggacgcctgttatgaagtgtcctttgctcgaacatatttctgaggatgatgctaaaatggtggttgcaaagcttaggagggttcgtgtggctgatgtagtggagaaaattgaagtctgcacagttcctttttacaactctaatgggcgtgtttcaaccctgtacaagttacagatgaaactctatccacaagaccagcttgagtcaggtcttactatagatgagtgtcaggcaaccttgagaacagtttttgttgaggcaatggaacatgcaattgaaaagcatctagatctgctatacaaaataaatgaaatccgtgctgttaagatagaagatacagagggctcattattaaatggtgatgaagaatctcaaagtagacatgctgatggaggagacactggtactagtgatgatgacgatcaaaatgataatgatgttgacttgggaactgatgcagaaaagatgaaacggcaagagaaagatgagatggagtatgatgatgatactgaaaccgaggagggaatgggtagcgaatctgaggagagcgatgaggatccagctgagtcaggtgatgattcacaagaggctgacaaagaacacacgatctcgaagtctgagacgacttcagtggatgacctgccatattctgtaaaaaaggggaaaaaatcaaaagatgatcgtggaacagctaaactagaagagaaaaatcaaaatgagggaagattagatgaccagaaacagggtcaaataaagaagcgcaggaaaaagttaaaacatactatccatgttgaatccagtgatttggattttgagattcactatgcctttcatgatgaacctcatattttactagctcagcgtccatttcactatcgaaagctaagatactcgcgctggcatgggtgagtggtggtccagtgggggcgtggggctaaactctattatcatccttg

SEQ ID NO: 42978 - DNA, 592 bp, Zea Mays
aaagaaagggcgttggctggctccaaaggcgtcttcctcctgttcatcctcggcccacgccgctgtgcccgtggtccatgggccgcctccctcgctctccccccgcacagattggtcctctgggaggtcaccttctgacgaggcccagtgcgacgcgcacgacgagccggcgcgtgaagggtcgtctcctgagaaagagggagcaaaaaatggtggtccaaggaagcaagctaatccgaaagatagcaagtgaagcgtttggccgggcgtttgggtggtgcccgagatacaggcgaatttctgggtgatcaaaaactggaatgtggtttctggtgttggtgttagcctttcttttggttggtgatttgaatcagtgccttttgtttgcgcctatctgttgtgatctggttgtaaataaggaagtcttatgtttctagttgcaggtcgaactttatcttctatcctaggccttttacttatctagggtgatagtgtaaggtgtctagatagagatctgacctagttgctattctgtcggatcgattgatcgcgatggatgtcgttgtactaaactttcctatttcctaataaa

SEQ ID NO: 42979 - DNA, 1803 bp, Zea Mays
tcaccgccggccatcggatatatttgcgctgctggtgctcgcctcagcccaagccgcgcccatgccgagctccctgcgcgtcgcggcctcccagctcctcccagccatggccgcccctctctgctcgctcggcttccagctccgtggccgagctctcgtcttcctacgcgccgtcgttcccctcgcagctcgcggaggccgacctcggcagcaccccatcgtcgtggagctctcccggccgtctccagccccacgcccacggtagctcgtctccacaccgcgctcctctgttggccgcgacctcgctttggcttcctgttgcgctcgtcggacgttgctccttggatggattctcctgcaagctccacagcgtcgcggcgcgcgagctcctctgctgaccgctgctgctcggctctccctgttggaacttcgtcggcaccgtctagtcatgctcctcgccatcgtctcacccttcctgcttgtcgtgtgtgggtctgcgcactatagccgcgctcttctgttttctcccggcgtgcccagcgtcgcgccctggccagccgagctcccatctcccgtgcgcgcgcccatctccctgtgctcgacgcccagctcaccatggacgcgcgcagctccctcgaggttcctctccatggccgcgctctgtcttcccttgccgcgtccctcaagatcgcgctctggtttatctcttcgcggccgccgttgaatcgccgaaccccatctcccatggagctcggagtttgaccttgctcgccggtcggccgtgctggtgctagtcgcctcactcgccgatgactccccaactggacgcacgagcttgctcctgcgtcaacctcgccgtcgtctcggacatcgcatcgccgtggtgcatcagcaggacgccggagcagtatctatgtccttggctcgtcggtccgcccttcgctatcgtcgtgtgtttggtacgcttattgattacgtgatatggaggaccaaagttgagtcgaacacaagatgtcgctgcgtgtaagcttctccacaagatgatgttgatggatgaacctgaaaatggaaatctaaacgagtgccaagacaaaggatggtcatcaagtgatcgacgtctaacaaacactaacatagtgtttattccaggcaagccccggtgcattatccccttccttatgttttaaaatctttatcaccttgtttgatgcattaggtgataggagttgtgtgctaaacaattgatgtatttccttccttggaaaattgattacccttccttgataccttttatgaaaaggatttttatgatgcttagccttgctctagaaaaacaaaatgttttgttttaaaacaaaaggtgatgtttcagattggatgggaagttttcaaaagaaaaggcttgatggtgaatccatcatggccgtgatgagttcaacatcggaaaagatgtacctctgctaggtaccaaactttgggttgtaaataataaagacgagaccgggcgggtgacttgcacaagaaggaagtctcggtgtagtgtctttgtctgagtcgattaaggaccgtgtcgatgtgggcctgctgaccgaggaccctttaactagccacatgcctcgtcatgggtaagctttgcctcagtcggaccaataccagaaaggccaccacgcaatgggagtggagagatggcgagggtagcatgtaccctccgtggcaagaggctggacggtggtgtatctgtgctctcggttggcatgaacccattatggtcttgagaaacccggtggcgagttgacatatgca

SEQ ID NO: 42980 - DNA, 595 bp, Zea Mays
aaacaaggacagaagcaaggaggcaagtattactgtattaattatgatatgtcaaacaaattggttgagaaatcaatatcacagcggagtgtgcaaaaatgatccctttagcagtactctgatgtcactattcactacataataaaggcttacatcacattttatagctgctaatagaaaagataatatgctacaaattattaattctcaaagataaaaaaagcatccaacctgagtatggtgggactgtgggacatgtccctgattaaattgtaaggaacatttcaaggttgctatacataatgtttcagaaaaataggaaataatcagaatcatagaagcaattagtcactgttaaaagttaagactttcaaaaatagaacagccatcaaagaaacaaaatagtaaatatttctagattaatctccattggttcctgatataaattactttattcagtgcataccaaaattatatacaatcaaatctagagcaatcagccaatcacataatcaaatatggaatagtagcatttcaacatatatacgaggtcatggttccttttggaatgctttgagactagaaaatccaaaat

SEQ ID NO: 42981 - DNA, 649 bp, Zea Mays
acaatacatatacacaaacccccaaggcctcacatgacagacaacaacacacccatgcccactcaggtgcactgatagcatggcgcttccgagcaccctggactgcctcctgtgcttggttcccatcaacatgaccaggaaatccttcgagagaaccggcaacaagctttggtctgctatctcgggacagcggcagcgccatgctgtagatgttgctgtccatgatgagtatttcgctgccctgggtaacctccatggagtagggctcgatccccagcttactgtagtcaaggatcttctccacagtgtacccgcactcatatttcaccatcgactttcccccgctcgctgctatagcgttgttgatgatgatgcaaggacgtacaaaagcatctttgcccttcaaaaggcataaagcattgttaaaaacctcgccaaagagcatcttatcgcccatttcatctctataccacccagtaagcttggtcatggctgcattccactcggtcaacctcccaaattggtcatcaccaaatattggaggaattagtgggttctggttgtagatgattgtcttgtaatctccctcaaccccagtaaatttgtccatgagtaacctgtgaacggtcatatcctgggctacaaagca

SEQ ID NO: 42982 - DNA, 349 bp, Zea Mays
tcacaaagagggcaacaatcagggtgtcgaagccccccgcttttgcagccgatctattgtccagcatcttctaagagccacaagccacaagaaaaatttacatttccagaggagcccaagaatgccaaattctctcacaaggctcaaactgtgttgagccctttaccatttcacattgttgatggatgaggtcacaaatgacatacaaggcgatatcccttggtgtatgtttttttacagcaatgtagtgttaactaatgaaagtcgagcaggagtaaatggaaaattagaagtgtgtttcgtttgaggaatgaggtagtccatcatcttttcactcgtcactttcttg

SEQ ID NO: 42983 - DNA, 389 bp, Zea Mays
aaggagcaggaagtttttcagtattataacaaaatcccctggactaaaccatccaggtatcttagcagttcccaatggttttcattttcaaaaacagctactggacttcccgtccaccatagctcacggctcaaccgtcgaaccttttaaaaaccgcttttctcaaaaccatctcttttttttggaaaacaaaacattaattgtcataccataccagactcgtccatttctgtggacacagactattcgaataggtttcaaactctgcgcagaggtgtacactttacccactagttcggctctgcgatcccatggccaatgagacccgaatccgactctctttctttccccgcatgtcctgaccttaacggttatccggaaggagtcag

SEQ ID NO: 42984 - DNA, 154 bp, Zea Mays
ctattccatccaaacaaacaaaagatatcacatatacatcacatatctcacaaacaccataaatcaaacaagttctcacagcattaccaacatgttcgaacacaaacataagtatccaacacttaagaacataagtctcaagtatctcacaaag

SEQ ID NO: 42985 - DNA, 2791 bp, Zea Mays
ccccctcccctgttttccttcccatctcatcacaagcagaagaaaatcgagataacgagagctagggttttgattccagtactcacgccgcatcctgtctccttctgcccctccctctcggcaccgcctccgccccctcattctctctcgcgtcatccggcggaggctcgaggaaactgaggccgggagcgccccgaagaatattctccacccagtcgccgacacccctgcgcgcgcgagagttaccattgtactgttgtagcttggcagttggttgactgtgtgacaactttgagctatgtcatattacgaaagaaggggtggagacaggggtagtggccgtattcaaggaagtggtgggcgaggtggacatgtcctgcgtggaagatcaggattggctccccgaggacctcttggggttaactcccgtccatctgcacgcactattgctaaggcaaggccaaacctgtcactatgtttttgttcatggtcaggttcctgactaaagtagaaactgaatggggagagcatgcctaagcttacattatatggaggggcaggagtatctgtgatgtctgtgactaatgtgttctctgtcagtattgtttggaggcttggaggggcagatgcaactttggtagaaattttgcagtagatcataaggttgaatttattgaggggcagaagtaaatggtggtcatctctaatgggaattttgttggaacaccaccatttcttcaaacatatggaaggaaatagatgaaaaataaagctggcggactccagtttgatgtgtctaaatcatgatatgctgaagggaagactccatcaatcttcttgccatatatggaaattgcaatgtgccccttattcaacagttctggattccatactcccatggaagttcttctagtctgcttccatagcaagtgcacaagccatttgtctcctggacttttgtgatattggtggagctctttccttctcagctgttaacttaatgcagtacttcatggttttgctatttctcggttataattattgctactcttcctctaaagaccaatgataagtcaatgtggttcgtgatgattggcatgatcatatgaaaagtttgaagagatattcttttataatgacatgttccctcacatgcttggatgtttggcatttttcagtcatttagcagaaccaaagacatgacatggcgacctgatctatttagtgatagcatggcggctagtggaatagaaactggtacaaaattgtacatttcaaacttggactatggggtctctaatgaggatataaaggagctgttttcggaagttggtcatttgaaacgctttgctgttcactacgatggttatggccgcccaaataggtggtgtttacacggaggagcgatgcaattgctgcactgaagcgttataataatgttctacttgatggaaaagctatgaagatagaagtcatcggaaatgacttaggattgcctatgacacctcgtataaatgttgttggggcttctaatggcagagctacaagaacagttgttatgacgttatgaaaaacaccccattgctggcagagattactggtttacagcaagctagtcttctttctattatacctgatctgcctgagtttagtcaacgtggcagaggttcaagcagtagacctctaaggtaaggcttctgtcaaagccgaatttttgttttagttgtcttaatttgttgcatttaatactagataaacatggtcccttttatttgcttggcttcgtccatcccatgccttattactagtagactagtagtttactacggcatcagattttcaatgttgcaatagcttgatctttattgttagctttagatgtttgacacctgaatactcttttataaacaaacatgatgtgtgctggttgctagtcgctaattaaacaatgagcaatttcttgtttatcatgcaaagaaaacatgttttgcacggtatagatgtactggaggcatgcaaattctataatgttttgagaggtcaaattttacatattgagttgtggacttggacatttgacaaaaaagagtgaggaaagaagtgcgcttcagttattaacttgttagtatggctggacatctctcttgagtggatgcacctaatacactgcaaaatatgtttttaacaaaaagtttgtttgaccttgtcctgacccatgaccttacatattgccgttcaagtaatcccagcaacaggtttaataaccgtggtggtttccaagctggtcgaggccgtggccagttccagagctgggggagaggccgtggtcagttccagagccgggggagaggccgtgcccagttccagggacgagggagaggcaggaagcctgagaagactgcagatgagctggataaagacctggaaagctatcacgcggaggcaatgaaaaccgattgattgcaaggccggtagtgccacaaggttgtggttttatccatcattttctgggagcaacgaacatgctttgtgctttggtttcaggagactagactcttgtagtaaattcgaacaaaagattgccagtttgtagtgtttgcatgaagtttgcaacctgatgtgtttatttttgtatcggttgctttggagattgtgttaatttttaggttcatgcttagaataaccgtaattggccaaaacatgcacccggccctgttccgctctgcgatgtgccttcgcagcattgtgttatttttagcatattgcagtttgtcggaggttagtccggtgc

SEQ ID NO: 42986 - DNA, 392 bp, Zea Mays
tttaatgagtggttctaactggactgcttccaaatgtagtcattggctaagccaaaatttgtatttcataaagtaactaagatcagtgtttgtctggatcgtgacaaggctgtagcttttcccataatcgatcagaccatatcctaggattaaggatgtgcaacagaacccttttgttgtcgacgatatcaatgagcttcagtttttttcacatccataactatataccaagccttttgccacatttgcaagccacaccatcgctatgaacagaaaaactattatgttagatgtagatccatcttctatccacatatcataaccataacgggtccttcaaaatttagatgtgaccttaatgctttgatatttgattggtaagggtctacagg

SEQ ID NO: 42987 - DNA, 416 bp, Zea Mays
gagtcttccgcaaagataaaggcttccactccactccatcaaattactcattcttcgtcatcactccacaccgctctccaactttggtataatcttcactcatatgttatttaccatagggagagttcaaagggcttatatttcactcaagtatccgtttttggcgattcatgccaaagggggagaaaatattagcccaaagcaaaaggaccgcaccaccaccaatttcaaaaatttgagttaagaaaagatttttctatttggtatcttatttttgatagaatttcaaaaattggtacaaccctttcaaaactaatatctaaaaccctcttgaacactaagaggaggattttattgagggggagttttggttagtgaagcgtccccaatcctctcggactcaaatgtgatacaat

SEQ ID NO: 42988 - DNA, 1254 bp, Zea Mays
aggattaataaaagtaaaaaaattccaaccgcacacggcacctcctctcgtccgttcgccgcctggctcgcaccgctgacagtgcgtcagtccaggtcgatactccctctttccaagatccggtcattctctctcggggtcggctaccgccgccgccgtacgccaggtgccgactgccgagaccttctccgatctgtttgccggcgaagagcgcccgccaaatctgcccctggtttcaaccgattgaaccccgatgtccgacgtcgagaaccctggcgtgggtgggaagccgccgccgtacaaggaccctgacaatgggagtcagcgattcctactcgagttggagttcgtgcagtgcctcgccaaccctacctacatccactgtactatctagcgcagaatagatatttcgaggatgaggcatttatcgggtacctcaagtatctaaaatactggcagcgaccagagtatatcaaatacataatgtatccacactgccttttctttcttgagcttctccaaaatgccaatttccgaaatgcaatggcacatccaacaaacaaggagcttgctcataggcagcaatatttcttctggaaaaactacaggaataacagactgaagcacatcataccgcgccctcctcctgaacctgcaccttcacaggcacctgctacattgcccctacaagcgtccgtgccgacacctgtagctccacctgttcctgcaccaacatcgtctatgccacctgtggtagcaggtggtgcatctgcaatgtctcctatgcagtttgtaggaactccaggcactaatatgccgaagaatgacatgagaaatgctatggacaatagaaaaaggaagatgggctaattgaagttcttgcgcaacttttcaacggacactgccggattcgagcacagttgctgcctcaggagccttattatttccttttgttttagtgctggttatttggccttgtagttgagggttcgtgagtttttagaatggaagcttctgacttagagtgaagttagaacaaatactccatgtcgcatgaacttgcacacgtgactttaggtgtcagcattctcctgaatgatcataccatttaccttaatgtttcagcatattgcttggcagcaggaaatatgtactgttcataaactatacatatgcccgttggccccaatacaaagttgacattttggcaatattctgttcatacaaaacaactgtacatgttttagtattttt

SEQ ID NO: 42989 - DNA, 508 bp, Zea Mays
tgaagatatcagagacagcaatctcaaagtccatgacattagattgcctcggcgggaagaataagaaattgttcacatttccatataaagggagttttgggtgacctccaacatgcataggtactatcgataccttaattcactttctaggacgactgttctttccaagggtagaaatcaaatgaacgtccttggggagattcatgttctccttcttctccttactcccgatagcactgcccacataaatgtgtttgacatgatctaggaagaaattcttcgggcatcttggtctcctctgaaggggtctatccatgcaccctatattatgaagatgattgaagtcgttacccatactcattttgacgagcccgtcaagcactcccgcaatgtgccgtactgggttgactccaataacccagctgcatgttcctagcaggctcccgtagggttaggaggcccttcttctgatgagtcggctcctcagcctccgcttcatgagacctca

SEQ ID NO: 42990 - DNA, 3052 bp, Zea Mays
aactgttgtcgtccactgcttttgcttctgggtctttcgttcgtagatataaaacggagggaacgcagagccgggcgcctgtctggattcattctgcgagagatctgctggggcattgattcgtcatcaggctcagctctgatcagcttcaaccatcatggggagtcaagagtcggagcaggccaaggtgctcccgggaaccgactgcccgcagcagccaccggcgagcaggacctggcagaggaggttcgacgatgaaggcaagaacgtcgccatgttcagcatgaccatgagcgacctggtggaacttgttgcggtctatgatcttctgaggaaatggatggacaactgctaccgtggcgtaccggtcggtgggataggttcaggaagcatagggaggagctacagagggtacttccagcagttccagatattccccgtgaccaacgaagagaaacctgtcctagcaaaccagttctcggcatttgtttcgcgcccgaacgggaacaagtactccacggtgctgtcggcgccaaccgctgaccttctcaagggagtcggcaaagccggcattggatcttgggactggaggttgaaggaggacaggtgcacttaccacgccctgttcccaaggtcatggacggtatatgatggtgaacctgaccctgagatcaagatcacctgccgtcagatatcgcccttcataccgcacaactacagagagagcagcttcccggctgcagttttcacattcacggtacagtccgttttgtctgttcttttcaaggcaggtgaacaactctgggagctcacctgcagatgtgacgctgctcttcacctgggcaaattcagttggcgggaagtcggaactgacaggaaaccacgtgaattccaaaatgacggagcacgacggcgtccgtggcgttctcctccatcacaggacggcgggagggcagcctccggtgacgttcgcgatcgcgtcccgagagaccgacggtgtccgcgtcagcgtctgcccgtccttcacgatcgcgtcgggcggcccgtccagctccggcgagcccacggcggcggccatgtgggacgagatcaagaagcacggcgcgttcgggcacgccggcgccggcaacggcaacgcggcgagggcggcggcttccaaggccgggtcgtccgtgggcgcggcagtggcggcgtcgacggccgtgccggcgggggcgacgcgggtggtgtccttctcgctggcctgggcgtgccccgaagttaagttccccgccgggagcacgtactacaggaggtacaccaggttctacggcactgatgccgacgcagctgcagagcacctagctcatgatgcccttcttgagcatatgaactgggagtcccagatcgaggagtggcagaagccaatcttgcatgaccaaaggctgcctgaatggtatccagttgctctgttcaacgagctctactacctcaacgctggaggcaccatctggacagacgggcaggctccgaagagggccggcttcgcttcgtcgttgacggccaccgagccgttctccatcgacacgctcctcccagtcgcagcgggcggcagcgcggtggacggcgtcgtgcgcgcggtggcgtcggcgacggagcggtcccactccgcggcggcgttcggcgcggcgctactgcgcggcggcgaggacaacgtggggcagttcctgtacctggaaggcatggagtacaacatgtacaacacctacgacgtgcacttctacgcctccttcgcgctgctgtccctcttcccccggctggagctgagcctgcagcgggacttcgcgcgcgccgtgctcctccacgaccctcgcccccggcgcaccctggacggcaggaccgtggcgcgcaaggtgctgggcgccgtgccgcacgacgtcgggctcaacgacccatgggtggagctgaacgcgtacatgctgcacgacgcggcgcggtggaaggacctcaaccccaagttcgtcctgcaggtgtaccgcgacgccgtggccacgggcgacgccgcgttcgcggaggcggtgtggcccgccgtgtacgtggccatggcgtacatggaccagttcgaccgcgacggcgacgggatggtggagaacgagggggtgcccgaccagacgtacgacatgtggtcggtctccggtgtcagcgcctacacgggcggggtctgggtggcggcgctgcaggcggcggcgggcatggcgcgcgtcgtcggggaccgccccgccgaggcctacttccgcgcgaggcgggacagggcggcgcgcgtgtacgatgccgagctctggaccggcgcctacttccgctacgacaacagcggcggcggcggcgccagcgagtccatcatggcggaccaactggcggggcagtggtacgcgcgggcgtgcgggctggagccggtggtggaggacgccaaggcacggagcgcgctggcgaccgtgctggactacaacgtcatgcgggtcaagggcggcgccatcggggccgtgaacgggatgcgccccgacggcgccgtcgacgcatcgtccacgcagtccaaggaggtgtggcccggggtcacgtacgccgttgcggcggccatggtccacgagggcatgacggaggccgcgttccggacggccaagggcgcccacgacgccgcctggggcaacgacggcttcgggtacgcgttccagacgcccgaggcttggacggaggacggcggctatcggtcgctgcactacatgcggccgctcggcatctgggcgatgcagtgggcgctgtcgccacccgagctccacagggatctcaggacacccgaggcgcgatcctcggaggagccgtcgccggcggacgctgccctcgggcaggcgcagttcgacaaggtggcgagcatgttgaggctgccggaggagcagcagcccaagggatacctttgggccatctacaacctcgttaggcaaattgtgctccccgcatgaggattctcttgctccaagcagccgcactcatgaatgcaaattgagcccgttattatata

SEQ ID NO: 42991 - DNA, 735 bp, Zea Mays
ccaggacacaatatttatgtagaccacatttcaataccaatactatccatatgaagacaggggcatgtcagcagagaataacatcatccatccacactaggaaggtacaaaatattcagatcccatacgagtaaaatgtgattctaggaagtcaaggggggggggaagagatgggtacacaataggaaggtaggaaatattttcagatcctatacgagcaaaatttaattctgagtagtcaagagcgaaaagagatgggtaccatgttgcgtgtccgaatcaggagaagctaacgcagatgagccaaggtcgtagccggagaggagagtaggtggtgaatctgggggaggccaagatcgggagagagatgattttggggaaggaggggcagagatcgtttttgccccctgtaggatcgtcgctgctcgatccgcagctcgttccatcactattgtcgtcagtctcccggaggctggagccgccagccgcaccttatcccaactcccacccttccgcatagtttgccgcctctcggatccgggagctcagctccggaggcggcaatagcctaggttgagcgcgtggaagagatcgaggaaggggggccgctgggcgggagccgagagatgacagaggcggcaggcggcaggcggcgtcggtcggaaaggaagacgagcgtgcgaggtagggagcctggcgaggggctaaacagctgttttctcgaatggaaatttg

SEQ ID NO: 42992 - DNA, 369 bp, Zea Mays
gggaggttctgccacagtgcggctgaccccaactaggtctaaagcagaccaggcgaagacatccttgttgtggttgagacaggagagaagtcttgcttcttcgtttggtgaaaggtcttcgttgattaagacagtttgcttgggagttgcgaggtcaagggggatgtcttagttccctcgctactctgcagttgtgcgttgacttttttatgtttagttgggtgaggactgctgttgtcttcgcattctgttgttgggcaatgaacattgcgctgtcctgggataaagtctctttctatgtttcttgctgcttgttggtctccacattacccattgagggcctggtattttcatgcacatatagagttt

SEQ ID NO: 42993 - DNA, 818 bp, Zea Mays
atcaaaataatacagggtaatggcctggatgtccagggcacgcttcatcctggatactccaaggaggaagaaattcccatcgaagaatttgagaaaaggaatttcacctatctactgaatgagcaccgctccatcggtggctaccagtgcctgttcgctgtggatggattctccagagtaaaacttacgccccaaatccccccgctctctctggtgaaagaacccaaggtgtttgcacatgggaatacgagagaccctgacattctttcactgagttggcccggttgtccttgagggcatggggacaccggacacccagattcctgtggcaggaccactaactgccagcagtgaagatgtgtttgagtcagtccgcgtgacacatatatggtatacatctctgggtcttgccatgaagctaccttacctgcaaatctagaatggggcccctcctcccctagatcccacggcttcgaaaccacagctttaaggaacactgccattttcaggtgcaaatttgtgtaacattttagagccggaagaaagacagaaagcacacggggggtggggggaatcatagcaattagcaaccttgtatttacaagttggtcgatatatttttttcccttttgaggcaactttcatactccatcttatataacaagagcttctagactttatttatcggcagcaggcatacagtcgtgctggagacgcatacttgctccattcaaagataatatatttgttttctatctgctgtggccctgctttgcgagtcgtattcggttcggtggcaggctggccgcattctatct

SEQ ID NO: 42994 - DNA, 1018 bp, Zea Mays
tttcctttcggctgacgacgacgcgtgggatgcggcgacggagggatgggccggccggccgaggccgcggagcgagccacgtcgacgtcgagggggggatgccgcaccagccagcaccaggctggccccccgtcagcgcgccacgttcccctcccctgccctgcattaaccggtggcatggggcgggccgcgggcggggcaacatgtcccgtgctccacgcttctttaaactcccacccaaccggccagcccaaccactgtcgcttattctgagggatcttatcaggaacccaaggatttctgtagcggcatagctagcatcggatgggagcgagcgacgacgcacagcaggttggggcggggcgttgcagtgctccagtgctcgatcggtgtcatgctgcaagcccgtatgggtctgactgatcggcatactatgcggctgttgaccagttggacgacgctgcactgacgagaccgcacggccgattgaccaggtcaaaatggtctgacaactggtagtcagtctggatgaggggcaagcaatgattggcagttgcacgcacgcacgcacgctacaggagcagcacgttcggtacagagcgattggccggtttggcagcactccccggccgctccaggtccccctctcccgcacacaacacaacacacaatgacacaaacccccgtgccagtcagtccggcagcccccagccccattccagcaagccgcgcacgcccggagccgcggagatcattaccgccaaaggtgcgccaccgcgccgggggccgccctgtcgtctttgtaccgtgccgtccacatggatgcctgcctgtttgttgcctgggggtgtgctgtagcggtaggctcgcgctcgcctgttccggctttaaacgcaacgcctttcggcctttgcctttgtcgtctgctccccttgatccgccgatcgccaccagctccgatccccctcacgactgggggtggacgaactaacgtttcggccttttgaatcgatgtctt

SEQ ID NO: 42995 - DNA, 941 bp, Zea Mays
acccctctattttccctagccgccacttccttctccccctgtcttcttccacctcgcgcaggaatcctcccacggcagcagcagccagcgcagggagcttcctccacccatggcgcccaagcccttcttcttcctcaagccagcggcgccctcattcctccctgcgcagcgccccttttcttgtgcctccagcagcaagaagccatcgcccctctccattttcccccacgtctcttccctctgtttttcctgtacgtgcgcaggagtatggggcctcccatggcgccctcctccctggtctcccttgcgcagggcagccatggccgagctcgccctcgcctcctgctctccatgggcgtgggtccccatcctctccctcctcccaaagtgcaggtagcagtccagcagccatggacgcccaggctgggaaacgctggaactcgcgctctctctggtttgggtggagcagcgcctctccctgcgctcagcctccccaactcggtgcccttgctgcaggcgagcagtagctccctatccatggcgccattgcaatattccccttcctccccctcggccagccatggcgcagcgcctctgatccttcatcctcgcaacgcagcagccgagctcgccccacctcccctcgctgcgcagcccctcggcgaaacgccgctgttcctgcaagccccggcttcctcgctgctaccgctgcgcgtatgccaagtgctcggcataatgtcaagggagatgtgttgttgcagcacgttgtgacgctcgccgggtgttcactgtttttggcgcagccccgttcgcgatgtcgtcgaccctcggaccgagagaggatcatcgcgcaagtgatgtggtgccaacaacaagatgcagtcgatggacgacccaaggaaggatggatttaaccagtggatgctcgccaagcgagtacc

SEQ ID NO: 42996 - DNA, 1166 bp, Zea Mays
cgttcttaactattgaggggtgtttactctcttccatctactgcaaaattcaattggaaggatatctaatgtagagttaatttgaaaagactgtatctacttctagaacagactcttttactccgtatataccactacccacaaatgtcgcagaagcacggaaaacccgaagattgttatttaaccaaaatagacttggcagaagagactcaatgatgactacaacgacgacttcacaatgtgcctatttcacaaatgagtacatacagtcacttaaaggttcaaacatggacctctgctcatcaaagaaaagccggacaccagatcttccaagaactgaaaattttctcagattatcagcaacgttttagcttgcgacgcaacttggattctctcctctcctctcctctcgttgcaacaaggcagtccagtgaatgagacggatggccccagctgtgcctgtagctgatgcatgatggagctgagcctgtgggcacaaagattaaatagagtttggaatggtcttttagacgccattagacacatgcaagtctcagccgatgagttgaggaggttgaccagacgcaaccatgtgcctgagtatgtagagtacctacgcaaaaatagattatgaagcccatgtgagtgctgttactgaaattgcacaaggtctagaccacgtgagcacagatttggcggaagttcttattggtccgcaacctcttcttgaagattatgaagcccttggtttgtacgatgatttccaatgcgatggtgaagatagctctgtggactcggatgagatcaatgatcgtcgtctatcgcatatgaacgagcgtatatgagatatttgtttgcgagagagttcagtttgccattgatgtctgtagcttatgaagcccttagttagttgccactgttgttcctggtacttgtatgaattgggttatgaaaatgaagagttgtgttatgagttgtattttgtgatcatataatggcttcatgtgataattctgcacctgttgtcactgttgttatgagttgtatcttatgaagcccttagttagttgccactgttgttcctggtacctgttgatcatacaattgttagttgtcactgttgttcctggtgctcatgatttcaagatcattttgataattctaca

SEQ ID NO: 42997 - DNA, 1511 bp, Zea Mays
agaaattagaatgtcaattgtgcaaagccagttatttagggtgtcaaaaatacaaatttctcctcccgaacaccctactcgttctcccccatcggcgccgctacgaccagcgtttgagccactcgccgccgcgcacgatcctccacgccttgctccagtcctcgtcggcacgcctccttcccaaccctaaccctagcactagcagtcagtcgagcggcggcaagtcaagggtctgtcgagcgggccggcggcgaagaagtgtctagcgaggcgagtcaggtgcagggggacccacccgcagcggtggcgtgaagcgcgtttgactggatcgaccaggttggcggctaaacagaggaggttgcttgtttgttttctccgtccggctgcggttttcctttgactggatcgatcagatttgccggcggcggcagcggtcccccggcaaaggcgtggggatccctgccgggatggaggtgccgtggctgctgctggtgcacgggtcagtgacggcgctggtggtggtgtcgttcctctgcgggcaatggcccatcttcgagggcaccttcatccagagcatcaaccacttcctcacctttggggcctaccactacctcctgcggtttgtgcagtctgtgtgcggcactggggctagggatctcgtcctcggtgtcgagggatactgctgcgaccgacccaacccgatattgcaggtattttatgttgccataattggagtgacatattttataatagtgcagacatctttccagtatattcctgggtattatgtgagtggattgcacagatatctgagtgttgtggctgtttctgttggtgctatactcttcgtgcttactagcttttctgatcctgggactgttactgctgaaaatgtttctcaatacgtatcttcctacccatatgacaacattatttttgtggagaaagaatgttcaacttgcaagattactagacattcaaatggcaagactacatcatgtggatgaaaaaggaaaatgaagcaaaggcggacgctgccacgctcagatccagcataggctcggccaatagtgatgcacagaaagctcctccaagcaaatggaggacgttcttcatgagatcccgcacaccaagcatggaaccagttgtgagaaacaacatatatgacagaggcatgattacaaacctgtgcgaggtggtcgtccctttatcagaacggaaggcattttcccgcatgaaatcagattgatgtcttttgttgcagttgctttgtcaccaaactgttgttgtatatcagtgtagaatttgcgacacattttttttggtcataccatagaggcataggggaaaatattcaggataatcgtgttcagtacctacgacctatttattataggtgaaaggttttgaagttgcatttgcctttgcaatacgccgatgtcactattctgtttttagaacatgattctgaaatggcactaaatatgaaactcatactatatgtcttcgag

SEQ ID NO: 42998 - DNA, 611 bp, Zea Mays
ctgctcgctctggcgtctgcgccgtggagctgcgtccatccagctcgctcctgcgcctagccatggacaccagcgccctcacctctgctcctccctacgcacgcccagctagccgcgagctctctctctctcgcgcgcttactctgtccggcccctgctcgaccgcgcgtgctcttgcgcccagacgtcttctttctccctcagctctccctcgcatcttcatctctctgctgagctcggatttccctgcgctctgctcgcccatggagtttgccgagctccatttctgctcggccgtgcccctaacgagtctcccatggccacgccctgggatttgccggagtctgtttccctcgccgcgcgctgcttctttcccatggcatgactgccctgctctgcttgacggacgcgtagtcgcccagctcgcggagcttccttgccgtggccgtcgcgtgcctgcacgcagctcggcgcctgctgcacgcccttgctgcgcgtgtcgaactcttctagtgcgcgcgcgaagttctccgctcgcctcggcgtgtcaagtttccgtgtcgagtttctctcttccgtgtcggttgtccgtctttgatcctcgcctcgac

SEQ ID NO: 42999 - DNA, 264 bp, Zea Mays
cggtgcgggggcgtcctggaacgcggtgagcccgtcctagtgcatctcccgcagccacacctccgtagacaccatcccatcccacgtgtcgaggacgccctcgtagagcagcaagcgcatgcgcgccggccccacagcagtgtctccacgtccggcttggcgctcttcatctcgtcatcgtgcgcctcttccacggccgggctgttgagcacccacggtggcgcgtcgccccagacgccgagctccgccctcacctctgcgctg

SEQ ID NO: 43000 - DNA, 2340 bp, Zea Mays
ggaatgttatttattttgtacaattcaaaattattaaaaaccattgtttttagattattatttctaaaattattaaatacaatattttgcgcatcctttgtatagcatgaaatgggtacaaaacaaagaaaacagaaaaggaaacagaaaaaggaattctgttaacactgtagctttaggggaccgaatttaggggatgttgctggagactcagaagatatagaggacataatcttttagagtgtgctgtaaatgacagagaatattcgtttaggggacgaaatttaggggacgctgctggagacagcctaatggtaaagccgggacggatgacgacggaaggaggagtgatggcactcgctctacttagtttcctataggctatcaacctccagtgccacgttcgtacgccatctgctactaggtttaaaactggagcagcaggagcgagcgtgacgtatgtgaagcggtttgaaccgtaccaacggttgggttgcttggaaccgacggctgaaataattttgtgtggaatgattcactaatttgtgtaacttcaataaggtgttgtttgattatttgagattggtgggtcggaacgattcctaactggattgcttctctaatttatataaattttgattagctgaaacgattctaggtgcaatccgacacaaacgaacaaggtctaagttgccgacacaaacgaacaaggtcttagttggaacggttcttgtcttccatcccagctaaccgaacacacattaattagaaccgatcccgtacgtagaagtaggctactagtgctagcgcaagaccgtgcaatgcatgatgtcatgcacgacacggcgtgtcgaggctccgaaagtctatggccgattttcttttttctttttagggctagtttggaaaccctattttcccgagggtttttcgttttctcaagggaaattagttcattttcccttgggaaattggaaatcccatgggaaaatagtgttgccaaactagcccttagaaggtagatgcctagatgggttgggtgtttcgtcaagttcagcgcggctgccgtgccgcgaacgagtggggcgcgtcagcggcggcgacgaagctgcgtggcatttgccactttcttagctttttccagccgggttgagcgcgtgtccatgcatatttttggtagataataacgtcgatgcgcggttgagatagacgacattcggtaaacaatcaatccacacacctagacacacccggggtacgtcccccgcagtttcttcttttccactcaaaccaggaacccgccggattattgctgggatacacacaaagtaggctttctagcatgatgctatgatgatgatgatgatgatgatgatgatgatgatgatgatggacgagatgcactcccggacatgcgcatcccgatcgaggctgcggcagcggatcgatcaacctaattcagtatatacttctcctttctccttgtggctggacatgcttcagtcgatcatcgtcaagcagcaggaggaacacattagacgcacatgtttggactgtgggttattttacaaagaagtataagagcatctcgaaagatttagttaacaacatacactgagtagggggagtcagtcggcggagttgtctatgattcttgcatacttagtcggggcaatgttcatggtaggtattattagtatagctcagagtcagttatggctcagaccaagcatttgtacctatcctcgtctagtggggacgaagtggattatgaagttaggggggcttaagtacgtaataccttaataaggggtgaaagggaaataggcttacaccttttcctaattgattttggtggttgaattgcccaacacaaataattggactaactagtttgctctagactataagttttacaggtgccaaaggttcacaataaaccaataaaaagaccaagaaagggttcaaacaaagagaggaaaagacaaccgaagtgtgccctggtctggcgcaccgaactgtccggtgtgccactggacagtgtccgatgcaccagggaacccaactctgaattgctcaccttcgggaattctggaagccgctctgctataattcaccagactgtccggtgtgccaatggagtaacgactactacagcgccaacgatcgtctgcaacagcagttaatgcgctacagtgcgcgcagaagtcagagcagagccagaaggcgcaccagacagtctacaggacctgtccgatgcaccaccggactgtccggtgacccagatgtcagaagctccaacggtcagaatccaacggccgggtgacgtggctggcgcac

SEQ ID NO: 43001 - DNA, 305 bp, Zea Mays
cttggactaggtctcttgtgccaataaaagtgcatacactattaaaagccttctgacatgcttcgatatcattttcaagagcagtggcttgccttctaatgccaaagcgagaccaaatagggtgttggatgatcccctttatatcttctctttcaattaagttgttctttacataaaaccattcttccatccaggctcctggccacctcttctgaaacgtctgaactggatagctcatatcagagcgaggcacgaagccgtaacaaccaaaattattgtgatactgctccttgccagtagccttc

SEQ ID NO: 43002 - DNA, 1524 bp, Zea Mays
ccatgcccccgtctccgcagatctcgcctgcgctaccccgctcgcgatagcctgtacctcgcgcctagcctcggcgctgccctccaccgtcgtcgtctcctccccgtgctccgccttctcgccctcctccacgtcgctgagatccgcatgcatcatatcctccgagtacgccctcctcgttgtcttagacccagagaagccgagcctgccgccgcctcgctcatccctagatctgcgcccagttatgtctcctacctcgtcaccagcgtctgccgtgccgaccccgaccaacgccgccattccgtgcgcttgcttctgcgactttgtcacactcgcagaccaactcgccgaggccttccgtggccatttagtgccgccgctcctagacaagaatgttggtcggggagcaaaggacgagggagatcacgcggtatggtgtacccactgtggacaagatctgcggccatggtatgcagctccctttccatatttgtcggtcatggtatctgcgtatatccgtcatctgctttactcgaacagaataatgttgagtcaatgtcttctgagccaattgacgaattgattaaggctgattgttttgccaaagcctttcaagaacttaagtatgagatcatgaaacgcttgcaagcaagaaacatatatgtggtatgactagggatggagtgaatgatgccccggctctgaagaatgctgacattggtattacagtagcatactccaccgatgcggcttgtagtgcttctgacattgtcctgtctgaaccaagccttagtgtgattattggtgttgtgttgacgagccgtgcaattttccaaagaatgaagaattacatgtttgacttcccaccatttatggtcctgatcattgccatcctcaatgatggtaccattatgactgtctctaaggacatagtgaaaccatctccacaacctgaaggtgagatttttgcgactagagtagttcttagtgcttatttggccacgatgactgttattttcttctgggatgcgtacaagaccgactttttcccggtatggaccagcaattgctactctgattaccgtatacgccaactaggcatttgctatgatcaagggcattggatgaggttgggccgacacatctggttgtacaatatcatctccttcttcccgccagatatcatccagttcctcattcgttatgcgctgagcaggagagcgtggaacctcgtccttgagcagagggaggccactacaatgaacccttcattgcggaagatggagtgtcaggagtgcttctacaccacaagcaagttttgattgtctcttctttgagttcattattgtggattacttattctttttacgatgtgttatcgaggctgacaagctattttatttttgcgaaatagctaaggataatccacctatgacttttgctgttgctgcctgcgaaactcaggatttgaatgtgacagtcttgcaagtgtttggtctttatggagaaaaccatgtttttgca

SEQ ID NO: 43003 - DNA, 681 bp, Zea Mays
atcctctccacctctcccaaaattggtagtgcatggtgaaaccgtagtcctttacggccgtgtagccttaatctcacctcccaattccacccagaaccgtcgcgacgccatttttcccctttttctgtcaccggcgagcacaaattcaccgtgctccatggccagaccactctagtatggctctgcacgtctcgtatgttgttttagcagctctgtgtacccatgaagctcattgtggcagccatttgaccaattcgggcgtgattgagtgggaacgcgggctcggcgtcacgggttccgccgcgcgcgtgggtagagcactctctatgtatgcaagccaaaattgaagtttgttcttgagtcgctttgggtcggtaatgctcaccccgtagctaatttggacagccgctgccggtcatgaccagtacgagacgcatagtgctcgacgacgagcgcgccgtggccatgggtctgattggagaagaaacaaaagccgagggacctatgcgtgattgtcagtgagacgatgaatagtggctaggggttcttaacggattatccaagcaattggggacctctgtgcaaatccgccagcgtaggcgcgcgcggggcacgttcccgtttcctgttcaagttgggctgacttgggccagtttcggtccaacactgttcctgtctttt

SEQ ID NO: 43004 - DNA, 720 bp, Zea Mays
gaaaacagaaaatagaaaacaaaaaagggaaaccttgctctagacccaatctgtacctcggcccacttcatccgtgtagatcagcccacgtcgcaacccctcaaccacacacccgcgcacggtctcacctcgaccgacgtgtggggccgagttgtcaactccttcgtgcctctcagtgacgaaccaacgccgcccgcaacagacatcgccgatcctgcgcgccccacaccatagccgcctccgcttcctcgagattttgttgcaacaactctaggatcctgctaccgaccttctcggctcggactcgcccaccccaatgcatataaaggttgagccatgaccctgtgcctattgtgcgccaccgaccagagcgaccgagagaagagagaaaacagagagatgtgccgcctccgccacgaatccactgcatgatgtgggtcggcttcgccatagcctcgctgcaggtcaaggacagatactacaagatgaggagcatgaaggatgtcgtgatgagttcgtgagaggtctaggtcgtcgtcccccaatcaactttggttgctagatcgtcgtcttctatgatgtaattacttaattattttatacagaactccatcatatattaatgatgttacatttgtttatgtaccatgactcatcatatgtgtgagacttgatcctagcagcacacatttggcattttacgcccgggtttggtgcccc

SEQ ID NO: 43005 - DNA, 1114 bp, Zea Mays
gccagctgctcccgtcgctcgtatatattactgcgaagtaaccctagctgccaccagcctcagcctcccctctcggctcccccacacggcactccagcccccagcctgccactcaaacagtacaccaccgccacaagcccgggccgaataagtctacagggcagcagggctaccgctgccgccgcacttcgccggcaaagaacgccctccagatcaacccctgcgatggagtccacggtgaacccgaaggcgtacccgctggctgatgtgcagctaacgatgggtatcctcgatatcatccagcactccactaactacaagcagctcaagaagggagcgaacgaagcgatgaataccttgaatagggggatatcagagtttgttgtgatggcggcggatacagagcctcttgagatcctactccacctccccttgttaggtgaggataaggccactcattcaaatgaattacgcatactgatttgcacaaagaatgatgtgtgcaagctatggtacattctcaactatcttctttccaagacatttagaatggctgcatccatgtctgcatcagcagactccgtcgcacctgaagattgcctagccagacagctaccagagatattgggagacttagctgacagaactggtgatggtgatagctctgcttccatcactgctgattctagcggtctgcaacatggattgtgtgggagctttggatggttacagttcttttttgggaggaaggacaacggtagcaggtttagtaggccttcttatctgacaatagaaatatagttaataaataaatttgagataaatgcgcttaaaaggaaggctcagaaggcggcgaacccagcgagcggtgtggcaaggctcacaagcgcgagagcaggctacactgcagtggttgcaatcctgctattgtcctcatcggtgtgttcttttcctgaccaagtaaaacataacagcaattcatttttaccatgaaggaaattctttgcaggctgagtcccgtcaacggaacgctagcttcactaagcatcggcagccatgttcggctccaccaaacgagactatggaagccaaggctattagaaggcagtgaaac

SEQ ID NO: 43006 - DNA, 1869 bp, Zea Mays
tgcataatttattagcaacacatgggtcaattagaccttattattcctccagaaatagtatcataccatttactaactaaagtaacatttagatcttacaaatagtagtaatttatatatatgtttacgtagcttggtggagctgatggtggtggtggaggttgtggttgttgttgttgttgtctttccaaccgtgattgccttatttcttgacgtatctccagacggacctgacgtatttcctcacgttcttgtcttatctgattttgcatttcggtcaccatgtctgtcaattgttgtattaccagcctttgggcagcaaccacttgatcgatttcaacagatggaggatttggaggattcatttctgcttgctgttgtctgataatctttccttcctggtatttactatcgaagttagaatcatatgacaaaatagttttgcaagggaaattattcgataagcggaatgaataagctagtagctggttatgatctgaaggttcttagtagggcttaatctttgttttatatcaagattgggataactagtcgtataaagtgaatgtccaaaggtacaatagaatctgccaagatgagatagatatgggtgagatagactacatgatgtaggtcaaaattttgttttaagttaggtggggacagataattaatcaattcgtcatgacactgttggttgggttagctcagggttgagttgatccaatgtgctgagttaagttaacacatggctagaagggtccaaatttcactaatctgttttaagaagaccacattggattagatctcactagattccataatcctatttaagaataccatttagttgagcatatcccgctgactttatctttatgaacttctagtatttttttatacacctgatttttttgccattaacaggtgtggcataggaaacaagggtacatcagattttggccattaggtgagtgtagatatgatttggggtaaaaggaagttaattattggagacttttattccgggtggtggatcttgattcatctgaagatcttgtatctttcattgctgaagttaacctttctcttgggtttgattcaaggaccatcaattgtggtattaggtgtcattatctgagttgggacagcaattataggtacatagggtaggcagattaaactgagttttgctttgcttttgggatgaatgagttgggcaacctataacataggctaggtcgtggtttctcggatgaattggtctaagacacaagtttaggtttagaatccattcgcatgaagatggtttagttaatacttgaggtagatcagaattttccatttaaattaaaacagaggagttatgcaaccatcaaatggttaaggtagtggcataaggctgagttggtcggttattcttaatttagtgccgagtgaatcaagttagaacaggtggatagggtctaatccatgttacaagtattaattaatctgtttgagtgggtcacattgggttagttcagattagatggaactagattagtttagcataactagatttgactagataagacctaattaattttggattagattaggtcgaaagggggtctaggcatgaccagattaatctagataatatctacttattttattttagaatagattgtgtcagtcacaccattcggagataagcaaagtggtggagataagtatgcttattaggacaagatgagtctctaggaataagatagaatcttttcgagataagatgaatcaattaaggtaagaaagaatcttttaagatcaaataggtcaattaatatatgagagaatcttttaagataagatggattatttaaaataaga

SEQ ID NO: 43007 - DNA, 1812 bp, Zea Mays
gtgcattgttggttcaagggtcatgcacgtttatctcttcagggaattggcatgagtagggtaacttgaatttgatcacacaagcattggaagcagttgggcgtaagatggaagttctacctgacccttctacagttcatttccatctacctggtgatctctctgtccttgtgcatcgaaagtatgaagacttcatcaatgaactgatcagcaaattccctcacgagaaagaagggataattaagttctatggcacatgctggaagcttattatttgccacagaatgctggggatattgctcgcaagttcataaaagatcaggagctactctccttcatagatgctgaggtgtgagagattttgttttattgtgagcacagtcaatgccttgcaaacacccatgataaatgcaagcatggcactttgggggaattaattatccagttggtggcgttggtggtatcgcattatccctggcagatggccttgttgaaaagggcagcgaaatccgttacaaggcgaatgtaaccaatgttgttcttgaaaatggaaaggctgttggggtgaggttgtcaaatgggaaggagttctttgctaaaacggtgatatcaaatgccactagatgggacacatttggaaaactcttgaaagaaaaagaacttccagaagaggagaaaaactttcaaaagaattatgtcaaggcaccatcattcctttcaattcatatgggtgtcaaagcatcagttcttcctgctggtactgactgccaccattttgtacttgaggataattggaataatttggaaaaaccctatggaagcatatttttaagtattcctacagttcttgatccatcattagctcccgaaggacaccatatacttcatatatttactactgcaggcatagaagcctgggagggtatttctaggaaggaatatgaagagaaaaaagagatggtggccaacgagattataagaaggcttgaaaagaagttgtttcctggtcttcaagattcaatagtcctcaaagaggtaggctcaccaaagactcaccggagatttcttgctcgaaatgatggtacatatggaccaatgccgcggggtaaacccaagggcttacttgctatgcctttcaatactacttcaatagatggcctttactgtgttggtgacagctgttttcccggacaaggtgtaatagctgtagcattctcagggatcatgtgcgctcaccgagtcgctgcagatattggactagagcaaaaatctccggctctagatgctggtcttcttgggctactcagatggttgagaacacttgcatagaacgatatcagacagttgaaaatggacttcatttttccccccggaaggctgatgtttcaccagagttaggattctgcacgatctgttatgatgatcttgttatctgtaccatctcagcatcgatttcttgaaactcctaacggaaaaaaaaaggaatacgaatgggtgtacaggtttcagattttgaattatatgattacggtgtcagggccatggcatattggtatgcatataaagactacatcatagagtaaccagatggtgtacatcatctgattaccgcaataagcagagcactacatttgggagcaatgtaaatcatgttacctaggattttgaaagttctgttttgagatacccttcaactttctgaatatgcataagcttcattgttcgtaaggcatgatgaaacctagaatgacacatcgtctaagaaaatttaaaactatgatgaaatagtttcacatattgcctagttttatc

SEQ ID NO: 43008 - DNA, 1339 bp, Zea Mays
acgccccaccccgctcggcctccagtccagctccaccgctttcacccgctccgctccgtttccgtcgctcccgtcccaaggagccgcgccacgcgagagggggccacggacggtggcagttttctgtttcggtgggcggggacgtcgtcgaccgaccgaccggagcggaaggccggagatgatggaggagggggcgcccgatctgcgagagctcgtgcgcctgccggatgttctcgtggtatgctcatctactggatggacagatgaaaagcacatgctttatcttcgattattggaagaaacatttgtgcaccaattacatggaagtggttgcatttttaagggactgtttaattgctctccaagatattgtaggcaaatgaaatcatctaagcaaattgttaaatacactacgcctggtcaggggtgtgccatagttgagggtggcaaagtcaagtcctgcataaaggctgagcatgttgagtcaccttcctgttgtggaaatcagcaagatgaaaaagttcgttccctggaagataatgcatcaaccactaagcccatggaaaaagccacttcccatgcaagggcagcaagcccaggacaagcttccacgtgctatgttggcaaacacagacattctccttccagaagtgcaggtattaagttcatttacttgagtgacgtggccagatttttaaaagagaactactcgtgcatttactcagaggggtcggatcagaactttgatgaggaaacccaagggactggagaatcaaaacatgaatacaacccgaagcgactgaaatctgctgatggcacaagggatcatcaggttgtgaatgcagaagctcatcaggtgggctgccttgatgtgagtgacaaaaatagcgagaacttcagtgcatcgtcaaaagtgcttgctgcatcacttgatgttgaagctgggtctccctccggcgactgcaaggatcatggaccaaaaggataatgcaatgtccaccgagtgttttctggagttgactaacacacccacctggcgcgccgcaactgaatcagagataggaagtcaatcagtgcaagtttgtaagataagctagcttgcccgttattctggtttggaagtcaaaatagttcgttcaacttagcctaggcagttgacggttttgttgtgtttctgagggactctgatacgaaaatcaaattccctttgttctgtgtttggcgctgcaacctgtaaatggagtgctttttttttgcgtaccgtgatatctgcgttttggaatactataatatcagaatttggagcgtgtttcgccatgctcgcctcacttgattgggc

SEQ ID NO: 43009 - DNA, 2195 bp, Zea Mays
gggaaaacaaacaaatcacaagaaatgaacataagagacacgggtgatttgttttaccgaggttcagccctcgaaggcctagtccccattgaggagtccactaaggacgggtctcttttaaccctttccctctctccaccgatcaccaaagaccggcgagctcttcttcttctcaaggatcacttaagaccccgcaaggatcaccacactctttggtgtctcttgctagctttacaagcctccaaaactttggaggaagttcaatgggagtcaaaactccacgcacaaatgaacacaagatgtagaacacactttctctcaatgaatctcacaaggcactagtgctaaactcaaacgagtagctctctcttgcttgctctctcttttgtggcacttgtgttggttgtagtggtctaaattttgtgtataggatggatcaatgaatagagatggttgggagggcttgaatatgtcaactatatgacttggaatgttgcttgggctcccacacattgaagtggccggttggggtggtatttatagccaccaaccaaattgtagccgttggagaaggctgctgatgatgggcgaccggacagtccggtgcgccgccatgtcatcctgccgttagggcttggagctggtcgaccattggaggctttgtcctcatgcggcaccggacagtccggtgcccctctgaccttctgctctgacatctgaattacactgttcactttgaagagtcgaccgttgcgcgcagatagccgttgctccgctgatgcaccggacagtccagtggcacatcggacagtccggtgaattatagcggagctatgcctgggaaacccgaagttgaagagtgtgaattacagtcgattctccctggtgcaccggacactgtccggtggtgcaccagacagtccggtgcgccagaccaggacacactttggtttcctttgctcctttgttttgaaccctttcttttaactttgtattggtttgttgtgaacctttggcacctgtggaacatatactctagagcaaactagttagtccaattgtttgtgttgagcaattcaaccaccaaaatcatttaggaaaaggtttgaccctatttccctttcaatctccccctttttggtgattgatgccaacacaaaccaaagcaaatttataagtgcagaattgaactagtttgcataaggtaagtgcaaaggttgcttggaatgaaaccaatataattatttcaatagatatgcatggattgttttcttcttatttaaaattttggaccacatttgcaccacaagttttgtttttgcaaattctttggtaaattcttttcaaaaacctttttgcaaatagtcaaaggtatatgaaaaagattgaaagaagcattttcaaaacttgaaattttctccccctgtttcaaatgcttttcctttgacttaaacaaaactcccccttaatgaaattctcctcttagtgttcaatagggttttacaagtttttgaagatactagaactttctcccccttttgaaaacacattaagataccaatttgaaaagttcatttttaaaattcgttggtggtgctgtggtccttttgctttgggctaatactttctccccctttggcatgaatcgccaaaaacggatacttgtgagtgaaatataagcccttttactttctccctaatggcaaacaaataaatatgagtgaagattataccaatggagagatggcggaataccggcaaagagtagataatacgatggagttgagtgaagcgatgtctttgccgaatactccatttccctttcaatctaagacttaatacacaagatactcatggaagcatattagtcttagccttggcacaagagagataggaaatatgcaaatttatcaaaggaaagagacatggttaaaaagatatatcaattaagcttatacagttctatataatatagattgctccccctaaatatgtgccttgagaggaatatagattttggccttaaataccacgtgcacataatttggtttaatgagaacatatatacgttatagaaactgtgaagtgcaatgtgacataataaaagagtgatgctcaagacagactatgcacttatgaaagcatgttataaacatcttaagcatttacccttaaggatttcaaagaggcttaag

SEQ ID NO: 43010 - DNA, 1703 bp, Zea Mays
gtctctactcccaaacccaaacctgattaatgcctcgcctccattccgtactctcctgctgaagcttttttctctgaaactagtatatcccccatctgtttggtcccgacgattttccgctttgggagcaccaccaagctcttccagcttgcagggctggagtctttgccagggacagcaatggtgccgacgcatggcgatacagccggaccgagctccagccaggatgacccggcagccagcgtgaagaagcgcaacagcaacaggcctcagtatcatccgtttactcagcaacagcttccagcttgcaagcctatacttgcgcctcagacggtcatccctgtactcctgtttgtgggcgtagtttttatcgtgattggccttggctgcattgcagcctcaaacagggtggttgaagtggtctatgagtatgagacttcatgcataccaagacacatgcttggcaacaaagtcgcctatatccaaaacccatctatagataagacatgcacatggattctcaaggttcctagggatatgaagcacccaatctacgtatattaccagcttgacaagttctaccagaaccacaggaggtacgtgaagagccgcagcgacaagcagctgagagatcccaaggaggccaacagcacgcagcagtactgcaagcccgaagctaccaccgagcacgggagcgccgtcgtcccctgcgggctcgtggcctggagcctgttcaacgacacctacagcttcgcccggggcaacaacagggcgctgagggtccacaagcgaggcatctcgtggaggagcgagagggaacacatcttcgggaagcaggtgttcccgaggaatttccagaaaggagctctgatcggaggaggcacgcttgatccaagaatacctgatcgaggcggacctccgcgccggcgagctggtcacggtgacgacgcagaataactacaacacctacagcttcggcgggaagaaggcgctggtgctgtccacggccggcgtgctgggaggcaggaacggcttcctcggccgcgggtacgccgtcgtcggcctggcctgcctgctgctggcgctgctcctcaccatgctctgcctcgtcttcccactgaaagaggaacaccttgcgctgcagtaccctttgctccggcctgccacggtgaccatgcatgcctagctagatcagtagacggtgtacagattgaaacagtttcttctttttcatttttgatgtatactcagattgaaacagtttgttctttttcttcttggatgtatacttggggtctgatcggtgatttcttgcgcacaggaacagctataggtcgagctgcgacatgtaaatagacactcaaagatttgagttgtacttgtacatttctactagggtctaggggttacagagtttaaaattggaatatgacagtggatacgagggtaacccccaatgtaatcgccaagtgatttggtagtagagcaccgcagtgtgtctaaaaatgaggattgaagtttctctgtcgatactgagcaccgttaccagccagccactacgcagctctgtttggatatcagttatattatttaggtgtcactgaattgtagtttagaattgtacggtctattttcacataatacagaggagtgagctctctattgagagagagagtttctagttataattcactgaacgttcg

SEQ ID NO: 43011 - DNA, 331 bp, Zea Mays
cacaaccctctctagccagtcgcagccaagcccagtagccctccccagtcgaccgcagccagcgcagctggccacaaccctgtcttctttagttttcttgcgctaaaaagagaaatcagtccttgatcatccataccaccatgaaaagaggagaatagaaggagaacatatgaaaagagaagggtgggagttttctctcgtcgttcgtcgccattcaacgctgcctgctggggtgacttgatcgggcatgtcttgaggctcctcagtgaagacaagtaaacgtagcggtggtttgctaccattttgacttgttactgcactttaatattca

SEQ ID NO: 43012 - DNA, 515 bp, Zea Mays
gcacggttggttgctcaaggctacactcaagtggaaggacttgattttgatgaaacatatgcgccggtagcaagggattcgatgagtacatgaacttggtcctcgaagacgctgaggaaatcaacgtcaagaaaaacactaggaaatcacttggccggatactcctcaaaggtgacaatataactttgatgatgaacagtggcaagtgaagattcttatggcaggaacgatgtttggtgctcgcttcgattatctgtgacacaatgtactccatccatccgtccagacttaaatgatgtatcatgtcattgtggtttagtgagagttgtataactacctgaggaaactcacgtgttactatatgctaagatgctgtgacggtgagctattcagtgctcacttgtgttccaaagattagcccgacttgtgtgtgccatgctgacatcttttctggtttcatactcagctttacgtaaagctttgctctgctcacgcttgccttttggaagctggga

SEQ ID NO: 43013 - DNA, 1681 bp, Zea Mays
cgcacacgtacgctagctccccagtcgatcagcggagatgcggagctccgtcgcctcggctgcgctgctggtgacctgcctggtggtggcggcggcggcgaggtcgacgggaaggacaacgctcagcgtcctgtcgttcggagccgcggggaacggggtcacagatgacgcgcaggcacttgtagcagcatggcaagtggcatgccgagtcccccgcgccaccgtgctagtgctcccatcagggcaccggttcctcctctcgccggtcacgctgcaaggcccctgcagcgcaaaactcacccttcagatcgacggcaccgtgttagcgccaccggaaatgggctcctggccgaagcccaggaggcctctgcagtggctcaacttcaagtggctgcaaggcttcagcattcagggaaccggcgcggtggacggtggccagcagaacatctacgggtaccgggcactggcattcgccaggagtcaagcctacgctgataaggttctacaacagcttcaatgtcagcgtgcgcaacatccggatcagcaacagcccgcagtgccacctcaagttcgacagctccggaggcatcagggtgaagaacgtcaccatctcctcccccggagacagccccaacaccgacggcatccatcttcagaacaccaaggacgtcgagatcaggagctcgaccatcggctgcggcgatgactgcgtgtcgatacagaccgggtgctcaaatgtccacatgaagaacgtggtctgcaatcccggccacggaatcagtctaggaggactcgggaaggacaacagcctggcctgcgtctctgacgttgttgcagagaacatcgtcgtccagaacgcactgtacggggtcaggatcaagacgtggcagggtggcgtgggctcggtgcggaacatcaccttctccaacgtcagggtggcgaacgtggccacgcccatcgccatcgaccagttctactgcgacaggggcggcgcgcggtgcgccaaccgcaccggcgcggtggccatcgccggcgtggcgtaccgccgcgtggtcggcacctacacgttccagccgctgcgcctggcgtgcagcgacgcccggccctgcaccggcgtcaccatgctggacgtgcgcctgtccccggcggcggccgggggcaccgtggcgccgctgtgctggaactcctacggcgaggcgcggggcacaatcatccagccgctcagcgtcggctgcctgcagaggagcaacggatacgcgatgcctctcacccagccttttaactacacatgttgagtaaactacaacaaccaaggacaaggattgttataagttcgaaagcttactctgtctagctctattactctttttttttcttcttcttctgcgtacctcaattaattctggactaattagacttcatcaatgttctgaatgacttttaaatccatctagcttccttgagcctttcttgcaacttcttgggttccaattccatagactgagatcaggccttgattatatattattttcatgcagaggtatgttgggtataataatgctttcaaaagcattcaaagttcctctaccaatgattacattgtaaggctactccatattcacagtatcaaatgtgatttcttcggttttagtgttatgaacataatcgaaggttactggca

SEQ ID NO: 43014 - DNA, 406 bp, Zea Mays
tttaacaagaataaagcatttgctaccaaagactttaaaatatgaaactgttggggacttgttctcaaatgctttggctttggcttaaaaacaaggcaacacaaaaatatgttaatgattaatgcccttcgtccttcgaagcattatttctctaagaatataatgatctttggacgaaggttgtgaaggacttaccttcatcatcacagcataaatcaatgaaagacgaagcatatgaaacatgggaaacaacatgaataatcatatgacatcataatatatctttttgttatataatcatgaatgaatagaaacaacacaagattacatttgtacctttggcttgacagaaggtaaaagtacaagcgtgacgcacaagcgagtaccaagtcagcatgaacagtac

SEQ ID NO: 43015 - DNA, 1059 bp, Zea Mays
atttacacaggaacgcaagatggacaatgacaatgaaattcttgtgtatgttgcggctgctcacatgatgctttgtatgatggcgatggttattaggtctacaaatacgaaccgtcatgctcatgcaccggtaggacaaattacctatggacctattgatgagagggataggaaaagatttgaatatcttaatgacaaaatttggaggaatgatgtcacttgtgttgacatgcttagactcaatagagggtctttcttccggttttgtaaattgtttagggaccgtggcttgttagaggacaccatacacatgtgtgttgagcagcaagtagctatgttcctacacacaattgggcacaatattaggaatagggtcattcgtaccaattttggtaggtccggagaaaccgttagtaggtatttcaacaaagtacttcacgctgttggagagctacgcacggacttcattacgccaccatcatccgctacaccggctaaaattcaagggaatcatcgttgggacccttactttaaggattgtattggggcaattgatggcactcacgtccgagcttcagttcctaaggaaatggaggccgctttccatggtaggaagagtcacactactcaaaatgtaatggcatgcgtagatttcgatctacggttcacatatgtcatagccggatgggagggaactgcccatgatgcgctgattttgagagatgctttagaacgacaaaatggtcttcgagtttccgaaggcaagttttacctagttgatgccggttatggagctaaacgaggctttctacctccttttcgtggtgtaaggtaccacttgaatgagtggggtgtgaaccctgttcaaaatgagaaagaattgttcaaccttaggcactcatcccttagaattacagtagagcgtgcatttggttctttgaaaaggcgattcaaaattcttgatgatgctataccatttttccctttctcaacccaagtagaaattatggttgcatcatgcattattcacaattgggtcatagaagatggtggtgatga

SEQ ID NO: 43016 - DNA, 913 bp, Zea Mays
gcctccatggccgagctcctctggtgcgggcgcccagcctccccaactcggcacccctcaagcacacgggaccacggcgcctctgctctcccatccaggcgccccttcccctaagcggatccatggtgctaggaggatctcctcctcggcaggtgctccaacctggtgtccatggcgccagtgccctgcacagcgtccccctcccccaggctcctagcacgtagagcatttctctgggtccaggctcgagcagccgctcccctcaacaactccctcaacgccggcctcctctgccccagaaattccccctgggcgctggaggcgccaagctcgcgctggagcacggcaaggcttgaccgacgccctttccatggctggctttgaggagtgggtcgagcccctcttcttgccatggcacttgacccctgttcttctctgccccacgacgcccagcctttctacaggagcaggcgccctctgcatctccctggcgcaggaaatccccaagtgcaggcgcccaggactcccatggccgctagcctctccatgcaaccgagctcccttacttcccagccatggacgagcctccggtgtgcatcgagctcccccacggtcgagctcccctctgttgctgtggccagcgactcctttaggtgggtcttcatcctgtcacgttggacaccgctccttttcctcagccaccgtcgaaccagcatggacccgatctgcgctgtgcagcagcgccggtccacagcagtagcctcgacatcccctctacgtcacgccctcggcgtgctcgatgtaatgccacagcaagcagcagcagtgacgcccttcgctgtgtcaagctcgccaagtcgggcctcacgccgtcgctctgcgcagcgtttctgcgttgtcgtcaaaacccatg

SEQ ID NO: 43017 - DNA, 520 bp, Zea Mays
gggtaaagtgcgcaacctctacagagtgttagaaactggtatatcagccgagctcacggttaagagcagccttgggatcctctttgattagaagaactttggatacttctatgatgatggtaaacaatgatgttataaatctaatctctggtatttcctcttttgagggagtacttttgggtaataactgggtttattactaaaacttggctctactaataacaataaatgtttgaccaactataagcaactgcttgacctcaactccatatacagctactccactttagccaaacgggacatttgctgagtacgttgatgtgtactcacccttgctttacaaaccaccccaccctaggttgtccccactgcacccagtgctcaggaggtgatgctggcaacatggacgacttcgaggagttccaggaatatgacgagttttagtttactttagtggcaaacccccagtcagcttcctatgtaggcttatcatctacgtttcgtttctttgcactttgat

SEQ ID NO: 43018 - DNA, 2319 bp, Zea Mays
aacacccccttagatgcaacgctgatactgataccactaccacaggccgcagcgagggacgtcgccggcggcccccaccctgccggtcaattcgaactaatactccaatgcgttgctactttgctagtcaaaggacacgccccgccccccgcgacgcacacggcaccaggcacgccctccgtcaccgctcaggtgctcaccactgacgagccgccgcggcgtcatggccacagcagcgcccggtcccggctcccggtcgcggctcctcccccttgccctctcctccttcctcctcctcctcctcctcctcctcatcgcgccgggggccgccgcgcagccgtggcaatcctgcgggaacacggacaactactcagccaatagcacttaccagtccaacctcgcgagcctcgccaaggcgctccccgcgaacgcatcccggtcggcgacgctattcgcggagggcagcgccggcgccctccccgacgccgtctacgcgctcgcgctctgccgcggggacatcaacgccacggcctgcggcgcctgcgtcaccacggcgttccaggacgcgcagcagctgtgcgcctacaacaaggacgccgccgtgttctacgacgcctgctacctccgcttctccaacaaggacttcatcgccagcgccaccaacaacggcgatgccatagtcctcatgaactcgcagaacgtgagcccgcccgtgcgggccttcgacgccgccgtcgccgtgctcctcaacgccaccgccgactacgccgcggccaactcgtcacggcggttcgccacgggggaggagggcttcgacgcgaccgatcccaccatctacgggctcacgcagtgcacgccgaacatgtcgcccgccgagtgccggacctgcctccggagcataatttccgatatgccgcagtacctcagcggcaggcggggcgggaggattatcggcatgcgctgtaatttcagaaggccagcaagagatcagacatcatcttattcagttaatcaatcagagattgaaagtattgattcacttcttctcgatatatcaatgctacgtgctgcaactgataactttgctgagagcaataggcttggtgaaggaggttttggtacagtctataagggtgtccttcctgacaaccaagaaattgcagtgaagaggctctcacagagctcagggcaaggaatacaagagctgaaaaatgagcttgttttggttgccaagcttcagcacaagaatcttgtcaggcttgttggtgtttgcttgcaagaatatgagaaactgcttgtgtatgaatacatgcccaacaaaagcatcgacaccattctttttgattctgagaaaagcaaggagctagattggggaaagagagttaagataatagatggaattgctcgagggttacagtatctccatgaagattctcagttgaagattattcaccgggaccttaaggcgagcaatgtccttttaaactctgattatactcctaagatatctgattttggcctagcaaggctatttggtggggatcaatcacgggaggtcacaaatcgagtcgtcggaacatatggatatatgtctccagagtatgccatgcgtggccactattctataaagtcagatgtcttcagcttcggcgtcttgatcctggaaatattaaccggaagaagcagcagtggttcctttaatatcgagcaatctgttgatctcttaagtcttgtaagacattacactatacccaaacctacaaaagtatttgcctcagaaatgataacaaaatttgcatttgacacaggtctgggagcactggacaatgggaacaattgtggagatcatggatccatctctgagaggcaaagctcctgcagaacagatgctgaaaaatgtccatatcgggctactgtgtgttcaagataaccctgttgatagaccgaagatgtcaacagtaaacatcatgctcagcagtggcactatgcctctccagtctccattaaagccagcattcttcattcccaagagcggctactactcaactgttcattcagaatcatatcctatagcttcccgatccgtcgataatggcaagccaggggcgatatcaccaaacgaagtgtcaattacagagctggaaccaagatgaggccatagtagttggacatggttgtttgttgtagcatctaacacttgacgctagtggctaaggacttttttacccaggcacatgggtgacagtttagccttagaattgattgtcattagtgcttgagatcttttttcccttttgttcgaaccagaaatgagccggc

SEQ ID NO: 43019 - DNA, 2908 bp, Zea Mays
caaaccgcgcccttctctaccacgctcctctccctaccccacgcaagaaccgccgcacctcacgcccacctagagcgcccatctgctcccatgtttgttgaattgagctctccccttcccctctgctccccagccgatgctcgaccgtgtgcggccatagtcgtggcagcgccctgtgcagcagccctggcgcggcccgcatccctgcgcggtagtacgtgcccctacatggtccagctcacggcgtcggcgagatctcagtcaaccccaccccagcgcgcctctgcggtgacccgtagccagcttgcccacggctcgcggcctgcctgcgtggcggctcgtggccagccggtgcggaacttttatgcaacggctcacgtccgagctcacgcgcgctacgcactgcagcgccacgctcattgccataccagtgtcgctgccgctctcgcactcgcgtgcgcacaacgcgtcactgggtctccgtcaatgtccgtctaccactgttcacgcccatctacccccctcatgcacgttttcatcgtcaggtgcatcgttttcgtgcggcatgcgccttgcgccttgtcgtgcatcgatagtttgttttacctagagtcgctcgtgctaattaaattacttatttaattgataattatttgagtagcaaattaatcaatagtaagtaaccattttattttgcgcctgatagatgtcgatcaatataattgtgtcaaactaaatactctagttcatattcgtttagcacaaacatgatatcccttaacagtagttattgccttcgcaattcccttatcttgcgccatcgtaaatgcgagttcgatattgcgttgcgtattaaatgatttgttctattgtatggtgtattgtttccttttgttttgagaatgttgaatgtatgtttgcactcgcgtagataactgttcgttcgcggaatccggggaagttgcgggagaagaccttgagcagcagctgtttggagaaggcaagtgtcctctggcctatttatgtcctactcactttataattcatttccctgcattatataattaatacctaagaatttactagtcttttgttcgtcatatccttgataacctatttgggttacactgtctatgattagctttatgctagtgctctactataatcaatgaacatgatgagatttccttatgatacgttgtttatttctggatatgattatagcattatgacactaaaggaggctgagctatttcccgagtacttctccgtaaggacctattcgttggatgaccaccagggaaaacaatgcagccatgagggtggtatgagacgccctttgctaactaattagaggaactgagttgtaatttgctttgccgttgtgtcgtcaatggggctcggtgtacatcactagctctaccaagggtggtccaccccttagtactgtacatttagtaaaatctaatagtcggctatacctttggggaatctttgtaaaggctttgtagtgaatccctacctgctcacctcggaagtgaataagggccttgcaaacccgggctagagagagaatcacggcacatgggtaaattgtgcgacctctacagagtaataaaactaatatattaatcatgctcacggttaagagcggccttaggagctcctttgattagagatactatggttacggatgatgatgatgatggctttaatgatgatagttctaattatgaattctgttattttctctatgaggaagtacctttgggattataacttgggtctttatcataaaatatggcttctactagtaataaatacctaacgagctaaaagccaaccgccttgagcttaactccacataaagctagtccacctcagccaaacggggcatttactgagtacgttgatgtgtactcacccttgcttcaacacaccaggttgtcctcattgcaaccacttctcaggagaatacgaaggcacatcggaggatttctaggagttttaggactatgatgagttttagatccgagttcatggcaaacccccagtcagctgcttgtgaaggccttatcttactacgtttcgccttagcactttgacttacctgttaaattgatgactatgtggatgtcttcgacatcatgatgtaataagttaatacctctctatgttattactcgagcaatatgcaatgatgttcatttatgtaatcgctgtgtacgtgaattcttatcctaccacgtacatggttcgcattcggttttcatactgaaccgggtgtgacataatgttacctctaaattatgatcatgtattatcactattgttggattttttattgttcatgataagatcattttgttaattggaacatggagcaaccacccgggaagctaatggaggacgcctttggctgactaattaggaaagctaatggaggactaccttacccgaaaggggcaagggcggtagaggagctaccggtatagggaggttctcgggtcgatcatgatgtgatggctttacggacaacatatcatatatcacccctcaagaaaccgtagcgggttttctgaagcttgtggaactttgtaaaggcctcgtagtgctacactgcctcatctcctcggtaaagatgtgcaacctctatagagtgtaaaactgatatatcagtcgtgctcacggtcatgagcggctcggaccatcacatgagtaacttatagaattaaacttaatatgtcatttgcattgcactgtgggatttattatcaattgtgatcaattatttaattgggttggtatctacttacatttggtaattgctaataaatttttgaccaacttattaaaagtaatgctcagtcataaccactttctctttggtaagccttacacttcacat

SEQ ID NO: 43020 - DNA, 2433 bp, Zea Mays
gaattgaagtgctaaagtttagtttcaattatcaccattagctctcatgtttagattataaatggctaaaagtagctaaaaaatagctgctaaagtttatctcgcgagattggaacagggcctaactattagttttagtgtattcaaacaccccctgagagtcgtaatctggcaaggatgaaaataacgtgaacaaattctaccaactacgctgtgcttatcgcctctggcggcggcgagttcgctcacgtcccggcgacccctcgccggtggccacgggccgtgacactccggcatgccgcgcgccccacgccggcagtccgacgaggcgcgccgtggcgcctacaagccgcgcgtcgacttcagccgctcgcgccgccgccgcgaggacggcctcctcgccctccgccgcctcaaccgcgacacgggactcttcaagcgccgccgcgacgagcccgctcccgccgtccctgcctccgatctgactcctacacgcgccgaagcagccccattcgcaggaatcacccgtccggcattcactccctcctcaccgcccgacgtagcggctccccgggatgctgctgagtcagagttagcttgaaggcctgtcagagctggtcgacaaactatgttcagatgacaccaccagtcagctcgaagccacaatccagttcaggaaacttctttcagatgaactcaactgtgataaaaatcatccgagcggatgtcctgcccagatttgccgagtttctttcaagacatgggcttccccagctccaaatggaggcagcctgggttcttaccaacatagctgcatctgattatacactgctggttgcagaatgcggtgctgttccaaggttggtggaactattaggatcactaaatgcaaacatcaggcatcaggctatctggtgtcttgggaatatagctgcagacttacctagctgcagaggcattctcttcgatcatggtgctcttacacctttactttctcaatttagagaaggcatgaagattccagttctgagaactgctatgtgggcactgtcaaatctttgttttggaaaattgccagccgaagtgcaagtgaaaccaatactagaaattatcagccagcttattcactctgctgacgagaagatactggcagatgcatgctggactgtttactacatatgtggcgataaaggtgatgctgtccaagatgtattagatgctggggtctgccctcaacttgtaaatcttttgatgcatgcatcagctaatgttcttctccctgtcattatggcactcgcaagaatttctgcgggagatgataagcaagttgaggtagctttatagctgtgtattctttgtgtcctcaccctttattttactggtgcagattcccagtgatctgcagtcactagaacgtagaatgtaatggccgaagaaccgagtatggactatggagatgctgcttgttgtcttaatagagaatgacattctcaattgcttaggacagttggtagcacgaaattacccaaagaacatcaagaaacaagcgtgtctaattgtttctaatatcgctgctggtagcaaggatcagattcaggctgtaatcgatgcagacattataacctctctcattgtcttgctaagaacgtcagagccggatgttaaaaaggaggctgcttgggctatatcaactgctgcgtccggtggttcaagtgatcaaattcagtatttggtcagccggggatgtttagagcccctctgcagcgtcctcacccacaacgatcctgaccttgtatacacgtgtcttgaaggtcttgagaacatactccacgcaggtgaggcggggaagaagggcgaggaatcagggacgaacccatacgccgagtttattctagagtgcggaggtctggagaaactggaggatctgcaggacgtggacagcgacaggatctacgagctagccatgaagctgctacagagctactgggaggaggaagtaagcgagagtgatgatccgaacatcccaggttcgaatgactcgtcagatactgtggaagcaacgtccgaagatgctgctgctgctgtgcagccaccaccagtaccgccgccgccgtccgccgcagatgaagccgagtgatggtagatgttgtattgtagattgtatttcaggagaggaaagcctggttccttttcttagtggcactggcatattgtatgatacttactatgatcaggtcgatgtagagaggaacgtgtgaaggtgtggtagccgttatgtgcagaattttcgcatcacgtttctgtaggcgacattggagcattttgaatggaggatttgggccaagagaaaaagaggtatgggggttatttggcgcgtgctgctgaaaggttaaagattgggctggctgttgaaatggagctccgcagaccgca

SEQ ID NO: 43021 - DNA, 1997 bp, Zea Mays
aacaatccgtggtatccagagtcagtctagaccgccatacggaggttgggcgtccgacgcgcgccggcggtgcttccagagcccctgcccccctgccgcgcgtccccctccgacttcacccgtgagtcttcttcctcccggtcatgccccttcttccctgagtaggaggcgacagatcagaatcctcctagctcgtgcggcaccgtgcgaggagcacggttcggctccggtgcccccacgcgtggaaggagcgcgggcgaggtgttggcggctccggcggcgcggtgtgcaaggcgagagcgtctccgggctgaggccaccgaaggtcgagcgcgcaggagggctatctgcttccgcgtgcggagctcttatctcagcacgacccacccctcccgacgggatagagctggatttggagtggtaaagacgggaaccgaagagctggtggattagaggtgtggggagatgtaccgtgggggccttgaccgcttcaagaaggcacagaccttggagcccttctcagtgaagtctgagtcaggcaccaagaaggcacctgcagctgcaggaacagctaaagcactggctccgttgacactgccactggattctaattttgtgccaggtcagaaccaccaaagtcctcaaggcaccatctcaagggtggctgggcaagatggtgatgctccagggcatgttgggacacaggtcggtggagggcagtcgacgtggcaacctccagactgggcgattgagccgcgcccaggggtctactatcttgatgtggtgaaagatggggaggtcattgacaggatcaatctggacaacaggaggcatctattcgggaggcaggttcctgcttgtgacttcgtgttggaccatcagtctgtgtcgcgtcagcatgctgctgttattccacacaggaatggaagcatctatgttatcgacttaggatcggttcatggcacctttgttgcgaatgagagattaacaaaagacaacccagttgaacttgaagttggtcagtcacttcgctttgctgcatctaccagaacctatatcctgcgaaagaacgcagctgctctattcccaactcctagccttccatcggatgttagtttgccatctcctccggaccccaatgatgaagatgctgttgtggcatacaatacagtacttaaccgatatggtataagtaaatctgacatattatccagttccaaagattcttcaggaggcgcctctagtgcaaatgatggtaaacatgcagttgaaaggctcttaaagagaggtaaaaagcgcagagtgtcatttagagatcaggttggtggagaacttatccaagtggttgggatttcagatggtgcagatgttgaaactgaaccgggccccataggtgtaaaggaaggcagtcttgttgggaagtatgaatctcttgtacaggttactgtcataccaaagggaaaggagcaagcatcacgaaaagaatgtacctctacctcaccgagtggggtaacagataagctacaagaggtgcttaaaaaagtaaagagcgcaacaagacctggaatctacgatgacctttatggggattctgttccagcaaaagtgggctcatcttgggcatacaaatcagatgatcaacctgttgaggagaagacgcgtggcatgaatttaaacatgaattcagccgatgacagtgacgacttgtttggtgactagtgattcagaattgtcagtggatacaaaaaaatatatattcttcagaattttgtggcagggttgtttcatttgctagatgctttttttttcttagtttatacatgattgtaccctgctgcaaatcaaggtatgttcttttgcctaatgttagcaacctaaggacatgctttcttgtagtgatgctcttggtgagtttaaccttgtttgcccctattttttcttaatcactttggtgattttttacctccgctgtttcctttagccaaccagctgttata

SEQ ID NO: 43022 - DNA, 1624 bp, Zea Mays
agatcgtttcttttcgttcaggattcccccttccgtcggctgcattcctacgcgcgtgttctgtctgtttctctcggccccctctcgctctccgacgactggtgggccgctgccggcgccgccgccttaacccaggtgttgaggctttcgttggtctcctcgccgtcgacgagcacccaccaggatgaattctaaacgtaggaggagtcatagcccagttgaatacaaggaaggccgtgacaaagattatgggacttctggaaagaaggataagtcaagagatctagatgacacatgtgatgctagaagaggtcatgaaaccgataggcactctgataagcattcctttggaacatcacgtgaatccaagaagcatgatgactatcggaggtaccatgataagtatggtgatgattatggtaggagccatccaagagcctctcggtcagaccgggaatcaagggctgatacttattatgatcgctcaaagcatgataacacatctggtagatcacgtggtgatcagcgagatgttggcagtaggtacggagaaaaatctgttaatcgagatcagaggagtataaatgaaggaaagcaggagtcccctcgtggctatcaaaagaatgatggcggagaatacaataaacatatggatgcaagaaagcaagagtacaaaggttatggagatgatagagatcattacagggttgttcgtaagaacaaggaaaccatcaaagaggaggaggactcgaagaggagaaatggaaaggaaattgagaaagaagctttggtggaaactagggataagaaaagaagtttattcagctctactgggccaaatgtggataatccaggcgatgtcaaactatcctcagccacaaatgaagccttggataacgctgcagaaaccgtagacggtgtgaatgcagctaaagttgcagctatgaaagctgctgaattagcaatgttgcatggtttaaagtgaataggaacattgcagcatttggtgctggaactgggcgcctatcaactgatcagaagaaaaagcttctttggggtaacaaaacgagtaatccctctgaggagacaagtaaacgttgggacttattttctgaccgtgagcgccaagagaaatttaacaaactcatgggtgtgaagagcagtgccccagttcaggaaaacacggtcgagaacaaggtcgggagctcggcggaagaagccaagaaactggaggagctcgacaccaacctggagaaacattacatagcaggcctccgcaggagagatggcaggacagtcggccttggcctgtagaaactctgcttgcagttgcagatgctgcggcattgaaaaatgcagagagcttgctctgtacaatctacagtgccttgtttattcttgcacttacaaaatttcctgtacggcttacgttgactgtttccgggttatcttgaagctctagaacatgtgtccctgattgacactcctgtactgcgtttgcataaccccgtcattcttgagtagtaattcaccggttattgttttctctttgcatccaaagatgttttgcttgaggcctaactatgcctatctagaaaattggttacgactaacgcaacgcccg

SEQ ID NO: 43023 - DNA, 260 bp, Zea Mays
caggcacctgatctctgttttgggaaagaagggatgtagcaggacggccactacacctttaaataaaggaatcactgcttaataatgttgttaaacagggagggtcaagtctagggaattattgtgttctagcctttcatggtagttgagctgatttttggggtgggctgagttacctatcttttatttggtcatgaatgttcattactacttttgcatgttgattatactacgtgaattatctttcttttataccttta

SEQ ID NO: 43024 - DNA, 307 bp, Zea Mays
ttatgattgtgactgaaattatctgtcttaacataatagcaattcagttacatagttcagtcacatacagacactgtgaaggacggtgtctgaggtcatttcatgcaactaacaattctagtgaagactatccaatcttaggacacaacatgcagcaattagacgtatctataacgatccttctatagtttaacgagtattatgtttttctgtaaagcatagaaatacttattttgttaatgcatagaaaatcaatgacaagaatgtagagtttttatgaaagtcaaaatagagatcgatgatttac

SEQ ID NO: 43025 - DNA, 5900 bp, Zea Mays
cgttttgacggttgtcctgcgtcgattttctttagaatcaacccacactcctataatctcttctctactactataatagaagagtttcttgcgtcctgattttagtgtgtcctcctcctccactaaccttcgtaagtcgtcgtgctttcccgcgtctacgaaacacactcccgcacactacgtgtataaaccgtctccgcacgccacacgccttcctccgcccgttatcgcaaccttagagcacgtcgtaaggataagtccccgtaaactccgcgccgagcgatgcaaggataggacctgtgaactccgcgtcgagtgacccgccacgtcgtaacctccgatagcgtgcctgccacagcgtcggtcgctataaatttctggcctctcgctctccgcgtcagcgcaacgaaaatggttaccactaccagcagcagggctcggatctttctaggtggcgggctcttcagagactcatgtcgtcagtctggtgctggcgtccgactgtttgccatgacatgtcgaggtcggacgaggacacagagacatgctggtcggtggctgcgaccacgggctccctcgttgtggcgccgacgaggaggaggctgtagtcgagcggcatggcgagggtgttgttccgcgtagggaggcgctttccgctctacatcacgccccatcattccatggtagttaaggtacccgtaccaccaactctttgactctaacgatcaatcgatctgcttaggctggaaaggtctcaattggtagctataggtggagtgctggcggtactaatgcgaaacagagcttgggagtcagattggtgcatatggggtgagcgatcgggtgcttgcttgctcatttctaaattgatggagcagggaattgagttatccgtgtttatagcggcgacgacggttacaaggatgcatgtcatgcatttgtggaattgcagcagccttcgttgagtcttggagagctacttctacggtcatgatctgaagaagtttctcaaagcgtgaacatctcttagcttgtaagatgattctaatttacagatgtttccatttcgatattaatcttattctgttaacaacatattttcttaaataacatcatgtttagcttcacaaatatgcttagtatttttttacatacatatattttcaatcagtagttataccaaatttgcaaattaaggcatgttagaggaagatacatcatgaaaaatagaataactaaaaattccaaacacaatggcttttgggcgtttaacttctctatacttcacagcccgtcgcagaagtattgttggatcgttgtggtctccatcctcttacaattgttgtcatgtgcaagctttgacgaaggaaactagagcgaaaaaatgggagaaaaccatatccaaccttccaacatatgcaacttgtgcacttggtctagttttatacgtcaatgaaaaagatatagatataccatgagaacaaaaacccatcagtaatagaagaggggaaatggtctcagcctctcagggaaacacatatgggagtaggacaactgcaaaggcacaactagggatgtcaaccggtacatactcatcgggtagtaccattccatacccgtacccataaaaatactatatccgtcaggttacccatatatactcgtgggtataaaatcatacccatacacgtactcacacaagtaattttaatccgtacccgctaggaaagtcttaaagtccaatacactaatcactcaaaatattaaataaacatacaaaaataagtttaacttcacgtacatcaaatcatatgattaccagtgccggtcctggcgggggtcgagcagtgcccccgaccagggcccccaaattaatggggcctcactttagttactaaataacagtatatatacagtcatatagcgtatattgtttatatatgtctgttggctctacaaaacttttaaagacctaattataagtcaacaacacggcaacaacaagcaaggagaattagacgtaacccattaatcttgatttctatattctagtagtagtacttcgtaatctcaggcccatctgactaggctctcagtcgcaaacagacaggcggtcgtgccgtctcctctcggtagccaacacacgacattgggtacgacaacgcttttgtctttccctacatagcgaacacgaaactaacatgacatgatcgattgatctcacaacgtattacatctatttgatcattgttcgaggtaaccttcttttgagtcatttggacacatatataccccatttttctacgagatgttatgttatattttagttactttgtatttaatgtgaacaacgttttcaaatatacataaatatttattaataatatatatatgcactataattatgtgtaataattaatattatcaagggcctccattataagtcttgttccgggcctctaaaatgtcaggaccggcactgatgattacataacttggtagttaaacaaataatagctagagaagagttttattttaattaagataggctctattagatgattataataatattgatgtggttatattttacctatgagtagaccggtatgggtagtatcaatccatatccgtctacccaatgggtaggttcttgcccattaacatacccgtggcggctggagatatcatcccgtatccgtctttgtatgggggtaaaaccgtcggttattcgggtttccgttatgtattgccatcgtctatgcactgcatttcccttcctcacctccggcgcaaaaccgcagcagtaggatcccagccggtcggccgcccaggatgccggagcctgcgtccccgccctcagcggcgggagccggccgccacatatccactccacatcaacaagggagtggagaatgctcccggcgcctcttcgatctcgacctccggccggcctcatgtgggagacgagggacgatgggctcccttccctcagcgtcagcggtgagttctaagcccaaaaggtatttcagagttgggctttggacgatatgcagcagaaagggaacctaggtcgtcccgactctcttcttcctacttcctcaaaacaattagtgcgagaatcctactaagtcaagtcctcgagtattttagtatcgactaacactcaattttttttcacgaatcaacggaagacaaatttttttagaaaagggaagctttattcagaagtctaggatataaaaacaaactctcaaaaacggccacccatgtttgggtggatctccactgctgataccgatgctgatggttctttttctagtttattagcatggtgatagcccaatcgattatcgttcattccttttgtagtttattactattattattgatgacgcctgtttctgaccactcctttcggccggccaaattaactctggaatttattccatgccttcctcggccctgtttgttctgcatgtcttcaaagggttgtgaccccatatagccggatgtcagtcaattcatccatggcgatcaatccattcctcgagcaggccaaggttcttctctgggttttgaggaaggacccatctgcgatgctcatctaattaaggttacctggtcatcttgctactcggtcgcctacaggatcggatagcttactctatctataatcacaccgagcaaactgtccatcctagctacaatgggtagcacgcacaaggaagaagtaggtgtcctggaggaaatacttgacgggagaaaagagccgaggaagctatctttatcagttctaaaacacatcacaaatgacttctcgcacgagcgaataatcggttatggtgggtgcggagaggtttacaagggcatcctgcaaaacggaagcgtcgctgtgaagaaaatcttcagcaacctaaatgttgaagataaggaatttgatcgagagattcagagcatgatgcaggtgaagcatccaaacgtagtgcggtttattggctactgttctaacacagagcatgaactgatgagaaaagaaggcaagtatattaaggtcgaggtgcgagaaaggctgctctgtttcgagcatatcagcaacggaagcctccgcagccacattacagaggatactgcgctccagaataccaataccatggcaaaatgtcccttaagtctgacatctatagtttaggtgtcataatgctggagctggtgaccgggagcaaggaggagccggacattactaatgtacttcgacggtggagccataggtggaaaaaatcaggacagcgtacaccatcatttcaacgccatcaagtgagtaaatgcataggtttggctaagagatgcaaagaagtagaaccaacaagaaggccttctatatgtgatatacttgctgccctaggcaaaatggaagatatgaattgcagtgatcaacaagtggacgaggaagtcacttatctggaggacatgctaggaatcgagcctcttgatctgcatttcctagtcgaacctaccaagcagatatcctgctcagtccatctgaccaacgctacgaatgactgtttcgccttcattgttcagacgacgaacccgaagcagtactgcatacagccggacagaggcgtcgttccaccacgatctgagtgtagtgttgccatcgtattatcgcaagaaccgacgcataataagcgatgcagcatggaggacgagctaagcgtgcagagcaccagagtggatgagggtgtgacagctgcggatgtgagtgaagcgttgttcactggaaaggaagatagaacggtcgatcacgtgagcctgatggtcggtttcgacatgtcgccatcgccacctgaggaacaaacggaggacttcacgtttgcaccactggcgtcgttgtacgacgaggagccacagttaagcgcggcgaagagtgcgcgtttacagttggggcgttctggtcgcttctctaagaagaagctagtgtctattctgaaatcctggcgagcaagattaaaggtatcatcccataagaaactcgagactccaaagcatgactgtgagattcctgaagctgtagagcatgaagaagttgccgcgcccaggtgtcccaaaggaccactgccacagcgcgatctttctccactgggcgaagcatgttctaggatgaacatgacggcgatccatgagatcctagtgaacagacattacagagatgatgacctagacccaaacgtgccgtcgctcgaggaatggacacagcagagcagggatatgttggatgataggaaacgtggggacttcacttttcgtgataaagatttccgagcagccatagactggtataccaagtgtatggatgtggggccaaagaaggcgtcaccaacagttctcgttcgacgcagttgctgccacctcatgtgcggcaacctggacgccgccctccgcgatgcaatgcaagcgcagcgtcagtatcccgactgcccaacctcactgtacatgcaagcagtggcactttcaaagctagggatgcatagtcaagccatgggcatgctgattgaggcgtcggagatggaagcgaatcagaaaaagacccgaaaagcagcttaagaagactcaacatgggcgaaacctatataccttcgttttgtttctgtaagctattcttgattgttgtatctgcttgccaaattgtctaggttggagtggaattgggaagctttacctcttggggataatgcatttcttgttgtattcccctctgaggatgaaatgctccgtatggctgatattgagtataagctcaagagtggaatttctattcatatggattaggcctggagatgctaatccggcctattttttttggatgagatttgggtgcatgtttctggtgttccgca

SEQ ID NO: 43026 - DNA, 450 bp, Zea Mays
ccgtcgtcgccctcgcggttatcgggtcgattcgatcagggtaagctgatctattattcctgctagttaaattattgaatgcgatgattttattgatttagcatatgtgtgttgaaatcaagattttagatgcgattcatatgaaggataagggtagacgtatctaaatcatgtgactgaattaataataaaaattataggactagtgtttcttaggtctggcagatagatattgattaaattgttttggatatatttcgtcgatgcttgaagtcgatctgaagtacaatccaagaatttcataatggctagtgtacataagtactcttgatatttatgttgttgagaatgtagttttatcaaatgctatgttatttgatggtgttttatccgttagagcgaataatgtaatattctatttaattagtatgtaattcaagttaatctaga

SEQ ID NO: 43027 - DNA, 5627 bp, Zea Mays
cagccggggcaggtgggcccagcggcgaccatgagcaagaggagagggaggagcgttcctcacctgccgtccgtcgtcttccttgctcgccttcgcttccctcctcttctctttcctagactagactagacttggcttgccttggattctcatctcgtctcttctttcttctcgctccaatcggcgcggacgtagcccccgcgcacgctaccgcctaccggagagattccgccgcccgttgggtggattccagcgccgttgagcaacaggactctagcgccgcaccggacaccaaccactagacgctgctgcctccctccgccgtctcggggcaccgaaggaggagcagagagatccatcggaccgctcggcggggtgcggccgccctcgctcctcatccaaattatccaatccactcgattccgattggcaactacccttcaccccgcgcgcgcaaccgctagctcctgccgccaagcgcaaccggacgaccgccgccctccctacgccaggaggtgcccaggtgtaggtccttcgccggcgacgaacacccacaagagcaaccgcaagggcatgtgacaagctgccgcctgcctttgccgcaggcaatgtgctccgacatgtcgggtcagcgccaccaccacgcaaccagcagggagaatgcaccggaagataatggttaccatcgcactccccatggtgcggatcatctcgagcagagccaggctgcagatacagataataagcatataaatcatctgtccacagatgacaatgttccctccagtgcttcaggccacaaacatggtgctatcagccgccatccatctacatcttctgttgatgatcgctccatcaagtccggtgatgattctgatggggccgagagtaccagtggcagaagcagtaatacagagatctcatttatgaataatgataccatctggataccacctcaagcggcagataaggaggatgaggcccagagttttgctacgagcattgcttatgacgacgacgatgacgattatagtgatggtataaagtggggccagtcaagtttcccatcccctggtaagcagcatgacgccgacactagcaatcatagggaggaacgagaaaaggcaatgctagaagctatgaatggccagctgaaggtacttgtcagtcggtttctcgcatctgctggcattccatcttccaacgaagagggtagcgatagctggcttgatattgtcacctccctgtcatgggaagcagcactacttatcaaacctgatggtagcatgggaaaggaaatggaccctggctcttacatcaaagtcaaatgcgtagcatctggtactcgccggcaaagtgaggtgatcaaggggttagtcttcaagaagaacactgctcataagcacatgccgacaaattgccacaatcctaggcttctacttctcaaaggagttcttgggcattctgatattggtttgtcatcatttagttcaatggatcaggaaaaggacctgttggagagagctattggtaaaatgatggagatatgcagtcccaatgttgttctggtcgagaaaactgtttcacgaaacattcaagaacttcttctgaaagaagttttggataaaccaaagctgaagcaatgtgactactttcatatcgaaaaatttatcgaggagcacaacaacgccagtgagggtggaaagatgccatctaaaacattaatgttcttggaaggctttccacgtccactcggttgcacgatactgctaaaaggagcaaacagtgaagaattgaagaaagtcaaacaagtaatgcattttacggtctttgcagcatatcacttgatccttgaaacatctttctttgaagatcaaagggtttttctaaatgataaaagtacccccaaagaaatttctgttactgctacagaaggggcatcaccaactgcttatgatgttgctgctcttagtggtgctatccctagctttccttcacatgaaaatggggatgcattcagttcagtatccagcagctctgcaaatgaccttgaacaaggtacaagtatcaggcccaataatgctgagaggttaacatcactagtccaagggccactaagaaaactgttcactgacatgttacgtcaccagaatatttacttacctgttacatcattgcaagaggcaaatgatattagtaaggaagtcagggctgaatcaagtcaagaaactgttattaatggtttccataggccagagatagaagagtctgtggtttcaattgaaaatggagattccataaatgatgcccagaaacaagaaattgctcaagcaataatgccaagaggttcttctgcaaatgataaagatgcagaatcgtctgttatgggagacaatggggcacatagtacaagtatcattatcaaagagaaatatgtcgatgatgatcaagctgatgatgcacttgattctcacagcatactgattttgatgtctagccagtgcccggaaaagcaggttatctgtgagcaaagtcatttaacccgtataaaatactacgggagttttgatgtgtccttgggcagatatttgcaagatattctgcagaatcagaaactgagttgctcctcatgtggagagcctccagagtcgcacatgtactcttacacgcaccgcaatggaaatttgaccgttctagtgaaacatctggtgccccaacaccatttgcctggtgaatctgaaggaaaagtatggatgtggactaggtgctcaagatgtgatcatgaacatggggtatccaaaccaactccaagagtactaatatcagctgaagcgcgtaacctctcgtttgggaaattcctggaactcagtttttcgagccactctgcagcaagaaggctgggctctaaagttgctatgtttcggtactcatctgttgagatctacactacctgcaaaccacaacctactctccagttcgtcaaccccatcagacaggattggtttgaaggacaaaggaggaatgttcatgctaaaggtatggcgcttttctctggggttgcaagatttctacagaacttgaagaatgaacatcctgatgcaataacgttagcaatccattgtggccttgcattccctgttaaggacttcactgaactagaagagttgttgataaaagaaaaggcccagtttgagagttctgtggacaaggccactgatcaaaatggggtaccaacctcttctgtgcatgaactgttgaatataaattgctttgggggtagccagtaccacagaacctgcaagtaacaaacttgaccatcaatcaggggatgctgcagcatccttacttgatgaaagccaggaagctgggcactcagaaattccttgcaatggaggtagtaaagctgagaaatcttccattgctcatggtcaaataaaggtagatggcacaacaaaaaccggaaatgatccttgcttcgaaatatccaatgataagaaggtccaggtcaatcttacagtagcagatccaatatctatggaacaggagcgttgtagcactctccaacagttcaaatatccttattgggatgacagggaaaggtggatttggaattcaatttctgagtcacaattggcttacaggaatgacattcaaattggatatttggaaaaattcgaactcattaacaattatttgccacattaccttcctcccttgtttgaacaacatgatgatgcggactctccgcatttcgcggtaggtcctggtggtaatattctgtgcataatggaagatgagatatccagcataatagctcgtgctcttgccatatctgacgaacgccgccatttgatagatttaaaatttgagaatggaatggattactccaagggagagcatgctaaagcaatggagaaatcctatagttttctgtctgaaaattctttcacctcatcaccatggtcatctacagattctgaagcaagcttgtcatctctgtcttcattttcatcattttcatctgatgacttttctggttatgatagctcttctttattgtcctcgatgcatccagaaatgactgtgaacgggaaaataactctgaaaggcaaatattcagtcactgttgtatatgacaatcaattctttgcactccgaaaaaagtgttgcccatccgagcttgcatatattacttccttaagccgctgcaagaagtggaatgctcaaggtggaaagagcaaggcctattttgcaaagacaacagatgacaggttcatcataaagcaaatcaagaaaacagagttcgattcatttattaaatttgcacctgattactttaggcatgtttaccattctctggacactggaagccaaacttgccttgccaagatattaggaatatatcaggttaagcagattagacatggcaaagaggtaaagatcgacttgatggtgatggaaaatcttctctttggccacaatatttcacgaatttatgatctcaaaggtgttactttttcgcgacgcgtcactgactcaaatgatcatgatactgtttacctggaccaaaattatgttgaggacatgggtttttctccaatctatattggtggaagaacaaagcatcttttgcagcgtgcaatatggaatgacacgtctttcctcacttcggtgaatgtcatggactattctctacttgtcggagtggacaaagagaagcatgaacttgtgtttggcatcattgattatctgaggcaatatacttgggacaaacaattggaaacatgggtgaagacttctctggtagtacccaagaatgtttcaccaactgtaatttcccccaaggaatacaaaaaaaggtttaggaagttcatggcaaagtacttcctgtcagttccagacacatggagctctgataattcatctaatccatgcaaatcctttggtcagagcaatcacaagttagcggaagtccacaatggtgatagcctgcttcagcacccaaatgaagctgaggggtgtgtctaatcacgtgcaggacttcctggcattttttaagcctatcccattgttgtttggcttttcactttgtaaaatggtgtacattggaggacctcactgttgatctatccaaaagtttgtgtttttaggcaaattgttggacaagtggggtccacaggacatgtacctatacaaatgttcattgttaatttcacaattattatagtgaaattaagaatttgtatgatcattttttggacctatcacttgtgtgactgaagctgtctattcttcacttatgactaactgtccaagatagacatttcctacctctattgaaattaggtcaatttgagtattatgttgtactgtatacccccagtgtacttgttgggatctggaagcagctccatagattttgtgtttgatggatactgtcccttttcggtatgccctttttcacttttttttggttctgcacaatgtacaactttcagatctcctggtatagaacagattgcaagctatgagtttcattgttacttagaatggatgtgatttaagttacttagttgtttgttcagtatgtgttcgtcttctggaatatcattcaatatgcatttatg

SEQ ID NO: 43028 - DNA, 1757 bp, Zea Mays
attacagagagcatttttgtcgattttttatgaagactgttgcgcttttgtgaatctacgtggtacctatgaatccattttatttgtatctagttttcttcatcttgttttttgattgtctacttcaataacaataattattatacttgatgccacataaaaatatagaggctaattacagaaacataaaaattagaggcttaatgaacaacagttgtagctaaaaagaatagattgctagatgttacatggacaagtccatcaaattaaaaaaccctattatacttcatgcaagaactaaagaatcacattataacacttatcaaaactaccatttaatttggtagaaattaaatggttaacaaacattaacctttcgaaaaaagattcaccataatttgaacaccttcctcaagatctaattcaaaagtgatctcttgaatgaaaacaaatggctagagagggatgaataacctatagaaatttacttacacaactaataattacaattatagcaaatataaaagatatacgaaagcgattacttgctctagttttactcaagattattttccttaaataaataaatagtgggaaagggatatgtatgaaaaagataagctatgtactaaataagatatgcttgataagtggatgagctagcaacaagtatatgtaaaagggaggatactttgggaagtaaatcacatctggcaagatatgatatgatatttatcctcgaagtttagttgcttcctcaatgtggcaaatctaaaccaaatgattcatgtgcttaattcgtataacaagccaagcctataaagggtggcgtaagcattactctaacaaggcactccagcaagccatgatatcactaggatgtttgcgaatctcacgtggggttgaccacaaaaccccttacaatatgatgatcggagtcaacaacaatcacaaaaatctttcaatgatcctccgctatctcgaagccatataggtggcaacaaccaccaagagtaataagattctcgcatctcaatatgatcactagtatcactagatgcaaaaactctatgcaaatcactaaagatcactcccagccccactttggataaatcactatcactggatgtgagtgaaaaagtttcctttgggcttactagggtgcatatcaagttgagaagcctagattctcactgcaagcccacataatctctacttataggatcctaatggccaactagccgttggaaccattcttgtgcattttgcaaggttgtcggaccatccaacacgtcaccattagaccaaagctcaaggtctgacgaccatagatcgtttcatgtgtactaggcatttgaatgttaccattgttaccaccaacttctatcttagtgtatggtctaatgcccttagtgtgacgaccatcaaaacatagaatacatggtatgatgtctttcgttaagtgaccggagagcaaccagtaatgttgaactggtctaatgcccttcatcggaccaatcttcatggtttgacaatcttgttcccaatcacatgggagaagtgatagtgggaccgatttaataaacaatgtattcattcggttcgatgtgctcatttcctcaccgtcgaaccaaatccctagggtccaacactctctagaaaacaactagagagcaattgtgagcattgaactagtccaacgacctccatcgaaccatagcacagagttagataattactctgatcgtgcaactatg

SEQ ID NO: 43029 - DNA, 278 bp, Zea Mays
ctatcttttacgtcatcagctcgcccaaatatcacataattttaatctatctttcgcattactaactccatcgtacttcacatatatttaactctaccataacgcgcctgtgctaaacacaaagatcagcacaattaataaatctagccaatccaattatcatacccactatctaaagtaacgagttcgtttaccaatatcaagtcgttccactaccacggacacggcgacaaattctacttcagatttttcgtcgagcactaggtagatgtcaccta

SEQ ID NO: 43030 - DNA, 1253 bp, Zea Mays
atgggaatcaaggcaagatggagccctatttccgtggtacagtttctccaatgatggatgggccttatgacgctattgaattagagacaagaatttccaagctaaaagaatccatgtgcaatttacacagcctacaaatgaagttgaaggtacctgaggatgaaccactgcaaactaacatcagggcatctctactgtggtccgagaaagaaagttttgaagagtataatgagtcttttatccctggacgcccagaacgtctctcatttgctgcgtaccaaacagtttcaggcatgtcagatgaacttctcactgtgcaaaactacaagatacaagcaatggattcgacagacacccttgaaaggctgaacactggtatcaagtttgtagaacataacatcggaatgatagccgcaaggcttgccattcaaaatatatgatcctcattggcagtgtttagttcatatgctaaatgatgtccgtgatgctaactccatctggtcgtaaaaaagaactcaaagcttttcaagtttcaactgtaaacgtggaaggtctgatctggtacattcggataacttctgacataactttgatatacattcagagaacagtacgaagatgaagaacacaatatgaagttgcctgctcatttaaatttgcatggataagctaacagaaaacaccatataagttgttcaagcatccagtacaacattattccatcagataaactatgcaactgtttatcaggtattgagatagaacataaaaaatgtctgatcagacaaaacataccataccatcttcagtgttcttaaggcgtcgcctaagcgtccaggcgctcgggcaaaggtggttgcctggtgcatttgctcgcctaggcaccttaagaacactgagcaccttattcaaattccaaagactacaactcttgcttgaaccaaagtaattttgaacgaaattaaaagtagtttttcaaggaaagaaatactgtgccgagcatgagtcctgttggacttaatcggtagcagcaaaagcttctaaagcacataaagcttccgcaatgtaaaagttggtatctcctggaacaatggcaggaagatcagttatactcctttgtcttgatctacttctttggctctctaacttcttgctgaccttcagcgatgttgatgccaaagagaagaatggcgcgacctccgttattgccaggcactgtctcctctgctggtggattctccgcttgattctgc

SEQ ID NO: 43031 - DNA, 956 bp, Zea Mays
ttcaaatttttatcccatagacaacaaatccccatggattgttgcccacaaaccaaccttgttatgatatgaaagtgagtacaacaaattcctgacctcgcgcgagtgctagaaaaatcactcgacttctaccgagatcctaattaataaagcagctactcgacctagcatactagtattcatttcaacaggattcgtgagatcatgcaactagggtttcaaacaactcctacacttaagtgcacattcaatcctacaatcaataagtgtagtaaaatatcataaataacaggttatgcatagaccggggcttgccttctaaagcagcggcaggcagatcctctggtgcaggctctggtgctggatccggggctacctcctgagcagctccttgctccggcacgaggacattctctccgtcagcgaggttgcagtctatcaaaatgcaatgaatatgtatgtcatgattatgcaggattaaacaacattatgctaaaggaaggaaaactaagttagttagtaacttagggtttcttggtcatacgtggcctttagtggtttatgcttatcattctaggtttaggtttggttgagaataagcatagtggatttgtattttccccttacatatttcagtgggcaatttaaaaagggttttgctagttgggctagggtgacataagtttccattatcaattccccctttttcatttttctaattatgaattctagtgtgggtttgaactacaacagtggtttaacttttcccaaaaatttggtaaaaattacagtgggttactattggacactgtagtttgtcatatgaatttgaggtccagaataaaaagactatgccttggacaaaaataacaaatgttgggcaaagggggtcactttgcactacaactcttaactaggggtgagttctgtcctaagggtcatttttgttggcatct

SEQ ID NO: 43032 - DNA, 1131 bp, Zea Mays
gtttttgaaggatcttctcctaatgtccaagaggttggcagtatcaaccatcaattccaacaatacaatattttctagaggatgcgctgatatgcatcactaagctggatcggaagaaactatgcttagtcggtgcaggcaggactgatacaggtggcacattttactacacccttcagttacagttgcctcagtagtattcattctgcaatgaatggactccttcctcctgagattcgagtcagggaaattagtgcagcacgtcctgaattccatgctcgctcatccacaaagagcaaagtctatcgctacaagatctataatgaagcaatcatggatccctttcataatcactatgcttatcatagtgcttataaacttaatccccatgccatgcaggaggctgcaaattattttgttggaatccatgacttcacgtcttttgctaatgctgcacataatgacggtgagcgcaggcccacaaagaagataacacgttttgatgttactgaaatgggtgctgtcttacagctcgaggttgaaggcaccggttttctgtacagacaagtgaggaacatggttgctttgctgcttcaagtcggaaaggaagcacttcctcctgatatcgttccagcgatcattgcggccagggaccgcaaagaactggcgaaggtggccttgtcagcaccaccacatggattgtatctcatgtcggttaactatgacgaggaaatcctgaagcctcctgaaggttcccctccaatttcgtttggcagaactcatcatcttagattttcttggttcagaactgtcaaccgtgggctctcatggcctgctagtttctgctaacggaccaaagtactcttttgtactgtctgaggtaattgtttattcggctggacaggctccgttttactgaactagttgccctctcatgcgttgttgtcgtcacagaagctgaaaatgatgaacgcaataagtgctccatgcaagaacatacgacttgtctggttcgatgtaatgtaacggtataggattccttcgggtatcaaataacgttacatgtgtttgttatgggttctattgaaattacatacattgaaatcgaataccgccgtatagaaaactcaa

SEQ ID NO: 43033 - DNA, 1117 bp, Zea Mays
gccggcagtggcactcgcagactcgcttctccccgaaaaacggctgaaccctgaaccctcactacgtcccgccgcctgcttcacagttcaccccggccatggtctccaccgctcgcgccgccctcccgacgccccacctctctctcgcttcctcctcccgccgcaggccccatctgtttttcacgccctcctccgcacctcgcctgcgcggcggcgctgccacctccatcaccgccggcagctccgcctcgccgcagcagcaccaggtcaccacgcgcctgggcgacgtgatagaggcgcagcagttcgatcgggactcgcttaacgagatctttgaggtggcgcgggagatggaggccgtggagcggagctcccacggcgctcccagtcgcgtcctcgaggggtacctcatggccactctcttctacgagccctccacgcgcacgcgcctctccttcgaggccgctatgcggaggctcggcggggaggtgctcaccaccgagaacgcgcgcgagttctcttccgccgccaagggggagacactcgaagataccataagaaccgttgagggttattctgatattattgttctgagacattttgaaagtggagctgcaaggagagcagcatatactgcgaatattcctgttattaatgcaggtgatgggccagggcaacatccaacccaggctttgttggatgtttatacaataaagagagaaattggcacactagatggaataaaacttggtttggttggtgaccttgctaatgggaggacagttcgttctctggcttacttgattgctaagtaccagaacattaagatatactttgtatctccagatgttgttaaaatgaaggatgatatcaaggactacttaaattcccaaggtgttgaatgggaagaatgttcagatttgttggaggtggcatccaagtgtgatgttatttatcaaacacgtattcaaaaagaaagatttggtgagaggattgatctttataaagctgctcgtggtaagtacattgtggataagaaggtcttagatgtgctgccaaagcatgctgtgatcatgcatccccttccaaggcttgatgaggacagatctagtgccgg

SEQ ID NO: 43034 - DNA, 434 bp, Zea Mays
ctaaaataacacacaaccctacaggaccagaagggcaaatgaagtacataagaataacatagagaaagtactaactctataagaaaaacaaatgcttaattgattatagtttttagtgaaaatgacgaaacattctgctctgcaaagtgggatagagagcaagaagagaatataataaatatataagtttctatttcatctttacaacatgtcaattgaagattttaagctcctttcaatctacataagagtagtaaacaaatgtcaaaataaaacccacaagtagcatattagttcctttatccttcctcttaaaatgagtcgaagagaaatatgttgtctgagtgcctgtacatactacagaccgatcaaatattcagtcagcaaaactttgcaaatacttaattttcaagatatgtttattttcctggaca

SEQ ID NO: 43035 - DNA, 1219 bp, Zea Mays
cctagaacatattttgataaaataaattaatcatatgtcatttatttgaaaatttaaccttgacataatatagtctaaagtaaccttagatttgcataaaaaataaccatatttattattatttagaaaaactaaagtaagaccaatatgatgaagtatttaaagtacttatatctagtattatattgaatacatataatatgtactttcatatctgcttctaaagtgtccacttcaccaattgttcaaatagaaaaaccaacttaaggtatacatgcatgatatgtcggattcacattatgtatgcatgtatacatcaagcggtggttataatagattttagtcaaacacatagctcaagctaaggtttcaaacaaatacatataaaaacacatagagttatggtactaaacaaaaaatataaaaaaagatgaaaaaaactgttaaagtacttgataactaaagtacactacggttagacaaagataagaaagtatatgtgtaactattgtattaaaatgtgaataaatgagatggaccaaaaataaattctgaagtaaaatctactatagctggatcaagatgggaaagtatatgtgtgactattgtgttaaacactatgaacagattagatagagcaaaaataaatttgattagctatcgaccccaaatttatctacaaatttctaacacgccatatctcttataattacagtcatgtgctctttaatcctcgctctcaaaattattgtcctgtgtagaagcatatagattttagtatacttggttgtaacaactaataattagtttcagcgtagaagcccagcgcactactacctgtcatgaagatagccagcaaccagcataacttgcacataacagacagataattcaaatgtgctctgacatctataattttaaaatcgaatggctcacgaccaatttggcattactaaaagaataacccgttgtaccgaactggttcagtatttttttaagcatatgtcagtctgatttactatctcggttctaaagaaatgaaattctagatttagattgagtcaacttctttatatttaacgtattagaaaatatttttaacaactataacttcaaaataatatactattaaaatatattaataattaatttaattataattagttggtatcataaatgttagtactttactatatatattttatgaacttaaaatcgt

SEQ ID NO: 43036 - DNA, 1263 bp, Zea Mays
caacaattgccagaggaaggatctcaatattcgatggtgtacagaagagtttaccggttgtttcacccatcttgttattcactatcttgatattcaccatcctgatcagaatgtggccaccaatggccaccatcgagtttttgacatcacacctgtccttcctccccccagttcctagagcccagaggtttggcgctgcacatcactgttccttcttcagtccactcatgtagtcatgtccatggatgaggttttttcctcttgaattcagtgggacaaccgttatgttgtgtttcttggaaaaatgtctttcgttagtgttggtcttctaaataagcgtcacttcataccactttggatctgactacttatcacaagaatgatcaggtaagaaagtccagattcctctatcctttgtagtcttgcagatgcttattattctaactatattagtttatttaacctttgcaccagaaaatagcaatattcttggtcctcacttagatacatgtctgaaaactttggtattttctgaagagtggtctgaatcagcagtcttacttgtcctatcaggaatgaaagagcctggaccaacaactcttgctttagggattgatttgacctcattggggttgaatttgaactcccaagataatctttacaagacatttggctctccgtggtcaagtgagccagctgtaggagaacctgattatcagatcccagcttgtttctctgcaaagccaccaccagcactgcaaaagtttcaccctttgacactattctacatcttttacagcatgcctaaagatgccactcagttatatgctgctaatgaactcagctcaatatctagcgtgcttttggaagtctgttcaaggggtggagtgaggagaagatatattttgctcccacatacaagtactcttgcaattcagattcttatgctggagagactgccacatcaaagaaaaagaggagaaccccagcctggtgtgaaagaatactatggcatggagatggcactacagcagtctgtgtccttaagcaaatcacaaaacactgcactagaccagtgaaccatacttgcatagctacggcccatggctaactactattattgttatgacatcaccggtgctggggcggggcccaaatcatcgattaaagcctaggtttttgtgtgacttgggaacacaatacctcggaacctttctaaaggacgctaagttatctgttcctcgaggaaatttcctgtgacca

SEQ ID NO: 43037 - DNA, 1894 bp, Zea Mays
caaaatacacacccgacccaacccagcccacatccgaggagccaccgcaaccgcatgcaactgcgccgcctctcgcctctcctagcgagcccgcgccgccgcctgcgattgcgctcccccacaaaccctagctctgccaccatgtccccgggcgccgctcacctggccactgccgccgacccggacgaggacctctgcgcgagcgccggggcgtcagaagcggaggtccccgcgcctgccccgcatcttccaccgctgccggtgtccgcggaggagcggttggaacgcgcttgggcgcactggaggcggctggggtccccacggctgctggtggcgccgatggtggacaactcggagctccccttccgcatgctgtgccgccgctacggcgccgacgcggcgtacacgcccatgctccactctcgcatcttctccgagaatgagaagtacaggtccatggagttcaccacgtgcaaggaggaccgaccactttttgttcagttttgtgccaatgatcctgacattttgttgcaagctgcgaagaaggtggaaccatattgcgactacgttgatatcaattttggtcgttgagtaacgttgttagtggtgcatcagccctcaagccttcaagcgcgatactaatgtgatgaagaataagccaccatgctagttgcccgcagcgtattgcaagacggggtaactatggagcatttctcatggacaaccttcccctcgtaaaatccctcgtgcagaatctagcagctaatcttcatgttccagtctcagttaagatccgtgtatttccacgactggaagacacattagcatatgcgaagatgcttgaggaagctggtgcttctcttgtggctgtccacggccggacaagagacgaaaaggatgggaagaaatttcgagctgactgggatgccatcaaggccgtgaaggatgcacttagagtacccgttcttgcaaatggaaacattcgccatatggaggatgtgaagaactgccttgaacatactggtgctgatggtgtgctttcagctgaaactcttctagaaaacccagcagtttttgctggtttcaggacaaaggaatggaaagaagatggtgacgagaatggagacggtggcttggaccaggctgatcttgtgattgaatatctgaagctgtgtgagcagtaccctgtgccgtggagaatggttagatcccatgtccacaagatgttgggcgactggtttagggtgcatccagaggtgagggaggaacttaataagcagaacaagctcaccttcgaatggttgcatgacatggtaatgaggctgaaggacctcggtggaagagtgccactttacagaaaggagactgcactaggacaaacattagcctctagcaatgcctgacaggttcttatatctgcagcctatcattattggagaggagcaattgatgaaaactgaagcattttgtaccaattttgacctgctatagtacagactggaagagattgttggactacaattaaacctcgattagtaaagcatattttgagttgagcagctacagtgcaacggctcacctcattgttgtaacagctgatatgtaaaatcatttttacatcattacatggtctcagataatttggatttgctattgaacttatctttggacgcttcacaaagctatattaccaacatgttcgcgcgcatgttcagctgcgcatatatttcacagaacctctggccgtctggcgtgcaagcaatgacaaaatcatgtacagtactatcaatgctggtggacgcaagaaaagaaaagaaccctactgctcgccactctgaaatggtggccattacaacggctcttcttcgagctccggccgccaatcgggcttctc

SEQ ID NO: 43038 - DNA, 3065 bp, Zea Mays
ctcgtgatgcccgtcccgcctccccgctgtggcagccgccttcgcgtccgtcgatccctccgtgcacagatgcgccccaaatcgcgcctcccccaccgcgctccgtgaaatccgccctcctcaacctccccgccacccagaactccctcgcacctcatccttcgcgcgatgctcgccgatgtgccgccttcaaacatcgtcgtcgtcacctcctccccctttcctaggagggcatcctcgccgatgtgtcgccttccaacatcgacaccaccgcgtccccgcaccaccctcccccgtgtgcgtccctggccccctgagctcgcgcaggccggaggaccgcgctcgcccacctgaagattgctccctcccccaaggagctggcggcgacgcggctgcgtcaggagatttgggtccaacttcacatcttattcctcttcagttctcggcagctttggaattgctcagctcagcttttcgacgccgagtctatagctgctgctcaccactgccctcggtgtctgtagtctgtccatggaatgctttcatactgcttgctactcgcagtgtcgtgctgtgcatgcctgccttcgaggcaacaaccaccgtgcatacattgtccgggtcgggctggtatcctttgctgctacttgctgatgctgataagaagaactgcagcttttatcaccccggccgaaaagtcgtctcttgactcgttcgcgctagcttcaaagatagagctaagcaggcgaggcctagaccgtccatgatggcgacaggagctcgacttcgagcgggcctccccagagatgatgctcctccgcagcaggaaatggtagcagcaaacggaacgggccaaccgcagctggtggtggacgaacacaagacgattcttgaagaggtccccagagaagaaaatggcaccctttctgccgccaattatgctgctcaaggtcatgagaatgttgccgctgagtactacaaacaacaggaagaacaggaaaaagttgtcaggagtgaatcattagccatatggctgtctaatatcgcaaatatggttctctttgctgcaaaagtgtatgcttcaacttgttgtcatgatatatcttgtggtttactgccttttcaatgcaaacgccaaatccctatagaaacccaattggaaaagcgtatgcagccactgaaccagggaatgcaagttgggattgcttggctggtcatacgaggtttgatctgttctgggtttcatgtaggaatcaaggaactagctgaggtctccttccctcaagatgacaaacaaacagaaaaaactaccctcaaggtgacctaaacacaaagggagctacataataccctacaagactagaccagtgccctcctaccattggcggcatgggatctcggtgatggaagggcaggggcagcacaggatctactgcattttttacaacgcagtggcagacattggagacgggttcgtgtgggatgccgactcctagctctactgccacgccagacactcttcccatatgaactttttgtgaagctctatagcaaggttgagttgcacccttttggtcttcataaccttggtaacaggccaatttatgctgggaatgcactttgtactgtgaaatataccgacgaggatccttgcatgatgagtattagatcaacttcattttcccctactgctgatgctatgtctgaaacaaaggttgcacctatcacccaggttgatctctctttcctcagtgaagggaaatctacatgggtgaatctgacatcccaagacacaaagcggcatgatcttgcaaatgcatgtgtagtagtcacaggaggcagaggtttaagaagtgctgaaaattttaagttgttggagcagcttgcggagaaatttggtgcagcagcgggcgcgactagggctgctgttgaagcaggttatgttccaaatgaccttcagagttgcaggagaaggctgcagcagcttgaatctcagctaatggaagcgaacagaatcaaagaggaaggcaacactggaagtatccgatggaaggagaacatattagaccaagagaatgaattacagaacataaaacaagagaacgacgacctgcagacaaaggaatcagcggcttctgagaagattaaggaactctcttcccagcttactaatgcaaaatatggcatgataaatagtaacaccaaggagataatgagaaggggggcactgaagaggacgatgaacctgttgtagtagttgccaaaatatgggagaacaacaagtttgttgactatgattcatctaaggagaaggagaatgatggtgactcacaggttgatttggaatcaaacaagggggatgcaggtcttgatagcaacgggttgcactcaactaaggagaacagtggcagggcatcaccaactaaacaacaccagcagtataagaagaagtctctgctgaagagattcggtggtctgctaaaaaagaaaagcgaaaattagcataaaactgtctgatgatattctttgttctatcatttgacatattttttgtaaaccctctcagagatgctgaaagccaacttactattgagagtactatgaaacctctcgcgcagtgtgaaataaatgacagaaatgaagtgtgtgttggtgttggtgctggtgctggagacactaacataaccggtggtattatccaattgtattggagttctattcttgaaaggtgcttggatacaaacgatcaaagcttgaaggaggcttgagtcaattgaatcatctgtaagtaatttagaagaaatattgtttttgttggtgaagcgagtttgttctttcctttgggctctatttatttatgaattgataacccaacaggattgtagtttgtagccatttagatttgaatccgagctatgactgagacgaatacaacatatgcattttgtagccatgtatatctgaatcagagctctgtgattgagatgaatatggttttatgtgccgtcgcaacacactgacattgtactatggtattataagtatcaatatgaagtatttctttg

SEQ ID NO: 43039 - DNA, 1183 bp, Zea Mays
  misc_feature (1183)..(1183): n is a, c, g, or t
gtggttgtggaaacacagaaactcttgtgtctttgatggggctactccggacatctctaggattactcaagacattagggacgatgccaagatgtggtgtctagctggggctgcagggctgaaagacagtggcaatcaggcaatcatgaaatttcctgagatccaagctgctgcttccgctcttcgcaatacaaggggtcttccatggcctaaaacttatgagcataaagttaacgaggacctcttggattggctgcaagctatgtttggctttcagacagatagtgtttcaaatcagagggaacatttgattttacttcttgctaacatacatatacgaagaaatccgaagactgatcaacaatccaagttggatgacaatgcactgaatgatgtgatgaaaagattgtttaagaattacaagaaatggtgcaaatatcttggtcgcaagagcagcctttggttgccaacaattcagcaggagatgcaacaacgaaaattactgtatatgggcttgtaccttctcatttggggtgaagctgcaaacttgcgttttatgccagagtgcatttgctacatatatcatcatatggcatttgaaatgtatggtatgttagctggaaatgtcagtgccttgacgggtgaatatgtgaagccggcctatggtggtgagaaagaagcctttctgaagaaagttgttacaccgatttaccataccatagcaaaggaagctgaaaggagcaaaagagagaaagggaatcattctgagtggagaaactatgatgatcttaatgagtacttctggtctgctgactgctttcggcttggttggcctatgcgagctgatgctgacttcttttgtcagcctgatgaaagaaatgaaagcacaaggatcagcaaacagaagggaaaggtcaacttcgttgagctacgctcattttggcacatattcagaagttttgacagactctggagcttctttattttagctcttcaggttatgataattctcgcttgggacggaggttcactagccagtatttttgattatgctgttttcaagaaggttttgagtatctttatcacttctgctatactaaatcttggacaagctacacttgatattatctttaattggaaggccagacgaacgatggaatttgcagttaagctgagatatgtn

SEQ ID NO: 43040 - DNA, 443 bp, Zea Mays
ctactatcccatatgagcagagcgagggcgtccaccacctaccgtgcccccgcccggccccgcgcatcccgctccccgaaaacctctccctccgtgccagggctcatccccaccgtgtcgtagccgccatcatcgcccaaatcctcgctcgccccacgccgcgccgaaatcctcatgccccacgcctgcccctgcccctgcctcccaaaccgcgcccattcgaaccggccgcccgaatctagcgcaagcacgcaggcggtgatgacggccacgggagacagccggcgctcggcgtgattcccgccccgccgcgagccaagaggttcgaggtccgcgacgtgtggaagggtgagcatcgacgatggcggtagaagaggaggaagccttcgatggtgcgctcaccgacgagcagctgcgagaggctctgtcgaagctctctacag

SEQ ID NO: 43041 - DNA, 1174 bp, Zea Mays
gccaagtacagctactccgtcgctaggtacagcttcctcgccacggctgctccgccaccagtggcggtcgctgggcagccggaccttgctcggcagtggcggtcagcagatcacgttcttgctaggcacttgctgcaagctgtgtgcatggctggtggatagacttggcctggcggtggggcaccatgcaatagccagagaagacgaggaaggaaacgaaaaggaatacaaggatctggcccacaaaactgatttcaaatttgatttactatctatatatatgtggaacagttggagatcataattttttacgctcaaacctcagttaccaactcccaacactattttttaagaactaccggagttgctctaagatgccaaaaattctagttgattatactaccgttcaccgtataatattcttttttagtataatctcatatattttgtgccatatgacttatgagttatgagacattattgcccccacgcaagcaggtccaccaccggggcggcgccgtcgtgttgatcaggacggacccatcattcgtctccctctggtacccgcggcaggccggcaaccccaagagtcgcaggagtgcccaagccggtggacaccgtggcctagtccagcacgcccgtggcctgtgaggcaaacgacgcggcccttgccagcgcggctgatggcgcggcaagtgccagcccggcacacggcgaggcgggggccagctcgggaggcgacgtggtggggctaagacaggcgcacggcacggcgcggcaaggctcagtgcgttcgtggcaatggcaggggcctccatgaccggggcgtgcacccccgcggaacagctcggcgcgcgaggtgtgggcaggccctgtccggcgctgtggaggctgtggccggcgtgctcgtggtggccggcgcgcccgtgtccagtccgacggcggacggttcttcagtccccatgggccatggcggcgcgagaacagagagacgacgaacgtagacgagaacatgcgagattcatgcacaagggtaatggtgtcttctcatgttcaaactacacgtaacataattaaaggaatattatacggtgaatggtaatataatcaattagaagatctttgtaatcccatttatatgaattaaatgtttgagatggtattatttacgaag

SEQ ID NO: 43042 - DNA, 381 bp, Zea Mays
atgaattgataggtatgtatggcgcgatgattattccgcttgtagctcagacacgtatttatttgacgcttgtaggaatacggggctacatgtagcatgataattgtatccccgatttcgaagtcgtcgtgctgtataactaagtctaggtctcaaggcataggttatgtctaattatattgatacatgtgtacaataggggttgtcgaggttacgagggaaaattaattgtgcttctgtgttgaagtcaataatttgctttaggagtcttataatagtaagctataaacgggaatatcacaacttaaataatgctacgtaatagataattaattacttaatggcgaagcacaatacatcactcctaagcacacgctagat

SEQ ID NO: 43043 - DNA, 2776 bp, Zea Mays
cgtcgggccgccggcacctgcccgagtggagtactcgaagcgggcggagtcggcgagtgcacacgtcaacacccacccgaatactagtagtggaatactagtagtggcagcgtttattagccgtcacactcccacactcggcctgccgaggagaaactgaagatggttaggggctagaacgagcgagaggcggccgggaggagggaccgatttgtcgatggcgatcggggcgttcgtggagggcgctccggcggacggcggagaaggttacagcggccgcgtgacgcccttcgtggtgctgtcctgcgtcgtcgccggcagcggcggcgtcctcttcggatacgacctcggcatctccggtggtcttacctcaatggactgcttcctgaagagattcttcccaaaggtgtaccgtcagaagcaggacagcaaagtgagccactactgcgagttcaacagcgagctcctcaccgtcttcacgtcctccctctatatcgccggtcttgttgcaactctggctgcagcaaccatcacaaggaggtatggccgtcgcacatcaatgctgatcggcggcagtgtcttcatcgcgggctcagtgttcggtggtgcagccaccaatattcccatgctcctaatgaacaggattctactggggattggtctggggttcactaatcaggtaacttatacttgaatcagtactcaacagggcacatatatttagctcaaaacaccataaatcggttgagcagtactccctttgtcacacatataggtcaatttagatttgaaggaaacaaaggcctaggtatggtcaatctagcacattcaagtagagaagatttttgaattgcttataacatgatatatagttcaagaaatcagcacaacagtttcatgctggatgaatgttctaatatctagatattggaaattaaatgtattgtgcagtaagtctagcatgaactcagaaaatcctgtgtggctatgaaatcagtatcagacttgagatcaagtatttcattgagttggacttggtggttaaaaacaaaggcttcttgtggatgtcatttgttcagctcccaagttggctacaatagatcgctaaagttgaacaaaagtacatgtttggcttattatgactttcaagtgtctttgctgctgatgaattatgcgctcttacagagttactgcttactaagcaaccttcaagctttcaacaagtgaagtgattatatatcagaatggagataaaatatagctgaaagtaaaagttgtgatgtaatctgaactttctagtttcagcttgcagtaatattgggtgtttggtttctaaggactaatttttagttcatccattttatttcattttagttcatccataagaaacgtatttggtaatttagggactaaaatggaataaaatggagagactaaaaattagtctctagaaaccaaacaacttctaataattagaatagctagtagaaaaatagtgacagaagttcacattgtgcaagagcaccaactatgaccacaagtcttaacacatcactgtctgcatagtactgtcatataatcacgtttcttatggattagagataattacttttgacgtacagactatactagctgcatgccgttcttaatatctctttctcccagagaacaattagatccatactaacatcatactatgcaagtcacatttgatttgcagtcaatcccattgtacctgtccgaaatggcgccaccccgataccgcggggcaatcaacaacggcttcgagctctgcatcagccttggcatcctgttcgcgaacgttctcaactatttcgtcataaaaatcacagcaggatggggatggaggatatccctgtccatggccgcactgcccgccgcattcctaaccatcggcgcgatcttcctccccgagacgccaagcttcataatccaacgtgacggcaacaacacggacaaggcaagggtgctgctccagaagctgcgcggaacggcctcggtccagaaagagctcgacgacctggtccgtgctagcgacctctcacgagcaacccggtacccattcaggagcatactcgagaggaagtacaggccgcagcttgtggtggcgctgctggtccctttcttcaaccaggctttgcgtggtcgtggggccctctcaccttcttggtccctgccgaggtttgcccgctggagatcaggtccgcggggcagagcatcgtggtcgctgtggttttcttgatgacgtttgtgattagccagacgtttcttgaggtcctctgccgcgtcaagtcggcgacgttcttcgtcttcggtggatggatctgcctgatgacgttgttcgtttatctgttcctgcctgagaccaagaagctgcccatggagcagatggagcaggtctggaagacacactggttctggaagaaggttgtgggagaggaagcggataggaaagaagcaggagcagggaatatagctttgtcgggcttgtcttagtcattttctgagtcgggtgtgtgtatgtgtatttgatcaaaactgcaaagaaaaacatagtatacgatcgcgacaagctgatgtaaatgtacatttgtatgtaaatcgagtaaacttatcagtctggcgttgttgccagttcctacaactaaccgttccaaatggtacaagagtacagaagcactaatataacaagaatgttgaaacgcactgctgtttcttctttcatgatcggccgtagaaggaaaatttacctaac

SEQ ID NO: 43044 - DNA, 1419 bp, Zea Mays
atggcaactcgcaacgaacacagattccgaagagagaccagggcatccataattatccaggaaaaacataatgaacagttccttgaatcacagactcgttggcgccaacacagagcttatgctgcttacaaacagcaacagaaagcttctttgattctccaatgcttgtggagggcacgcattgcaagaaaggaacttcggaaactgagaatggaagcaagagagaccggcgcactgaaagaagcaaaagacaagctagaaaagagagtagaagaactcacatggcggttagacgtcgagaagcgtttgagggctgaccttgaagaagcaaagagccatgaaattgaaaagttgcaatctgcactgcaaaaaatgcaagaaaatctcgaggaagcccatgcagcaatagtaaatgagaaagaggctgcaaagttagcgattgaacaggcaccaccaaagatagtagaagtgtcggttattgacaatgcgaaacttgaggagttgacaactcaaaataaagaacttgaggatgaactaagtacgtttaaacaaaaggctgaggatcttgaaaataagcttattgagttccaaaaacagtctgatgaactgtcacaggagacacaagaacaagcatccaaagttactcaacttcaagagctggtcgaaagattggaaagcaagatcgccaccttggagtcagagatcgagttgctccacagcaattctgcactagctattcaggtcgtggttactcctgaaatgaatcagacaacagtaattgaggaatttgacaagggacaccagcttgaagaagttaaaacggtcaataactctatttgtacttatgtttgcataggctaccatgctctaatttcacacgagattttgagatacttcttgacacttgtattttttgtcattgaagcccatatgctctgttgctatgccataatggactgcttggatgatgccgaccttctggccaaaagggtgtggagatttgagcctatttcaattgttttccaagtaactgcaaatggtgttggcctgctagatcctggtgttgaaagtaaccgtatttttttctttaggttgaagcatgttcaacaagttgaactatctaatcctaatgttgagatccgcttgcttgaagtattttaccacaagatttataagagcacgaccaggcaaccgtcgaccacgcccaatcgggagctctatcttggcgtcaaagtacattgtggcgaggaggtggctatcaagttgggccattttgagcatataaaaatacactagcaaagagttgatttctggtggcgaggacaccgcagcggcagcgggtgacggactcaacgagcaggcctggatctttgttgtcatctcagcacagttcttcaaaattctcctatccatgttgtc

SEQ ID NO: 43045 - DNA, 373 bp, Zea Mays
ctcactctaagatttttttactgacagagtatagctaactaaaaatctacaggttgttaactaattaaactggcgctaactgttagcaaactaaaagtgcagaataatgtgatgtcatattaaacaaactacaatcagaaactctgatatacttttcagacggttgttgttcggcaaaaagaaggcgaaagacgactgacatttcctcccaaacaccttcttttgaggcgtagtacagaggtttaccttctatcaagagggctcacaccaataaaaaataattgtatggtgcaaacgcaacaagctagcctttttgcagtggacaaaggtttgttccagtacgacatatctgcatcttcagtagctcaatagt

SEQ ID NO: 43046 - DNA, 958 bp, Zea Mays
tgctcgcttgcttgcttcaggcctacctttcggcagtcttaagcttggtggttgtagtggcgcaagtataatgcgttattatcctccaccagagaggacccataggccatatgcatgtaggcatgtagctgcaagtctctctctctctacaccctatacttagtagcggagatcatgctgtccctgtcgctgcctaagtggttggaggactgactagttagtgccagacccagactagagacgggcaagccagcagccaattcgtccgtgttgttgttgctgttgtcgtcgtccactatttagttgctttgcgcgcgtgcagagagcgagctacctaccctatagagtgtacatagcaagctccgccgccgtcgccattcctagacacaccttagctcgctctcgcccatgtccgtgacaacaagggagccggagctatagctgacacccgctttcgtcctttgtcctttcgcggcattcctcttggccttggatggaggggtgcccgtgcctctgagctccggcctccgggaattaataaagcaagataggaggatatcgccatgcaggcggcggccaaggccaagacaagcaaactgtcagttaggctgaaacagacaagtgtagccaagctcccaaatcaaatggtccaggtccagggtatcgaatggccagcaaacccttggaataattgaagctggtcctcgtgttgccacccaactgatggattaagatggcggtaccagctctgctaccaccagtgtcgctgcaaccaacggcaaaacaggcgtgtctgatagaactgatgacgcaaactcttgtttgggaccgggaccaggaaccgtaattgacaccggacaaaaaccctgaaaataggaaggctatcagtcatatatcccatcatgctagtcattttctcatacagaaactagaattcggtagcaagacaagattatcg

SEQ ID NO: 43047 - DNA, 2109 bp, Zea Mays
ggaaaagggtaaattcgctttcagaggcaagcgctgcgttgccacacagcgggaatcctgcccagagctgccgaatcgggtccaatcccgtcgacctttctggccgccgccgccactggactccatccagaaattaccttcgattcggccggggccgtgggagcggggatggggctcggggaggcggcggggcggctcctggcggccgtggactgggagcgagaggcctacccggcgtacgacgacttcctcgcgctccccgtcttcgtccttttcttccccaccgtccgctacctcctcgaccgcttcgtcttcgagtgggttgcaaggaggcttataaatagaaatggacatcagagcactaataatgaaacagaagaaggaaggaagaagataagaaaattcaaggaatcagcttggaaatgtgtttatttcctgtctggagagcttttagctttgtcggttacatataacgagccttggttcaccaataccagatatttttgggtaggaccaggagaacagattgaaacttaaggctgtatatatgtatgctgctggattctacacatattccatatttgcacttatgttttgggaaacaaggcgttcagactttggagtgtcaatgtcacatcatgttgctactgtcgtcctgattgttctatcttacgtgttcagatttgctagagttggctctatagtattggcaattcatgatgcaagtgatgttttcctggaagtagggaagatgtccaagtacagtcattgtgattggcttgccaatgtttcgtttctgttttttgttatttcatgggttcttctccgcctcacttattttccattctggattctgagaagtacaaggtaaattcttctgttctggctcataagtctatcagattcttatgccaagaaaaatcatcgagttcgtaaaagtttgtttgcatatacagtcgaaagtagattggtatcttatttgttctgtactcaaacggttattgtgaaaacttggacagtgacttcctctagtctaaagaacattcctttatatagtcggacagtagcatcttagactctaaagagaattttactatgtacttccattggccacacaaatgaaggtttggatattttttgtatgcaccactggagacttcacacctttgtggacttggctaatcatataactcagtgtccaaaatatatcataataaacaattatagacatgtcaaattctgacaaggtaccatacagattcgccccattgcagtgttggtctggttcacagtttctttgttgtggtgcttgttgagttgctgtgaggttgtggccttcatcatctatgaggtcttgttgactttggacaaaaagaagcacaattttgatggtcctatatactattatgtgttcaattcccttctattttcactacttgttctccacatatattggtgggtcttaatatatcggatgcttctgagacaaatcaagacaagaaatgttggagatgatgttcgatctgattctgaaggagaagacgaccatgaagactgattggcgtcaccatcttagtttgcatattatgtcggtgctagaagcatcacccccaataccgtccctgagcttatacattctttggctggattccaagaatacgtgcagattatgagaggacgagcatttgttcctcacgagaatcaccgaagccgggctacgatttcttctgtctcgactgctcatttgtgttgtactaagtatgcattagaaacagcgctgcaatgtgttaaaaaagttggatgtcggatataacattcttgtgagtgttcagacaaagtgcagcggtaaatgtagcattccagaaaaaggactggctgtaaactatatggcctttctttcgacaaaccattgtaaaaattgtgtatgccaggatagccttgcttgggatttaccacaatcccaatcagaaactgtcccttctgaagcatgtatttcaccattcagtgattcgcctgatgataatttgataaattcatttatccaacacacctgatgcatatttgctgaaaaatggttcccagttacatatttatcataggggagaccgg

SEQ ID NO: 43048 - DNA, 2301 bp, Zea Mays
ctcgcactactggcaccatgttgttcaatgctcgtagtaggggttacaagcgggcgagagagggaagggttcccaagtctctatgagttgttggttctaagggactacatattaggtgttcgctacctagctaagtcgatcgagtgtcgctgctccgtcccctctgctcttctcgtgcgtcctctcgggactctcctcttctttgggccaaccctccccttttatagactaagaagggggtcggttacaagtggcttcttgtggaaggagttaccacgtcgtggtaaaacaaagggttctatccttggtagaatcttgttcgtcagtattcgtccttgtcttcttagtactctagtcgggctctataagccgagcgtgatgatgcgcatgggcggcgagagacctaggcgccatcattacaccttctgttctgcatcgaccccaactttcatagcatgagcctcggtgtccctcgtcgtgttgcgggttgtgtagattttcaggagacttaggactagcctttatagtccatgagtgggttgcagtcctatggcttcataggccataagtgggggctcaggtttgggttcgtaggccataagcggggcagtctacgagtcaggtgtggaatccactcaagttgcttcctcttggtttgcccgaccctcctttctggctccgcctcgcccgatctccgagtttggtgccctggggttactcgggggcaggtccttccggagcgaactctccctccatcctccctctaactcgtgggccctaggggcttaggaatttgatccccgacaaagtgtatagtttttcgagtgtgttacaccgaggatttgagagtgggtgctcaaaatatgaagtgctgtcaaattttttattacaataataataaagtcttttagtaccatgtaagtttgacattgaaattcaacggaaaccataaaccaagaggcacatgtatagttgttttctatgcgtacttattgaaggcttctttggtgtattttagtattgtaagtcttcttttacaattcttttcatcttatctttggtcttttgatgcctatcttttgtctactgtggcgccttactatccaatacacattggtgtctttagaggtctctattgtacatttccaaaccatctcaaccaatgatgaataaacttttattcaatggatgcatggatctcttagcctatgacgttctggacttgatccctttttaatatatatttccataacacttattagttaaagtgtaatgttcttttgtggataacatatataatattgtgtactagtaaatgttttggtctaatagttaccctaatattttctttgttttggcatttaactagtgcccattgctttagtcttatttaaacaggaagctatggatttacatttggtggcttaggccacctcgaagggctcccccacacctccaccccatgtcaggtgtactatagagagaattcgcgctccaacggctctccccattgcggccctatatgggggagagataaggtagctccctatatatgggtgtaggaatgggcctgtgcaagaaatggatgatgggtcggtggctcaccatggctgcattgcccaggatccgagtcatccaacgccacccgagctcctgcacagatctgcatgcacaggagggaggttcagcgaaatgaggaacgcgacgaccgtgcaacttaagtgcctcaggtgggaagcctactactgtagtagctagaacgaggaggggagcgaggcagcgcggcgtgctcaccggcggcgaggtcagttgagttcccagtcaacccggaggagcagctggcttctgagacgagcgagggaatggctacctacgtacggatgcactcaaagatgcgagcatacatgagaggttattattgattaatgtgatgaaccatgtggcgcgttgacttggtatattgaaagggcaagtgtagaaaggatctagatgtactgagccggcctagttgactggatcataaaagttcgattcaataaagaatgtagagagagagagacagctggatcgcttcggttttgtcagataagttcatctcgacacattattcgccctaatttttttagtcaatcccagatcagttttcgtagcgcagcggctatagacaagttgcatccagctggtgcttattagaatatagttaggtgcgcatgtattactgttataaatgaatgcgacacaaataggatcaatcacagagaagacacggatttaacgtggaaaacccctccaaagtgaagg

SEQ ID NO: 43049 - DNA, 387 bp, Zea Mays
atctgacgggtgtcgtgcggcttcactttcttctccataccttccggtgatttctctcaaaccagcgacgatcgacgaggattgcgaacatgacgagagggcgaaaaccatctatcacaacaactctctctaccccgcaaacaacatctaaaacagccatatgaagcagtgttgagatcttccgcccccatgacctagataggaccgaccacgaggaggtgaaacacgacgagacgcgtatcggaagagttactgagattaaagatgacgacacgcatcaaggcgagacgacgtatggcggggaaaaataggaatggacgatgacgagggagcagcacggctgcgtgggacttggcgaggtggaggtgtgtagctgagtaacgatgg

SEQ ID NO: 43050 - DNA, 1140 bp, Zea Mays
ccccgtcgcctgcccgttcccccgtttctaattttatgaccgtcgaaaaccaaaatttagataggccacccaaatccaggtgcaaatcccaacctccctccctcccaggccccctccccacctccacctccaggcaccactggtcccacctcctcacctgcgaggatgctgctcgtgagtcaggcagcgaacggctccctctccgcgcggcggctgccgtcgaagccgccggggccgtccaccaccaacccctacccgctcttcgccaaccctcgcctcctgcgccgccgcctggcgctctccggcgctggcgccgaccaagccccgcgccgcgccgcgccgaccccagccgccgcgggcgagggcccctccgcctcctccaccgaggacccggtccttgtccgcgtcgccgacgacggcgtgccgctcgagggcgtcatccagattgagaagcccggggatgcggccgccgagtccaagctcgtctcctacgcgaagctgggtcttctggccggcggggacgtgttctgccttctgctgttctctgcgattggaaggttcagccatggcctgcccgtcctcgacgccgagacgttcaagacggccgaccccttcattgctgggtggctgctgagcgcctaccttcttggcggatttggcgatgatgccaaagggcgcaatggcgtcggaagcgcggttatcaccgcagctaaatcatgggctgttgggataccgttgggacttgctatccgagcagtgacgtctggtcatcttccaccaactccttttatcttggtaaccatgggaagtacaggggtcttgttaactgcatggcgtgctttggtatcacaactgttttccaaccagcaaaagcagcaggatgatgtctaccggcgtggaagtccttttgagctttttgagctactcacatcgctggtgcggaggtggtgacatctgaaggctgaagcctatagaaggtcacatgtcaatcaacaatgaagcgtttgtagttactgttgattttaagacctgtcaatcgctttatagatagtgtgcagtgtgctacatgtatatgagtgtctatgtttgtattctcttttctttaatacatgtaatgtgacaaaaggtaaagaaaggtga

SEQ ID NO: 43051 - DNA, 724 bp, Zea Mays
gcaaggcccaggcctaacagaccgagatgtatcgagttttgcgccttcgatacgtcgtttacgtattcagtttttcacacaacggcggcgatgtcgtcggcctcctcctccgccgccgccgccaacgccggtgaaggaagcgggggtgcggaggagggcgtggagatcacttacgtgagctatggcggggagcagcatctgccgctggtgatgtcgctggtggacgaggagctcagcgagccctattccatcttcacctaccgctacttcgtctacctctggccgcagctcaccttcctggcgttcgatgccagggatggcaagtgcgtggggacagtcgtgtgcaagatgggggagcataggggtgcattcaggggctacatcgccatgctcgtcgtcctcaagccctaccgagggaggggaataggactgcggaagggaggttaagtctcttggggcaatgagatgatgcagatcgaagagcatcggtggcgttgtggtagacccaagtctgttattgaactcatcccagataattgcttctttacaacgatggtccgttatgagcgtaccattctgatcctcaagcccagttatggtgttaaacctaaaccgctctgttgctgccgcatgaaagaaactcgtgttttcatctccaaatttggtccatctgacagtgtacctttgtctccaaaaaatcttttttctttccagtagattcagg

SEQ ID NO: 43052 - DNA, 3238 bp, Zea Mays
cgccctcatcctgttttgcttgcccgcatccccgtcagtcattttggtgaaaaccgaaaagcgcctcccctcctgctctgctcctgcctctctcgtcactcgtcattgcggccgggcactgggccactggcatcgtaacaactgccgatacgcccgagacagcgcgggcggagccagcgagagggaaggccatgaggtcgcagctcaacgcgtccttctcgccgccgccctcgctccggcgagctctcccctctgccacgccccgcgccctcaggttccacgcgttcccgtggcggttccgcgctcctcagcaccacggccgcggcgctggagctcgctgcgctaccaatctgcccgcgcccggcagccatggagtcggagtgctcgcctccgagaggagggccgacgatggcgacactaccgtgaaaaatgcagatgcgcctagcacttcaacggcgacgcagggaaacctcaacatggctgccattgttagcatagcattctgctttctacacagaattgtttctggacggatgcagtcgatgatgaatttgttcccttggatgtcaaacggcattgcaagcttgccatttgcttgcatatctgatcctaccagaaaacccatgcctcttaagctagatttgactcttccaccactgcctgatttcggatggaatttttcgcgactgtactatcggttcaattctcagcttgatcggaacattgccttgtctatcattaccttgctcatcacttgcttttcatttgtcattgttggaggattactgtttcataagttcaggaagcaacaacaatccctggaggactgcttttgggaagcttgggcatgtctatgttcatcatctacccatctaaggcaaaagacacgtgttgagcgtgtcattgggttctttcttgctatctggggtatattattctattctcgattattaagtgcaatgacagaacaatttagaaaccagatgcataaagtaagggaaggggcacaggtgcaggttattgaggatgatcatatcattatttgtggagtcaatagtcatctgatgtctatattgaaccaattgaataagtaccatgaatcatcaattcgcttaggtttagctacagcaaggaagcagaaaatccttcttctctccgatcttccaaggaagcagattgataaacttgcagatagcttggccaaagatttaaaccatattgatgtattcaccaagagttgtagtcttagcatgtcaacgtcatttgagagagcagcagcacacaaagcaaaatctataattatcttgccagcacagcatgaacgatatgaagtggatacagatgcatttgtctctctattggctctacaaccctgtaaacaaattgcacctgttcctatcattgtcgaggcttccaatgcaaccacttgtgaacttctgaaatcaatcactggcttaaatgtgcaacctgtggagatggttgcttctaagttatttgtgcagtgctctaggcaaaaggaccttctgaaaatctacaagcacttgcttaatcagcacaaaaatgttttcaaccttttcaggcggcctgaattagagggcatgaagtatatggatgtgagacgtaaaatccatgatgcagtcgtttgtggtatcttccggtctggaaaaattcattttcacccaagcgaggaagaactactgaaagaaacagacaaattgcttcttattgctcctgttcgtgggatgaaaagaccacaatatagagcattaagtgtacggaaagaaacacaaacattgagtcgtaactcagagccaagagagggtcaaggatcatttaatatggctactaccatggataatgaaacacggctaaataacattgtaaagcgccccttgaaatctctttctaagagcagtgattatatgcttggacccaaggaatgtgtacttattgttggttggcggccaaaagttaccgaaatgatacgggagtacgataattaccttggacctggtagtacagtggaaatcttgtcggaaacccctattaaagagaggagcagtatcatcaacccccttttgcagagccagcttaaaaatgttaaagttactcaccgggtggggtgtcctttgaactacgatactctgaaggaaacaataattaacgtacgagaatctgccaagtcagataaagaggttccactgtcaatagttgtgatatctgacagagactggtttgttggagcagatgctgcacaggctgataaacagttggcatacacccttcttcttgctgaaaacatttgccagaaacatggcgttatggttgagaatcttgtatcagaaatcgttgacatgggactaggaaaacaaatatctaaaataagaccatccctttcatttattggagcagaggaaataatgagtcgtgtgacagcacaagttgcggaaagtagtgagctgaatgaagtatggaaggatatcctgaacgctgaaggcgatgagatctatattaaggaaattgggctgtacatgaaggaaggagagaaaatatcattcttggagctctctgaaagagcagttttacgccgtgaagttgcgattggttacatcaaggacggcaagcagcatattaatcctatcaacaaatcggagccgctgtcccttgaaatgaatgattcgctcattgtgatatcggagtttgaaggtgaacaaccaattatgatgggcggagaaacttcaggatgaaattttcagctttatatctcttcacagaaactctaacaactcttgctaccatgaagagatgacatataacctgtttataatccttttctttttgtacaaagggaaagcaaaatatagtttaaaggccacaaatcaagttttgttcctcccatagccgtagaacttctttgatgcaaatattttactgcacagtttaaccgcagaatcttttctatttatctgtaaacatagtgaataacacaggcaacttgtatggtacagatgtctgaataaaggaaggatgaaggaaaattgattgactatgttccttgttgtttccttctgactaatgaatacaatgtttccatttttttagtcctgagctagacaaaatcagctaggtatggccttgctgttctctttgggagataaattcgtcgcctctagcatttggcacaagaaaagtttgttttacactttgcttcattaaccaagccactgcttcagccttt

SEQ ID NO: 43053 - DNA, 2876 bp, Zea Mays
cttccggctggctggcatttaatgagcccacacaagtgtggtacccttcaagtaacactgtgtgtgaagtttgtggggatattggttacagacaacttctgctttgttgcagagactgcaagcgttgtgctgtgcaccaatactgtttggacaaagttgtctacgaggcatcattaataaaatggttctgttatgaatgcctacaaaggcgtggtgaagttactcgcatcagttctctagagaagttgtcaagtgaaagaccactaagtcaggtccattctcgttctccagtacagcagctaattaccaagagtgtagagtcagtaagggatgcagggccttggagagatcggaaaaatgaatcaattgcgactaaatatccatctctcaacagaacatatccttcaattaagaagcacactaaaaagaagccgattgtgaaaccaatgggtaactgcacaaatagaaaagtgcgaatggctaaagttaccacccatacaagtgccgaagcgtcacgttcttgtgaaaccattgggacagaatcatctaagagcaaccatgggaagaaccagcaggtggaccatgcaaaccctgtcgcattgaacactgagcagtctttccctttgattgtgaatagcttgggtacattgggagataatcaccagtatcacctcttagaaacaacagaagggttggcttgcaaattcaagaaagttccacaatcactcgcagcaccattgaaaagattagagaagagagacaatgtggttttgggatcaaataatttagggtcatcttgtttcacagctgaccttggaagctcggttcttggaaaaagtggagacaaatcgaatagaatgaaggatattggtgcaaacttgtcttccaaacacaatgatcatggcaatcaggcaaatcaacacactttagttggctcgaagaacatggaaggcaagtctgtaaaggctaaacatactgtggttgatgcacataaaaacacgtcttggacagtggactcactgataaacgtcaaggacaagtctgaagtatatggtgatagtaatagggatatcttaaatgatgtcacagtccagctggatcatagggctagcaatgagttgctgccgagaagcacggccaccaatataccacagctagccactctggaaaacgatgttgtggacacagtcatgccatattcacccaatggtggttgtgaggaatcattttcctgccctggcataaaaaacaccccaagtgttcgagaaagaagtgtagatcccattaatatttcaagtgattctcatgataccatagaagcatccgaaagcagtgaaagattcatggaatgccaaaaagctagcttgtgtcgtcgcaggaaaactgtgaagatggctatggtgtcctcatcatctgaggagtcaggagaagacactatctctgaaaacgtatctttggggtatgttttggcatgtagaagttctctatctaaagcacaaaagaagagagtaacgaagcttattcaggaaattcaacctgaattcacagtttttatatcaataatgcggatgagcaatgtgaaactcccaggtcctcttctgggaattaccaaggaatatgcaattgcacatttcccagataaaaccacaaatgtcactcttgagacgcctggcaagagcaagaagtggcatcccaaattctacaaaagagatgaaagtagaaagaacttgcttatgggacaatggctagactttgtccgtgacaatcatgtgcaggagggagatatctgcctctttttaccgacaaaagatgagataagacacacatttatggtctatattcttcatgaaacaacccattctagatgtggggctggctttcaaagggttggcccatgccttggtggtgcatccagtgcaaagatggcttcagaagttcatattgaggatgaaccaaccgctggagaacatgtttcgtcggacagtgatatgccagaaaattctcatgaacctctggagagcggagactcggatgatccatttgaacctccatactttgtaccatgcaggagtcctctatctaaatcccaaaagagaatggttgagcagcgagtgcgagctatccgatctgaagttcccatttgtgtggcagtaatgaagaacaataacgttggcattgctcagcgttggatgctagaattatgttcacgatatgcttcggtatatctcccaactaaagggcaaaacatattgctccagtgcaaggggaagacgtgggaagccaaaatgatgtttcataatggcagaaggtggtttcttaatggaggttggcccgattttgctcgtggcaatggcctgcgcgtcggtgacatgtgtctattcgaactgaagaagaaaaagagtacgcttaccatggcagtccatatcattcgcaaggagcagttttaggttgggctggcatgtagttaatccatggttgtggctgatctctggatggattagagaccaatctcaatctgtaacgtttgttggtaggctggtagctatctgctgacaacatgttttagcatgatgtatatataacatcctttattatgccgaaatgtcgccttgcttttacttatgtgtacatgtagcacagttttgtttgcttttcaaaatttgattgtacggcagtaggttgaacatgcagcttgagtttcagccgcactaggtcgcctctccacagaaaacagaaagtgaagatggagaatatgcaatgtgtttggaagcaaaactaatttaggtaaacaaatgtaatgaaattctcaaagcggtttgcacaatcctctgtttcttatcttgatcttctctttgagtttgtcagctgcaataaaa

SEQ ID NO: 43054 - DNA, 738 bp, Zea Mays
gaccgaagacacaccgaaaaaagagaaaaatacaaaaaaacacaaaaaaaaaccaccatccactgatctatctaagatacactaaaaaaactagtctcaacttgatctttcaccaattgtgtaacttggatcgtagatctctgttgtccctggaaaattctattatttctttccaaccatatattccaccagaagcagataagaagcccatcgaaattcttctttgactctttgcagcaacgactccttaatctcttccaccaatcgtacaacgatccggagctagaaatgccacgtaggaaggatttctgtttctagtgaagaggcatgcacgcatagtggagcatcagaaggataggtcttggccccccggcccatgcgttgtggccaatcgagtgaagcgtgcaggggtgttccctaatgctcccctaattctatagagactgttagtttttttagctaattcttatgtaaacgatgtaaaaaatacttctaacagcaccccttaatctcaaatcctggcttcgccctcggaagcgtgtggtctgacgaccagcccctatatatgctgggtggtatatggctgccaaggtctctccagtgatatacatgacatacacccgcgagttattaccgaggaggggtttttttttggcgtgtttggattgaagctaacaagcaccagagttccccgctgatacactagataaactatactctggggacctttcacagcta

SEQ ID NO: 43055 - DNA, 377 bp, Zea Mays
actgcaatggatggggagaatccttccgtacaagatgtctacaagttggctgtgtcagagatcctagtatggctcaatatcaccagctaggctagagctgcaatcaagggtgtctcaaacagcgccagtacccctatgtcgatctactcaccttgcaccagcctctctagacaggcactatcaactagaacaatcttgtttattacttaatttgtgttcaacgtttgaaggtttggtaactgtgtatgtgttatctgagccaggcctatctagatgaattgatcgagttccatgagtctttgtgttgatgttgtaaaactatcgtattgggatcatctggtcgtatcctaaatcataattttaactatattcataat

SEQ ID NO: 43056 - DNA, 1137 bp, Zea Mays
gtaatcgatcagctccacccctgtccttttgtattttgaaaatgtcttcatatgtgtcattttgtactcgaccagccccagtcctgttcgttgttttttctctcactttgtaatcgatcagctgcaatgaagtgggtagagtgggtagccgctgtcgaggatcgccatcgagagggcgacggccgcgctctcgacgggccagagcagcaactgggtggtcgtcgagttcaggcatccgaacccctccaacgacgactgggtcggcgtcttctctccctcgggtttcaggtactcgacggactatggcatgtttaggctctgcatagcgaacacggaggaggactgggggccgggaacggagcagtacaagttcatcgatcgaagcagccctggctcgtcttcctcgcgcaccgtgttctcggctactcgtcgggtggctggtacgagacaatgatgggctcgtacggggagccgatgggccgggacgggcttcaagacctctggcagaggtacgatatagcggtcttcggccacatccacggatacgagcgcacgtgccccgtctaccaggcaaagagccggtgagtccaagatgatatggatcattacggcgggcggggcggttcaacgcgacgacccatgtcaccgttggctgcggcggcggcgcgagcctgtctacgttcagagacagtgtgccgtactggagcttcttcagggacgccgacacttgatgttcggcaagctcacggccatcaacagctcgttcctcttgtttgagtacaagaagagccgcgacggccatgtgtatgaccgtttcagtctcgcacgactaccgtcacctggtggcctgctccgtcgacagttgcccccgaagcaccttggccgtctgatcgagctccggactctggagacatgtgttgatagatacactgtttgatatactttcagcattgtttttagttaccattggttctgaatgcactgaaccttctacctcgacactacatgctacatatcaaaagggcaatggtgtagaacaaatcatgtgcttctcactttcatctggttctggtttccagcgcagattctggctggatctttagcatgttcatatgaatgtccttgttcgagcatgcc

SEQ ID NO: 43057 - DNA, 290 bp, Zea Mays
gttcccgccaacctcggccgcatgcatgtcgattaggtcggccacgcccacgccacaggcaactgaaacacattgtgcacgtggcatgatccagcggcaggaagggcaggcaggaagccgccgaccttatcggcagtggcacaggacgggcaggaagcagctcaggtgccgccgtgtcgccagttgccatggccgacctctctcatccttctagctagcagtctagctggcgatggaggtcgtcactaaagcaagtgcacatgcttccattgttggtggtcgacggttgt

SEQ ID NO: 43058 - DNA, 331 bp, Zea Mays
ccgccacggagctcgccggactgcgtccagatctcccctgcgtcggtcaccatccacgctcagcgcctaggcttcctcctcgacgttcttccctgccctagctgcgtacgcccagccgccggccgacctcaccggtgaagttctggtgctcgtgttgctccttcactacaacctagaagagtggcggtggcgatgctcaggccggctacacacccaatcccggcggcgacaacactacaacctagaagggtggcggcagcatagttgctgtggacgaccaccaccgagacgctgatggcagatctcgccggcacgactagcagcgtggtgc

SEQ ID NO: 43059 - DNA, 2556 bp, Zea Mays
ccccgcgcgcgtcttcctccggcatgcgccagcccccccgagctcgcccgcgcaccaatctcgccgtcgggtatcccgcccgcgagcccgcgcaccaagctccttccccgcgacaagctccctcccccgcgacgcgtcttcctcctcgccctagatcgccgccccagctctctcctcaccccgcaatccccgccgcccatgctccgctctctactcgccccagatcgtcgcccctgttcgcgtggattgggtaccggtcccaactatctccatggattgcgcgtccgcgacaacccaatctcctcccggtctccatggaaggcgcgtcctccccccgtgattctcgattccccgcgtccgcgccccagatccactctcctctctcccacaatccccacggactctgccccgtatcaccaccccggctccttagaacgtgatccactctcctctctcctgcaatccccgctacctcaacccagatcgccgccctcgctctcgatcctcgcccacgctctccatggaaggcgaggccgcgatgctcgcgtggatctatgtagaggctgcgacgctctcccaggaagactactgccagtgctccgtgctccatgcgccgcgctggaacgccaccgtgcggtccatgtcctcgtagtatcgcccagactcgcccatgtagtcccacctgcatccaccgaccaccaagcacactctcactgcagaccagagaggattgccacgaataggtgtgtgcagttctactctacccctgcatcgagccggtgtgcgtccaccagaggccggagttgaaggagagcacgtcggcgtcgcgccatgactcggcgttctcgtagatgtcgtccagcatcagcacctgcttcccctggaccacgtcgatgtccaccagggtccacggagacgagctgcgtcggcgactgcagcgcggcggcgtgcagcaggcagacgagcgactcccactggttgcgccccagcgagtcgcccacgaacatcaccgtcttccccttcatccgtgtcaggaagaccgtggcacaacgcctgatgtcacgttgtcccagcggcgccgcggccggcgtcacgccacgcggatggtcacccacgccacgtccctagaccggtgtggtacgccggcgcccacagcgtcgatgaggaggaggtcggagcagcagtagctgtcatgggcagtgccgcagatgtggagcagtcgaatgagaggctagacgggctggagcaccacagcaggctggtgtcgctgttggccggtagccgctcctcccccaccggcaccgagagggacttgtgacccaaggatctgttcccgggggatgtggtgtttgcgctcgtcgatgatctcaggctcaaccactccaaggacccataggccatggggttatgcaatccaaagaaggaaattcctgcttgagccaattacagaaggccctgatatttgtcaaattgatggttgtagtgttaaattggaatacaagaggaggcaagtcaaatatggtttgtgtgacagcacgttactaacttactctactatatctgcatgagaaaggatgaaccctgtttgcatgtatactaattaatctacggattcattaatgtgtgaataagattttatttaattatgacagcaaacgtgacatgccattacaatttcgtttatgcaaaaaagtaagttgcttatagtttagcctttggtttcaatttgcactttatagaattatactggcagagctcctgacggagcacctgacggagctcgccacaggtaccaaacggcgcagcagcagttgatgtgcaacccgagtgtactgccgctcgaggaggccagtaagtgccaacaacatgaatagccaaagcagggaaatagggctggcgggggcacatgggtaacttggtcctggagcattggagaaggagcataccacaaggaaaccaacacgagttccttgcttcctgaaggcctcatagctcagattactgggttaacgaacaactcatactttgatggagcacatgaggttcgacattatgtcaggaagcattcgaatcttggtcgtattgtgcttgaagttgctaaggactcgcaaatcccccgccaagcaaactgctagaaatcttttcagaggtggagatgatgaagatgatagtgctgatgccgacacaaatgatcctgttgtaccttggtcattaggtagagtaggagttgggcatatggtgtacatctccggtttgacttgtgccttgagttcaacaaatatgaaagtgctgagagaggtggcatctagaggacgtcatgtcgaacgtgtgaagaatttttttagaaatatgtatatttgtgcgaaactttttagaaacttgactccattttattttctatgttactctcggctttgtttcctatcctttccaatgacttgctatgcatttgcactgtatttggcatgtttaaaactgctacacaaaacttgctatatattttgtccaaaaatactatatccttgttatgattgattgatctttattttgtctgct

SEQ ID NO: 43060 - DNA, 3885 bp, Zea Mays
gagagagaaagaggcagcagagcacataaccaaacgacacccatccgaaaaccccgaaaggaggagggaaaagggtgagagaaaaccacgcagtcgcttgtccagacaaaacaagaacaagaacccaccagtaatttctcgtgaacgcattccgctattgactgctcgccctgtcgagcagattgagctatccaatatccatttagctcgacacagtgaagaactgaagatacacattgggcttgcttgtgttccgtctctctcaaacatcctgttggtgtgctgtgaaggtctgaaggtcacataatccacttggctatatgccggggtgggtaatgtgagtcgggcttgataaatgcagacttgttaacttgttttgcaacaagaatgggggcaaaagtagaacgggaaagttatatgcctggatattatgccacgggggatctcaatttggaaccaaatggtagatggtctccatactatgaggagatgacatcaaatgatcagttatgcaatggcttcacaacaaaaccaacaaatgactattcagaatttgacaaagaaatactcaagcatcaaatacttgaacatgaagctgtgtttagacaacagcctcacaacccactcgctatccaggtgtatgaactgcaccgagtttacaaaatacagaaggatatgatgaaacaacatcaaagcaaagaggtatattcatacccaactttggcagttgcatcacatacaaattcaccatcacaagtgccacaaaacggtgcaaagatgatgtggcagatgccagttcctccaatgtccacaacatacaggaaagctattggagagcataatgatacaaaccagtcctccatgaagttccttagagaaggcagtgtgcagtcctcaccaaatggatttatatcaagtgatgttggtccaagaagcagacaaggcacttttgaccttcaacttccagctgatcattatatagatgacgatggcacatcagataacaagcccatagatttccttggtttggcatcagatacaaaaccccggaatgatgctgagcttacattagttagtgcagaaggcttgggcaagttcagtgataatagttcatcctcgggtttgcagactacaaataatcttggaccccggcaggttaccgacctgaatgaatcaaatactggcttccatatgggtagagcaaatggatcagtttccagaggccttccgcgtacccttgagaactcatggaaccaaccaatattgagagcaaacacaactaatttcagtttcagtaaaaaacactccaaagaaaagcacacagatgaaggtacaagctcaaatttctttgacacaagtgtgaaaacaatacatgacgacaaaccatcaatcaataaaggtaaacaagtcagcagtgtaacttttttagcacccagatataatgatgctgaccccccaaaatacttcaaagctgttgatgggaggcctgccactgccagttataaccactttgtttaccaaggtcagaatagttcagttggatggattgcacaaagtcctctggaaccttctgttatcaataattttgctagagttgaccgtccacatcatttgaatatgggtacatttactgcccccgtctctattcctcaaatagacaatccttcaattgtctccccgatgggttcttgcacagcagacccaaggagcagcgttatcaataatcctgctttaattccaagattcaatgggttctcaactgtgaattcgtacaccagtcttagtgctgtgacgcagagcattggaacttcaatcccaaagctgataaatgtggataatgtagataaacgctatcgtggttttccacttgattcgttttccgtgtctcactcacgacatcaggtagcagtttcaagtaacctggagcaaaagaattcccagaagttggaagattcagatcaacagtcccatggcaagggtatgaagaacttcaatttgaatgagacactgtcagattgtcaggaagatggtcttgtagaacaagatgggagatgtgcttccagttttcagcatgataaagatggggggtcagtacttgggatctcttggctcaaaaaaaaacttatgtctgctgacccaacagctgtggagaagccagggaagatttttggacattcattgggaactgcaatagagctgaaaaatactaaagaccagaatgaaccagctgtgactattcggaatttgtcagattctgcttctacatctgttggctgtgcaattaagaaggataggccttcggataacattgttaccggaactctgcctgtctgtaataaagcccaagagggtgctacatgtttacctctttcgtgccagaagcatgtgcctaaagatggacaagccgctgaaggagccaccaagaaaagtggcgcccccatcaggaacttcatcgatctcaatgatgatgtaccaaatgatgacaattctgaggaatcagtagtgtcacacgaatgccacgtggaaccttcacggaacaaccatcctaaacgagcatttgtgattgatttagaggtgccggcctgtgaagaggacgcttcgtgggatattgatcaagaatgcgcgcagccgaaacctgatgcgtaccaggaagttgacgacggatctgatacatccgctctagctgcagccgagaacatcgtagcgttgtcaaggaatacgccaacagccgcagaggcatcggacgatacgttgcagtggtttgcagatctcgctgtattaaacatcaacgaccttgctgagcaagctgaactccaagcttgtacgaatgattccagtaactacgagtcggattcattcgagtccttgacactgaagctggaagagaccaagatcgacgatctctggagcaggccactggaacctgaaaccgcaaccgatgaacagacagtttcagctgctcaccttctcaccaagcccagaaggggccagcaaaggagacggcggcagaagcgagatttccagagagatgtcttgcctggcctttcgtcgctttcccggcctgagatcacagaggacgtccagttgctcgaggggttagtccaggcttccgggggatcctgggagtcgagcttgactaggcgaggacgttgtggtgggcgtgctagaggcaggaaacctcggaaaactgtagtaaccgtaattgtagaggaggaggaagaggaggaggtagaggttagcccaccgccaaaacctgctggcactggggaattggaagccgatggcaggggtatgatcgggtggggcagaacaacaaggcggtgtcgcagagcgagatgtccgtcaggtaacagcatggctactgcgtcttgagtgggagggtatttcttggcagcaagcattggacctgattaggtactgggtggttcacaattgttgtattgactccgatggatgggctggtggtataaggtgatcacactcatatgagtgtcggcctactggtctcagcacaactttcgtgcttttgggtcgaaacatggtttacgttcttataataagttcggtaaattagctggcgagacatttctgcgacagcattgtactaagctgttccaggttatgaggcccggtgccccggtatatattcattgtgagaaaaactgcaatgcatgtaaaccaccttgatctctgaagaatagctcatcacatgtgtaacaaaagggtgtgaatgaggctctgagcctgtattctttttgtagctgtatgccctgcctaattggcgctagtatccagcatgcgaattgctaatttagttttataccgtggatattgctcatatcgtgtcccaacgcttttcttccctatgggaatgcatatgccact

SEQ ID NO: 43061 - DNA, 3296 bp, Zea Mays
aaatcctaggcgtggtgaaatcctaaacccgctccgcgggcggcgatggcgctcgtgtccaccgccaccgtcgcgtcgtcgtcctaccactgcgacccccacctcttcccaggggccaggaggagctggcgcgagccgaggtggagccgcggcggcgcgggcgcgaggctagcggtgctgcagcagcgggcggggggcgccgcggcggccgcggcgaggagggaggagctggtgccctcggggaatgcgaggaactcgtacgaggtggagtcactgatcgaccggctgagcaacctgccgccgcggggctccatcgcgcgctgccttgagacagcgcggcaccggctgacgctgcaggacttcgcggcggtgtaccgcgagttctcccgccgcggggactggcagcgctcgctccggctcttcaagtacatgcagcgccagtcgtggtgccgccccgacgagcacatacacgccatcgtcatcggcgtgctcgggcgccagggccccgcgctgctcgacaagtgcctcgaggtgttccacgacctccccgccgagtcgcgcactgcgctctcctatacctccctcatcgccgcctacgcgcgcaacgcgctgcacgaggaggcccgcgcgctgctcgaccagatgaaggccacgggggtcgcgcccaccgccgccacctacaacaccgtgctcgccgcctgcgcccgcgccaccgacccacccgtccccttcgacatgctcctcggcctgttcgctgagatgcggcacgacgcgtccccctccgtgcgccccgaccttaccacctacaacaccctccttgccgccgccgccgtgcgctctctggctgatcagtctgaaatgctgctgcacactatgcttgaggccggcgtctccccggacactgtttcttatcgtcacattgtggatgcctttgccagtgccggcaacctctcccgtgcagccgagctattctccgaaatggcagccacggggcacacggcggatgcctctgcttatttgggactcatggaagcacacacgcgtgttggcgccactgctgatgcggtggctgtgctgcgacagatgcaggctgatggatgtgcgccaacagctgccacttaccgtgtcctgctcgatctttatggaaggcaggggcggtttgatggagtgcgccaactcttccgtgagatgagaactgctgtaccgccagacacggccacatataatgtgcttttccgtgtattcggagatggtggcttcttcaaggaggtggtggagctcttccatgatatgcttaaaactggggtacagcctgatatggtgacctgcgaaaatgtcatggctgcctgtggtcacggtggcctccatggggatgcaagagaagttcttgaatatatgaccagagaaggaatggtgcctactgcagatgcctacactggcctggttgaggcccttggccacgcagctatgtatgaggaagcctatgttgctttcaacatgatgactgaaatcggtagcttgccaactcttgagacctacaatgctcttgcatttgcatatgctaggggtgggctcttccaggaggctgaggccatcttttctcggatgagtaacaatgctggcattcagaaaagcaaagactcatttgacgccctcatcgaagcatattgccagggctcccgattggatgatgcagtgaaggcgtacatggagatgcgtaaatccaggtttaatccagatgagcggtcccttgagggagtacttaatgcctactgcatagcaggggtcatagatgagagtaaagaacagtttgaagaacttcaatctagtgtgactatgcccagcgttattgcctattgcatgatgctgtcactatatgccaggaatgacaggtggactgacgcgtacgatctgctggaagaaatgaaaacaaatcgtgctagtagtacacatcaagtaattgcttccctaatcaaaggggaatatgatgatagctccaactggcaaatggttgaatatgtcctcgaaaacagtaccatggaaggctgtgactatagtttccgattctttaatgctctccttggtgtgctttggtggtttggtcagaagggccgagctgctagagttctggatcaagcagtaaaatttgggctgttccctgagttatatcgtgacaccaaactggtttggtcactagatgtacataggatgtcgatgggtggagcactggtggctgtgtcagtatggctcaataagctttatgacagactagtagaagatgaagatcttccacagttagcatctgttgttgtattgagaggagaaatggagaaaagcacagttacaagaggactgccaatcgccaaagtcgtctactcctttctaaacgatacactatcagcgtccttccattttccaaaatggaacaagggacgaatcatatgcttgaagtcccaactaaaaaggctgcagtcggccgtagactcctcaaatgggtctcttgcagctggttttgtcgacatgacaaactcccgtctgccggctcccggttccaagatatacacaagcgaggaccaattggataatggttcacgccatttgcctgacgaaccgttggcggaggaaaaggagtcggagcttctcgcactgtgagctgctgcccttcgcatctacagttgtgatgccattggtctgaacaaggggagacgagatgcaggataccaagcgtattttcggagttcgtccattcagatctccgtctcggtctcagttatccagggcaggattttagctcgttgtagggagaacgagcttatggatgttgttgactgtgtatggcatccttgtgcgtccagctcaagtgctcaactctgtaaaacatgatagcctgataagtctgttgatacgatctgaatcctgatgatggggatagtgcctgtagtgtgatttgtattattaccagctgagtgaccatctgttgcttgctactaataaatctctctttattaaaagctcctaccatttcctcgcaccaggaggctccgccggggacccgaaacattcatcaaattcagctcggagccccgcctgcctcacccggtcgcccccgacctggcgaccaaagccgtgcctactgcctaccgagcccctcatctcggcgaccgtctctctcttcctcgctctcgccgacggcagccccgaccaataacaacgtttttgcatttgtttttattggccacttcggtcgaaccaatatctttttgcttgatagttctattatattgacaggaaatggt

SEQ ID NO: 43062 - DNA, 2566 bp, Zea Mays
ctcggctcatcagtattattattattattattattcggctcctgctcatcagctgcagcagtcgtgctccggaccggagaagtcgaaatggaggagaggctgttcgccacggagaagcacggtggccgggcgctctacaggctccacgccgtcacggtgttcctggggatatgcctgctgctctgctacagggcgacgcacgtcccggctgccggctccggcggcagggcggcgtggctggggatgctcgcggcggagctctggttcggcttctactgggtcatcacgcagtccgtgcgctggtgccccatccgccgccgcaccttccacgacaggctcgccgccaggttcggagagcggctcccctgcgtggacatcttcgtgtgcacagcggacccgcggtcggagccgccgagccttgtcgtggccacggtcctgtcggtgatggcgtacaactacccgcccgcgaagctcaacgtctacctctccgacgacggcggctccatcctcaccttctacgctctgtgggaggcctccgccttcgccaagcactggctcccgttctgcaggaggtacggcgtcgagccacggtcgccggccgcttacttcgcccagtctgatgagaagcctcgtcatgatccgccgcacgccttgcaggagtggacgtccgtcaaaaacctatacgatgaaatgacggagcggattgactccgctgctcggacgggcaatgttcctgaagaaactagagcgaaacacaaagggttttctgagtgggatacgggtattacctcaaaagaccaccacccgatcgttcagatgggaaagacaaggctgtagctgacaacgaaggcaatgtgctgccgacgctggtgtacgtggcacgagagaagaggcctcagtaccaccacaacttcaaagccggggcgatgaacgctctgatccgagtatcgtccgtgataagcaacagccctatcatcctgaacgtggactgcgacatgtattccaacaacagcgacacgatcagagacgcgctgtgcttcttcctcgacgaagaaacgggccacaggatcgcgttcgtgcagtaccctcagaactacaacaacctcaccaagaacaacatatacggcaactccctcaatgtcatcaaccaggtggagctgagcggcctggacgcttggggcggcccgctgtacatcggcacgggatgcttccataggagggagaccctgtgcggcaggaggttcaccgaggactacaaggaagactgggacagaggaaccaaggagcagcagcagcaccgccaccgcgtcgacggcgagaccgaagcgaaggccaagtcgctagcgacctgcgcctacgagcacgacgacgacacgcggtggggagacgaggtggggctcaagtacggctgctcggtggaggacgtcatcacggggctggcgatacactgcagagggtgggagtcggtgtacagcaaccccgcgagagcggcgttcgtcggcgtcgcgccgaccacgctcgcccagaccatactgcagcacaagcggtggagcgagggcaacttcggcatcttcgtttccaggtactgccccttcgtctttggacgacggggcaaaaccaggttgccgcaccagatgggctactccatctacgggctatgggcgcccaactcgctgcctacgctgtactacgctgtcgtcccttcgctgtgcctgctcaagggcacccctctgttccctgagctcacgagtccgtggatcgcgcctttcgtctacgtcgcggtcgccaagaacgtctacagcgcgtgggaggcgctgtggtgcggagacacgctgagagggtggtggaacgggcagaggatgtggctggtccggagaacgacctcgtacctctacggcttcgtcgacaccgtcagggactcgctggggctgtccaagatgggcttcgtggtgtcgtccaaggtgagcgacgaggacgaggccaagaggtacgagcaggagatgatggagttcgggacggcgtcgccggagtacgtgatcgtcgcggccgtcgcgctgctcaacctcgtgtgcctggcagggatggcggcggcactggatgtgttcttcgtccaggtcgctctctgcggggtgctggtgctcctcaacgtcccggtctatgaagccatgttcgtcaggaaggacagggggaggatgccgttcccgatcacgctagcctccgttggctttgtgacgctggccctcattgtgccattcttttgactttgaggtgctaataatacgtgtacgggcacacgcacgttcgcatgtatgacgattatgggcaacaggcgtgtaataccactaatacctattaaacactccagtctccaagtgatccattgctacacgtgtgttcctcctgttctctatatgcatgagctgctgatggtgatacgatactgtcagatactgcaataagacgccaaacaagataagcatcggcaatcgagtggatcctcacaaccacagtggacgctatgcaggtctttggaggcagttgctatgcacactttgattggcgcttc

SEQ ID NO: 43063 - DNA, 1937 bp, Zea Mays
atgacggccattcactctgctcaccaacacggcctccatatacagaatttagatcacaaacttaacattgataaccaatttgaggcattgaagtgctatgagatgatagatagggattgccggtggattaatgcaactttccaatcagttccaacttccatgggaacaaatatgaaagtggacgaccttgttcagatcgaaagcaaaagagcctctggtctagtggttaaggggttccaagtagcacctccaaattgggttcgatcttcctcggggttatgtcctgtgcgccatccttcggctgggcgttgcagagtggacggtgacgaccccgctactgatgggagcgaccagctgacacaagctaacccactctcgcccggcgacgtgctcatctccaaggacggagcctttgctctcggcttcttctccgcagtaaagaagaagaagaagagccatttgacaaagattttactcccgattatagcctttgtgctgccactcacattcacagccctagtctggacatgtaaaagaagaggtcgacgacaaaagaagaaggttcagaagagagtgatgctagaatacttgaggtctccggatgaaatgggggataagaatatagagttcccatttattagctttgaagacattgctgcagcaacagatcatttctctgactccaatatgcttgggaagggaggttttggcaaagtttacaaggttattactaaggtttcctgataaagaatgatggaatcatgcaagggagtgttaggaggtaccaaggaagtagcagtgaagagacttagtaagggttctgttcaaggaatggaggagttcaaaaatgaagcggtcctgattgcaaaactgcagcacaagaacctagttaagcttattggttgctgtatttatgaagatgagaggttgttggtttacgagtacttacccaacaaaagcttggattacttcctattcgactcatcaaaaaaatcagtgcttcagtggacgacaaggttcaagataatccagggggttgctagaggaatcatgtatctccatcaggactcaagactgactataatccatagagatctgaaaacaagcaatatcttgttagataaggagatgagccctaagatatcagattttggcatggcgaggatattctttggcaagcagctccaagcaaatacaaaccgagttgtagggacatacggttacatggctcctgaatatgccatggaaggatccttttcggtcaaatctgacacctacagctttggtgtaatactgctggagattgtaagtggattaaagatcagctcaccgcaccttctcatggatttccctaaccttatagcatatgcatggaacttgtggaaagatgggaaatcagaacaaatggtggactcatttgttgtggagagtaattgccctcttgatgaagtttcgcgatgcgtccaaataggtctcttgtgcgtacaagatgatccaggctccagacctgtcatggcagtggttgtgttcatgctggaaaacagaactacgccactgccaacaccgaagcaaccttcatattttgcacaaaggggttacaagccccggaaggctggagaccacagggaggtctccactgacatgagcttgacagcacttgaggctcgttagatgtttaaccatatcatattgtactctgaattttcagggttttgcaacagtgcaccaacttttttgataactgactgtacatgagacctgtgaatctgtgctatgtgatttttatatctgtgagcttgtttctgtatggacgtatggtgtttgttgaatccgtggataatatagattgtagaataatttggtgaagttagcatttgtgttttttgctacagaaaaggctgacaaacttttacaattttggggtatttcctaaggat

SEQ ID NO: 43064 - DNA, 1195 bp, Zea Mays
atggcgtcggcggccagggcaaaggaagggccggggaagctgggagccacgggaaaagcgggttatgtagattcatcaggcgataagtccaaacgaagtgtagtagagattaaaggtcgcttctcagtgacatctgagaatgtcgatcttgcaaaggttcaggaaggtccacttagtagtctctcccggaaatcaccagagggttcactgttaagaaaatctgccagcactggtgattattttgttaatcctaagctgatgtgtaatgctaatcagctgaaggaactatgcaatagttcagtatcatcttcagtattaattccccaccttaacaaccttgtgcaacagactatgtttcagcaggatctaatcatgaacctacttagtaacttgcaacaaagtgagaaagttgatggaacacaaccaataatatcttctcaagtccgaacaatggagaatgataaagtagctgatacagttaactctgtgaaggaacggtcattacttgttaaaatttcagagttgcagtctaggatgataatactgactgatgaattaattgcagctaagctaaaacatgttcagttgcagcaagagctaaatgcactgtactgccgagaagaaattgtggatatcagggatgaggataacgaagaaacataatgaggatccatgccgtatgaattatccgcctctctctgagatgcataaattacctgcctctccctgaggtcaatggagaacaggagaaggaaagcggcggggagaacaagagaagaaaagtggaggtgccgcaaatatttgctggatctagagagtagctgcggttgtgttttttttctttgaaggttgtcttccccttgcttgctgtcatcagtcatcagtgtgtataaccgtctctttttcagtagttcgaggtttttttttgggtgactacaagatgaggcgtggtcatgctgctatttttctgtcatccccatcattggaagtagctgtgattatgtagtacgtaggctaccggggtggttaatctatgtagaattgcaggtgactgcataataaattgtattttatgtagcaataggatgtatattaaatattggcgcattcgttgatataatatcatatagggctatttgcaaacatccaaacaaggttgtttgcatatatctaataataaagtatgtatctactc

SEQ ID NO: 43065 - DNA, 2011 bp, Zea Mays
atcacgtcttgtcagagcctcctcgtcgtgggcgtaaaagccgccgcctccaacccttgtaaaagtttcttggatagtccgtagccgcttgccctgttcgcatcttcgcgcgtggcgcacaccgctccagctctccttcgacgggcacggccgagccgccttcgtcttggccgcagcggtgcgcgctctccatggcgtcctaattagcctagccgcaacgccgcgcccgtgcctgcggcatggatgaaccccttcttggcaatggtcttaagaccagcgggaaaagagagagcctggtagtggccgaggtcagaaaacagatgtaccttgctgggccactcatcgctgcatggatcctacagaacattgtccagatgatatctatcatgtttgtcggtcaccttggtgagcttgccctctccagtgcctccatcgccacctcctttgcaggcgttactggcttcagcttattgtctggcatggcgagcagcttggacacactgtgtgggcaatcgttcggggcaaagcagtactatcttcttggcatctacaagcagagggatccagagattgcagctggggcagggagctatatccggtggatgattcctgcgctatttgtgtatggtccactacagtgccatgtccggtttctgcaaacgcagaacatagtcctcccagtgatgctgagctcaggtgccacagcactgaaccatctgctggtgtgctggctgctggtgtacaagattggtatgggcaacaagggtgctgccttggccaatgccatctcatactttaccaatgtatcaatcctggcaatttacgtcaggcttgcaccagcctgtagaaacacctggagagggttctcaaaggaggcttttcatgacataaccagcttcttgaggcttggtattccatctgcgctgatggtttgcttggagtggtggtcatttgagctcctggtacttctttctggacttctccccaatccaaagcttgagacatcggttttgtccatttccttaaacacaggctctttagcgtttatgatcccttttgggcttagcgcagccataagcacccgtgtttcaaatgaacttggtgctgggcgaccccatgctgcccatctggctacccgtgtggtcatggtgctggccatcgtggttggcgtattaatcggactagctatgattttggtgcgcaatatctgggggtatgcatacagtaatgagaaggaggtggtcaaatacatctccaaaatgatgccgatcctagccgtgtcattcttgttcgattgcgtgcagtgtgttctttcaggtgttgctaggggctgtggatggcaaaagattggggcttgtgttaatcttggtgcatactaccttataggaattccagctgccttctgtttcgcctttatgtaccatctaggtggaatgggactttggttgggaataatctgcgcactcgtcatacagatgctattgcttctcacaattaccttgtgcagcaactgggagaaagaagctttgaaggcaaaggacagagtatttagtacatccgtaccagctgacatgatgacatgatatttctgaagatatttttttgaaggaaatgcccatgaaactttgccaaggaacatactaagaattggttgttcagattcaaggcctttctccatgccatcagaatgatgcttgggtctagtaatagctcctgagcagtctgttttttacttttggtcaatactcaatacatggaagatgtttggtttgaagaaccacgccatcctagatgaggtggtatattataagttgatataacggctccatactagttattgaggaatgagacgatgattatctcatgtaataataatgcttttccccctctagttattgatgtaagacaattgaggcaaatgaacaaaatgtcacatttgattaaataagttgcattgtctatttgtgcagttgtttgggaaataattaaattgtaattttataaaaaaaag

SEQ ID NO: 43066 - DNA, 1302 bp, Zea Mays
cgcaaacggtgagcgcacagcacgcagcaaaccagatctcggtcgcccgccggctctccagacggagcgagcccgttccgtcgccgtcacccagcgcgccgatggagcagcagatggtaccactctgtgtgaagagtgtgaagcgaaagaggaaaagggttgaccacagcaatattattctagcattaccagctatatatccatttccacaaaagaaaacggtggcaagtgctgcaggaaagaaaagggcagcaaccaagaaaaacactacaggaagaaacaagacgcgcaacaaggctgcacgtgcacccaagcaaggactgaggaaaggtaaaagaaagaatgctaaggctgctcatgcacccaatgacgatgcactaacggaaggacgtataggttctgtagacatatcaaatggtgcaagcaatgaacatcctgtccaagaggatcaaaaagacctcatacggcaacaacacaacttctcaaacactggagacgacattattgtggatgatcgttcaggtgatgcaaatgaaccaaaaattgttagcaatgaacaatatatttccgatgaagaagcaggcacagtgcagctaccgaaccctgccaaacaagacattctggaagcggattctgcagtggaacaaccatatgttatcaacaacgaacaacagattatggaggaacaaccaggtgtggagaaccaacaaaatgttgcagttaatcagcaacacaaaccagacgaacaagcaggcataatgcaagaacaaaacattggaaatgctttagaagaaaatgtgccagaggatcctacagtttttgctgatatattcaactttccgctgaataatgaactcatggatctctcaaacattgaagacaatctggaggattcaacaggatgaacaaactataatgaataatcaacaactgattccggaccaacaagcaggattagtgcaccaacagaaccctgaaaacgccatagaaaaagttgttgcagaggacgaccctgcagtactcggtgacatattcagctttcctttgagtaatcaacttatggacctggactaaggttctgcatagccaatcgccatgggaattgcgttgctgatttatttttttccaagataatgacatgaacctgtatttcaacattctctggtccaaatctgttttgttatcgtgaacataatgctgtatatacaagcgtatcgtcttctctgattattatatatacatggtatatatatatagatgttccagctgcagtgtggcaaatcccatttctgtgagaagccg

SEQ ID NO: 43067 - DNA, 4588 bp, Zea Mays
cctgcattgtcaatggaagacattatcagagcttcaaagtgttagtggattcaagaaggtaataaattacacgaaaagagttgctgaggaacagaggtacaagagggcactatcacgtgaagaggttgaggtgcatgatgtgggcaaggagatggagctggatcttattaaacaatatagtcaggttgaacggatatttgctgatagggtcagcaaagctgatggagatgatctggttcctgaatatttagtcaaatggcaaggacttccttatgcagaatctacctgggaaaaagatacagatatcgattttgctcaagatgcaattgatgaatataaggctcgtgaagctgccacatctatacttgggaaaacagtagatttccaacgaaagaaaagcaaagctagtttgaggaggcttgatgatcagccagaatggctaaaagctggtaagcttcgtgattatcagctggaaggactaaactttctcgtgaatgggtggagaaatgatactaatgttatacttgctgatgaaatgggtctggggaaaactatccaatctgtttccatgcttggcttccttcataatgctcaagaaatcaatggtccatttcttgtagttgtgccactgtcaacattgtcgaactgggcaaaagaatttcggaagtggctgcccaacatgaatgttgtcatttatgttggcaaccgtgccagcagagagatgtgccagaagcatgagtttttttcagacaagaagggtgggcgtcatgtaaaattccatacgttgataactacatatgaggtgattctcaaggacaaagcggttctttccaagatcaaatggaactatcttatggttgatgaagcccaccggttgaaaaattgtgaagcatcactatatactacccttttggaattcagcactaagaataagctgcttatcactggaacacctttgcagaacagtgtggaagagctttgggcattacttcatttccttgatccagttaaattcaacagcaaggatagttttgttgaaagatacaaaaatttgagttccttcaatgaaaccgagcttgcgaatctgcataaggaattgaggcctcatattctaaggcgggttataaaagatgtcgagaagtctttacctcctaaaattgaacggattctacgtgtcgagatgtcaccccttcagaaacaatactacaagtggattttagagcggaatttccagaatctaaataaaggagtccgtgggaatcaggtatcacttttgaacattgttgttgaattgaagaaatgctgcaaccatccatttttgtttgaaagtgccgatcacggttatggtggagatagcattggcgatcggaataaagttgaacggattgttatgagtagtggtaaacttgtcttgttggacaaactattggtgagactacgggagactaaccatcgtgtgcttatattctcacagatggttaagatgttggacatccttgcagaatatctctcccttcggggatttcagtttcagaggcttgatggtagtacaagagcagatcttcgtcatcaagccatggaacattttaatgctcctggaagtgatgacttctgttttcttttatccacacgtgccggaggacttggtattaatcttgcaactgcagatacagtgataatttttgattcagattggaatccacaaaatgatctgcaggttcttcctctcattctcttcctcctgcaagttcttgatcacttggttattcagaagctaaatgctgagggcaggcttgagaagaaagaatccaaaaagggtggctccatatttgacaagaatgaactttcggctatcttgaggtttggagcagaggaattgttcaaagaagacaagactgatgaagaggccaagagaaaccttgaaagtttggacattgatgaaattcttgagagagcagagaaagtcgagacaaagggtggtgaaggggaggaaggaaatgagcttcttagtgctttcaaggcatgtgatgtcgcaaacttttccagtggcgaggatgatgcaacattctggagtaggctaatacagccagatcctgcagatattattcaggaaactttggcgcctcgtgctgcacgtaataaaaagagttatgttgaagatccccagtttgacaaaaataataacaggaaaagacgtgcagttgaagcacaagaaaagccaaggaggcgttctggcagaacagtggaaacagttaattcagtaccattggttgatggagcagtagctcaagtacgagagtggtcttttggtaatattccaaagaaggatgcttctcgttttgtacgagcggttaaaaaatttgggaatgcaacccagattgacttaattgtggatgatgttggtggtgtactagagaaggcaccacatgaagcacaaatagagctatttgatttgttgattgatggttgtcagaaaagctgttaaagagaatacagatatcaagggcacagttttggattttttcggtgtagctgtgaaggcctatgaattgctagctcgtgttgaagagcttcagttgttgtcaaagcgcattgcacgatacaaagatccaatcaagcaataccgcatccaactaccttataaaaagcctcagtggtcagcaagctgtggatggactgaaactgatgatgctagattgatggttggaattcattggtatggctacgggaattgggagaaaatacgtttggatccaaagcttggcctgacaacaaaaattgcaccagcaacacttggtgagagagagacatttttaccacgtgctccaaacttggataaccgtgctagcgctctcctgcaaaaggaatatgctaagtttagcggtaatagctcaaaagtcaaaggaaatgcccgccagacagtcaataacgacagtaatagtggagctcgatcaatgagaggccgacaaaaggatgcaccagataaagaggataataagccgaacaaagatgacattcagaagcgcaaggtaatgatggaagctgaagcaagagaagaaggtgaaatttctgaatcagaggcagagacaaagtatcgtctggacaaagaggagaagtggctcgaatggtgctctgaagttttaaatgaggaacaggaaactttgaagcgcctggacaggctgcagaatacaagtgtaaacctcccaaaggaaaaggttctttcaagaatccgcaagtatctcctgataattggggacaaaattggtgaagttgtccggcaacacagtgaatcttataggcaatcccgcatgaccatgaggttatggaattatgttgccaccttttcaaacatgtctggggagcaattgcatgatctctatttgaaacttagtcaagaccaactggaaggtggagttggcccatctcatggtgccaatttcacatccattccttccagcaagggaggtaactcaaatcaacttcatcctacaagaaaccataggccaaccaggtctctccagtacaattctgagtctttgcacaataatgagagctctggaagttctgaagcctggaagcgtcgacggagagcagaccctgataatcagtttgacacccagcctttgtatcaacctccaattatgacaaatggaaataggttgcaggaatctagtagttctgcaggaattcttggttggggtccagttgaaatgagacggtatggtaatgaaaggccaaagcgtggtgttcatcctagtcattttcctactgggcatggacctttgttgtagctgaaggaattagatgactcgaacaaccttgtccactttggcataactgttcccagtgaatttcagcttccatatagttacaaatggtggaactctgtcggaattgaaattcttttttccataacaagaaggaataaaaagcaagacctgacctggagcgcagtttgaatactgtccctcaaaggtaatgccaggactccagaggcgacgcagggatttgttaacagctacactgaatatccttctgacaacatcacagtaaaacgaatacatggtggcttgtcaactgccaagaggattaatcgaggaaattttgtcgattcagttttgtgatccaatagaaaagttgggggtcattaggaaaaagttcatctcaacaatgatctatagttcactctatacatgtattatgttttacattgcaatataatgaaatatggttcagttattcccactcagtgtgttttgtgcccttctgtattgatgtaatagatcaaagaaatgcatgttctcgttttttttttttttttttagaaaaccgcaggagaactgcgcatcttatatattagagaggaaaaaagacattacaaaagaggagaagttgcagagcaactctcccacctaataaagaagttgcagctgggggggcatagtatgtgttagtttcaatttctctaaatagaggaaatatatattttgttcacgcgatggaatcggtagatacttgaattgattccatagtatttttttcctgaggtgatgtgagaatgaggtgtgtggttatatgtatttcaaat

SEQ ID NO: 43068 - DNA, 403 bp, Zea Mays
ctttgaagctttgtacgacagaagatgcagaactcctttaaattggtctaaaccgggagagagatgtttctttggaccagacttagtaaatgaagctgaggaaaaggttcaacttatccaacgcattaagtgcagtacaatcctacaaacattaagtgcagtaaaatagcataatataattggttatgcataaaaccggggcttgcctttaatttaacacttagatagtgtttgctggggggtactcgcttggcgagcatccactggttaattccaccattcttcaggtcgtccaccaactgcatcttgtggttggcacctcatcacttgcacaatcagcatctctcggtcctaaatgagatgcagatgcatatgtatgaatataatgaaagtatcacaaaag

SEQ ID NO: 43069 - DNA, 1110 bp, Zea Mays
catacatcggctccctgtggtcttccccacgtcaccctcgcatccttatctgtcgtacgcatttcccctcacctggaagtccctcgttccctaggagcaccgccccgtgcagctccatgttccagaacaggacgttgcttccctcctgctccctcacgcaaacctctgccacgctacagctcccagacatgttgctcgccctcgcaaagtgttggccttgtgtgctccaccgcatagcaccctgcgatcgctgagtcccgccatgttgtctccctgcttgtgttcacaagctttatcgccttgtcgtgcacacctcagggctcgcctccgtccgccatgagtcccaatcgcgggttcctggtgccttaacttcgccctagttatgctccctcaccagaagcactcgttgtgtccgcagatgcctggacgcgtgctcgtccatcgcgctcaagccactagacgctgctgtctccgccacctgcaacgagcttcgtaaccgcatcctgtcgtcggtgatcgtcgttgttcttgcggagtctaaatcaatttggacatggtaaactgatccatttattttccgttaatatgaggagtggttggattgaataaatgtaggggtcacgatgaatatcttgtttgtagcacagatacgttggttttattacatgtttgatgaaatgccttgttacatgtattgttgtagttgtgttcatgtttgagaaataatcgcgttgcgtgaggcttaggtttaagatgcttattatgctaggaatgtgttaataactgtataagtcaagtgtgattggatcggttttaataactatattgtgaagtatagtgtaggagtcaagtgtgaagtatattgtgaaactagccgacgggttctatcagtgatgtgtgccaattgtgttaatgtgatagtttattattgtgaagtaaacacatcgcttagtaaggtttggactaaagtatgtattatacgaagtaaaattaaaatagttcttcgtgtgcgatgtgtggctgaattgatgacagcagaatagtttgagtgtcttaagaaattggtctataaatcttgttattgttgattatgtaaattgtattgattta

SEQ ID NO: 43070 - DNA, 1079 bp, Zea Mays
cgactgaacttatcttcctgtaatcatgccgatttatcctcatttagttccaacgtctgagggcgctgtgcgggagaatcagatcaatgttgcggataatgcttaaacccaatgagccatctgggctttagtctatccagtcttgcatcaatccattcctccagcggttcctcccctggcccacaaagggatggccttacaaaataatgggtccaaagtctttcgcgaggccttctaaccttctagtggacccaggggatatctatcccccacaagcccccaatctttgagttgattttaaaataatcggcctaaagatattaggtccagcttgcggttttgattttgggtcgtggatgctctgaaagtacgcctgacgaactgttgcttctgaactctaatcaatccggtaaaaacaaacttctgttatccttcttcagctttttcaacggtcttcaccttatacttcagaaatcagtgctcggttaccggcttatgctttagagatcagcattatgtccttaggggttgaggattcattgggtgcaccggaggtgcacccaatgggtgtagcccccgagctttaagtggattactaaaaataatccactcaaaggtcttcatctcatgcttttagaagttattatcttatcttcgtctcatggcttagaactcagcattatatcatcagcttatgctttagagataagcatgttgtcttcatttcctgttttagaaactaacagcatgatctgcccatgtcctgttaggtttgaaatttatttgatcagcgacatattggacgtctggtagatggctcttggctggtcttcatttcgctttgtgctttaatgcttctgttgattagacttgtacttcagtagctatatttggatttcctccgatctccatcgatatctttcttctgtctggatacattcattgcgtatattgtatggatgtgactgcttgggaaaatctattgaaaattcttggacgtcccctccccaatgggtgtaaccgagggatggcttggtacgccgagcgtttagcaaactgtccttgagtagtaacttgac

SEQ ID NO: 43071 - DNA, 1804 bp, Zea Mays
gtcgccggttttggcgctagactagaaaaacgtggacttccacctggtggtggtgggtggctgcgtactgcgggccgctgccgatcgagtaaaaaaaaaacgccgggcatcggccgcctcctacccccaaccccctccaccctgtcctcggacaggcggcgtcggtgcgccggcggtgccagcgcggaggcggaacacccagacagcccggaccttcagctgtctgcttctgcgtctggcttgcgggagcgatcccgtcttctgtcgaccagtcgtggactcaaactagagctggcttcgccatagacttctggaggaggcaacgggattgggaattggaacatggggagttcggtcggctgcttgggaggcggctccaagtcgaggcaagatcagaatggtcaggtcgtcgcgggttcgtctccccgttcagtgcaggtcatgaattatcaagacctggaaataatgtacatgtattctccctaaacgagttgaagactgccacacgaaactttcacatgttgaattgcattggccgtggggggttcggagcagtgtataaggcacccaaaccttatcaagctgattggttgctgtgttgaagggagtaacagactattggtgtacgaatatgcagagaataatagtttggcgaatgctttgcttggaccaaagaacaaatgtatcccattggactggcagaaaagagttgctatatgtattggaactgcttctggccttgcttttcttcatgaggaagcacaaccacggattgtccaccgtgatatcaaggctagcaacattttacttgataagaagctgctgccgaaaattggagattttggattggcgaaactctttcctgatactgtcactcacattagcacgcgtgttgcaggaacaatgggttatttggcaccagagtatgccttgttgggacaattgaccaagaaagcagacatatatagttttggggtgcttcttcttgaaatgataagtggtgaaagcagcagcaagtcgacttggggacctaatatgcatgttctcgtggaatggacatggaagctgcgggaagaaggaaggctcttggaaattgttgatccagaactggaaaagtacccagaggagcaaatgcttcgtttcattaaagtggcactgctgtgtacgcaagccacgtcccagcagaggccgtccatgaagcaggtcgttaatatgctatctaaccaaacagaaattgatctgcaaaatgtagctccaccaggtgtgctgaaagaacctcggcagcgtaccggtggctttgggggtttgatagcagacacgtcctcaagccaaagcactaaaggcaacccagctgaatcatacagcacacagaccaacatgaacagctctcagtttagcacaactgatgtatcaccacggtgacgttgtcgactattgtttgacgtcttcagaggtgtctcgcgcctcccacaaggtttattgtgctgagcccggacaaaatcgcttgatatggaaggcctgatccattttcatcctgttttagagctacgtaggatgcgaaggccgctgtgaattgctgatgtacaggaattgtagctcatctgtttttcttttctgcggaggatgatttgcagttaaatttgacattttttttatgttctccattaaagcctgttgtaggtatacattgcaagagtacaagacatgtattcgaaatttcaaaaattcatgaagactactgtagctttccttcatgctttcaacaacccgtgaaactcttcatgagttagaaaaaaaatggtga

SEQ ID NO: 43072 - DNA, 2947 bp, Zea Mays
ctgttcccgtcgaccggattcggttcggaccgcagctccccacagcccacactcgtccgtccgcccgtcgaatggcggctcccaaaccctaagccacagatcccttcccctgcctcagcttcgaacgccctcgcctcgccgccggtctttgtgtactgccgctgtgtccgtcggcgcggatcaagggtccgctccgctgcaccccgcggggagaaaggggcgggcctcggcgtcctccgctcgtcgcccgagtgtctgagtactatcaggtgcaagtccagccgaactgattgcatgacatatgaaatagcgagcgtcgaatgaccttctctatggatatggatttgaacgcatcaccggtgcctgacgatgatgagcagcagccttacaatgaaccagtggaggctgagtatgctcaggaggaacatgttgaatctgctgtcgcaacattgcgccgggaacgtgaagaaagacgcaagagactaaagagagagcagcaggatgatgggtcaaggctacattcccagcagattagggttgattatgctcctcaacccaaaaggcatagtcgcatcaaagaggcacctcagggctggttggactgtcctgcatttggggagccaatagataaaatcataccatctaaagttcctctcgatgaaacattcaatgagtcagtgcctcctgggaagcgatactcctcaaagcaactagttaacaaacaaagaaaagctggtcgtgaaataggtctggtgattgatttgacaaataccaccaggtattattcaccagctgaatggacgaagcaaggtactaagtatgcgaagattgcatgcaaggggagagatgcggtacctgacaatgaatctgttaataagtttgtctatgaggcaatgatattccttgatcgacaaaaacattcaaagaatcctaaatatattctggttcactgtacccatggtcataatcgtaccggtttcatgattattcattaccttatgcgcacacacgtatcttgtgttgctgaggcgataaatatgtttgctcaaaggcggccacctggcatatacaagagggactatattgaagcactatattcattttaccatgaggtccctgagaatatgatgatagcatgccctccaacaccagaatggaagagaccagatgatctcgatttaaatggcgaagctaagcaggatgatgacgacgacaatggtgatccagaaccaccgcgtaatgaatcagaggataaaatcatcaccaacgacgatgtgttaggggacgaagtgccatatgaccagcaagaagctttgcgtgtgctatgttataagttgcttgaaatgccccttataaggggacattcacaatttcctggatcacatccagtttctcttaacagtgaaaatctgcaactacttagacagcgatactactatgctacatggaaagctgacggaacacgatatatgatgcttataatgagagatggttgtttcttgattgatcgaaatttttgctttagaagggttcagatgcgctttccccataagagccttgaaggtctgcatgatatgaccttgattgatggagagatgattatagacacggtaccagattcaggcttgaagagaaggtacttggcatatgatcttatggcacttggtgcagtgtccaaaactaagttgccgttttctgaaaggtggaaaatgctggaagatgaaataatacgaccacgttattatgagaaaaataaatttgagagtggttctaagagcaatccgttgtacaaatatgacatggaattattttcggttagaagaaaagatttttggctgctctcaacagtaaaaaaggttcttaaggtgttcattccatccctttgccatgatgctgatggccttatatttcagccggcaacttgagagtgcacatggcaaagattggcatagccgaggtggagtttaccaaaggctgggacgatccatatgtaactcgtactcatgaaggtctcctgaagtggaaataccctgagatgaattctgtggactttctgttcgagcttacgaatgataatcgtcaactggttttcctttatgagagaggaaaaaagaaactcatggatggtgcccggatagcatttactgacgatgtagatccatcctctatcgccgggaggattgttgaatgctcctggaataaggaagaacagtgttggtcctgtatgcgtattagatctgataaatctactccaaacgacatcaacacataccggaaggtgatgaggagtatcacagataacattaccgaggaaaagcttctcgaagagattgatgagataagtcttctcccgatgtatgctgataggatgcagcaggctcatacaaagatggcacaacaacagcggcggagattgccaccacagtgctagccagtgctggggcgctctcctaccgccctagccagctgctggcttccgtagctgtgtaattagtagaggtttcagtagccccatatgatgatggctggctgggtctggcctgccaactaattctttgcacctcatttgtgtcttctccctgccctcccacccacctgtataggcgtcgccgcagagtagtttccctgtaaattgtgtactctatgttctcccatattctcccctatggttttatttttcatgggtgtagaatagcgtttaacaagagggtggtgttctaggtacattagtgtacgcgttactatctctcggtgttgcggttgccttgtgctagaataaatatggttaccatctgttgctgatgggtcatgtggttcccccggcggatatcatgtggttgcgtggtatgggttattttcgtcttctgttttgttcgcacctgatccgatccgatcttttgttcaatgaagaagaaaaaaattattggtaaaacctacgtgtttatgg

SEQ ID NO: 43073 - DNA, 3234 bp, Zea Mays
cccacctcaacctcacctgccactgccatcctttctcacactcgcgcaccggcgcgcgtccgctgcccgcaccccgtcccgttgtactgcagggcggagcctcgctcgccttttgtactgcacgcccacgcgtccacacgcgcgcgcggcccggacctggctacgaagcgcaggcagtacagacagcaccgcctggtttgagcggctgccgccgctgcatatactccctccctgccttccagtgccaggggtgaccggcgtgcgtgccattccacgctctcgcggctcgtgtgccagcggtgaccagcgctcgtgctcgtccagtccaccaggcgctgctgttccggcaagccagccaggtgagggatccagatcggcctctgcgtgccatgcgtggtctccgctctccagcccgcgtcgagaaattcgatcctttttggctcggttctggctgtcctgtgcgtcagttctgcgtttccgtgtctgttatcgtcatagtccgttctgttttttttttccttctgtttcccacacctgtgttcctgttcctgtcctgctggagtgatttatggcatcgtttgcgtggttttcaattcaggattggatattttccgccaatcggattctggtgacatatacgttagcgtttgaggatccccatttgggaaatttcggtttccattgcaaaactgaataaaaaatatatccaagagaagaaagaaggccaaaggttatggatttttaataatccgagatccatccgacaactcacgcgcctctgcatctgtccaagtccaatgcacgagcacatggatggcgtagtggcatggtctggttctttttttttttgtgtgaacaaacaaatgaactcacatctacgcctccatactgcagcagcagccgccgccgccgccgtctcggagctcgagctcctagtcccccggggccgaggcgccggcgccatggaccagctccggcccgagccggccgcgggcgcgcacgagatcgagaagacggcggcgccggacgtggagtcggagcccgcggcggcggtgccggagccggagcgcgtgccgccgtggcgcgagcaggtcaccgcgcgcgggatggtggcggcgctgctcatcggcttcgtctacacggtgatcgtcatgaagctgagcctcaccacggggctcacccccaccatgaacgtctccgccgcgctgctcgccttcctggcgctccgcggatggacgcgcgccctcggccgcctaggcattgcatgccgccccttcacccgccaggagaacaccgtcgtgcagacctgcgtcgtcgcctgctacaccatagggttcggcggtgggttcgggtcgttcctgctgggcctggacaagaagacgtacgagctctccggggtgagcacgccgggcaacgtgccggggagctacagggagcctgccatcggctggatgaccggattcctcctcgccgtcagcttcgtggggctcctcaccttgcttccactcagaaaggtgctcgtcatcgactacaaactcacttatccaagtggaacagccaccgcggttctcataaacggattccacacacctcaaggagataagaatgcaaaaattcaggtccgtggattcctcaagtacttcgggatcagcttcctgtggagcttcttccagtggttctacaccgccggcgaccactgcggattcgcccagttccctactttcgggctccaggcttttaaccagacgttttccttcgacttcagcctgacgtacgttggtgctgggatgatctgctcgcacctcgtcaacctctcgttgctgttcggtgccgtcgtttcctggggcgtcatgtggccactcatcggcaagcagaagggcaactggtatccggcagatgcatctcagaatagcatgacaggcatctacgggtacaaggccttcctttgcattgcccttctcgtgggagacggtctctacaacttcgtcaaagtcatagctatcactgtcaagaacatacgcgagagatcacgtcgcaagaacctgaacagagtggcggacgcggacacgatggcgctggacgacatgcagcgcgacgaggtgttcaacagggacaacatcccgacgtggctgtcctacgcggggtacgcggcgctgagcctgatcgcggtgatcgccatcccgatcatgttccgggaggtgaggtggtactacgtggtggtggcgtacgcgctggcgccggcgctggggttctgcaacgcgtacgggaccgggctgacggacatgaacatggggtacaactacgggaaggtcgcgctgttcgtgctggcggcgtgggcggggaaggacagcggcgtggtggccgggctggtggggtgcgggctggtgaagcagctggtgctcgtgtcggccgacctgatgcacgacttcaagacggggcacctgacgctgacgtcgccgcggtcgatggcgttcgacgtgggcgagccggacgggtactggaaggccccctacgcgctcatctaccgcaacatggccatcctcggcgtggagggcttctcggcgctgcccaggcactgcctgcagctgtgcgcggggttcttcgcgttcgcggtgctggcgaacctggcgcgggacctgctgccgcgccggctcgcgcggctcgtgccgctgcccatggccatggccgtgccgttcctcgtgggcgccagcttcgccgtcgacatgtgcgtggggagcctcgtggtgttcgcgtggcacaagctcgacggcaagaaggccgcgctgctggtgccggccgtcgcctcggggctcatctgcggcgacgggatctggacgttcccgtcgtctctgctcgcgctggccaaggtcaagccgcccatctgcatgaagttcacgccagggagctagagggcgcgctgacgatgcgtacagaacagagggcatcgttcgtcgtttgtggggtggaatccgtgtagtagaattacataccaaccaggcctgttctaatgtccatatgagcttaatgtacggtgtatatatatgtaaaaatggaaatctgaaggatgacaggatgaattgcctgttgtctagtagcacgcatattattattattatagcatagcactaagagcaagtccaatagactcggtaaacagtctctgctcggtaaaaaaatgaaaatcgtcgtgaaaacaaattccaagagactcgccttcgtcctcacttctccatc

SEQ ID NO: 43074 - DNA, 2002 bp, Zea Mays
atctccactcgatcctccgtcttatcaccggtgaggtactgaggtgagacgatctccgccaccatggcctccagcacctccctctccctttgcttgcacgcctcgtcgccctcgtcctcgtctcctggactccgccgaccctccctcgcctcctcctcgtcctccaggtccgagagaacgcgcaagatcagggccaaggcggtcagggaggactggaggcagaaatccaagcccatccctcctggcgccgtctaccctgccaaggaccactgcagccgttgtgggctctgcgacacatactacgttgcgcatgtcaagactgcctgtgccttcctgggagacggcatgtcccgtgtcgaggatcttgagcgacaagtccacgggagaggccggaaggaaggcatggatgaaatgtactttggagtctatgaccaactcttgtatgccaggaagaccgaacctgttgaaggagcccagtggacgggaatagtgacaacaatcgctgtcgagatgctgaaagcaaacatggttgatgctgtggtttgtgtacaaagtgatcctgacgacaggcttgctccaagacctgttttggccaggacaccagacgaagtaattgcagccaaaggtgtgaagccaacattatcaccaaatctcaatacacttgccttagtcgaggcagctggtgtaaagcggcttcttttctgcggtgtgggctgtcaagtgcaagctttgagatctgtagaaaagtaccttggtttggaaaagctttatgtgcttggaacaaactgtgttgacaatggtacgcgtgaagggcttgataaattcttgaaagcggcaagcagtgagccagaaactgttatgcattatgaatttatgcaagactataaggtgcatctaaagcatttagatgggcacattgaagaggttccttatttttgcctgccagcaaacgacctggtagatgttattgcaccgtcatgctatagctgctttgactacacaaatggcttggcggatttagtggtggggtatatgggagtaccgaaatatgctggggtctccatgacacagcatcctcagtacattacagtcaggaacgatcgtggacaggagatgctgaacctggtagctggccttctggaaagcacacctacaattagcaggctccaggcaaccgtttgttatggagacagtgaaagctgacgatgccgcaaaactggggaaaggcccttcgaaaccagctcctagattcgtcggcgacattctggccttcctgctgaacttggtcagttcttggtcgtctgcagaggagggatggcatgagatttgtaacgttaactgaacacgagtacataaccaggctgtgctgtatgatatgctgtttcaggttggacccaagggtctggagttcgcacgctactctctggactatcacaccattcggaattatctgcatgttaggcgggcatggggaaagcaaagagctgagcagcacatcccggggtatgccaagaagatcgtggaggcctacgacaaagacggacggatcgaggcaatggttacgcagtcaggtgactgactcacaccattcacactctactagctggtagtatttgtatactagctggtagtatttgtactgcattgtagtaaagattaaggaatgtagaagaattgtttgtgatgtgacgtagtggcgatgtatacagtagaatgtataggctgcatggcagcagctcagatctgtatgtacatcctgcgcttgccagtttctagtttgcatttgcttttctgggcatgccttttgttttaattatattgtctttgataagtccaagataaaagaagccacagagtcctcaaatgttggaaatcgccaagttaatggctgaattttgttgcgtcaatctaagcacaaccatgctacgattgatttagtgtgtatgatatgatgaggggtagctctatgttaaggtttggacgaagcagaggagagttgggc

SEQ ID NO: 43075 - DNA, 1724 bp, Zea Mays
tccaaattttctgaggtggagcagtccccgcttggcggcttgtctagagaactcacccgccgccacgcgcgaacgcaaccagcgacgcctcgcggccgcggacagcgcggagccagacgcctcgcattcgctgagaagccgaagcccgtagagcacaggagttgtggacttctagagcacggcgggtctggtatgagaggcttccgctttgcgttggtccgtgcggcgcggtcgcggtcgcgggcggagcaccagaccgtgcagcgccgccggccgtccgatgtggcccaacgtttttcccacaccgcgccggcgccggcgaggccatctttcggcatcgcgttcgacatcgatggggtcatcctgcgcggccgaagtccgatcgggggcgcgccgcgggccatccgacgcctatattccgaagaaggaggaggtgttccagagcacagaagggcccttgagctaagccaacttttaggagtcaatatttctccaacacaggttgtgcatggacattctccttacagagagctggtgaagcgttttgaagatgaccttattgttgctgttggaaaaggagagcctgcagtagtgatgtccgcgtacggatttagaaaagttctgtccatagatgaatatgcatcatattataaagatattgacccccttgctcctttcaagacttggaaagttgggcaaacagacagtcacatgtctgcaaaagtgcacccatcatatgatgtttattcagagcgagttaaaggagtatttgttgtcagcgatcctgtcgattggggaagagatctacaggtactctgtgacatcttgtctactcatggacttcctgggactgaaaaaggtgatcaacctcctttgtattttgcagctgatgatcttgaataccaggcagcatttccttctgagcggcttgggatgggcgccttcaggatagctttggaaagcatcttcaatgaaataaatgatcatccactgaagtatacatcttatgggaaacctaatccatttgtgttcaagaatgcagcaaacatacttgaaaaacttgttatgagtatgtatcctaattcacagacaccaatggaaggaaaagattatcagttttcaactatttacatggttggagataatcctaaagtggatatcaatggagctatgaaggctggccacccatggtcatctgttcttacaaggacgggtgtttttaggggaaaggataacgacccacagtttcctgcagatgtggttgttgatactgttgaagatgccatcaactatattctggagaaggaacgtatacagtgatgataccatgtatgctcccttgatcattatcatttgacatgcttgacaagacaagatgtagccctttttttttggtctagtaaatttataatccttggctggaactggaggtcgactcttagaactccacctcgtgaacagtgcagtctacagtataaaataatgtttttgttaaactataggtagactgttgcaaacagctttattcgttctgccaacaaatacacgttagagtcagcaagacatattttattgcattttttgggtcctgaagagggtatttattactatgtgtacaaaggctaaggcaggctccacgcagtggaaccaaaactgaaatgagcgtcgcttgtaatagatgttcttgtttccatgtagaatatttgcttctcgggctgctcttt

SEQ ID NO: 43076 - DNA, 2217 bp, Zea Mays
tttcctctccccaccgcacgcatccagtggctgctgccgcctcgcccccgctcctcctcctctcccgccacccacgccgcgcaggcctcacctactggtcgtcgttgcctaggggccagaacgcagggcccacagccccgccgcccgccaccgcctccaagcctgctgcgccgctcactgtcaacctgcctcgccaagtcgcccggatctcgacgccccacctgcggccggcggcggccccgccaagctccgccactgccgccacctccctgctccaaccccgcacctccgcttcgccatgaacccttcgtcgtcatccacctcctcctctggcgggtaccactctagggccgctgcctttgcttccccgcagccgcgcggcggtggcggtggcggcggccgagatgggagcgaccgcatcgacgccctcggtcgcctcctgacgagggtgttgcgccacatggcggcggagctgcgcatagatatgaggaccgatggatacgtgcgcgtccgcgacctgttgaagctcaaccttcagaccttcgccaaggcccctctcaagtctcacactgttgacgagatcagggaggtatcgatgatactggttttatttcgttggttgattgattgatgaactgctgtcgaacttgttaggctacttgatttgtgctaaacgctgtttcttctcattactcctagcttgtataggtagacttgccttttggaatgctggcatgctcttgatttctttggattatgaattttgccgtgaactatgagcaatactcagtttgatgagaaattgtgacattttggctggcgtgcaggcagtcaggcaggacaacaagcagcggtttagtctgttggaggaagatggcgagctgttgatccgggcgaaccaggggcacacagtaacaactgtcacatcagagagcctgctgaagcccattttgtcccccgacgaagtgtcagaaaaaaccttgactcgattttgcaatttgggctaaagcgtatggcaaggttacacatacatttctcaagcggcttaccatcagatggagaagtaaccagtggtgtacggcagaatgtaaacatcttgatacatctggacgttagtaaagcacttaaaggtgggatgaagctttatatttcagacaacaaagtgatcttgacagaaggttttgatggcgtcgtcccggtgaaatactttgaaagagtcgaaacatggccaggacgagctccaataccgttccagagataacaggccatgttaccatttttcgtgattcgattgatgattttccggactccgtgaaaagctgtggttctttgtgtgtcttttcggtttttgtgtaacgaaaccaaaagacgagttagtttctctgtgcctgaggatgtcaagagggtttgccaaccatctatcctaattaatggagtacgagaagtttgcggagtatgagcagaagtactcagaggatgcagcaaccaaacattgaaaagtatcatggggagttgcctgcctgctgggctgatgcccttcctcagctcagtttggcaacttccagaagcatacgcctgaggtgcgcaacgtctgcttcggagcgagggagcatggcatgggcggcatttgcaacggtgggcacagcccagggctccgtttcatggccaacgactgctatgcaagcagtccttctttacaagcgtgcaagcaaacatccggtccattagattacgatccaaccacagatataactataatttgttatggttttttataaagattattgagttggtggtgaaaaggtttaagtattaaatgtgacctacggttgaatcacgatctaatggaccagatggtttgcttatggtttgcttgcacgcttgcaaagaaggactgcttgcatagcagtcgttgccccgttctatgttgttggtacctatcttgcttctctgatcgatcaataaaaggagacattatttgagggaccctttttgggtgccttgtatgctgtagctgttcaagtggctgaataaggctgcaagtcttgtgtaaggtgagactctgatgcataagctttgcaacttgcaagtgatgttggattttggaatgttatcaactttagtacacgttttctggccgtctgatcgaatcctggacaccaggggtagaattaattggtcgatcagagctgttaatcgtccaggccttgaaaaacg

SEQ ID NO: 43077 - DNA, 489 bp, Zea Mays
cgacgcagtggcacgaagcgagtcgtcgggccaagcataatggctaggggaggcgatggcgcgtgcgcatagaggacaggcgtgctggagaagccgagcaaggacgcagcgaagacacataggcttgcgacctgggcaaaatcgatgtctgcgagactgagcaggaagggtgtgacgtagagggagctcgggacgacagacgacagcgtcgagagagaagcacgacgccatcacgatggagaatcgagctcacgacacaagagaaagatgacagccagcgaggaaagagcaggagcacgggtccgagctcgctgcaggttatacgtcgacggcgaacttctgccccagcgacttttccacccgcaggacgttgtggaagccgtggaactgaaggccgcgcagcacgagcctgtcgccgagtggagcagggaagcggggcagcgatggccggcgccatgactgagaacaggggctgtcggcattggggat

SEQ ID NO: 43078 - DNA, 473 bp, Zea Mays
aaattcagtttcgccctattcaccccccctctaggcgactatcaatgaccttgacgaagttatagctggacatggtgacttctgtgccctggtagcttcttggggcacagttgttgcctttctgaagtctggctgcgaacatgggaagattatcaatagacccaatttcaatttatcaccagtagattttgataacattcccaaccttgcccgaagcatagccaatagatttataaaattggtatggacaaaaggtggacgaagcaaagctggtgatgaagctcgaagtcaccttaagccggtaacaaaatcataccttgtacttacctcttccttcgaaattgaattttgcttatagtactttaatatgtacaggatgacgaagccgaggccgaagctgaggagtaaaaagacgaagctccatggacacagacgaagcttgaataatctgtagaaaaaactctaaaaactct

SEQ ID NO: 43079 - DNA, 2094 bp, Zea Mays
aaccgatcccctggcgctagcacacggacgaagcaacacacggcggcggtggcgggggacgacgacgtcagcacggcgatcttctcagcgacggctttctctccagtaaccttctggctggctttgcatctgtagatcacttctgctattactatctcaggttttgaacttagaagccctagcaactcggtggcaactggtaacaacagcctagaattgtgggttgttggagatgtttgtatttttaattcttgatcacgatgaggacatgtaaaaagttgacaaattagcattgttggtggtaactggtagcagcaactctgttttattttcatgtagtgtatttcctaaaaaagttatttaaatattgtgtaaactacaaattagcataacacagttgattgtgggaacaagcgaattgcaagcagcggctctttttttagaaaaatatatttcatacattagaagcccatacttctccttaactaattcctgtattatccctgccataaccgaacacagggattctagagggggttagaagcagggaatcatacccccacagggagggattgagtgaagtggaagggatccactcaatccctctctggattgcctcccctaggggtttagatccctaggaaccgaacaagccctcaatcctcatgattttgggatgaaacgaacatggcctcaatgggatgatggtattcaatgatgattgtcatgaatggagctgaaatattgttagtcccttttttagcatccaattttttctctcatttttaatttagttatgacatctccctgtttgttgaagggcagtcctggtgcaacagtgagagctgtctcactgagtcatcaggtcacgggttcgaagtagtctctccgtatttgcgggagaaggcttgctttggtttatccctatcctagacgtcacatgtgggagcctccagcagtggatctacctttttttatctccctgtttgttgaaagactacttgcttgcataggtgacgttccatctttcatccatctcgtgtctatatgttcaagatggcgccattggttcctcagcagaatgtgatgcaaaggttcaggtcattagtgataatccctctgctgttatgttactgtcgaaagtcctttggaaaataccagatcgtgcgatttcccatgacacatcccctttgactatatatgctaccagttcaataagtaacaacgttaagactgttcttggttctggaacacaatatgctaatggatttgctgtggcggatattgaacgatcatctctaatcctatgcggtaaagcatttgctaattcagctatcgtgaaagatgcacttgctgctatgacagccccaatattgtctgcaagaggaggcctcccggttccaggatggattatgagctttggtggttctattgtattattgtttgccctagtggaaatcatgatgtcctgcacagaaatccacaatgctctattgtccattgactgtggtgcagtcatctcttccaaggggtctactgtgcttttcccaacaaaggcaagcagggagcagaaactgcttaccgaaccaactggagtaattatcgtatcatctgatagctctggtgtcataccatctgtatgcaagctctctcctggccaggctgcctaccatttcttggctggatatcacgatggaaaatttgtcccagcatacactagagccccctctcctgctgacccacttgcacttgcaatttctttattctcacatttgaaagaagatgatacaccggcatatctgatcaacgctaagcactctggaaagtacattggcggcaatgggcttatgaaattattaaagctggcactatctcacgatcttcctaacaaaaaaactgaaggctctagagttcaagctctgcaacgggaggtctgttcagtttgacgtcggcaacgtggtcatggtgacaaggaacaccggatgtgtaggagtgatcaagaactgggagaagcacaagggcatcttcgaggaaaacatagaatggaattcaaatttggtggtcgcaaaagtgtggagacttgaattcatataa

SEQ ID NO: 43080 - DNA, 1199 bp, Zea Mays
ttcacaatgctcttcacctgcaccacagagcaaaacagattaggcatggcgaaggcaaaactcgtcagtcagttgcggcctcgtgtgagtttgaagcaaaaatgcgtagcgggggcatcagaactaccttctccagacatggacactccttgggcaaattttacattcccagttctagatcagaaaagcatccaaccagcaggtgcaacatcagttcttgctaagcaggcggcatctcctgatcaacattctcttcccaccaagtagcattctacagcacagaaaattgattattgtaactcgtattgtctctatgatgtgctataatgaaatgtagtttatgcaagcaggcgctttgacattctcttcccaccaagtagcattctgcagcacagaaaattgattattgtaactcgtactgtctctatgatgtgctataatgaaatgtagtttatgcaagcaggcactttgaagctgcaaccggctgtttagctaggataagatgagccatgtatcctcttctaagaaattcaaggcagcttccttgttcttcttgtaaaccaataactctcgattcacctctaactgaataagcccgtacatggactacatcatggattggatagaaacccagctggacgacgaagccattttccctcaacggcttggggctgctttccctcccaacttccacgacgttgtcaagacggtcctgaagcgcctcttcggggtgtacgcgcacatctaccactcccacttccatatgatcgtcaagctcaaggaagaggtgcatctcaacatttgcttcaagcactttgtgctcttcacgctggaattcaagctgatcgagagcgcagagctggctcctctcagtgagctgtcagtactaaactggtgagatagttcgaataggcggcagccgcggcacaccaagtgttcagtttaatgttcgtttggtttcggatggaacatctccatttacacatttggtatcagccgttggcaactcagatgatctccgtatcagccgttgatatctacctattctattactatatcccttctctttattaaaaaagaagggttcgatccaaagttgtgcctctcagaaccttttagcgccataccgctgctgtactggatgattttggcacagacagaagctaatgtcagttctaaattcttttttatagagggag

SEQ ID NO: 43081 - DNA, 330 bp, Zea Mays
gagcaggtaccttcgaactcggacccttcgggcttgagtcaaaatcacagtgagaagaagcacaagggatacgaagaatggaacgaagctgaagctgtgcgcaagggagcttcggcatgataacagaaaaggaaaccgacttaaagaggaaaaggctatctagaccccgatggattactatagaattattagcaaatgtaaagagcatgagtgtaattttacatgggctgcgtcccgtgcctataaatagatgaacagtgctccagtactgtttacgctgacttggcatttgcttttgcgtcacgcttgtactctttacctttcctcaag

SEQ ID NO: 43082 - DNA, 1481 bp, Zea Mays
gcgccaaacaatcaaaccgggacttccttgtcacagtccatgtcgtagctattatgacatgggaatgggatggatgctgaaactttgctagctagctagctgaaaggctccggccgggcctggctggtacacacgcccagatccttgttgtgcacgtacgttccaaacttgctcatactactcagagcgcggcgacatgttcggctttctgaaacaacggaggcagaccccgtcagggttctcgtcgtcgtcagccgccgaggaggtcaccgccggcatcgatggctccggcctcgtcgcgatcgtcacgggcgcgtctagtgggatcggtgccgagacctgccgagttctggcgctgcggggcgttcgcgttgtgatgggcgtgaggacaccgtctgccggtgagcgcgtcaaggaagagatcgtgaagaacgtccccgctgccgattctccccacagccagattctcagaaaagctggtcagaaaaaagctgaaccaaacagacacgttagcagcatgtcatccgtcaagagattcgctgacaacttcaacggactaaatctcccactcaacattctcattaataatgcaggaatcgcattttctcctttcaccctttcggatgatggaattgagttacaatttgcaacaaattaccttggccattttctactcactaatcttttacttgaaaagatgaaaatcacggccatggagagtggaatagaaggtagggttgtgattgttgcttctgacagctacaagcacacgtatcgagagggaattcgttttgataaactcaatgatgcatcaggctataaaggcatcctggcttatggccaatcgaagctggccaatatattgcgttccaatgaactttcttgccgcttgaaggaagaagatgcaaaagtagtagtcaactcactgcatccgggagttgttgccaccaacatcacgcgccatctgggtatcataaaagatattctttctccaattgctaaacttgtactaaggggtgttgaacaaggtgcagccaccgtttgttatctggcattgcatcctcaggttgctggagtcaccggcaaatactttgtggatttcaatgctgttgaactaaaaccgcctgcaactgacaaggagttgtccaaaaagctctgggattttagtgtcagcctactccagtgatataactgccgattagttctcctacgccagctggtaaataaaggtcgatctgaatgagagatcatgtttcagtaatagaacaaggtgatccagcagtgtaatatctactactacttattgtttgactagatatggatgccatatgtttgtaatttgaataaattgattggatacatttctgcacttgtttgaattgtggcaatgtcggacatgtctaaagatgtgatactattgagtgttgagatgcacatttttttttaaatcctttgtccataaaatttccgtttatgtgctg

SEQ ID NO: 43083 - DNA, 1492 bp, Zea Mays
tataaccctagctcgtttgttctggaacaaatccacgtgccgcctcacgcggctgagcacgccgcccccgccgcctcgtccctgtctcgccgtcgccgcctcgttcccgtcctgccatcatcgtctcgtccctgcttctcgatcgtacgccgtgagcaataggagttccgtccggcgctggagctgagcctggagattgtccctactcttgtgagagtcgcgaggacaagctttccccctcttgagatccggtgtctaatccatttttcaaggtggtgttgagagagctgcatggaatgttgaattagagaagagtcttgttgacttgttgtttgaacacaatatgcctccacatagggctcaaaatggatggagtccagatgcttggaataaaatagtttctaaattccacaagaagcatgaatatgttacattcaacaagatccaaattcaagaaaaggagagagaattaaaaagggaatacaagatattgaaggaggcaagaaaacaaagtggagtttcttggaatgaaaaaagatgcatgatcattgctgaaccaacgatatgggacaacattatcactacatttcctagagctaagaagttccgcaataagtcttttccaatctttgatgccttgggtgaattatatgatggtcacattgcacaagggacttggaacattacatctactcaaccactacaaaattctgatgatggagagaaatttaaaaccatagaagtggaatatgaagatactaatgaaccacaagtagatgcgagaatagaacaagatgaagatatagtaattgttgaaagggttgaacataggttacctaaaaggtcaggtgcaccaactgtcaatcaagagaaggagacaaagagagtaaggaaagatgcactagaagggctgatagggaggtaccttgatgtgaaaacaaagcaagttgcagatgaggctacacaatcaacaaaagagaaggaagttgctcaagataatgatttttctatcaagaggtgtatttctgttcttaagactatggatatcacaagagatgagaagatcaaagcagcggaggtgtttaacacaccaaattacagagaaacatttatttgttttaatgatgatgagccagaagtcgctctcctttggccaagggggaagatggataaactctaaagggtccaaggataaagatattatcaacatctctagaggaagagaaagtcaagtcacatcttcagtctgtgcaggctgtttattcagtttcagtcaataaggcttagcttgtagtgtgtggtctaaatcttgcatgtgcatgtagagactgtttcttcggtctgtgcaggctgtgcagttttcagcttgtttcttcagtcgtttcagacagttttttcagttttctgtgcagacatgtgctcgtctctactttgtcaaaaaaaagatagaattattcagactgcagttttcagcttgtttgttgattgggtt

SEQ ID NO: 43084 - DNA, 972 bp, Zea Mays
gcatatatatggcagaccggcagtacgtgaccctgccccgacacaacctgccggacgggacggacacggacgcggcgcaaaggcgaggaagcccggggcggcgcatgtgtggcgcgcccgcgcgcgcggccgatcggatcgccgccgcgccggggctagttactactatcgtcggcaggatccgttccgtggaccgtggcctgtcccgtccacgcgcgccgtcacaccacaccaacagcagttgaagcacatggaatggaattatggaaggcagcagcaactcctgcccccggtcggtcggattgctggtccggcggatcggcggatccgtcggcgcggtcgtccgctccaacgaccgagcccaaatcatgtgcgccgcgcgcgtgctcgtgcggccgtggcgggacgcgagtcgcgcgcgcgtcatgtcagtcggtcggtcgccagtcgccacgacgccacccccatgcgccgggatcgcgagctcccccagctgctcgatgctggtatcgatcccaggctgtccagtgtcggtcggtctttgtttgggctctcatgatttccacggcacgctgttgggatcctccacatggcttgacagcaaagacgtcgtgcaagttgtagcgcgccgcgagcgacaggatcgggatcgacatttgaacgtaatatacgcgcgtacgtggtagggatcatggaactgtctgctcggccctagtctatgctgctttaggatgggattgagaccagtaaccggaggtcatgtctcagtttttttaacttacatatatcgtcatgtttgtttcaacatatttttaagcttccggcccatggaaagctgtcaaatacctagtttttcagcctgtttttgtgagaatcgaaaccggccaaaattaacttgaacacagaatcaaccgaattgtcgtactaatagtagaaatacgtctctttctacataagtctacagaccccttc

SEQ ID NO: 43085 - DNA, 1961 bp, Zea Mays
gcctgctgcttgcgatggacgaaaacgtaatcgttgttcatcatttaacggattttgctatgctacttcatcatgcttcaaacggagacctactaggagatcggtccagatacctctcacaattttgcctctatctatttgacttttcaaagagagattaatactatacccctactggctaaagggttacagagtattcctatggacatgatatcatcctgtcccatctgcaatatacaagttcttacggttgagctggaatggcatgccaatagccactttgatgacgatcaactccaaagggacatcgaattagcacatcagatagcagttgctgaatcaagtacagataccatggggcctcatcgagtcatagtggatactcacaccattacagtgagctattggatgaacaaatctcttgtatggtcagagcacaaattcgaagcaaagttcaagaagtggaaggcggtattatgagcttgttgaggagctgcttggagtcagaagctggttcctcaaaaagtatgatatcaggctatattgaccatcatcagagtctttcatcagaagataagggatggggctgtggatggagaaatattcagatgctgagctctcatctattgaagcaaagacaagaagctagagaagtattatttggtggttctggatttgttcctgacatcccttcactccagaggtggcttgagattgcttgggataaaaaatttgatacgattggctccagccactttcacaacaaagtttatggtgccaagaagtggatagggactacagaatgtgctaccctcttccgctcttttggcctccgtgcaaagattgtagattttgatagcacagaatcatccgacctccaaagtaagaacagtagccatgcagcaagtcaagtacgaggacttatggataagttcttaataaagagtaattcccctaaatcatcgtctgaattttgtcaagaggatgctgaaagtatgagaggccaacacgcccttgttgactgggtttggaactattttgcatgtgagcgctctgatagattaaccacacagcgtgccactgtcagcaataaaacaccactctattttcaacatcaaggtcattcaaggacaattgttgggattcaaaaggaaatggttcaccgtggatctcaagaacaatacacccttttgattttagatcctggtcatagaactgcagatctagaaaggtccctaagaagcaaaaatggatggcagcgtctggtgaagagaggtgtccacacgctcaggaagccacagtatcagttatgttatgtggatcctggaattgctagttcagaagagatggagcaactgaagactattgatagtatgcttgtcaggttttaggttcctgggcactcccctggttgaagaaacaagaacatctaatccattgccgaacggtgcgctgtacgaatgacacagcaaggatgggcctgcagaaaactggatctactgttgtttggaggaccttagaagggtcctgactgctttcgtaactggacctgcccgttgggcttgttcggttatctgaacgactgaacctgtggtgtaggtaaacgaagcagagcttgatgtacagtacagtcgcttgtgttgaagtggagagaataaaagtgtttgtacatataataacatcctgcagttgttaatcttttgttacacatctgatgccgcccgcgcactcagctcagttgactggaatattgactcaaggatcgtattctgcacaagttggaatctggccatatgtttgttgtttgttgggtgtcgagccatcccttctttcgattaaatatagtcgcacgtatgagtacaaaatttgttgatcctatgtgtatttgcagtacggcctgttttaaggggcatttggcagagctcttatagctccgcttcaaacgagaatcactctagcag

SEQ ID NO: 43086 - DNA, 334 bp, Zea Mays
gggagactgtattcttgcagagtttgtaccatgttgtaatctttataactttatttggctcacgggttctggtcactgtcagaaacaatgcacaactgtctgtggtagtttcaagggaaagcctccccatcgactatactgtcaaggaacttgattggatttctgagatttctatgccgaagatacataaatggtaatggattttcttctatacaaacatggcccaaaacaaagcatcttctataaactactaagctacttggtgaccagtctatcagtatagttgaggatttgtattctaggaatcctattggtataacatgaggactgtgta

SEQ ID NO: 43087 - DNA, 2485 bp, Zea Mays
tttttttttttcaaccaagtttgaaaaattatatcaatatttatgcctgaaaatatgtttatcatagaaatttataacacgtggacggtgcagcttcagagccacgagctgcggatgcgcgcatctggggctggggcgtccgcgttccactcccacagtccacacctcagcctcagcgacattggttttgcggtgggtcgccctcaccctgtataattgcaacactgcagtactgcaacccttcggcactcccaggctccaagacgagcacgcacgactgtctgccgtcttccttagccatggacgcccccggagcctccaccaccacgctcctcctctacggcgcgctcctcctggtgggattcctcttcatcgcggtcgcccgccggagcaacgcaggccttccgccgggtcccacgggcctgccgctcttgggcagcctgccgtctctggacccgcagctgcacgtctacttcgcgcgcctcgcggccaggtacggccccatcttctccatccgcctgggctccaagctgggcgtcgtggtgacctccccggagctggcgcgcgaggtgctgcgggagcaggacctcgtcttctccggccgcgacgtccccgacgcggcccgctccatctcctacggcggcgggcagaacatcgtgtggaaccccgtgggccccacgtggcggctgctgcggcgggtgtgcgtgcgggagatgctcggccccgcggggctggacaacgtgcagggcctccgggcgcgggagttcggggccacgctcgcccacctccacgcccaggcccgcgccgccgcccccgtcgacgtcggcgcgcagatgttcctcaccgtcatgaacgtcatcacggggacgctgtggggcggcaacgtcggcagcgagggcgagcgcgtcgcgctgggcagggagttcaggcacctcgtcgccgagatcaccgacatgctcggcgcccccaacgtgtccgacttcttcccggcgctcgcgcgcttcgacctgcagggcatccggaagaagtccgacgcgctcaaggagcggttcaaccagatgttcgccaggatcatagagcagagggtccacgccgagcgggccggcggcgagcccccggcgcccgacttcttggagtacatgctcaagctcgagaaggaaggcggcgacgggaaggcgtccttcaccatgacaaacgtcaaggcactgctaatggacatggtggtcgggggcacggagacgacgtccaacaccgtggagtgggccatggcggagctgatgcagaaaccggagctgctggccaaggtgcggcaggagctggacgcggtggtgggcagggacgccgtggtggaggagtcgcacctgccgcagcttccctacctgcacgcggtggtcaaggagacgctgcggctgcacccggcgctgccgctgatggtgccgcactgccccagcgccgacgccacggtgggcggctaccgcgtcccggcggggtgccgcgtgttcgtcaacgtgtgggcgatcatgagggaccccgccgtgtggaaggacccgcgggacttcgtcccggagcggttcctggacggcgccggcgaagggcgcaagtgggacttcacgggcagcgagatggagtacctcccgttcgggtccgggcgcaggatctgcgctggcgtcgccatggcccaacggatgacggcctactcgctggccatgctgctgcaggcgttcgactgggagctgcctgccggcgcgcggctggagctggacgagaagttcgcgatcgtcatgaagaaggccacgccgctggtggccgtgccgacgccgcggctgtccaagcctgagctctactactccgcctagtccaccaccacatccatccactgggctgggccattcggcagaggaggaaatgtaacatatttggcccacctgccctccctcgtgaatacgttacatactgaacagtgttgttttaatcgaaagctccatagattgttacctcctacataggacaaatctgccacgcatcaacaaccgctgaattgtggatgtccacgtgcgctagataatctgatcttatctatggttatctcattatctgatagcaacgtgtgtgtcattggtggatgcattgtctcacggctgcgagtgactttgaggaacaagttgcaggctgataccaaggacacctgagagatttgcatctgatggctcaatgtttgtagtccttgggcacacctttcgcattttattccataaggttgtttcacctataatataaggctggatccagcacacgtccataccgaccggtgatgtgatggcatggcccggttcagtttggccttaacgtcgatcggtttggttggttgatcggtgtggttgccgatagatcggctcgagcagtaccgaccatattggaacatgactggttgatattgacccttacgctagagaaccgatagttagttcatgtcattttgaatttc

SEQ ID NO: 43088 - DNA, 551 bp, Zea Mays
aacgaatcaacttatcctcattaaatccgacttgaaaccacgaaatcgacggtgcctcgtggtccacgcataacaccaaatacgtgatgagcgatgtactagacttcactattctacccgatcaaattttattcttgcactatttcacgactgcgatttacacgcacgtcaccggctcacattaacagcataagtataccaaactgacgagaaatattaaaacgaaaagcgagagcgacgacagatgccaataatttaatccgtctttaaggccacgagcacagctatgatttccgattctgccattacgtcgagcacatgatgagcaccacgcgggatttgttgctttatccaaactctctcgattttcgacgatgcaagagatgttgacgagttggaggctccagggtcgagcacgatagagggcttcggagctcaacgcaagtggcgcacaactgacagatagatcgtcgggatcgatgggcacgtcgcggacgcggcgtggattggcgacgaagaataaggggctgctgtaatggggcgtcgatgcg

SEQ ID NO: 43089 - DNA, 3747 bp, Zea Mays
gtttttcttctcctccttgccaagctcccacggcgcccagcccctgtgccgaggcctcccaacactctctccctcgaccggcgctctgcccaatccccaaactcgtcgcgcccctgctctccaggttggccgcacgcccatcttactaccgtgctcgcccagctcagatctcttcgtgccggcgctcttccctgccatggccgccccccctcagctcgcctccctcaagcacgccgcgctcctccctgctcgaccatggaagccgcaccgtcgacctcgcctgaaccccctctgccgcgtccctctccctgacttccgagcttcagtcatggtgtacggtgggatggggctcaggtacatgtacccctgcatcaccatggggagatcaccagggcctctggtgccatcggtctcttctacggcgcacaccttatcttctccctctagacccaactctccaccggccgtgcttgcctgcactgctcatggccggtatgcgttcgcgcccgcacagagcatctggagttctggcacgacgaacgggggaatgaagcagccagcatcgctcgcccaaatccggggagcacttgatgtccggccgtcacatccccgatcaccttttggttttcctctcttcgcctcggtgtccatgtccaagcgcactcgcctcggccagcaatggtgccgagttccttctgtccatgctgcacgtttccatcattcccgtcgcgcccaggatcgttttgtatgcgtgtcgttttcctggctctcctcacgccgatggtcgctgctccccatcgtgccgagctccccactgtcgtgcgtcgctacgggcttgctatcggacgcggctgtctccgtcacttgcttcagctcgctagccctgcagctctttacgccaccatcttgtatcgttgtcgatcctaccatcgaacgtcgtgcgtggcgtcatcatcatccttgtccactcatttaggttctcgtcgtgccatggccgcacgggaaggctggccggggttggccatggtggtcgggcactgctatttttgtgtgccatgctatggccgcaccaagttccatggtgttgtacagtggctgtccccgtctcctttgtcgtgcattttcgacttcaagcactgcttgcagcatcgttgatgtcgcgctttctttagacttgacgcgtcaaactccttcccgtcgcgcctcgtgtgccacttgtccggctaaatgtgagactcggccgtcgacgcactgtccgtctcttgggattcgatgtcgtcctcgcttcagccgccagatgttcgatgaaacgcctgaccctcggaactgtcattattccaacggccttgtcgcgtcttgcgtccccactggtccctattcgttgtccacctgtggcgcaatgaaaggctcgaactgggcatcattgtcaatctcgcggtttcaagtcagatttaggtaatagtagccaatttgttacttctgcttttggtcggatgaatttagttaaacatattagttgtgcaacgtataattaaattggttcttcgtatctgatgtggtcagtctagtcatatgtgatattgttgtttgtctagtgtactgtatgaactaattagcgtagtgggttagaaagctataaatgatttctatctgtagtcttgaatttaattatcttggaaacgtgagcctaatttttgttaattgtttggtataggctaaagtatggaacttatacttagggtgttgttgcctgatgtatgagttaaattcggttaagtaggaaggacgtgagtgttagtatgtatattttattattttgtgattattgcgcttagtcgtatgtcgataactagtgtttccgtatgaaatagtacaacgccttgctgctaggtgtttaattcgcgaacatgtagtaatatttagtctcatactattcttgtttatatgcattcatgtgcattatgcaaatcatttaggtacgtttgttgatcacgtgatgcggaagacgaccccaggataatgcagagagtgaacatctccgcaagacgacgtcgtcagtcggacgaacctgaagatggataatttgacgaatgtcaagataaaagatggtcgtcaagcagacatcgtctaacaacactaacctagtgtttatcccaggtgaagagcctgcagagctttgctacttttgtgcaaaggtggttccctagtaggaggaagaaccgaaatagaagtgtgttgttgtggatggtgctaagtgccggtgggctcgaccttcttataagtctaagtacctcttctatacttcttattgaggatggtcacttgagctagcatatatttcaaaactacaaataatttataacatttcaaagtttatgctttgaaccaaattttttaatcactccgatcatgtacattgtaaacttcatgtaacttgtaaaatttggttataagatttccgctgcaaattgttggtgtgtgatttgtgtttacttaatcccgtggttctggttgtaagtgatttatccgaggtccttggggcactcggacagatcctgttaagttatctggtgcacatgcatagtcgtctgaggtctttgagacaagggcaggtgcatgtgggtccaataacttgggaggttctgccacatataattgagacttttatggcgttgaggaagcgcaggccagataagtagtattattgcaatctttatgtttaatgtatgcaactttcatgcttaattattgaatgccaaactttatatctatatattgaattgtttaccaaatttactataaattatatgtacattagatagaattctacatgaaaattttgttgcggcacactctatataaaaatcttaggtctgccactggagcaggactttgccgagtgcccgacaaaaagcactcggcaaagcatcgagcactcgacaaaggatcggattccggtagtgagctcaacttagacgtggtcatcaagattctccaactccaaaagttccacgcagcgctggaacaagttcatgtcggaggtgaggatcatcagccgactccggccctggaacctcgtgctgctcgtcgggtggtgcttcggcggcggcggtggcgacgacctcctgctcgtctacgagctggtgcgcaaaggcagcgtggataggcacctgtacgacacagacaagaagctggcgtgggggcgaggacgcgaggagacggagtcgtgcgtcgtgcaccgcgacgtcaagccaagcaacgtgatgctggacgcgtcgttcgccgccaagctcggggacttcgggctggcgagggcggtggtcgaggacggccgatggtcacggacgacggcggcggcggcgggcacgaccgggtacgtggacccggagtgcctgagcactgggcggacgagcgtggggtccgacgtgtacagttttggcatcgtgctcctcgagatcgcttgtggccggccagtgccccgtggtgacgctgtcgaacgggaacacgctccacctggcgcacagggtctgggagctccgtgaaaccgggagggttctggacgcgcggctgggcggggactacgacgttcaggggatggagcgtgttctcgtcgtcgagctctggtgcgcgatgttggaaccggaccgccgacacatggcgtgtccatcggggctgcccgcacacacggcgcgcccacccaggctgtcgggccgcgacacacgcgcccgcacgtatagcagcgggctt

SEQ ID NO: 43090 - DNA, 389 bp, Zea Mays
ttttgaaaatgctcgagcatataaagagccacagaaaataagcaaatgtatgaatcaagcaggcagcagagtgagtgatccagctgcggtaggcaatggcggatcgatgggccaatcaaatttgctagcgatcttctcagagtcattcccttccttgcttgctgaatccatctgcagtaggcaatgactgatggatgggctaatcagccttgttagaaatcttgtcagcgcccttcccttatttgcttgagcctatagcagaacaatcaaaacaatgataattccttttgtaaaaaatatgaattatttccacgacattcagttctagaaaaggtgctacaggtaagctggaaaacagccatatgtacaacaacaattcaacaatttca

SEQ ID NO: 43091 - DNA, 101 bp, Zea Mays
aaaaagatggatgcatataacaacctcatatcaaagaaacaagttccatgaccgatgacgaaaaggctaaactcattattagcaagaagtgtttgaggaag

SEQ ID NO: 43092 - DNA, 1153 bp, Zea Mays
aaacatgatggtgcttaaattcgatggcagaaaatcagaaatggcgttcccttgccagggactggtagcttggaaacttggaattgtccttcactattagtcttggtaactcctttgggaaaaccgttaacgatcatctgaggtcaactttgagttttgataacaagcaacctccatttgcgagtcaaaactttgactacggtcaaacaatagcttgcatttcatacccgtacaatcgttctagatcaggagatgtttgggcagcctatgagtcacgcaccagcactgccactgtgttccgttcccaaattgctggtgggggttcatccacaagaattcccttgcctttggaattagcagagaatgaacccatatatgtgaatcccaaacaatatcacgggatacttcgcagaagacagttacgtgccaagctagaggctcagaacaagctagtcagagcccgaaagccttaccttcatgagtctaggcatcttcatgcaatgaagagggcacgaggttccggtggacgattcctcaacactaagcagctccagcagtctcacacagccctcaccaggtccaccaccacaagtggcacaagctcctcaggctcaactcatctgcggcttggtggtggcgcagccgcagctggagatcgatctgtgctggcacccaaaacaatggcctcacaagacagtagcaagaaggccgtttcttcagccctcgccttcactgcgactccaatgctgcgcagagatgacggcttcttgcagcacccaagccatcttttcagtttttctggtcattttgggcaggcaagcgcgcaagctggcgtccataatggaagtcagcatagggttccagttatgagatgaccggtttgcgaaccatagctggtgatccaggcgtctagggtcaacttcgctgtggtgtcttagtctctcaggcaattcatccttggcttaatttctggctttttattagaaggtaccaaaatgtgttccataccgttgtggccacagagcccataaaccagggggtttgatggttggcactcctacccaaactattgttgcagtggtgtttgttagaataaaccttgactattattctgtacaatttgcctttatcttgtactgccaattattgtgta

SEQ ID NO: 43093 - DNA, 834 bp, Zea Mays
ctcggccttcttataagtctaaatatgcgggaatgtcgcgccgacgacggtgaacaccacctggaacggtctcgccgtggtggaccttgtcggaggtcggttaagtgcgtgctctagggttgatttgctcggtgagtgccaagaagtgatttgtgaagaaggagcctgctccagtgttgttgatccagtggtggattccatctaactgcttattgtgatataagatctcctctaacaaggcaagcctcggtgcatttgcccttccttgtggtttaaatgttttatcaccttatatggtgaattaggtgataggagttacgtgataaaaatatgatactttaccattccttggaatttggctactattcattgctacttgttttataaaaagaactgaaatgcttagccctgcttagaaacataaaaattgtttgttgtaaaaagaagatgatgtggaatattggttatgggattttcctttgaaaatcataacaaacttatgatggtgagtcccttagggcccaggtgggctcatcatctgaaaagagtacccctgccgggtaccaaaaatggggaaatggtttgaataaattgagactagatgttgagctgacaaggtcacccgtctgcgtcgattaaggaccgtaccattgactagcctattgtggttgagactttgcaactaggcacataccctggtatgggacagggtcaacttgaacctggctattccatacgtgcaaagacaaccgagcattgggcgtgggagatggtgggagtggcagtatcctcctggcatagtagttggatggtgaaagtcgcctagaggggggg

SEQ ID NO: 43094 - DNA, 2845 bp, Zea Mays
acataagcttttatctaggcttgcggctacttgcatcggagcaagtcagtcacatctcacagctcagtgagatccagagccaaagggcggggcgtctcccactcccaatcccaagtccagccgccgccgtctcttgctcgctccaaaagccgttttccagagatctttttcagggccagacgccagccgccgtctctcgcttgcctgcatttccgatcctgaggcagtcctcatctcattctcatccaaccgggaggttgggaacgagatcacagctacagttacctgagtagtaggatcctcctcagatcggcttcaaaaatcaaagtgggggggacaacaaggcaggggatgagtgcagctgcaaccaaggtgaagagacgtgtgggcaagtacgagctcggccgaaccataggcgaaggcacattcgccaaggtcaggttcgccaagaacaccgagaccggggagccggtggccgtcaagatcctcgacaaggagaaggtcctcaggcacaagatggccgagcagattaagagggagatttcgaccatgaagctgattaagcaccctaacgttgttcgcatatatgaggtgatgggaagtaaaacaaaggtctacattgtgctggagtatgttaccggcggcgaacttttcgacacaattgctaaccaaggtcgaatgagggaaggcgaggcgaggagttacttccaacaattaatcaacgcagttgattattgccatagcaggggtgtgtaccaccgggatttaaaaccagaaaatctactgcttgactcatatggaaatctgaatgtctctgactttgggctgagcgcgctgtcccagcaaatcaaggatgatggattgctgcacacaacttgtgggactccaaactatgtggcaccagaggtcctagaagatcagggctatgatggtgcaatggctgatctgtggtcatgtggagttatcctgtttgttctgctagctgggtatttaccttttgaggactctaaccttatgacgctgtataagaaaatctcaaatgcagaatacacatttccaccatggacatctttccctgccaagaggttgttgacaagaatccttgatccaaatccgatgacggtatgcaagagcacagaagctgctcgaaataaaatactacccaaaacaatgtaggaattttggaaagtctaaaagttcctactgcacttactagcacatagccagcgatagatgtatttgggggaaagattcttttaggcctcgttcgttttcagccgatcagcccattcctgttccgggtggaacgaatggacctggtttggaatttggtacaactcattgaaattgtttgtttcggcccgaattggaatcgaaactggcccagattaaaatttcccttcaccccatggcccggaacaaaaccttgtgtcgtaccctccggatcgaagcctggacacgacgcggccggagcgacggcgcggcggcggctcgacgcgaccggcgcgacggcggcttgatgcgaccggcacggcggcggcgcacagccccgacgacgaccctccccgctgccttctccctgggttgattttgcgtccatattatagctgagcaactctttcattcctagcagattcatctctccaaactggcactaatttaacattaggatcagatactaatttaaacggtccaaccaatagatctatatgcttttttaaacggcgctggaatgcataactctaatcttaggttccaaatacagttaaatttgctgactagattggtcgaacaaagcagaagaaaattcgtgtgacttcagaataacaatccctgaaatactggaggatgagtggttcaaaaagggctacaagcgcccggagtttgacgagaaatatgacacgccattggatgatgtggatgctgtcttcaatgactcagaagagcaccacgtgacagagaagaaagaagaagaacccgtagctctcaatgcatttgaactgatttcaaggtcagcaggcctaaatcttgggaacctatttgactcggagcaggaattcaaaagagaaacgaggttcacgtcaaaatgtccaccgaaagaaatcattcgcaagattgaggaagctgcaaaacctctaggatttggtgtccagaagaaaaactacaagttgaggctagagaaagtaaaagcagggaggaagggaaacctgaatgttgctacggaggttgcgccctcccttcatatggtacaagtccggaaagcaaaaggcgacactctggagttccaaaagttctacaagaacctttccaagaccttaaaggacgttgtctggaaatctgaagacctgcaaatgcgagctgcttcttagcatccactagatggcgagatgttcgtacgtgtcagattccattcccgtagcatgatgtgtcgtcagccgtttctgttcactgcactctgcatggtccggtgggcgcgtggcttggcattttcagagaccgcgttgctcgttgcagcccgggatgaaggcgatgcagtaggttttgtggatgtggtgagctctgtatatgcctattgatgagtcatgttgcaagctgtaacgacactatgatccgtgaagtgtagaagcagccaagtatgttctttctatgctgccccatttcccggcagtttccatgcattttgaagaaaaaaatagtggctaactcattgatatttgtatttggtcatcattaataaatcgcctctccatctgtgcatgacccctctatcgttgtaagatttttttacaatcctcatctttctaaggttctgtttttttaccagattatataattcagctcaaat

SEQ ID NO: 43095 - DNA, 834 bp, Zea Mays
tgtacgcgaccatccacaggattatacatcctgtaggccttcgatcctacctcataccccacaaaaatcatggggctactcctcttctccagcttcttcaagtgcggcttggtgttcttcacgtgagcgatgcacccaaatgtgcggaagaagctcactactggctgctcgccatgccaggcctcgtatggcgtcttcctgtcgaggctgcgtgtcggggatcggttgaggatgaagacagctgtggtgacggcctcaccctagaatatccctggggagaccctttgccatcagcatgcttcgcgccatgtcgacgatggtttgattacgccgctccactactccattctgttgtggcgagtatggagccgtaagctatcgctgcacaccttcctctgcacagtaggccccaaactcaagtgatgtgaactctcctccgcgatctgtccgcagcaccttcaacttcctcccggactccacctctactgctgccttgaaacaccgaattgttgttggtgcttggtctttgcttgcgagaagacagacccacatatagcgactcaggtcgtctaccagcagcaagaaataacggcttccgcttggtgttgtcggcgcgatcggcccgcagatgtcgccatgaaccagatcgagtgcgcctcctgcgcgctgctttgtctgtgccgggaacagacgttgatgttgcttcccagccaggcagccctcacacatttgatcaacgtgatcaatatgtggcaggccacgcaccatgttcccgctggcaatcttctggagtgcttggaagctgatatgcccgaagcgctcatgccagcgcca

SEQ ID NO: 43096 - DNA, 384 bp, Zea Mays
aagaagatagtgatgatgaagaaaatgaaagtgagagtgatggagatatggctctatttgtaaagaaattcaataaattcatgaagatgaagaggggtcaacctagaagaggccatacatcaagaagacatgctttcaatgatagaaaatgttttgagtgtggggaacccggtcacatcgccatgaattgccctaacaagaagaagaagggcacagatggagatgataagaagaagaagaaattctacaacaagaagaaagatggcaaagcctacctagttgaatgggatttggataatagctcggatgatgatgatgatgacacctcatccaagcttaatgccggaatggccatcaatgaagccccttcacttttctcatccc

SEQ ID NO: 43097 - DNA, 1646 bp, Zea Mays
tttttccctgctgttgtgatgcaggagtttgttcattcgctctcttatttaatccaagtattccctaaccaagtggataattcatctcacatgaagaaacggatgaacaacctgaccaaatggatttctgcccaagtgcatgatcaactgttagtatgagtgaactctcaacccttggcttaccaatggtactgagaggattttcttaatgtcaaaagtagttcaacaagttggttttgactaacttgtaactgctcaatgaacgaaggctgagtttagagatcattttatcgagttgtctaaactcactttggttcaacacaccctaaagaaagtacttaacaaaatcaaattaagtcgaccagtaaccatctaattatctctctagttatgcctcgatcgcctcacgtgtgttttcccagcatatgcgatcaagtcgagccatgcctagtgcttgataaaatggactggtcgtaaagtccgtatctacagatctcttcactggtgattctctagaatctataccatctttcgtggacttgaattctcgggtaagccacatgttaaccgcgacagtattcgacatccacacccgtctcctgtgctatcaatttcctgtaaccacttgttggtaaacttctttctgtgttttacccaagacggtgcatgtgattctgtttggggaaaatcacgtatttaccgctcacccaatagactcggatagtacaatgtcatcagaaaaagcaaactgcacacatgaaaccttatgtgttcttgtggcaggtagcgtctctactatgggacatctctaaattagcttaaggcgatatatgatatgcccactagagaaactacatcctgaggcactcacctttacttggactatcttagggttatcgctgatatggatatgggttacatacttctctacccttagaagtctttcgctctgaatctcgggacgagattcttttaaggggggagggctgtaacaccccaggtgtttatattccgctcgacaaagagtatgagtttaagcacgtaatatcagtggataaaacagatgctaaatttcaattagcttcgtctatcgcgattttaatatcgcatctgttttatttgtcgcgagtgcgacattctttttattttatttatccgggctcttcctaaattttcgtgatgttcggaacatcgttgttccgaaaatcggtgcgtccggtgattatttaaaattcatcgctcgcgcaaatacgaatttaggaaattcagtacggtcctccgatttcatctcaaacaaatttattttgaactcgacgactaagatactcggggtaaaataattcgaatcgcgcgaaatcgtgcgagaggttatgatctaatttgttctttagcccacactgtagaataatcaaattaactgtgttttggtgatggatacatttttttatctgatttcgaccaaaccagtgttgtcttaaatattgaatctgcctgtttacgtgccgttcgagaaaaacgatgcgccagctcattgtcgaattattctctagtcgaatattcggatagcgggcaaaattcgtctaaatataacggaaacgaatgcaaattaaaattaattgaattgtttctctaacaaattgaccaag

SEQ ID NO: 43098 - DNA, 1973 bp, Zea Mays
atttacgattgcatctctaatcctccccaaccctcttccggttcttctcatcccaactgaccgactaccatggccggcggcggcggcggctctctgtctagcccctccgcctccttcctttccagtcccaccccaacaccgccccctcgtctcctccgcaggtgtagcacgaagtctgcctcacgagatagccccatcctcagaccaaaaaagccgcctccactcttctgcgcggcggcagccactcccacccccgctcccgcggccgcgtccaagtcggctgggtcatggagggacctgtgcagtctcaacgcctgggtggtgcgagactaccgccgccttgtcgactccgtcggcgcgctcgagccggcgcttcggaggctctctgaggaacagttgaaggcgaagacggccgagttccgcagccgcctaacgcgcggggagacgctcgccgacgtccaggccgatgcgtttgctgtggtacgtgaggcggctaggaggacgcttgggatgcggcatttcgacgtccagataattggcggtgctgtgctccatgacggctgcattgcagagatgaagacaggcgaggggaagacgcttgtttccacacttgcggcttatctaaatgcccttacagggaaaggggttcatgtggtgactgtaaatgattatttggcacagcgtgatgctgaatggatgggtcgtgttcatcgctttctcggtcttactgttggtctgattcaggcgggtatgaagtcagatgagagaagagctagctacagatgtgacattacatacactaacaactcggaacttggatttgactatcttcgtgacaacctatctcgaaacaaagaacaactagttatgagatggccaaggccattccattttgctattgtggacgaagtggactcagtacttatagatgagggaaggaatccattattaataagtggagaggataatagagatgcagttcggtatccaattgctgctaaagtcgcagaacttcttatggagggtgttcattacaccgttgaactaaagggcaataatatagatctgacagaggacggtgtagcacatgctgagattattcttgggacagatgatctatgggatgagaatgatccatgggcaaggtttgtgatgaatgctttgaaggcaaaagtgttctaccgaagggatgtccagtatattgtcagggatgggaaagctattataattaatgagttaaccggccgagttgaacccaagagaagatggtctgatggtatccaccaagcagtagaagcaaaagaaggcctaaaaatccaggcagactcggtaattgtggctcaaatcacatatcagtcattgtttaagctttatcctaaactttctgggatgacaggaactgctaagacagaggaaaaggagttttcaaagatgttcaagatgcctgttattgaagtacctacgaatctgccaaatatacgggtggacttgcctatccaagcttttgcgtgtcgagagttctgaatacttgtcagagctacttaaagttcacaagattccacacaatgtccttaatgcaaggccaaagtatgctgcaagagaagccgaaataattgcccaagctggaagaaaacatgctattacaatatctactaatatggctggcagaggaactgacattattttaggtggtaatccaaaaatgcttgcaaaagaaatagtagaagataacatacttccatttttgacccatgaacctcctaatattgacatggaaggggaatccacatcccacaagctgcgcggcagagcaggcagacagggtgatcctgggtcgacacggtttatggtgagcttacaagatgaaatattccagaaatttaatctggacactgaatgggccgtgaggctaatatcaaggataacgaatgatgaagacatagctatcgagagcaatgttgttgtgaaacagg

SEQ ID NO: 43099 - DNA, 3672 bp, Zea Mays
aaagtaaatgctgcagcgggcgattggttatttctcggcctcatcgtcgtcttctccgatcccaccctccttccctccctcccaattcccacccccgtcaccccgtgctccaaaccctagcaagcagcaatagagcggaacccatgcaatcctaatcgttttctctgcctaatcctctccctttctcatcctcatgacctgtgcctcatcgccgccgccgccgccacgggctatgaagcgcgagctcgccttcgcgctccagtccctgtccgagatctcggcctcccccggccgcacgcgctccggccgccccatctcttcccttccgaacccattggcatcagcatctcccaagaggcgcaagagatccgcccccctcggcctcgcctccgcagccgatctcatctccccgcccacgccgcctatcgacgccgagccgcctaaccagcccctccgtgacatcatccaaccgctccatggatctaatcctcccaccgcctctgaccaccgatccgattccaatgccgatcaagagctcatcccacaaacgatgctggaagccccccaaccatcgcaccttgagactgcaatagggtgtgcaacagcaacagaggtctcggcagtgaaagtgatcgccaacccgaatctgcccgcatcagaaaatagtgcagcagatgactccgcaatggaagtgattgcaaagccgaatgtggccacagaggatggtgcatcaaagttgaatgtggccatggaggatacagcatcgaagctgactgtggctgatactgcagcagtagaaccaactttgctggaaaccaccattgcagctggatcaaccgttgtagctggaaatgaacagtgtgataactcaaactcaagtggagcaagtctacagcagcaagccgttgacaatgtattgatgtccactgctatgctagctgaggacgctgccacacctgtggctgctgccgagctcaagcctgcaaggcgcttcactcgattgctgctcaagaatcatgagccagacaaagaagagtctgcagcttgtgaaagtcaggcaacaccagatggcagcaaggatacctcatttgattttgctttgctcctggagaagcctcagagaaggttcacaaggtcgtcgctcaagacaaaggttgagagcagtttggttggatctgacgatgcgctggacagtgcatctgatgcccgtccatcagtgaagaagatggagatgaaaatgtcaaagaaagttgcctgcctcacgaagcaccctggaaacattagagagctgctcaacacaggcctgcttgaggggatgccaaaggctgtgctaaaaggagtgattactggttgcaatatacgttgcttttgcctgtcctgtaatggctccaaggctgtttcatcttattactttgaacaacatgctggaagcaccaaaaaacaccctgccgattacatttacttagggaacggcaatagtttgcgagatgtgctgcgtgcatctgacagatctcccttggaggctctggaaaaaacgattcgttcctcaattgatccagtagttaaaaggagccacactaattgtttgaattgcaatgagcctgttcttccgtcatcacaaactgaaaacgtgctctgtcaagtttgcctagagtcaaagcaacctcaagaccctcttaccacatcatatacatgtaatggcagttcgagtctgactccaagttcgaaggaggctttgctaaagaacatatcatcaggcaagaagggcggtagtgctggcaaagtaacaaacaaggataacagactacacaaattggtctttaatgttttgcttgatggcacagaagtagcttactatgttgatgggcagagaaaggttgacgggtatattaaggatcaaagaatctactgtaatcactgcaacaaagtggttagcccatcagcatttgaagctcatgcgggtgagggatcaaggcgcaaaccgtatgataacatattcacatcaaacggagtatcattgcatgagctggcaatgaaaatatcaaaggatatggaactgtcagaacgtgagactgatgatctgtgcagagaatgtggtcagggtggagatattttcccatgcaaaatctgtccaaggtcatttcatccagcttgtgttggactctctaaagtcccctcagaatggtactgtgataattgtcgcaatcttgtgcaaaaagaaaaggctttagcagagaacaaaaatgctaaagctgctgggaggcaagctggagttgattccattgaacagataatgaagagagctatacgaattgtccccatctctgatgatcttggaggctgtgctctatgcaaaaagatttcaacaatgctgtgtttgatgagcgcactgtgatactctgtgaccaatgtgagaaagagtatcatgtaggatgcttgaagaatcaatggcaagtggaactaaaggaattgccagagggggagtggttctgttgcagtagttgctctgagacacgatcttcattagacaagataatctccgacggagctcaactgttggtggagccagatcttgaaatcataaagaagaaacatgtgacaagaggtttatgtatggacaccagtaaagatctcaaatggcaattactttctggtaaaaggactactgaagacggaagcatattgctctctgctgcagtgccaatttttcatcaatcttttgatccgatccgtgaagctctcactggtagagacctgattccagagatggttaacgggaggggacctaaggagggaatgcctggacaagattacagtggaatgtactgtgcactgttaactgtgggctctactgtggtgtcggcagcacttttgcgtgtgatgggaggtgatgtggccgagctgccactagttgctacaagccaggatgttcaggggctgggctactttcaagccttgttctcatgcatcgagaggatgctagtttcgctgaagatcaagcactttgtgcttccagctgcacacgaagctgaagggatctggatgaagaaatttggattctctaggaccactccggaagaggttagctgcgaagcctgctattaagttacgatgcaaaaatctaattgatgttggtgttttgcagctggaagcttatcttaatggggcacacctgactatattccatggaacatcatacctgtacaaggctgttccaatgtcatgatatatgggatgaaaaagatatgggtgttgcaatagctagcaggattttgtcttgtcttttctggagtcgctattgtgatgtacataaagagttgatgaggaaacaaagcattggcaagacaatgaaaggttggtatacaggagctggaagccaaggggaagaaaagagctacaagaggtctggattagttttctttctttgtttactcttgaatcgagtgtagtggcgctggggttggcaagtggtggcacacctagcaaattttggtgtaatactagatgcaatgcaattgaagcagttccgtgagtcctggtccgatagccatattttgcaattgaattttgatgtgtttgacaccgacaagtggcggggctcgtatgtgagtaatcggtggtccttttcttgctgtcctggttaaagttgcgatattgctgttttgaagtaac

SEQ ID NO: 43100 - DNA, 277 bp, Zea Mays
acgctatattgaaccggccgtggtgcctgagtttggcggggaggcttcttcagctgctgaacgaagagaacccattcctcctacgcagaaggctggagagccggctataatgccgaaggcagcttcggttgatctagctaagtcgaagactgagaaagataaggctaaaaaaccaaatattgaagaaacaaaagcgctagaaattttaagcccttcatcagaagtaacagtgccgaaggcacaaaaaagttctgctgcaactcccaagaggagaagg

SEQ ID NO: 43101 - DNA, 1371 bp, Zea Mays
cttccttcaacaagtccgcacgtacgaccagatgaaagcaaagctcggcgttttttaatggaacactagcctgaacgaaggaatagtacgtttgttcgtgtgtggttgcgttgccgagatcgatcgatagacagggtagcagctagcccagacacacacatattggtctgtggccatatggcggggctggggtttccgaggagcaaggaggcggcccgtagccacgcggtgtcgttcctcctcggcgcggcgctgcccactgccctcctcttcttcctcgcgtccgaccgcctcggcgacggcttgtccaccatctcgcacagctgggggaacgggccggcgggcgacgacgaagcaaaccagcatgccatgttcaagggcctagccgagctgctgccgagagttgccatggacgacaggacggtgatcatcacgtcggtgaacgaggcgtgggcgcggcccggctccctgctggacctctacctcgacagcttcaggaacggccaggacaccgcgcacctcctcggccacctcctcgtggtcgcgctcgacgcccgcggcttccgccgctgccaggccgtgcaccctcactgctacctcctcctcaacgtcacgtcgtccgtggacatgagctccgccaagccgttcatgagcacggactacctggagctcgtctggaccaagctcgtcttccagcagcgcgtgctggagctcggctacaacttccttttcacgcacttccccgtgtacgccgacatgagctgctcgtcggacgacttcaagccgtcgcgcgcgccgctggacaacccgctcaacacaggcctctactacatcaagtcgacgcaccggagcgtcgagatgatcaagtactggcgggcggccagggagaggttcccggggcagcacgaccaggccgtgttcgtcaacatcaggcacgagctcgtcaccaagctgcaggtcaggatcccagccgctggacacggtgtactatggagggatctgcgagtaccacgacgaccccgagaaggtctgcaccatccacgccgactgctgcgttgggctggacaccaaggtgcacgacctcaaggcctttgccgcggactggaagaactacaccagccaggcgccggaggagaggcagaaggctgctttcaagtggacctacccgactcggtgccgggattccataggttggcgtaagccttgactagcgcgcaatctcaagtgggtaacaggagccattgtataatatttttaaacatgacatacagacacccgagaatgtatgcacgcctgtccactgttaggactcctgcaacctttgctcaaaatctagtcgcttatgctcaaaatctagcaactagatacgat

SEQ ID NO: 43102 - DNA, 3506 bp, Zea Mays
aacagacccgcagtgcgttcgccccttacctttttcttgtccctttcacggtttcaccccgcgttcgctctctctcccgtggcgacgactgggcggccgccgcagccgccctagcccggtgcggctcttcgtcgggtccttcgccggcgacgggcacctaccaggatgaagacgaggatagtgtactccagggagtttctgctgtcgcttggcgagttggagcattgcaagaagctgccccctgactttgatgcagcgctgcttagtgagctgcaggagctgtcagcgggtgtgcttgagagaaacaagggctactacaacacatcccagggacggccagatgggtcggtgggatatacttactcttctcgtggtgggaacactggagggaggtgggatactcgctcatctggatcaagtgatcgggatggggaacctgatcgtgagtctcagacacaggcagggcgtggtgcaaaccagtacagacgcaattggcagaacacggagcatgatggcctacttggccgtggtggtttccctaggccatcaggatatactgggcagttgtcatcaaaggatcatggcaatgcgcctcagctaaacaggacatcagaacgctaccagccaccacgtccttacaaggctgctcctttttcacggaaagacattgactcgattaatgatgagacattcgggtcttctgaattatcaaatgaggatagagcagaagaagaaaggaagcggagggcatcttttgagttgatgagaaaagagcaacataaagcagtgctaggaaagaagagtggtcctgatatcctgaaggagaatcccagtgatgatatattttcaaagttacagacatctactgcaaaggcaaatgccaaaactaaaaacgagaagttagatggttctgtagtatcctcatatcaggaagataccactaaaccatcttcagttctactagctcctgcagccaggccgcttgtcccgccgggttttgcaaatgcattcgctgacaagaagcttcagtcacagtcgtctaacatcacacatgagccgaagctagaggatgaccagtcagcaacagggttcacatctgaaagtaaagagaagggagtttctggtaacgatgctactatgggtccaaagcacacgcttccacctggtagtgttacctcttcagctgaattggcttctagcgttctgaaagggagcgaggattgggatgctgatgtaatggataagtattctattggaaaagaaggcaaatctaaaaatattgatccagttaggaaggatgattcagtagcaatcttagaacagttctttggcaatgttttatcgaaaagcggcagcaacctaccaacttatgttgagaaccagccattgaaaactgatgatgacatgatcacttctgtgccagaatcatccaaatttgctcattggtttcttgatgaagacttgaaacctgcagaagacttatcttcaaagagcctgctctccatgattgtcaaaaatgaaaatccaggtctagaaaatttaaaccatactcctttatctgatgctgctgcccagaatttatccccaagagcacctattgataaacttgattctgcatcagagcttatctcatttacatcctctacgcctgccaatggagttcttgaacaatgcatccattctgatgttccagaggcagttcctattatgacatgtgaggatcttgagcagacgatgttagcacaggttagcaatagcagctcaactcagataaatgctacaaaggagcaactgactgttatggatgaaccagttgccatgcagaaagtaactgtagataatcatgcatcacaacatcttctttcattgttgcaaaaaggaacagataataagggagcaccttccctgggtttccagagagaatcaactgatgaacctctgagtgttgacacaaatttaatggcaaatggtggaatatctggaagtgatccggttaacagtgttgaaaatgttcctacttctgggaaggacttgacattggaagcgttattcggggctgcatttatgaatgagctccactcgaaagatgcaccagtttctattcgaggagccacaactggtggtcctactgagtttgcagagatgggtaaaactctgttgtcatctagccatgaaggatactaccctgttgaacagaccgtacacttcaacaatactaaagatgctgctgtccgtagagaaccaggtattgagcattcagcagtacctggtctaagtcaggggagtgctagttttgacaagaaaggaatggaaattcatctgcctgaagaagataatttgtttaccatgagtgattctctgcttggtcaaaattctgatattttggcatcagtaggatccagcagggttgaagggctattgcctgaaaaggcacttgataacctcagctataggtttcaaagtcttgtgcctggtgatgcagaacacattcaagtatatggtcctgatgcacttggatctcatcctcgtgattctcagaatatgtatcatcttctacagggtaggcctcctatgatagcacctcaccctatgatggatcacattgttaataggaaacagccagctccatttgatatggcacagtcgatacaccatgattctcaccgttctttcccatctaatgtgaatcatatgcaacataatcttcatgggccaggggtccctcacttggaccctgctggacatattatgcgacaacacatgtccatgcctggaagatttcctccagaaggcttgccaagaggtgtccctccatctcagcctgtgcatcacatggctggttatagacctgaaatgggtaatgtaaataatttccatatgcaccctcgccagcccaactatggagaatttggattgatgatgccaggtccagaggtgaggggcaatcatccagaggcgttcgaaaggttgatccagatggagatgtcagccagatcgaagcaacagcaggtgcaccaccctgcaatggccgctggccgtgtgcctagtgggatgtacgggcacgagcttgatgcgaaattgagatacagatgatggatgcctggatgcttcactccgtacagaggacctggaggtgtggtttgttgtatggttgtagcatgtacatctgaacgggtgatggaacggagtgggtctaagatctgtaggagcggaagtctaccgggaaaaggggttatggtgtgctgaatggaagacgtggcgtcgacgtcttagcagccacatgtgtaatgacgttttctgtctactgtttctgacgactatgcagtttccattttgtataagctctgttatgcaaaaggaaaaaaaaagaagaaaaaaaactgagtcagattaacagattggcgacagtgtccgcttgaccctatatcttcaacttgtttgaaaggaaatgaccacgcgtcatgccgagacgtttgtagctgatagcactgtttgagacgttttgc

SEQ ID NO: 43103 - DNA, 4904 bp, Zea Mays
ctcccgtccactcagcgtgcctgactgcccgtgcgcgccctcgctcagtcgctctcgcgcgcggcgacaactgagccaccgccgacggtccaactcttcgtcggaccctttgccggcgacgagcacccaccaggtaacccctcactctcttccctcgcatgctcttttgcaggggtttcatggtagcgtgacctgtctcggcctagaaaatgtatataaagaaggcaagatgttctgccctgggtacaatttggtgatatttttctccccatgtaagcttgttggcttattggccatctgtctggttcaggtcgtaatcgaagggtttaagagctacaaggaggagatatcaacagagcccttcagtcccaaagttaacgtagttgttggtgcaaatggatctggcaaatcaaatttctttcatgctatacgatttgtcctgagtgacatgtttcagaacctgcgaagtgaagataggggtgcccttctccatgaaggtgctggacactcggttgtatctgcttttgttgagatagtgtttgacaattcagacaatcgtattccagttgataaagaagaggtacgcttgcgcaggacaattgcttcaaagaaggatgaatactacttggatgggaagcatgtcagtaaaactgaagtcatgaatctgctagagagtgctggtttctctcgttctaatccatactacgttgtgcagcaaggaaagattgcatcccttaccttgatgaaagattctgaacgactggatcttctcaaagagattggtggtacacgtgtttatgaggatagacggaaggagagcttgaaaataatgaccgaaacagccaacaaaaggaagcagattgatcaagttgtccactacttagaggaaagactgagagaactcgatgaagagaaagaagaactaaagaagtaccagcagctggacaaacagagaagatcacttgagtatactatattggaccatgagcttaatgacgcaaggaatgaattagcttcgatggatgataaccgaagaaaaatttctgaaagtatgtcccttgcggacaatgaagtggtggatgtccgagagatgatcaagagttttgataaagaaataaaagtctcaactaaagggataaatgataccaaggcgcaaaaggaaggtgttgagaagaggcgtactgaagctctgaaggtagttgctaagattgaacttgatttgagagatataaaagataggattgtgaatgagaagcgagcaaaggatgaggcagcgagggatttgcagagtgtgaggagagagagtgaaaagtcaaagtctgaattggctgaaattagtaaggtgcatcaggccaaactaaaggaagaggaggatatatcgaagagcattatggatcgtgagaagcggctaagtatattgtaccaaaagcagggaagggcgacccaattcgcaaacaaagctgctagagataagtggcttcaaaaggaaattgaagatctcaagcctgtacttttatcaaataaaaagcaggaaggtttacttcaagaagaaatccagaagcttaaagatgaaatcaatgatttaactaactacatcgagtctcggaaaagcgaatcaagtaagttagaggaaacacttgcgaaaagacataatgactataacgatttgaggaagcagagagatgtgcttcaagaagaaaggaagtcatattggaaggaggaatctgaggtgacagctgaacttgataggctacaagaagatcttataaaggcacagaaaagcttggaccaagcaactcctggggatatcaggagaggcctgaattctgttagcagaatcattaaggaccatggtattactggtgtttttggtcctgtattagaactggttgattgtgaagagaagttctttacagctgttgaggtcactgctgcaaatagcttgttccatgtggttgtcgagaatgatgacatatcaacaaagatcattcaaatattaactagagaaaaaggtggaagggtgacatttataccattgaacagagtgaaagttccagatctcagctgtccgcaaagtcctgattttgttccattgttgaaaaaattgaaatatcgatctgaccatcgtcgtgctttcgaacaggtttttggcaggacagtcatatgccgagatctggaaactgcgactaaagttgcacgtagcaatggtctagattgcatcacacttgatggtgatcaggtagggaaaaaaggtgctatgacaggaggcttctatgattctagacgctcaaaactaaagtttgtgaagataataagggataacaagacagcaattgatagaaagacgggtcatctagagagtgtcgtaaacaagctaaaagatatagataagaaaattacagatttagttaccaaacagcagcaaatggatgctgaacgtgatcatgcgaagtcagagttggaacaatttaaggctgacattgccagggctatgaagcaaagggggtcacttgagaaagcccttgtcaagaaggaaaaatcacttaacaacatctgcaaccaaattgagcaagtccagtctagcattgcaatgaagaatgatgaaatgggcacagagcttattgatcagctaacttcagaagaaagagatctcctttcacgattgaatcctgaaattactgatttgaaggagagatttctaatgtgtaaaaacagtcggattgagatcgaagcacgaaaggaagaattggagaccaatttatcaacaaatcttatcaggcgtcagaaagagctagaagcgataatttcatctgcagattctagaaccttgcctttggaagctgaggcaaaggagcaagaactgaaaagttccaagagaaaccttgatgaactaacttcattattaaaggctaatgtcgatgccataaataatttcaccagaaagatggatgatctgaaaagaaaaagggatgatctgaaggctcgtgaagctattttagagcagactgtacaagatggtgccaaagacttagaacagttgatgaacagcaggaacacttatctagccaagcaagaagagtgcacgaagaagatccgagatttgggcttgttgcctgctgatgcttttgaagcgtacaagaggaaaaacaagaaacagctacataagatactctatgactgtaatgagcagttgaagcagtttagtcatgtgaaccaaaaggctcttgaccaatatgtgaacttcacagaacaacgcgaacaactgcagagaaggcgagctgaacttgatgccggtgatgtgaaaatcatggaactcatatcggttttagaccaaaggaaggatgaatccattgagcgcacatttaaaggggttgcaaggcacttccgtgaagtgttttctgagctggtgcaaggtggtcatggatatttggttatgatgaagaaaaaggatggggatgcagttgatgatgatgaggaggaggatggacctcgtgatccaggccctgatgggagaatagaaaagtatatcggtgtgaaagtcaaggtatcatttactggcaagggagaaactcagtctatgaaacaattgtcaggcggacagaagacggtggtcgcactaacactgattttcgctatccaacgatgtgacccagctccattttatctgttcgacgagatcgatgctgctctggatccacaataccgaacagcagttggaaatatgatccgccgtctagctgacatggctgacactcagttcattgcgaccacattccggccagagattgctaaagtggctgataagatatatgccgtgagacacaagaatagggtgagcaacatcgacgtggtgtccaaggaggaggccctggacttcatcgagcgtgatcagacgtacaatgctagctgaggctgctgctgctgctgctgctgctgtgtattgattgatctgcaggcagatgctaacgcagacaggatagttcttgttgtgttatggatattctggcctattgttgtagctgtgtatatgtgtgatgcagttaggtagctattggaccagcttgtttggcgcatcaacgttgtgaatgtagcagctaccaccttggtttggtaccagctttaattaagtttgggaagcgctgattagactagacgtacgttacatgttgccccatgattgttgtatggcacgcccagcccaaaatggcagtaatcagttcatttcgacaattaacgtaagtgtaagtgtacgagtagtggtattcaaatgttttttaactgtatttttctagtacatttattttttgtacccataaatcatgttacacgtagtttcattggagggagcataaacatgttcctttgacagaaagcctaataaggctataaaacaaaaattactacacgtagtttcagcaacgcaaacaaaaaaccccgtgcctgcctaatgaattggtcattaggcatgggcttctgcttctctataaggcgactacgagctcccagctgctcagtagctagggtacatgcccatccttcctatggtgctcctgcagccgaagttgacagagcctcgaggctttctgctgccatttgccttcgtggtggatttcgcaatcctcttttccttgcccgtgaacttatcactgtctcgagctctttctttcgaccgtgccacttttgtcattgacgagagagagctttaagtcagtaccaggtcatggcaaaatcaaatggaaactaaatagtatagcaggttatctgaacacaaacaactctatttggaagatctgtgaaactagagtcataataatctggggctgtaggcattaccttagctagcctctccttaagctttggccttgcagatactaccactcttgctggttgacggtccgcgtttt

SEQ ID NO: 43104 - DNA, 440 bp, Zea Mays
ctcacaggttacatgatccaggtgaaacgggataaactctttacaacaaagtttaacctgtttttttttactagctaacattgccatatgggtttaccttacatccacccttcaaaactaatttacatagttatattgcctcacgaggattaagttgcctgctatatcttctccagttatcacatctgtcagatgtttgtttccatgctccataggtaccttttagtccgttggtgttggggcagaataaaaggcgccattgagcatatgcaccgtttgttgcagatggttgaccagtcgctgcgctatttgaaattccatcggataggtacgatgcaactcctcaagcacctgatcctgatgacttaggaagcccatggtttctttaagttcttccctaacagtaacagcatacgagcgaatttcttcttgttgctgac

SEQ ID NO: 43105 - DNA, 419 bp, Zea Mays
cttcagttcgtgcctatgcaggcttttcctcagtacctagccacgcccactcctgcactaaccgctcttgtaccatccaagtttggagctccacgcctgcctcatcctacgactctgtggggttcttctgttaatttcactctaggagcttcctcttctacgggtgtttctggagcatatgtgctaccctttacggatggcagagagcagggagacgtggtgacaggtacggtctcagttaactcgtttgattcccatgctctttttgactctggcgctagtttttcatttgtttcggagaattttgtgtcgcgtgctggtatttccgtgcagaggatgggtcacccaattgtggttagttctgctaatggctccattagtagttgttcggtctacccgggttgttccgtcattcttgc

SEQ ID NO: 43106 - DNA, 2341 bp, Zea Mays
atgggcactctcccctacctcttacttgtcgtgctgtcctctctgtcgctcgtcccccgcgccgccgcgtactcggagtactcgtgcaacggtaccacgggcaacttcacggcggccagcgcgttcggcgccaacctggcccgcctcgtcgcggcgctgcccgccaacgcctcctcctctccgtcgctcttcgcctcggcggccgtcggcgcggctccggacacggcctacggcctcgcgctgtgccgcggcgacgtcacggacgccggggtctgctcggcgtgcctagccgacgcgttcggcaggctgcggcggctctgcggcgcggacagggacgccacgttctacgccgacctgtgcacggcgcggtactccggcggggacttcctggcgcggcccgacgacaactcccccgtgatcaacgcgctggacgtgaacgggtcgacgtactacgggtgggacgcccggaacgcgacgagccggaccctgttcctgtcgctggtgggcacgctgttcggggagatggccatgtacgccgcctacaactcctcggccgcgcgcatgttcgcgagcgccgccatgtacgtcaacccgcagctgcccacggtgtacgggttcgtgcagtgcacgccggacctgtcgcgggcgcagtgctgggactgcttccaggtgctccaggaccagaaccggcggtggtacgacggccgcgagggcggccgcatcctcggcgtccgctgcagcttccggtacgaggcgtaccatttcttcggcggcatgccggaggtcagaatcggcctcaagggcgacccatcttcaccagctgcggaaacggaaatccatgagaagaagagaaagctgcagctggaggcgcaatcccggaacagctctaccacagaggatgcgctgaagctgtggcggatcgaggagagcagctcggagttcacgctgtacgacttcgccgagctggcggccgccacgggcggtttctccgacgagaatctgctcggcagaggcggcttcggccccgtctacaaggggaagctgccggacggcgccgagatcgcggtgaagcggctggcggcgcattctggacagggcctggaggagttcaagaacgagatccagctgatcgccaagctgcagcacaccaacctggtgcggctcgtcggctgctgcgtccaggaggaggagaagctgctggtgtacgagtacatgcccaaccgcagcctcaactgcttcatcttcgaccagcagcgggggccgttgctggactgggagaaacggcgccgtatcatcgagggcgtcgcgcaggggctgctctacctgcacaagcactcgcgggtgcgcatcatccaccgcgacctcaaggctagcaacatcctgctggacaaggacctcaaccccaagatctccgacttcggcatggccaggatctttggatccaacatgacggaggccaacaccaacagggtcgtcgggacatatggctacatggctcctgagtatgcttcggagggcatcttctcggtgaagtcggacgtgtacagcttcggcgtgctgctgctagagatcgtcagcggcaagaggaacactggccaccacaactacggcgacttcgtcaacctgctcggatatgcatggcagctgtggagagacgggagggtgttcgagctgattgacccgacgctgggcgagcgcggcgacgtggcgaccatcgtgcggtgcgtcaaggtggcgctgctgtgcgtgcaggaaagcgccaccgaccggccgaccatggcggacgtcacggcgatgctggccaccgccggcgacgccgcgtccgccgggccgctcccggacccgaagcggccgccgcacttctccctcagggtggcgacgaccagcggcagcgacgacgactgtgggtcgcggacgcggttcaccacgtcgtgcagcaccaacgacctcaccatcacctccatccacgagggcaggtgatttaagcagcggaggcgtcttttgatggtcggtcgatcgagctttcgtgtgaatgagttgacaatccgttggccgttgtcggctgaagacgagacgagtagtgttatcttgcttgcatctgttgcttacttttgagaccgtgacaggtcacatgacgatcgtttacgtttggatggtgctccgctgtgcagattaatgctagcagtgtggaattattattattgattagggacaagtcgccgtgctgctttgatggcgaaaggttggtgatatgcatgggcggcagggttcattcaaaaggacgcctcctggtttcctgtagagggctctttcagttcagctggcctgcactgcactaaac

SEQ ID NO: 43107 - DNA, 2248 bp, Zea Mays
ctgctgcagcctgcaggcagccgcccgcgcggaggaggaggaggaggaggaggaaagcaacaagcgatcgtcatcagatctctcacacaagacgccggagtccaggcagatagatacacaccgcgccgcctgccgccatgtcgcctctctgctgtgactcggactggtcgtcggtcacctgagagcaagctaaacgacgacggacggacggagctagctgctggctgctgccagtcacgcctcctgctcatcgaccaagtgcgccaaataaaggatcggaggctgctagcttgttactaataagctgcggcggccggtccgcgtttttctttgcttccgatccgatggcggccgcctcgtccgcgcccttctttgggctcggcgacacgcagatgcagccacagcagggatccagctcctctctgcagcaaaactccacagctgctcctggcgccgcggcggtgccgccgccaaagaagaagaggaaccagccaggcaacccaaatcctgacgcggaggtgatcgcgctgtctccgcggacgctgctggcgacgaaccgcttcgtgtgcgaggtgtgcaacaaggggttccagcgggagcagaacctgcagctgcaccggcgcggccacaacctgccgtggaagctgaagcagaagaaccccagggaggcccgccgccgggtgtacctgtgcccggagccgacgtgcgtgcaccacgacccgtcccgggcgctgggcgacctcacggggatcaagaagcactactgccgcaagcacggcgagaagaagtggaagtgcgacaagtgcagcaagcgctacgccgtgcagtccgactggaaggcgcactccaagacctgcggcacccgcgagtaccgatgcgactgcggcaccctcttctccaggagggacagcttcatcacccaccgcgccttctgcgacgcgctggctcgtgagagcgcgcagatgccgcccctgggcgccggcctctacgtcggtcccggcagcatgagcctggggctctcccagatccatggctttgcagatcaagcccagtcctcttcagcagcagcagccccgcagtttgaccacatcatgccatcgtcttcgggctccagctccatgttccgttctcaggcgtcggcctcctcgccatcttacttcctcggcggcagcgcccctcctgccgccgcccaggatttctccgaggacggctcccaaggcagccagggccctctgctccacggcaaggcgcacttccacggcctgatgatgcagctccccgagcagcagcaccagccgggcagcagcaacgccgccgtcggcgccaacggtagcaacatcctgaaccttgggttcttctcagccggcaacagcggtggcacgtccggcagcctgcaggacgcgcgcattgccatccaagaccagttcaacctcagcggcagcggcagtggaagcgcagagcacggcaacaacgtgatggtggcgtccatcggaagccacctcggcagaggcttcccttccctgtacagctcgtctccgtcggccgggatggcccagaactcggcgacggcgctcctgatgaaggcggcccagatgggctcgacgacgtcgagcaccacccacaacaaccacaacggccctactacgactagcacgctgctccgtgctacgggcttcagcggcgccaccggcagcgggcagctggggactactggcggcagggccgccgcgggagaagaaggggcggcgtcccacgaggcacacttccatgagctcatcatgaactctctggccggcggcggcttctccggcaccgcagggttcggcggcggcgtggacgacggcaagctgagcaccagagacttcctcggcgtcggcaggggcgccgcgacgatggcgccgcccgggctccacatgggcgccctggacccggcccagcagatgaaatgaggagtatttaaatttggctggagatggcggcgcgcggtctcccccgatgtgaatgaaacgaagctcatgcatcatatgtggagctaggccgcgcgggccagagaccagaatctaagcaggatgctttggacgtttactgcttgttgcctcgtgctcttctggatatgccttttttttctcgctgcatgcatgcatgttgcatgatgatgcggctgtttatatttcatgttggttccttctctgggtcgcgctgctttcaaagctgaaagggggtcggcgggggtccgcgcagagaatgc

SEQ ID NO: 43108 - DNA, 1204 bp, Zea Mays
gggccgatacatgctaatacccgggggacagaaaaatccccacccgaggcgtggaagacacctcgtcgtcctcctcgcgtgcgagcgccgccaccgcgctcacatcagtgtcgcctggcgtcagcgcattgtgcccttcccatcgaactctgccgaccccacatcttcccatacgagtggtgtttctccaaggttcgctgttggccatatccacgtcgtcatcctcgatccagacgagtgtgtgtgccatatccacaggtcttcgacagatttagggtgaggataagtagcaggctgctcggcctacctcctcattggccagaagctctcctcagttctccactttgcccagcatgagcctcctcgcctcctcgttggtttcctatgaggccagattgagccaaattgaattgtgccaaggataagaaaaatggataagcgaactaggaatagaagagaagaggaggacgaggagttaatgctctttcttttccctgctctttatctaattactaatggagggagagagagaaaagagcaaggcatgcttctattctacctggcaaggagagacttaaagagattcttgaagggcatgggaagaaatgtcttgtcgcattccgtatggagcctcgtatattcaaagatatagtaacatttcttagagaagaacacatcctacatgacacaaggggtgttaccatggaagaaaaactaggaatgttccttttcatgttgtcctataatgctagttatgagtatttacaacatgaattcaaacatagcggtgaaactatccatcgacacatccaatcagttttccatgtaatcccactctcatgtatagatttgtgaagcccgccactggaatttcagttcattggaagattagcacggatgaacggttctttccttacttccaaaattgcattggagctattgatggaacacatgttccaattaccatttcggcagaaaagcaagccccctataggaatcgaaaaggcacactaagtcaaaatgtaatgttggtttgtgattttgacttgaacttcacttttatatcatctggttgggaggggttagctacagatgctagggttctaaggtctgtactacttgcaggattccatgttcccgagggaaatattatcttgtcgatggaggatatgttaacacaccatctgtcggcgtttcgagaccg

SEQ ID NO: 43109 - DNA, 227 bp, Zea Mays
cttggctcacgtttccgcttgtcgccggagcgacccggcgaacctcgacctttcttgtctttgcccatgatcagatcgaagaaaagaggaagttggaaaagaagcaacagatgatcagaggatgtgtgaagagaacaacggtacaagcaggctatttataagggctggaggcaactgttcatctcctaccacgctcactgaacagtcgcgagtattcaataagcaat

SEQ ID NO: 43110 - DNA, 2987 bp, Zea Mays
aataaaaagaaaaaggtgagagaactcgatgggcttggaactgtgttttggcccattaacatttttcccgcgtggcccacctcccctatgtgctcgcgcctgctgactaatggggccgcattgcagccactcgtcttgcgcgtgcacaactcactccctgacgctgacttaggggccccatccgtcggtcaaacaggcgcgcggaccgttccgtctcagtcgctggcgcgtgggacccactggttgggttctctcccaccccgtgtggcaccaaactcagaaccggggactccattgctcatgtggatcttgtcgagctgttgcccagggccatccatccccttcggccaggcatataagtactgatgccccatgcccctgacgcacttgaatgccacctcggtggtggatgccatcgtcgacattagggggggctattcgccgccgctgacgactctgttctacgtcgtcgttctggtcccggcaggtggtgtgcgagcttcgtcagtgcgtgttcgtggtgtgcattgtcgtattgagtggataacttcatcgggggagggtgaattgctcgtcgtcgcaccttgggtgccacggatacaccaagcgcaatgtgtggggcttatcgttgctggaaccacggtgagtaatccctcaaaaatgtcatactgttaccctctacctattaccgccttcaaatcggagtttgggcatagcaatcgaagtttgggtggccgtggccatggcctccgccgtgggtctcgggcggcggcaccgggctcacggtcgttgggggatgcttagcgcacgaccgtgggatcctcgatggagggtcttgattagatcggtgtatgggttagatgtgggggttggtgtgtcatcgtggcccttggattccgtgatggacaattgcgatttgatcacatcgtaccaattcgattgtgtgatcgggaccatcgatctatgtgtgcacgatgaagattagatcgtgccgtgggaaatgatggaccatcggatctggatcaaatgggtccggtgggatcatggggatttcagatctggggcgctgatctcagaatcaagggtcgtgggcgcgtatcggtacattacatgacttgatctaatgttggccatcagatcttaatcctacgacggtcagtgtgtaccggtttggactatataacaagctaattgcggtcgttaacaatagatccatcggctgatctcatcttgtatcccttcggtcgatcccgttttgcagtttagccctcgaggtttcttgaaaccaacccgccatcccagcctgtataaagatcagtgccactaagtcctaaaatttgtagtttagcccctcgctttgaataaaaatacgccgcagtccttcagcacttagaaattatgaaaatgatttttagtacaaaaataattctagaaacttgtttaattcattttaactcctttttgatccattccagatgcattaaattcatattaatattgtttatcatttggtaaccttgtttagtcatgaagcatagattaaaaatatgcacttaatttattatatattaaacacctaaatcttcggaaaatcataactctttaaccgtaacttcgattctagtagttctcgaacctaggatctagttacggtacatagaatattattatgcagtttgttcttatatttggtgtgatgttaattttgcctataccatgtttgtttgtatggctacgattagcagtgaggtaacgagtcatttgaagagcaagttggtacctgggaatcttgagtcttaggcaagttgttcccttgatcacttttctttacctaatattgttatggttaatcactgtgacttgctcaggttaatttgaagggacccaataggtttccctagcattgtttatcccctaccttgcaaacaaaagcactattgggtagttttgctatggctctacttggttttgggaaattaatgttatattatgatcatgttccagttatactgttgttttaattattgttcatgacaagatcattgtgttaattggaacatggagcgaccatccgggaaaacagtgctacaacaagggtggtatgggacacccttggctgactaattaggaaagctagtggaaaactaccttacctgaaaggggcaagggcggtagaggagctgcgtatagggaggttctcgggtcgatcatgctgcgatggcttttcggacgagggatttctatattgcccttctctaaatcgtagcgggttttcagaagctagtgaaactttgtaaaggcctcatagtggtaccttgcctcgtctccttggtagagatgaatgggaagtcacgctcccttggcaaatgggtaacaagacttgtgggtaaagatgtgcaatctctgtagagtgtaaaactggtatatcagccgtgctcacggttgtgagcagcttggaccctcacatgagtaatttatggaactaaacttaatttatcatatgcattacattgtgggtgttgttattaatttgatctcttatttatttggattggtatctacttataattagtaactgctaataaaattttgaccaacattaaaagcaatgcttagctttaaccatctcttttggtaagccttacacttcacatgagctcccacctttggtgagttcatgcacattatttcccacaaattgttgagtgatgaacgtatgtgagctcacccttgttgtactcacatccccctaggtcaagaacaggtaccacgagatgaggcgcatgaaggatgctatggtgagttcatgagatgtctaggccgtcgtctcccagtcaactttgggttgctggatctttgtcttcatatgatgtaaatatttaactattttgtacagaactctattatatattaatgatgtgacatttgtttctgtaccatgagtcatcatatgtgtgagacttgatcccagcacacatttgacacac

SEQ ID NO: 43111 - DNA, 920 bp, Zea Mays
tgctatctcattcagtcctgagttctgatcctctccgtctctccctcctccctctccatccaaagtgtagtgtagacagtaacccacatctcgtttcctcgccgcggccacggcgccgactgagcgaggtcttcatctgcgcttcaccagcgacgattatccactaggtaggggatcatccgatcatgtcgagcgcggcggtgaacgggctgtccggcgccggcggcggcatcatcgcgcagatcatcacctaccctctccaaaccgtgaacacccggcagcagacggagaggtcaacgaagaagaggaaggccaggagcggcgccagcgccaccccagcctccaccatgtaccagatgctccagtgactgcagctgattcaaaccgaaggatggagtgggttgtacagcggcctcaagccctctctcatcggcactgccgcgtcgcagggaatctattactacttctaccagatcctcaagaacaaggtggaagatatagcggttgctcgtagcaagaagggccttggggatggtactgtcgggatgctttcttggcttggtattgcagctgttgctgggtcaatcaatgttcttctaaccaatccaatatgggttcttgtgacacgtatgcagaaatgtctagggcgaattcgttggaggttgcagttctgaaggataggctggttaaattggagtcagaaaaagctcgtccatatggtactcttcaagcgacagatccaggaggtttaccatgagtctggtgtaagaggattttggaaagggcttattccaacattaatcatggtatgtaatccatcgattcagttcatgatctatgaaacattggcaaagcgtctgcagtcaaagcgttctggaaagcagctaccaaaaaggcacctcacagctatgggttttttt

SEQ ID NO: 43112 - DNA, 2228 bp, Zea Mays
acatcatcgccccccttccccgcggccccaccaaatagagaggcccagacaccgaggggaaaaaggagagagagtacacaggtgacagccgctgcaccgagggcacagagggacagctagacagggactgccagcggcgtaggcggtgtgggggatggagcgcgagatggcggacgcgcccgccgcggcgatccccgccgccgagccgctcgcggcggtggcggaggaaggggagggggaggcggccgccgaggcagtggggtccaccctcaccatggagcgcgtcgccgccgcgaagaagttcatcgagagccactaccgctcgcagatgaagaacatccaagagcgcaaggagaggcgctttagattggagagacagctagcttcttctcaagttcccaaggaacaacaaatcaatttaatgaaagatcttgagaggaaggaaactgaatacatgcgacttaaaaggcacaaaatttgtgttgatgattttgagctgctcactattattgggagaggtgcttttggagaggttcgattgtgtcgagagaggacctcaggcaacatttatgcaatgaaaaaactcaagaagtctgatatggttgtcaggggccaagtggaacatgttagagctgaaagaaacttgttggccgaagttgctagtcatcactgcattgtgaagctttactattctttccaagacactgagtatctttaccttattatggagtacctccctggtggtgatatcatgacccttctcatgagagaggataccttgactgaacatgtggcacgattctacgttgctgagactattcttgctatcgaatccatccataaacataactacatccacagagatattaagcctgataatttgcttctagataagaatggtcacatgaagctgtcagattttgggctgtgtaagccaattgattgttcaaagctctcaactttgaatgaagatgaacccatgagtgatgacaacttgagggaatcaatggatattgatagttctttgtctgatacagcaaatggtagaagatggagaagtcaacacgaacagcttcagcactggcagatgaacaggagaaaactggcattctcaactgttggaacaccggattatattgctccagaggttcttctaaagaagggatatggaatggaatgcgattggtggtctctgggcgcgatcatgtatgagatgctagttgggtatccaccattttatgctgatgatccaataactacatgcagaaagattgtgcactggagaaaccatttgaagtttcctgaggatgcaaagttgtcaaatgaagcaagagatctcattagccgattattatgtgatgttgaccacaggatcggcagtgcaggggcagatcaaataaaggcacatccttggttccgaggagttgcatgggataaactttatgaaatggaagcagcatttaagcctcaagtaaatgatgaactggacacacagaatttcatgaaattcgaggaactcatgaatcttgtttctccaacttcattattctctgtggcagttggaaaatcctccagccaaaacaggctctggaccttcaaggaagaagtacaaagcagtagagcactagagcgcactagtattactgctgtaagtgctgtttgtcctcggcaaatttctgaactaaatcagcatgcaaacgcctggatgatgtggctccagctggataacctgctcatttttagccaggtttctgctttctcaatcgtgggcaagcggtttgtagaaatccaccagagtttctagttgtaaaatagtattccacggactttaacaaaggtcccatgtactaagggctcatcatcagacaccgggacagtttttttctggagaaattgcaccttgcggctggctgcccaggttggtagagcaaattgcggccttctcttgtggcagttcccggtccgctaacatttgatcagggaagggaaataagatggtgttgttgcggcaggaattctcatgggggggagttagtgttgttgtttgatatgtatcaggaattttcacatttgtagtagggtttctgttagcatattttagaaacatcctttttgcagagttgctatttctcattgatgtatggaaaacaacataatttggagatcgaagctcgatctaacttttatgctgcatatctgatctagattacatcaaacatgattcatcc

SEQ ID NO: 43113 - DNA, 1192 bp, Zea Mays
cttatataagaagaccgagcccaccggcacttagcaccattcacaaaagaacaaaattataacatgaaagacaacagggaataaaactctgagtacacaattactcagtaagacttatccgactaaagaaaagactctcaagggtatgctggtttgttgggaatcaaggtgaagcttatcaaatttcaaggactcatttttgcagaaaagcttactagtagtggatccttatgccaaacttttacttcttaagttaaatacttttcctgaatctagatttacttaatctagagcattcacttgtcctacactagcttcattttagcatctttagtttcacttgttatctacgatgagggtcgaagatcaagtattcatatctgagaagtatggcgatccgaattgattaatacccagccggggatctccaaccacacgacatatgtagcacttaacccttacatatgtcaactcacacccgattttctcaagaccagaacggatccctgccaatcgagagctcagtacctcaccatccagcctcttaccaggtggatacacgatactctcgccatctctccattcccattgcagactggcctttctggtattggtccagagggataaacacaaaaagaacaacgggttctcaccggggttcgatgaagttgtgaccgggtctacatagatcgaagtggagctcgctgtagcatatcatcgagcatgctgagggcgcgacccagaggggtttccatggttactcctgctacaaggccagggcaagggaacacacaccggaaagaggacacaagaggagaagcagcaaaggtcgccgaccaccaatgacgaagggagcgactgtggacggaccttggtgttcttgtgcccaccaccgtgcgaccatggctgaacaaggacgaccggtgtgaaggggatgaggaactttggctccatcgccatggacgagctagggctaggcgacctcagtagggaattggacgccaaccaaggagatgaggatgaacttgctaggaaccgagcgccataggaagggaggcgaggtcaccgacgtactgcaggaaggggaggcaccatccccgggagagggtccgcgtagggagggatctagggggagccgccatgggagggagcaagggctggtcagtagagaatgagggagaggctggtgtcg

SEQ ID NO: 43114 - DNA, 3974 bp, Zea Mays
atggcccacagaggcacaaccccaattatgggtcatgtcgtgccagcacatgggacgagccagcggcccacgacacgacacacaattacttatagttgctcgaagtcattccacacatcagaggtggttttcctacctcgcttgttacctgtgcccgagctgctgcctacaacagttgggcttgcactcggcgttggcgtgaatgaagaactgccacaggcgccacctccatttccttgcgccattgctgacaccgaggaagctcgcgggctcgcgaccgaacaggaggtggactgtccgtccgcgccgtggctgactagccgagaaggaaatggaacgtggccgactaaccgaaaatgcgtcgtggccgcccgcaccgggaagagccgtcgccgcaccgggaacgggagaggaaagccgactagggaggggactggacgcggggaactggaatgtgagaacgggaggggaggggaggagattactggccgcctgggaggtagaaggaccgatggacgatggcgtgggctaagcatcaagcgacccgacgctcgccgaatcaacagcagcgccagcgaaaatcggaccctagcgacgctctccgaccaaaccaagcagcggcgcggccacttcagcgctcaggcagtggctcggccacatccaggagagggccagtggggaaggcgcggcgccaaatcgaggaggggtcgccgccagggcggctggacggcgccggctcgccggctccccgtggccaggcggccagccgcctccgtagccgctcctgacatctctgcgttgctgcaacagcatacggctgcatggcgcacagcggcacaagtacagccgcacaggcacacgaaacctcatttgccacaccaaagctcaaccaggatgttcccgtgggagatggacattgatggagagtcgagcaaaactctgggacagatggaagacctgactcagagctctgccacttatacgtcacagatgttgctttccaaccttgcttcttctgggatcaaagaaaaaattccattggagaatgagagttgtggcatttgtagagacatcgtcatcgacagaggagttttggattgttgctcacactggttttgctatacatgtattgacaactgggccgccatcacaaatcggtgccccctttgcaaaagtgaattccaacacataacatgcactccagtatatggtacgattggagctactgacgaagatgaatactctttaaccagctgtgatgatgattggtatgggcaagaggaaagcagcacactttccttcccgtcatactatattgatgcagaagccgtagtttgtttggatgatggtgattgcaagattcggaatggacttgtggcagctgaggatgattcaactttagatacatctattgcttgtgattcctgtgataaatggtaccatgctatttgtgtggcgttcaatgcaacaatggcatctgacagttcatggctctgcccaagatgcaagtttaacgaagtggaatatgaggcaaatgtaatcttgaagcaaaaccttggtgaggactgtgtgattggttctgataggacatgtaccaacgcatcattttctgggagggtgtcagtatctgttgctgatgagggagaaactgcccttgttgtatcaatggtgggtgcacattctgaaactaggggtggtctatcagaagcttcactaggacttgagacagcacatgaaacatttaactgcagtccatacccaagccattcaaaagatgtccttgttgcagatgctagttccttgaggaacacagatattgtcagtagatcccagaataaaccttctgaaataaatgttgtccacactctttgttctgagcctacagaaacatcactacaattttcaccaatacgtgagccagcaacaaccatatttagctcagagcaggataacatgtcaactgaacggttggaagtgccaaagcttgtgtcatcttgtccagtagtagataacagcaaggaggctaaaagtactggagaggagaatgcagcgcagcaaagcaataatgaattatcttctgtaatcaaatctccacaacctgcctcatcagatgcagttcatcagatgaaaactgcacaaaacctacagttgccacttaggcatgatgagcatagtagcgatgacaggaaagaagaacacattgaatctggaaatgaaatgatccatcctgcgaagaaagcaaaactggaagtgcaagaggacattaatgtaatcggaaactttgatttttcttcaatacatagtcatactactagtcctgcaaaagctattaccgacgacattatgtcagagtctgttgcacaacagaaatccattcctgatataatgagcattgttgacggtgaggtttacagaagggatcctggtagagagctggctaaacctgtaggaagaagagcaggagataagcctggtcctagagtgaaaaagatcttccgaaaggaagaaggaaaagaatcatctgccttggttcaaaagctacagaaagagattaaggaagtagttagagatacaggcacaaatatacttgagaaggatgaatcttttgatgaaaaactgttgactgcgttccgggcagctatagggaaatcagtggatggaccagccaaaagtactaacaccaatcaattaataagaacaaggaggtcattgcttcagaagggcaagaaacgtgagaatttgaccaaaaagttgtatggaacatctacaggaagaagaagaagcgattggcatcgtgattgggaagttgaattctggaaataccgttgctccccaggaataaatcctgaaaagattgagacattgcaatcagtacttcagctactaaagaaatcctctgaaatggacaaggaaagtgctaaggggaaaagggaagagaacaacaacagttccattttgtctaggttgtatttagctgatgcatcagttgttcccaggaaggatgatattaggcctctctctgcccttgcaggatgtgcgccattagaaaaaagtagccaaattaaagctagttgtaacaaatcgtctagcatacctgcaggaggcaacgagacaatgaaaatcagttcacccagcagcactgggaaagcatcaagctattcaattctgaataaagaggcacctagcagaagagaaaatagaaatagccagccctcccaggacaagagaaaccaatcctctggtgatatcaagcaggacaaaagaaaatgggctcttgagatcctggcaagaaaaaatgccagttctattacaaataaagatcaaactggaggcaatgatgctcttaagggaaacttccctctactggcacaacttccggttgatatgaggccgcagctggcagctggcagcaacaaaaaggttccggtatcagttagacaggcacaatttcaccgaattgctgagcattatttgcagaaagcaaatttggatgtcattcgcagatgtgcagatactgaattggccattgctgatgctgtcaatgtagaaaagggtatttatgaaaggtcaaatagcaaatcaatttatgtgaatctttgctctcaggctactcgccagcatgccaaggcaaaatctgataatgacacttcaactctaaccaaaaggactgaatcaggcagtgatcagatatcacaggaagctacatctgagggtaccaatgttagtggcagtgatatggaagaggatctaaacagagcagctatctccaatcaaaagaatgaactagaggatgatactgccccagaacatattgtgcacaaggatactgttagcttcaacagtgcagaagacgcactaaggaaagcgggcctttttgattcccctcctaacagtcctgagagagggaacacggcggttgaaggtaactctgaatccacggcagtttctaattgtcctaagttttcacaaaagaa

SEQ ID NO: 43115 - DNA, 2184 bp, Zea Mays
gtctggatcctcctatccaattccgtctcgcgttcctctcgtcggctcgtcgctctccgagccgcgaaatggcgcctcctacctctgcatcggcgcggccgctatccctccccctcaccgtccctctctcctgtcaccgctcccacttgctccccgcgcccaacgctcgcctcctcacccggcgccgcgtcgcgctcgcgccgacccggcctggcgccacgctcctatccagcctcagtgacgcccgggaggaggaggaggatgaaagtggtttctatgaggaggatgagcaacaggaattcgaggatgaggaggaacaggggtacgacggggagaacgaggagctggtcgaggtgggatacgtgtcaggcgcgcacggggtgcgcggcgacgtcctcgtcacgccacgcaccgactttccggagctccgccttgccacgccggggacgagatggctgagggctcgagctgctggcaagcagcaggtcagggaattcgagcttgttcggggaagggcgcacacggggaagaagagttggatcgtcagctttgatggcgtcaacaacctggacgaggctaggcaaatagttggttcagctgtacttgtgaaagctcgagatagaccagaaattgaggatgatgaattctattcacttgaccttgttggaatgagagttattgtcaaggatacaggcaagctcgtaggaacagttggtcaggttttcaatttcggaggtggagatcttctacaggtgataatgggctcttctgaggagaaatgcggattacacctccgaaggggttacttgagctcaattctcgttctgacaagagatcgaagaaagaaaggcgtgcgatggttaggagtggaaggacaggaaaaggtttcaacgtcgtgtaattgcaggaaagaaggtactctccgaaatggaccaagtccatgttctggaaggtttggtatcaggggacaaggtccaaaaggcatcacttgcagagcagattgggagcattgactttcaattgttccgacatgcagtacattgtgttagcaagcagattgagagctcttcaatgaatttgctcgctaactcttcactgtcaaggaaaaaagtgatcaaaataccatacaagactctcatcaaccttggggacaaagctgaacatgcattcagtactgaatttaaaaatggacttgacattcttttgaagtccaaagcagctattgtgcttgttagaaacggctctgactctgatactgagtttctgagtttgctcaattcttttagtgaattaatgaaggttgtagaaaataaagtttctccccctttaattgtcattgccccagctggtcatgtggagtcagttcggaaatgcctggtagagaatgactattttggttttgacactcaaaaggtgtgggtgctggaagaggtggagcttccagttgtcagtatatgctcggagggaaacagaaaaaaagttctgatgaagtctccctgggagataataaaaaagccaacaggttctggagcaatcttcagcttactgttatcaaacaaaattttggaaaccctcaatgaaatgggtgtacagtatacacagatctgcagctcatccaacaaaccaatcatcgggcatcctttgctctttggggctgtcgcttcccgcggggctgatgttggcatccaggtctccaagaccggtgaaacattagacgatttcgacgtgatcctttccatcgaccagctgaacaagatgtgccgagatgtcacccagatcaggttctccgctcgctccgaacagaacgtgcacgtcgagcatgtcgacgggcagtgggtcgccgtccagccggaggtggcaaattcccatcgcctgcatgccgaggttacgagtgtcttagactcttgcgctcctgataagctgtgtgtcatggagattgttgagcaataaaagtttcttgcctgtgtactgtacataatcacaagtacttgatagatgcgtgaggtttttcttctgctattgttttgctatgaatttttaggggagcatctacgaaggggaataccagccacccactgccaattctactggtcccagaaggattaaaaacttgttagaggataaggtcgtcctctactcaatccaacagcgatctctaaacagtcctatagatttagagtacac

SEQ ID NO: 43116 - DNA, 1553 bp, Zea Mays
ggaaacggactaccagcgctgagccgttccgtttcttttcaatcttggcgttttgtctccattcaatagggaaagggatgtttcgcttgaggctttcctttgtgcctgtgtcttctctgtagctttcaagagaataaaaatttggagcttctctcgcaccagcgtcctttccttcttccttggtttcatgctgacaactagggctgatcttcaggacggcctgttcttggttcggttcctgagagcgattgatagcgccagacggagtttcttctttaggagtcgtgcactatgggtaattgctggtttaaggggaatccatactttaacagggtttcttccaatgcaaccaaagcagaatctcccaaaattcagagcccctcggagagaactgaaaaggaggattgccagctaccatccaacccgaaagaggtggaggcgctgagaaaggatacagctcgcaatcctttgatagcgttcacatttgaggagctcaagagaatgacaaaaaatttcaggcaagattcgttactaggcggtggtggatttggcagagtctacaaaggttttatcaccaaggatctccgcgaagggttagagatagaagagcccacaagagttgccgttaaggtccatgatggtgacaatagcttccagggccatagggagtggctggctgaggttatatttcttggacagctctctcacccgaatttagtgaagttgatcggctattgttgtgaagatgaccacagggtccttgtttacgagttcatgcctctaggaagtgtggagtctcatttgttttcaagtaattcttatcctattcttgacagattgttgattggttttatatagtttcttgtcattttgtcataacactgactatggtatatccacacatggcattcatgcaaattctcatactcataactgaaaagaatcgattgaaaacgagcataaacctgtccctcactcctatcctgaaccagtataatttaacttgcttcgagtggcagcattataaatttctgcatgacctatgtggtcagttctgcattattatttgtccatttgagatccaccagtgtatattatcagatcagtggagtatttgttttcataatgcaggggttatggtgccacttacgtggtcgatcagaatgaaaattgcgctcggtgctgcgaaaggacttgcttttctgcatgaagctgagaagcccgtcatctatcgggacttcaagacatcaaatatattactagatgaggaatataatgcaaaactatctgactttgggcttgcaaaagatggaccagttggcgataagtcccatgtttcaactcgtattatgggtacctacggttatgctgcaccagagtacattatgacaggggcggacctacaagaaaatgagagtgtgggcatacttgtaaggatgggcacaaaaatactagagcagggacatctaagcgatgctgagcagaggactttatggtgaaaatttaggctctactacttctaaaggagaaatgagcgggggcctgggccctca

SEQ ID NO: 43117 - DNA, 982 bp, Zea Mays
gttcttttcagcaagcaaatgagtttctgacaatgcctttgccatggttagggtggaagaattatgaagcaagtatcggaggacaaagagccttgaaactcattcgtcagcatggttgcatagaagaagttctgcaaaatctgaaccagacgagattcagtgttccagaagactggccttaccaggaagttcggacattgtttaaggaacctaatgtttgtgcaggaattccagatttcacgtggacctcaccagatccagagggccttatggatttcttgtcaacagaaaacagtttcagtcctgatagagtaacaaaggcagtagaaaagataaaggttgctagggataggtattccccaggcagaatgaagcatttaacaccagttgctagcttacgaggatctcatactgagaaggaaccccagtgcatactaggttctccaggacaaactctgaaggtcatgtcatctccacaagtatgcaagagtccaagctctggtttcagatatggtagctcaaagccatttatgctgggcagacagtcaggatttcatggaatgccttatgctctctcttttatctaaaatctgtagctgctctggtttatgagaaggttgaccgaagctgtagctgcggctacatttttagatgatggaaaccgatatccggctttcacctcactgggaggatatggccaagtagctgtagctgcagctacatgaaaggatgctcacttataatatgttaatctcgtgctactattgtaatctttccatttctattgtaacgtagttaatcagctactgcagttcatcgttgacatctaatgctggttgctgctacaccggttgaccttaccttttgtcaatatattctgagttttcgggatggtgtttttaaacctatgctgagagggtaaactggcagaaatgtcctcgactttcatgtgatggcattgtatgcatcgtgtgcttaccac

SEQ ID NO: 43118 - DNA, 747 bp, Zea Mays
agccgtggcctcacctgaaggctgagttgctcctgccgcgtgtctcccctgcatccggcggtgcccgcgaacgtgcgcgttgcatccgggacggggagccactgcagccacgcgccagccgtggggaacaccacagggaaaaagagtggtgagatcagcacaactgatatagcgtgactatgcccccaaggtgtttgctcaaatgccagtaagtctgcttgataggttctttgatacgccgtgtaactggacagtgcagtacgtgcccagtctcaggatgagaataaaaaaaggaggaatcaagttcatccttgaacattgtccgagctgctattctcaggttggtggtcttcttctccaccgaaggtcctaaagtcaaaaataccttcggcaaaatgatacaatagcttgtcgaagctaccttcagcctcggctcagctcctcaagccgaagctcaatagctttggcccagacctagcaaagaaggaaaagaactagatagactttattagttttaattacttgtaaacaagtgtttgggggcatggatgtaatcttatccgggctacgtcccatgcctataaatagatgaacagtgccctgtactgttaaggctggattgcaatcgtgctcgagtcattctcgctctttcaccttccggcaagccgaatgtaccattgtaatatgaatattattaaagtttattcatgtttaatgaagataaataaatcataaatatatgacgga

SEQ ID NO: 43119 - DNA, 3166 bp, Zea Mays
acttcagttgcggatgcggccaccttctcccctttcctcagaccccaggccccagcccggcaagcagacatgggcaaccgtgcgtcgcgccaccaccgccaagccgccgagcagcaaccggcgacgccgaccctgccgaagccccagccccagatccagccgccgcctccgcctccgccgacgcagacgcagcagtaccagcaggcgccgccgcagtcgcagcagaagccgaagccggcggcggacgtgggggcggtggggcgcgtgctggggcggcccatggaggacgtgcgcgcgacctacactttcggccgcgagctcgggcggggccagttcggggtcacctacctcgtcacgcactcggagaccgggcagcgcttcgcctgcaagtccatcgccacgcggaagctcgtccaccgcgacgacattgaggacgtgcgccgggaggtgcagatcatgcaccacctcacgggccaccgcaacatcgtcgagctccggggagcatacgaggacaggcactcggtcaaccttgttatggagctctgcgagggcggggagctcttcgaccgcatcatagccaagggccactacaccgagcgagccgccgcctcgctctgccgcgagatcgtcgccgtcgtccacagctgccactccatgggggtcttccatcgggatctcaagcccgagaacttcctgttcctcaataacaaggaggactccccgctcaaggccacggacttcggtctctccgtcttcttcaagcacggggagacgtttaaggatcttgtgggaagtgcatattatgttgctcctgaggtactgaaacggaaatatggggcagaggctgacatatggagtgctggggtcattctttacatccttctgtctggtgttcctcctttttgggcagagaatgaggatggcatatttgatgctgtcttgcgcggtcacatcgatttctcttctgacccttggccttcaatatccaatggtgcaaaggatttggttaagaagatgctgcgacaagacccaaaagaacgcctgactgctgctgaaattttgagtaagacaactgtgcttctattgctttgcatgctagttgtggaatcacattttatagtattctcatgtgtagagaataaacactcatgtagtaaatttgtatcaaatgggagcaatcattcctcctaatttattccaaattttgtgccttttgatgatctctccagttgaaaatacatgttgttttagaattcctcatggtcaaacttcttttaactttgaccgttaatatataaagatgtgagctagatgtcattaggtttaccagggaaagtccttcaaagtatttatcatctttattcgaaatttcatattttatagaaattgtagaccaaagtttcacctaaatgacatgtagtttgcatcagagagtacaagagtgctaaagcactataacagttacataattccagaaagaaactgctgatttctctatctttatttcaatacatgtctgctttctctttctctctctttctaaaaaaggaacctatcttctttccacatgaactgagtattcattcacaaatgttgtttatcagtctaatattgtgagcatacagaccacccatggattagagaggatggagaggccccagataagccacttgacattactgtcattggtagaatgaaacagttcagggcaatgaacaagctcaagaaagttgcattgaaggttgtggctgagaacttatcagatgaagagattatgggcctaaaagaaatgttcagatccctggatacagataacagtgggacaattactcttgaagagctaagatctggtttaccaaaacttggtacaaaaatttctgaatcagaaattaaacaattgatggaggcggctgatgttgatggaaatggtaccattgattatgcggagtttatatcagccacaatgcatttgaatagattggagaaggaagaccacatactcaaagcttttgaatatttcgataaggatcacagcggatacataaccgtagatgagttggaagaagctttgaagaagtatgatatgggagatgacaaaactataaaagaaatcattgctgaagtagatacagatcatgatggaagaattaattaccaggagtttgttgccatgatgaggaacaacagccctgagattgttccaaatcggaggcgcatgttctaactgtcatggacaatcacattgaatactttcaagaacaatctgcccttagacataatctttgtcccattttctttttggaacagccgttaagaagactccttaatttgagatccatgtctctgctgcccggacctgtttgtcccaaaatagggtggtgttatagtgattcgtacttgatgctttgagcttcatggactcttgcgtggcaatgtttatccccattgtacgtctggttgttctgctgcttcgatctgaggctttctttaggtgtaaaaaagaatcgcggatacatatttcattcctatagatagggtagatagggatgtaatcggatcgatatcactgaaaccatatttgttttcatatttttattcggattcgaattcgaatacggatagcttcagatacgaatacgaatacggatgttctcggatacaaatacggatagctatgtgtcgaatacggaactagtcggacacggatattgtcggtaacgatttttttgtcggatatcgtgtaagacatcattccacacatatcattgttgtaatcatgtatccactccttgagtctaaacattttttttgtattatatgtgtcggggaccataattagggataccctcaagactcctaaatctcagctggtaacccccatcagcacaaagctgcaaaggcctgatgggtgcgactaagtcagggatcggtccattcgagggacgcgatcacgccttgcccgagcccagcctcgggcaagggcagccgaccccggaggatctacgtctagcccgaggaccccctccagcaacggacacaccttcggctcgcccgaggcccagtcttcaccaagaagcaaccttggccaaatcgccacgccaactgaaagtgcattcatcccttttgtgagtttggtgatttggataacaacacatttaaaggtcta

SEQ ID NO: 43120 - DNA, 6417 bp, Zea Mays
ttccgccaccaccaccacacctcgtccagcggcggtcggcaaaccctagaaccttagacccatccgccatactgcggttactgggcgcgggctagggccgggcctccgtaatcgcagcttgcggcgatgccgcttttcatctccgacgaggagctccgtctcctcggcggcgacacggctgccgttgccgagcgggctgatgctgccatccgtgagctccggcggcaggtggataccgtacgcgccgaggcggatgccgctgcgatcgctgccgagcagacctgcgccctcctcgagcaacggtacgcctccctctccgcggagttcgatcgctccaaggccgaggctgccgagctcaccgcctctgccgagcgccgcgctgccgagcttgcctcctctcaggcggagatacatcagcttcgcatccaggcgattgctaaggatggtgaggtggagaggttgaaaattgaaatctcggagctgcacaagtccaagtgccagtcgctggagttgattgagcagagagatgcagaaattaaagagaaggacggcatcatccagagctactacaataaaattgtaaacctggcagaaacttctgctggtaaagaggccaggatacaagaggtcgaagcaaagtttacccattgtcaagcaatttgcaatcgcatgactcaggagaaggagctgcttgaaaagcacaatgtctggcttgatgaagaactgaaagcaaaagtgaagaacttggctgaactaagaaaaacaaatatggatgaggaggctcggttgtcagcaagtattgctgagcttgaaagagagatatctgaatcctctagctccttgaggcgaagcaaagaacgcatctctgaactggagcaaagggtatcctacatggaaaaggtcaagaaacttgctgagcttcaccaagaaagttctgaggaatggtcgaaaaaggctggggagctcgaaggtgttattaaagcattagagacacatctgacccaagttgaagatgaatacaaggaaaagcttgagaaggagaccttgtccaggagagaccttgaaaaggaagctgtcaacttgaagcagaagcttgaaaagtgtgaatttgatctggagaatacaaggaagtccagtgaattgagcctcgttccattgaccagcattgcagcaggctcttctgatgtagtagacacaacagtacaaggactgcctatttctgatgcagttaatcagaatgatctaatggttattccaaaggtacctagtggtgtttctggtactgctttagctgcttctcttcttcgtgatggttggagtcttgctaagatctatgagaaataccaagaagctactgatgcttttcttcatgagaggcggggaaggagacatgcagaagcagttttggaaagggttttgcatgaaatagaagagaaggccgagcttatcctagatgaacgggctgaacatgagaggatggttgaagcttatgctatgatggatcagaaattgcagcaagcattgctggagcacgacaattttgaaaacaatgttaggaatctaaagtctgagctgaaaagacgggaacgtgatcatagcgtggcacagaaggaaatagatgacctgcaaaaacaagttgctgtccttttaaaagaatgccaagacatacaacttcgttgtggttctagccttcctaatgtaggttatgtcgcttcttcaagcttagtcaatgttctttccaatgtagagcatgatatcaaggacaatatgtcttttaaagacatcaacgggttagttcaacaaaatgttcaactaagaaatcaaattcacatgctctcagccgatcttgacaaaaaggatatggaactacgggagagcttccaaatcgagttgaagaaaattacagatgctgctgcgtccagggttgaaaaagttatgaagaaatctgaagaacaagcaataatgattgaatctctccatcgatctgtggcgatgtatcggaaactttgtgaggagcagcagaaggctcgttcaaatgttgaatcggcacccactactctgcaagatagcagcagaacagacctgatggttctgtttgaaggatcacaggaagtctcgaagaaagcttatgagcaagtctctgaacgagccagaagccttgatgaagagttgacaaaattgaggactgagcttgagtctctgcggtctgagcgtgataaggcggtgcttgaagctgattttgctcgggaccggcttaatgggtttgcagcggagcttgagcatcagaggaaggagtctaactctgcttcacttagaaatgcggagttgactcgtttagtagttgattatgaaagaagacttcgtgaagatttggattctaaacaagctttagaggagaatctaaggaagctatcaatggaggtgtccacattgaagaatgcaaaagagagtttagagaagtcagagagaagagctttggatgaagtccgtgatttaacggagcgagtgcatcgtttgcaggccacaatcgacacaatccataccactgaggaggtccaagagaatgctaggtccatggaaaggagaaatcatgaggaacacattaagcgactggaaagggattgggctgagcttaacaaggagcttcaagagcaacgagatcatgtccgtgttttgtctcttgacaagaaaaatgtcttcgacagctgcatgaagcaggtagaggatatgagaaaagagctaaataactcgtggaaagctgtttctgatgctgaagcaagggctgccattgcggaggccaagtgttctgatctagaggcaaaggtgaaatcgagaaaggccatttcaagggatggttgccatgaaatctcagccgcatctgaggagaatgatgaactattccagttgaaagaggagttagaaaaatacaaggaggaagcacaagcaaataagaactacatggttcagtacaaagaaatcgcacactcaaatgaagttgcgttgaagcaattggaatctgcacatcaggactacaaggctgagaccgaggttggcaggaaagccttggaagatgagattgttaacttgagggataagttatcagaaatggagaagagttatgtcattaagtgtgaagaagctgccaatgcaattgaatctaaagagaagcacatcacttctctcatgaatgaaatttctgttttaagaacagaagtttctcagaaactaccacagttagaaaaattggaaattgaattggctttgtcaaagagttcacttgatgagcagtataagcgctggcgaactgcccaagataattatgaacgccaggttattctgcaatctgagacgatacaggagttgacaaatacttctaagcagctatcttcgttgcagcatgaaatcactgtacttcgccagactgcagatgcactgaaaaatgaaaatgaatgtctaagatcttctgctgaacaagaaaagataggcttattgaaagagaaggacgatgccctgcagaagtataatgagcttaatgatcagaatagaattctacacaatcagttagaagctttacacattcggttagccgagaaagaacggaatattgctgggctttcatcacatcgtactgataattcacatgcagaagatgatctacaaagtgtcatcagttatctgcgcagatcgaaagaaatagccgaaacagagatatcattgcttaaacaggagaagtctcggcttcagatagaactggaaagttctttaaagtctgccaaggaggcacaggacttgttgcgaagtcaagctgatagtgccagggcattgatgttcaaggatgaagagttcaagtcactgcagattcaggtcagagaaattaacttgcttcgtgaaagcaacatacaacttagggaggagaacaggcacaattttgaagaatgccagaaattccgtgaagaagctcaaaaggctaaaatggaatctgagaggttgcagaaccttctactggagaaggaggtagacgctgaaatgtgcaaaagagaactggaaatgcagaaggcagaaatagctaatctcaaccaaagtatttctgagctgattgaaaatagcaaaggcattgatttgaacacttatgaagccatgaagaatgaacttcaaaatatcaaatcaaccttgagagagaattctatggagcttgaaagtgcaaagatactgctttctgagaaagaagttgccataaaaattttggaggataagctttcattatgtcaatctgaattggattccaaggaaaagaagctgaatgatgtagaggcgtcccttaaatctgagattgacaagcataagaagattaatttaaacttaaagagaaagcatgacaatttgatgaaggagaagggagagattgctaaagaaaatcaaagccttgtaaagcagatggaggatcttaaatcaactcagaagacaacatctgaaacaacacttgagcaggctattaaagaaaaggatttcaggatacagacattagaaagaactctggaaaaggaaagagatgataacaagaaagagaaggcaaagagtaggaggaatgagaacacaatctttggtgcacttcagaaggtgcaacaggacaagaaacaagtagaggagtctatagataagcataagcaggctgtgagagagttgattgagaattatcctggattatcatctgaagtgccacctatctctgcactagaagagcaacttctttcatacttccgtgcagctaaagatatggaggaatcttctagtcccttccgtgatggtgcagcaactcaaactccagttgttgaaactgcccctgtggatgcacctacttcagctggaggacgtccagtagatacttcgtcaaggccagctaaagctaaaatgacggaagaaagagcagttcccaaaccaagcagtgaagtacgtaggcctggaggaagaagaccccttgttcgtcctactcttgaacgaactgaagaacctcatgctgatacagatatatcagctgttgatgcctccacagttcaggacaaaggggggccaccagcagagcaagaaacttctggaattttacctgtgttacagcctttgagtcgtaaacggcttatcacatcttcacagacggtagacagtgcctcgcagggtgaggctaatgatgtcaatcctccatctaagaagcccaaggaggaagaatcttcacaagggactagtgaactcaaaagtggtcaaccacctcttggggatgtagcggcacaggttaatgtgcttccagccactgatgacctagatggacaacagcctacagaagagatcgatactgatcaggcacctgagccaatggtagaggttgaggcaacaagggaagaggatgggggtgataaagatgactctggagatgcatcaacggacatcaaaggccaggatgctgatgctaatattgacgcaaatgcaattcctttagaagaagagcatgtagtggcaaagtcagaggcaataattgaatcatttgatgatgaccggaaaacagaagattcgaaggaagatgctcagcgtactactgcaactgatgttgatgatgacatggaggagggagagttggcagaggaacctgaagacaagagtgacgttgatatgtcagagatcgagggtgaggctacagccgaacgtgctgctgtggaaccggaccaaagtcctataacacaacctggtgcagctgatgcctcaccaagcagaactgcagatgcatctcctgctcgtgaaccttcccctagtccggtccaagctggtgcatcttctcgaccccagaatactagcactgcaacagaggcacgtgaaccttcctctaacccagcccaagctggtgcgtcttctgaacagcggaacaccagtactgtagtggaggctgctgaaactcgttccagaacaatcaacttaagtgagagggccagacaaaacaggcaaaccaggtttcaacgcgcacaacaacctggcactgctcggggtcgtggccagcaatctgttacactcaggaaagatgctacgggtcgaggatcaaggggccgcggggggcgtggtcagtcctagtaaagtagattgtcttttctcgtgcagggataattttgtccattgggatagagacccttgtatttttagattgatcgacgaacttcatggggatacagagacccttgtgtttttagattgatcgacgaattttgtctcattggtttttactaaatgttccctgacctgcgtgcgaatccttgtgggttctgagaccgctatatctaatccaaactgttttttttttgtttttgtgaccgatttatttattcatctggatattttttgtttttgtttttgtttattcaaactgcgtgacgcaagtac

SEQ ID NO: 43121 - DNA, 1733 bp, Zea Mays
tgataactcattgttcagatatgcgttaagcaatggttgttactattttgtgtaagacctgacagaaacaatcatcggcttgtggggaagatacaaaataatgaggaattacatgcctaaagttggtactcttggccttgatatgatgttcctgacatgtactgtgcagatggtcatatttctaggagtgccattttcagaatgacatcacttattcatttggagtactcatctgagcactgagttgctaccttaagattacctatttcatgttctttaaaaacagcttaccaatttcatggaattactctttgtacatagtacacaacagcttcaacacggatacgatatatagttgtttcacaagatggcatcggtttagtagaattgatggcatataagcttagaactcagtttcctttgcttgtacatttatattgactgcccccgcaaataaaatttaacaatgtgcccctgaaactaagatagaatctctacatacggaatcactaaatggttgtattttccaatataaattgcacatcatttcgtctggataagtcaacatgagaccacttttgctaggatatttgtatttgtagatattgggacacaaaactaaaaatattatgagtcttagctaaactccttcagaggcacattgtattatgagctaacccgatttgtttttttagcttccagcacttccatattccgctcattgtgtatttttttcttaatatcactgtactatatgtcacaaccttttcatgcattgaccaataacttagcatttgtaatgggtttctcctttctgtatcattatgtatttatgtgtacttctagggagtaccattttcttcatgttggcgatgaaatgctacaatctaagtcgcttggtcgagattcatatgtctttggagatcaagaataaaatggttctactgaaacccctacaagatgccttccactctgtgactcgtcattgggttcactcagattctactgccccttgacggaatgctttgctctgtggatgatgatcctgagcatgagttcaagttccaacgaccgaggaaggatgagcagggcagagaggacctactgccgaggaaggttgaacaagagagcaagtggcaaggtgccccgagtgcaagatatatgtggagaagatcaggggctatgtatttatcatttacgggtgcagccattgattctgctacctttgtgcatccccaatgtctagggacaaccgttgttgcaaaacctgcaatcgaacctggggaatgccttgaaatcgccaagctctctacttgaaggaaagaaactcatattaactaatattatatgtgtgctgctggttcattttcagaagcaattaccattcatcaaaaataggctaacacggctatatatcaggaaaagtcgattacaagcagaacatatattgacctataaagcaaaccacaaatgggcatcatagctgaatgataattgagaatgattcgtcttgagaagtacaaatcctcagacacgtcgtttttattcattcaagtcttttaaatctaactgcagatcatggcaagtatggtgtacaaaaggtcattacaatttttagggataattgtttgcattgttataaacatttcttaattttttgtgttctggtaggacgcccgtaagggcgcttttatgttctagtattcttagaagcgtcacaagatccaagtcgg

SEQ ID NO: 43122 - DNA, 897 bp, Zea Mays
gatacacacggacacaccaggttcgagggttcgagcggtcgagcctggtgacctgatccctgtgctggtcaacgtcaaccgagtccgaaccgcatcgatcggacggtctcacgacgacgaaggttcgcgaatcccctccttccttcggcctcgccttcttattttgtccgccggacaagccagtagtggctacatcgcgaagggcggcaaggcagatctagggcgatcatggcttacgtcgagagaggtgttgtgaaagacaaacggactatatggcgactgagcataatctcagacttcttctgggccattgtgagctttatcagaatcttctttgacacactgttctcattggacaaaactgacaacttcaagaaagggtatggtgctggtaagaagtgggatggtggacctggtggtggtgggcggggcccatatggcggtggaggaggtggaggattcggcggcggaggtggaggtggttctctccctgcttgtggatcctgctgtggctaataagcgtgcaaccgttccgcctgatgactacgtataacaaatgaatacacatgcttctgtatgttctgaagaacatcgtagctattgatatgtattttactgtcagacgattgtatcataatcgatatgtcgtttattaacagcctatttacctgtagcttgactctggcatgattcgcatggtacattcatggttcatctttcgtgtaccgctgcctgattgcataataactagatcagttacaaagtttaataaattgtctggtgtgctgttctgttaatgtcttgtatagcagtaattggtgaatacaaacagtgaggcacctgcgggctgcggcctgcgggtagttgtatttgatgatcagatagagcatgaaaatg

SEQ ID NO: 43123 - DNA, 394 bp, Zea Mays
cccaagtactctacttctagtgatgatgaagtagattatactgatttatttaagggcttagatagagctaaagtagataaaatcaatgagttgattgatgctctaaatgaaaaggatggattgttagaaaagcaagaggacattctatatgaggagcatgataagtttgttagtgtgcaaaaatctcttgctttagagattaacaggaatgaaatgttgtcttctgaattatctgcttgccatgaaactgtgtctagtttaaagagtgttaatgatgatttaaatgctaagctaaaggaagcaaataaatctagttcatgtgtagagcatgtgagtatttgtaatagatgtaaggattttgatattaatgcttgtaatgaacatctttcatcta

SEQ ID NO: 43124 - DNA, 717 bp, Zea Mays
ccttgctctacttagccatgcactatttctatcgtccggtcgagtttggatcgcgggtcatctagcatagctcatatttaatctgtgcctagtgtcggatcgagtcggtttggtccatacttttttgttgtgtcggtgtttagtctcgaccaagcactacaggattacccacgtagtgtttttggaggacagcgacgttgatcgcaactcgatggtacgtgcaggtgcacgtcggaacacaagagaattatacagatgacctacccaaagcgaagcaaatgacaggctattgacgacgggcggagtcacggacactggactacagtctggcactacctgcgcccgtggtttgtgttgtgctctgctcctgctcctgctcgtggggcggtggagtggaggtgcagaagcagctgtgctggcggcggtgattcgcaaatcgcagcgccaggctaccgtacagcggccaccgacgggtgacgaggctctggccgctggtattggacgacacggcggcatgggccccctcactgacgccaccgaaacagctagccgcgccaacggaccacacgacagcctcgcgccgtcttgtcacatgtcctactatatctttgtatcgtgcgtccaacccaaaaaaaaacaaggtatagtgctatgcatttacacttaatatagtttgcaaacatcgcactaattgtatttgtattgtgagagaaattc

SEQ ID NO: 43125 - DNA, 2643 bp, Zea Mays
ggactggtggcgatccaacatggacgtccatagaagcagcagagagggagcctgccccaacacccttgagggctgggtcactctcagcaccaccctcgggggctgggtcctccatgacagccacctctaaggctgaagatccctcagccatgtccatgggagccaggtgacttggatcagcgtcttcgcaaggtagaccaccctccaaggccgatgaagcactggaaactacacgggttatctcttgcccggcaggatcacgtggcagaagaccatcatctgggacctctgaacagatagtgggattgtcagcttcaggaggctctgatagaaggtcctcaaggatgatctcttccaactcttggtcaaaatcagatattgacaacccctggaggctgacgagcgctaacaagacttgtgtgggaatgtcgttgaccctgtggcgatggctattcttgcggatcagcggaatttcttcctcttcttcctcctcttcctcatcaagcgctccgccggcaacctgaacatcgtcgcaacctccgacattgtcctcgaggatggtgctctctaggccatcgccaaggaataacgtggaggggccagtgtctcgctccaagcatgacaaccgccgaagtcgccttttcttcttcttctcctcgacaggtgcagctggatggttcactcggcgtgaacacttgcgacgagcaccctctggtttctgaatctcctcgccttcaccaaagttttgcccaatcgcaactgccattggcttagtgcgggcagagtcagatgattctctggccagcaagttaagaacaacattcatctcaacatcatcagtactggacaacatctcaaagtaagtctgcttctcagcctcaggaagatttcggaggggagcaatcaaggcctcaatgtcctctgaggagggtcgaactctatggcccgggctaccatctcgaacatgaggattggaaacaaaattggagaaaggactctgcggaggcaggttccaaggagaataagataagggggcgccaacattcgaaaccctgccccttagcatcagatcaagtcggcttagcaggtcctcattgggaatccgtctgcttgtaactcgggtagaatcgctgacctcgatgtacaagtaagcaggatagattttgtccttcaagggttggatgttcttgaagacaaagtcagtgaccccggcttcggcagtcaggcctctgtccttcaacgagcaaattttagcaagcagcaccttggctttggctacctctaaataagtgggggattctacccagctgggcgtgcgaacgtcgggttgcctccctgatcgaggggggagggacttattgtgattctccatcgtgaaccactcgaggcgccatcccttgatgctgtccttgaggggatatcaaggtattccactttcctcccatggcgaagctccaaactggcaccaccgacaagctgatgctgtcctccagccataccgggccgacagtggtaaaggtacctctagagtccaaagtgggggagaatgccaagaaaggcctcgcacagatgtacaaaaatgtcaacttgaagaatggatttgggatttaaatgtgtaagatttaaatcgtagaaatcaaggagaccgtggaagaatggagaaacatgaagagcaagccctcggatgaggaacgacacaaaaacgacggcctcgtgggtgtcctccgtcgaaacagtgacccgtgccagttccgccaagaacacagttctttcggcgacaaaaccctagtctccacaagatgcaaaagatctgattcagaaattatggacatgtgattaccagcgaatggaagctggctgttgggatcgatgggtggaatgatcggaacggtggcgctctgtctcttccgcttgggagccatcacaatctctcgggcggaacgagcgggctcgagaattcagaaaacggagaagcggtagatgaaaaagtaagatctagggttggaaactcaagaaggtacatcggcatgagtataagttggctccttaggtcggacattacctctaaagtgccagatcacaactcggaaaagtgaggactacaatcatcacttgggcattacctctaaaatgccggcaaactttcaagcacacaaataaaaagcaagcaatagtggttaagtggagtaacttcatccttcatccgtaatgggggaattaacacaaactcgaagccaactcattatgagtcggcctcttctacccctatcactacattacattacactacattaccctactacttacactacactacactactaactaacactaccttattctactgctacttactattgctgctactgctatctatactaatatttaaaccagcggcattatgccactggccttgccgctgctgccatcgcccttgccgctgcttccgtcaccgtcgcccttgctgccgttgccgcttccgccgtcaccgttgccgctgccgtagtcaccgttgccgctgctgccgtcaccgtcgcccttgctgtcgtcgccgtgccgccatcaccgtcgcccatgctgccgtcgtcctcgctgtcgtcgtcgacgctgctgtcgtcgccctcgccgtcaccatcaccgtcg

SEQ ID NO: 43126 - DNA, 818 bp, Zea Mays
cccagctgggtattaatcgattcatgatcgccgttacttctcggatatgaagacttggtcattgacttgcaatctaagtcatggatggaatcataatgagcaaaaatcgtgttgtatggattaatgtgatgatgaaattagactagatgcaaacaaggtctattaatacttaatctagcattaaaatgttgaaagtaaggatccactcatagtaagcttttctgcaaacagagtccttgattcttgataagccttaccttgaatccttttaaaaccagcatacccttgagagtctcttctttagtcgggtaagtcttgctgagtacttgcgtacttagggttttacccattgttgctgcaggttacgagtcacttgattgtgattggtgttaagcgccggtgggcacgaccttctataaatctaagtacttcttctatacttcttattgaggatggtcacttaagctagcatatatttcaaacttataaacaatttataataattcaaagttatttctttgaatcacttttgtaatcactctgatcatgtacattgtaaaacttgatgtaacatgtaaaatttggtaataagatttccgctgcaaaattgttggtgtgtgatttgtgtttacttaatcccgcggttctggttgtaagtggtttatccgaggttgttggggcactcagacagatcctgttaagttatctggtgcacatgcatagccgtctaaggtctttgagacaagggcatgtgcatgtgggcccaataacttgggaggttctgccatacccttggttgtgattgcctctgtcttcac

SEQ ID NO: 43127 - DNA, 449 bp, Zea Mays
aagtatagtgacattagttaagcaaagtattgtgttgttgttgtgctgtcagtgctctttgtggagtttttggcatttgttcgatgaactgtgccgcacagaatgttattggcttcttgttggctttattgctccattagttctgtagactttctcccttttgtggggtgtaaagaacgttagattacttgattatctttttcatgacgtcaagaacaaggtttaggaagattaggagttttgtttcaatagaacgacttgtttcgtggtgctttggtgtgaggtgtttgatcttcttatgcattcatctggtgtggatgtttgacaattgaattaaaatgaattgttgaagttggtaagagttgttcttagtgcatattacctcttcataaaaagagtgttgttttaagacattgatcttgatgtatagttgcatccaaattcaatga

SEQ ID NO: 43128 - DNA, 488 bp, Zea Mays
cctggccagtgtgcagtggccaccacgcctcaccgtcgtcgtccttctttgcccctgctgcacacgtaccagtcgatgatgatgggctggttgttctcgacggaccacctaagtgcgacgtcgagcttctcctttttgtcgatctcctccatctccactagcttgaacgtgccccaacaatatgcctccgctcagactctctcccagtgctccttcctcctccccgtccagccgttgtggaggcgagacgcgcgacgtcatcggggtccggggagcgggccggagaaggcattgtagtagaggtcgagggagcaaagggaggtgaggagggagagaccagacgagagcaggccagataggttgttgtggcctatggcacgacggtggcagggggccatgccgcgctcgccgaggagcacgccaactactcaagacataccagatcacaacgaacaagctagagacgaatctccgtgccagggacaccg

SEQ ID NO: 43129 - DNA, 7757 bp, Zea Mays
cgcatcaaacagagcttgactatataaaaaatgttgaaaagttataaaacaatttcaatttttttctaaataataaatagctctccctctataaaaaagaatttagaactgacattagcttctgtctgtgccaaaatcatccagtacagcagcggtatggcgctaaaaggttctgagaggcacaactttggatcgaacccttcttttttaataaagagaagggatatagtaatagaataggtagatatcaacggctgatacggagatcatctgagttgccaacggctgataccaaatgtgtaaatggagatgttccatccgaaaccaaacgaacattaaactgaacacttggtgtgccgcggctgccgcctattcgaactatctcaccagtttagtactgacagctcactgagaggagccagctctgcgctctcgatcagcttgaattcctgcatgtgtggtcagttaaaatcatttataatatgctatcttcttggggaaagaaaacctgagtgcctgcgagaattaccagcgtgaagagcacaaagtgcttgaagcaaatgttgagatgcacctcttccttgagcttgacgatcatatggaagtgggagtggtagatgtgcgcgtacaccccgaagaggcgcttcaggaccgtcttgacaacgtcgtggaagttgggagggaaagcagccccttgtgtaatcaggaaaccaaaacgcacatggtcatggtcatggactcatggtcatttgtcagccaaaatgtaaaagagaaattaccaagccgttgagggaaaatggcttcgtcgtccagctgggtttctatccaatccatgatgtagtccatgtacgggcttattcagttagaggtgaatcgagagttattggtttacaagaagaacaaggaagctgccttgaatttcttagaagaggatacatggctcatcttatcctagctaaacagccggttgcagcttcaaagtgcctgcttgcataaactacatttcattatagcacatcatagagacagtacgagttacaataatcaattttctgtgctgcagaatgctacttggtgggaagagaatgtcaaagcgcctgcttgcataaactacatttcattatagcacatcatagagacaatacgagttacaataatcaattttctgtgctgtagaatgctacttggtgggaagagaatgttgatcaggagatgccgcctgcttagcaagaactgatgttgcacctgctggttggatgcttttctgatctagaactgggaatgtaaaatttgcccaaggagtgtccatgtcttgttgtatgtaaatgaaaaaatatgaaattacacacagagaagtccatgtacaacatataggacatgaaaatctaaaattcaatcaatcatattatttgatacataaattcatatatatttacctttttatgatatagagattgcaggggtgcatcaaattagttgttggtggctgatgtttgtggtgtgaggcatgcttgtgttaacttgttcatctaaacaagaactataaatgttttgtgtacactatggatcaagaatcacgtccttatttgtgtagaagtctgttctttttgtgtaggtttggtctggcttaagttctaatgtccttttactgtggacgatctctaggatatgcagcttgttaaaatgattttgattgcttcgttggtcacattagttctactatcaccatgctggcttcgttggtcacattagtttccttatctcatgaaccatttttggtaaaatgaagtcttcaatgaaatggatggctgctcaattctatttttattgctctcacaattcctattcccacttgtgtgaatgaccaagcgatgatgctatcgcagatggtgtggcatgagcctacaatttcattgtagttatgaaaactgatcagtcaatgatgatgaatcatacgagacttttttacttcagcatgttttttgataggggatgaattttcatgcggtgttatgaactacaggcggaggtgagcagtgggagcgtttgcgtattaaagtgcactacactacaatacttgtttttgtatgttaagcatttactttagcttaatcaatcttgtagtttttaatgttatctttgtcgtccatgcaagaggatctccattgtgtttcgcaagacgagagtcaccaagcacctgttccgttttgtgtagaacttcacgctcattcctatcccggatacttctatccttatccggatgatggtacctagcaacaatgatagtctgtcatcgacctggacgaatagccatagatctctctcaacaatttatgtgccgtcgcaacgcacgggcacctacctaggtcgcaggcagaagcagaactcacctccgcccggcccggctgtataaaaaaaaatcctctcacaccgcacacccgcatctctcccatcacagtgcgccacccgcacccaccaacgaggcaacgaaacccagtcggaagctagaccggcgacaagtgcagcgctcgccgcgatggattctgactacggcgtgccgcgcgagctgtcggaggtgcagaagaagcgcgcgctctaccagcccgaggtgcccccctgcctccaggtacgcaccgccgccgcacctgccccttactcctgctaagttccgtgcgtgcgccattccccgcctacgcgtacagatctgcggtctctcgggtcaagcggcgccagatcccgcattgtcctccggccggatcggtttgttccgtcggcgctgatatctacggttcaccgttcacctactcccgatctctttagccgggatcaggctacagtgcgtgttgcagtatcagctgacgctgactgatgtcgctttcgctggtgacactggatctgagttgtagtgaacgtcacatgtaaatcgtggcgctgtcctgtattttagatcggtctgcatgtctgactcgtgggaggatttgttttttatgctgtcgtgattcatctgttttgtagtgtctggtagcaattgcaactgagagttaactgacgaaattattctgtagcaatgatgatggacctatctacatgtactcacgggtcctataattgtaattgtggaggggcttaggcctaggactcggttgtcgctatcaaattgaccttcttatgtatggaatcgctttggaactcgtctatatgggtggactctcaataaatttctgcatcaaatcggcttttctcttgtttgggccttgggggcacttttgaactggttcctagacgggaagaattgtcaatagcttttcagaacagatttcttgtgtgtttctgttgagttagctcagttcacacacttgaggaacggatttattgactgtatgtaattcaggggactactgtcagggtggagtatggtgacgccgcaattgcagctgaccaggcaggcgctcatgtgatcagccatgcgttccctcacacctatgggcagccccttgcacatttcctcaggaagacggctgttgtccttgatgctaaggtcatatctgaacacccggtggtcaggtacatctttcgtgttcctgtacatgaaaaatcttttgcctcacaaaaatcatctctcaaagatctaatcccttatgttccaattgcagggttggcattgtcttctgtggcaggcaatccccaggaggccacaatgttgtttggggactctatgaggctatcaaggcccacaaccaaaacagcaaactcattggtttcctcggtgagtaatttgctacttttcagtaatcccctaggagcatcatattatctacattgtgtcacttaattccattttttttctgattagcatgtgcttcaatgcatgagtcctacaaataaacttggtgcatttgattgtcactgaatttttctggtaacgtctgttgttttggctcatactaataactttgtttggtgggagagggtctctaaaagagtccataggttcaagaggaggggtttccatagtgtcattatccttggagcttggtgcttgtggctctctcgtaatagggctgtttttgatggagtgagcccttccattaatttgacaaagaggttgtttctagatgagttgattagttggagtaaggcgggagcgaagcatttagacagtttgggaattattgtcgctttaaatagggtctcgtagggcccgtcaggcttccccttgtgggggaggcttgagggtttggtcttggtgttgtaattcggtccattttggacctttcctttcttaatataatgatgcgcagctctcctgcgctttcgagaaaaaaaataactttgtttggatcagattagcagataatcaaccacacataattgatgtattattttgcgtttagtcataaatatgaatgacatctgaaaatcttcgacccaactttcatgggttcatttcatccaaactagatttgcaggcatttcttagatttgcaatcctaaatcgacagcattactgttatgcatatagacacaccaaattttgggagacaccttatgttctgggctcctggccagtttcttggaccttagtttgtctggcccttgcttcctcttgcttgccagagctttgacatttagatgcatgctaacacaaattaaaattattttaatgttttctaacatattcgacctatgttgaaacaggtggatcagatggtttgctagcgcagagaacattggagatcactaatgaagttcttgcttcatataaaaatcaaggtggatatgacatgcttggtcggacaaaggatcagattaggacgacagagcaggtcaatggtgcaatggctagttgccaggctttgaagttggatgctctggttataattggaggtatgctttgttttttaatctatctactaagattttggtacagtgtacatttgctcattaaattttctattttcatcttatgaaggtgtcacttccaacactgacgctgctcaacttgctgagacttttgctgaggcaaagtgtgcaacgaaggtacatttaagttttttaatatatattgcttttttttgttcctttatgtctagttttagtgatcacgtttccttgtgtgtggatgaactgatcccatctattgaacaggttgtaggtgttcctgtaactttgaatggggacctcaagaaccagtttgttgagactactgttggctttgacaccatatgcaaggtagggctgaattgacatcactatatattgcttattatgtggtttatacagttgtttttgttgaagtgtataagttgattgactaccttctcccatcgtccatcaacttaagcttttgggttgaactggttagtgcgtccactctaacatggcatcaaagccagaggtctcgagttcaaatattctggcagaggctttatttgtgcctccacccatttattttcacgtttgtgcctttctccctttctctctggctgcgtttgcgcctttctctctagctgcacgtgaatgggggtgttgaagtgtataagtggattgactaccttctatcagcttaagcttttgggttggactggttagtgcgtccactctaacagttttcaccattgaggttttatattacctgactttgatatggtactatactgtctctgtcaccgctgcagtttactgtcatatttagaatgtgtttatgttctgttactacttactagtttgtaatggcccccttgatcttatttgttgttctatatcaggtgaatgcacaacttatcagcaatgtctgcactgatgctctatctgctgagaaggtacatataacacatgatagatagcattgcaggatcctgtcttgcacattgctcatcatatatcattggctgaatgttgagatttaccgattgcacattgtctaaatgttttgaggcaacccctgtacatataacacatgacatatagcattgcaggatcctgtcttgcacattgctcattatcatatattgttggttgaatgctaagatttaccaattgcacagtctaaatgttttgaggcaatccctgcactaaattagtttgccatgataattattcatgtccaaacgaaaaggaaacagatgaattcctgatcaactttgttaagtctcgatacagaaagaatttttagaagtattggataagcactgttggttgttcatcattggttttagcgatggagcctacatgtcagatcccatatgtgggtacatgtgtgtaggatgcaatgccggcagtagttttactgaagatgctataaaagtttttctcatgaatttgaattactcaatcaaatttctgatctgccgtgtgtctatattctaaatgacagtattactacttcattcgtttgatgggacgcaaggcttctcatgtggcattggaatgtgctcttcaatcacacccgaacatggtcatcctaggagaggaggtggctgcttccaaacttacaatttttgatattacgaagcagatttgtgatgcggttcaggcaagggcagaaaaagacaagaaccatggggttgttcttattcctgagggtcttgtggagagtattcctgaactatatgctctgcttcaggaaatccatggcctccatggcaaaggtgtttctgttgagaatatctcttctcagctttcaccctgggcatctgcactctttgagtttttgcccccttttatcaggaagcagctacttctccatcctgaatctgatgattcagctcaactttctcagattgagacagagaagcttctagcccagttagttgagactgagatgaacagacgtttgaaggagggcacttacaaaggaaagaagtttaatgcaatctgtcacttctttggctaccaagctaggggagcactgccttccaagtttgactgcgattatgcctatgtcttggggcatgtgtgctaccacatcatagctgccggtttgaacggttacatggccacagtgacaaatgttaagagtccagtgaacaagtggcgatgtggtgcggctcctatttcgtctatgatgactgtgcagcgatggtcgcgtggcccttcagccacccaaatcggaaagcctgctgttcacatggctagcgttgacttgaaaggaaaagcatacgatgtattgaggcagaattcttccaggtttttgttggaagatgtctacaggaacccaggtccgctccagtttgaaggaccaggtgccgattcaaagcctatctcactgtgcgtcgaggatcaagactacatgggcaggataaagaaattgcaggaatacctggagaaggtgaagagcattgtgaagcctgggtgctcgcaggatgtccttaaggcggcgctgagcgccatgtcttctgtgacggagacactgaacatcatgacctcatcgtccaccggccagactgcactgtgactcgtttggtgccgttttgtggtgcggatcagaatccccactttttccatggtgtcgattgacaaagttaggagcagtaatcctggtgccacacgggtcattcttttgtagcttcttgggagagttctgtcagttttgaattcgatagtttattatggagaggcttgttggtgagtttgagctcgaataatttttgaaacagacggattgcggaatcttaataaaccaaaatttgtgactgcattcacatttctgccagtcgtctgaatgagaaaaatgtgagagcgatctcttcatctga

SEQ ID NO: 43130 - DNA, 872 bp, Zea Mays
aagtaaagcaaggatttacattgtgctggaattcgttatgggtggagagctccacgatatcattgccacaagtgggagactgaaggaggacgaagcgcgcagatactttcagcagctgataaatgttgtagactactgccacaggttgtgtatgtaagtggtggaaaagctcatggaaggtacacaatgtttgctaacgttaccgactcgagccaggtgagggttcagcatggaggttcatcgaggtctgctgctcgtagctcccgtcgctccactcaagatccagcagaagtggagcaactacgagaagaacttggtgacatcaggattacttgaagcaacaagctgcgcaacatgaatattatgctacacagattcagcaacagcaaaacactcatacaacaactagcacaagcccaagggatacacgtcccggtgccccccacctcccgttcattatcattggtcttcacctccaccaatacctacatctccatctaccgaacatcagacccctctagctaccttgccgacgcatgaacaagaggacgggttagactttgtcgaaaccctcttcaatagtggaggtatcgaccatcactcttcattgtaacctgatggtgatcggcgaccgtgagcttccatgttattgtgttctgatacttgagacttttattatgactatgtatgagatattgtctcttattagtaccggatgatgagatgtgtcttattatgactatggatgagacttttgtgatgtaattgatgagactatggatgagacttttgtgatgtaattgatgagactatggatttaaatattgttatgtgattgtgtgtgagatgttttatgtgaaaatatgttgtgt

SEQ ID NO: 43131 - DNA, 509 bp, Zea Mays
gctagagaagtagctgaggctgctgaaaagagcgcagaggccgaaggtcaattaggtattaactaatagtttttattgtgttgtaatctttaggctttaagatttgtttgcgatttgtaatagcaatgtagccgtatcctgtcttacttcagatcctgctaaaacgtcttcgggccctcagccgaaaggagacgacgaaataaaaaagatggctgaagatattatggacgaagccgtcaatcggctcctgaacgaggctgcagaagtcgttttgagagaggattaagtatttttgtgaaaaacttctgaaatgtaatatactgaaacattttgtaaccccaaatgtaatatacctatttttgttagtcaattctttacgatgcatgaaactttacagtaccgcttttgagtctttgacgaaaaaacaccttcccttcttttcatgcttcgtgaagaagaatttttctttgtcacaacaatatccaatattctgatgaataacatccagg

SEQ ID NO: 43132 - DNA, 693 bp, Zea Mays
aatccaggtttttcgtcgattacacgtttaccacactaattttaaattcactcgaaacgaataacccaagcaaatcacttagaatgtaatgactactataaagcaagggatcagcaacatgtatgactaccgatcaaatcacagtaaacgactcaggcaatctaataaatattatacctagtcgactggaataacgaatcaacataccattccaacatctgactcgaatccgcgagatcggtaatcattttccgattcaaacaatttgtcgagcgcttggcagtggccacacgaacttcacgcacaccaccatcaaatctttggacatatttcttggggattcttttgtctgcgcgatcacaatttggagatgtcacgtagggactggcatcgagacgacggaacaacgacgaactagcgagatgaaccacgacgagtgatgtcttgacgcggatgagcaatggcaactggcggactcggaacagcggagtgaggtgcacggccagctagcaaagatgagtatgtgtggcacgaagatgtttggcgccaaataagacgtgcgcgcagatgcctaggactcgacgagcaacggcgcgaggagtaaagcgaggtcgcggccgggcgaactctactacgcggactgctatgggccaggatggctaccgcgacacacacgacattgctacgccacaa

SEQ ID NO: 43133 - DNA, 2491 bp, Zea Mays
cgacgcttcactctgcccctccctcctcccttcgtcttccaccattcactatagcggagcgcaggctggtggacgccgaaggtgaattcggtggcgccggtgccgaacccgatattcatggacgcctctcccctgaacccgccgccgctggtggaggaggagcttgtgctgcgccgcagtgctcgttgcctcaataggccaacccggcccagctacgcggaacaggagcctcctaaaaaacccggcggccggggccggagcaagcggaagagggacgaggagaaaccggagctggcaccggcgcagcagggtgccaagagtccggacaggaaggactccaaggatgaggcgggtgagaagaagccgacgcccatgattgcggcgctgccggtctcttgcgctggcgttgctgctgaagacgatgcgacggggaccgggaagagcgccaagctgagggtgaaggagacactgagggcgttcaatagccactacctccactttgtgcaggaggagcagaagagagctcaggctgcgctacaggagattaacgctaagagtggcctcaaacgtcagaccaaggggggtgaaaagaaacgcccatcaaagcggcctgacctgaaagcaatcaccaagatgcaagaaatgaatgccgtgctttatccagagaaaacgattggacatctaccagggatcgatgttggagatcatttctattctcgcgctgaaatggtagtgttgggcatacacagccattggctcaatggcattgacttcatggggctgaaataccaaggaaaggagtattcaaacttaactttcccactggccacctgtatcgtaatgtcgggggtatatgaagatgatctagacaaagctgatgaaattatttatactggtcaaggaggaaatgatttgcttggtaaccatcgccaaattggctctcaacagttgaaacgtgggaatttagcgttgaagggagaatggtaatcctgtccgagttgttcgaggacatttgtcaaagaatagctacactggaaagatctacacctatgatgggctttacaaggttgtagatgactgggtgcagaagggagtgcaaggccatgttgttttcaaatttaagttgaagcggcttgagggtcagccatcattgacaacctctgaggtgcgatttactcgtgcagaagctccgacaactatttccgaattacccgggctggtttgtgatgacatctctggagggcaagaaaatattcctattcctgctactaacttggttgatgatccacctgttcctccatctggtttcaagtacttgaaatctctacaaattccaaaggacatcaagattccgtctagtattattggctgtgattgtgaaggaggttgtgctagcaacaaaaaatgtttgtgtgctcagcgcaatggttctgatctgccttatgtatcatataagaacattggcaggttggtggagccgaaagcagttgtatttgaatgtggggctaactgcagctgcaaccatgattgtgtaaacagaacatctcaacaaggtttgcagtaccgcttagaggtatttaagacagcttcaaaaggatggggagtcaggacttgggacactatcctccctggggctcccatctgtgagtacacaggggtgttgaggaggaccgaagatttggatggttcacagaacaactattgttttgacattgactgtcttcaaaccatgaagggtttggatggaagggagaaaagggctggatccgaaatgcacctgcctaatcttcatcctgagaatgattcagatgcacaacctgcacctgagtactgcatagacgctcactctattggcaactttgcaagatttataaatcacagctgccaacctaaccttttcgtccagtgcgtcttgagctcacacaatgatgttaaactggcgaaagtgatgcttttcgctgctgacaccatacttcctcttcaggagctatcctatgactacggttatcgattggacagtgttgttgggcctgatggaaaaattgtgaagctggcctgccactgtggtgctcctgattgccggaagcgcctctactaacctgcagtgtgtttatttctatttggatttttgaggaaacagcttatattgtaggaaaaacagtcatggtacctatgtagttgacatgctcttgatcatatatagcaaaagaggagcaatttatggggtgttcggtttaagaatgaaattagagatttagaggacatggtggtcatggtagcatattttgccgacaatcttcgattaactgatatatctggacatctggtcctgcaacacttatcctctggataaatatatatacgttacatgtttcctcaatgagtcaatggcttggatctgtgttttttctatcatttgccgtctcgcgcgtgcgtgtctgtgcttaatcgataaatacacggactactcaggtacctttttcaaattgtg

SEQ ID NO: 43134 - DNA, 1617 bp, Zea Mays
tgcgctgcggctgtttgtctggcaccggaaagaaaaaatccttctcggctcggcacaccgctgccggccatcgccgcagccggagatggaggacatcgaggacgtgctgggcccggtcggcctctctgtcggcggagcgcctccggtgctccgcctcctgctagcctccgtcgcggcaagctcaagcgccggtcgtccagggctgcgcatgcgcggcctcagctcgaggcccggatccccggcacgcagacgattcacgtcaagactatcgggtgctcacataaccagagtgacagtgaatacatgtcaggtaagaaagaacaagtttattgagattcttcctattaatgttggatgcttgggtgcctgcacatactgtaaaacaaagcatgctcgtggacatttgggaagctatactattgacagctttggatcgtgtgaaaactgttgtcggcttgtcgctgaaggtgtccgggagatttggttgagtagccagtagcgaagataccggtgcttatggacaggatatcggtacaatcttccaaatttgttaaacacgattgttgcggagcatcctgttgaccgaagcacattgctccgcataggcatgacaaatccacctttcatactagagcatctgaaggagatatctgccgttttgcgtcacccctgggtttattcgttcctccatgttcctctgcaatctggaagtgatgctgttttaacggcgatgagtggtgaatacactgttggcaagttcagaaaggtagttgatgctttgtgtgagcttgtccctggaatgcaaattgctacagatattatctgcggctttcctggttagctaaacaagttcacggcttagcatttcattcttagttatcatttatgagtacatctgaacgacattttattaactgaatgccccaaaagacgttgctgctaatagtttgcactaaactgacatcccattttgagggacgccctgctgctaggatgaagaaggtatcgagcaatgaagtgaaaaaagcggagtcgtgaactgacttcagttttcgaatcattgtcaccgtaccaaggaatggtaggcaaagtagagaggatctggatcactgagatcgcgaccggtggtgttcgcttggttgggcataccaagggatacatccaggtgctggtaattgcccctgatagcatgttaggagcgtcagcaaatgtgaaggttacatctgttcggcgacgtctttggtgaagtggtggaagaaggatctgttgcggcaggagaagcaccgaagcgaactagcgcgacttgtagtggtggttcttgagcgagcgtgtcgatggtcgattttggcggtttgttttgtttactcggtctgttctgtatggcgttgcaaaattgtgctactgtacaaatacatggttgcgaacaggttaacgcggagtcttctgatgctgcgtcacgacggatcagggtttgatgaaagtgaagaacatggtgcgatttgctaccgtgttcggaaaaatttggtagtgcatcgaaacccaaggcgtgacgtgttctctgtgtcatcactttaaaaaaaaaaagaaaactgtgttcgcacacgaggcaaaacagaa

SEQ ID NO: 43135 - DNA, 258 bp, Zea Mays
ccgatgaggaatccacctcacaatccgagcgaatagctcccgaatccttcctggacgcgcccgcaaagcttcgaagatggacgaggtcacagttgtggccgggttccgccactccgggacctagcccgccgcagcgatggcgcttagttggttctgagctctagcgatgaggaactgggaagcggcgaaaggagcaaggggtcggttagggttaggggttgcgttttatggcctccagggagataggtcggtccagcg

SEQ ID NO: 43136 - DNA, 475 bp, Zea Mays
cgagcgagcaggtgtgggcgtggcgtgggggaggcgccgaggcggtcgggcccgtagataagagtcgtctcacctcgtcgtcgcagcctcgcatcgcacgagaggagaaggagaggggaagggctagagagagaaacaaaggtggtagtagatgtggcatttgaagtatggttagcttgaggcgacgccgactattgggtctttgttctgggaaagactcattgccagttgatcttcctaagccgattgaaaatgaaaaaactgtggaagttgcacactccaatgtgaagccattcagtgtgcatccactacccttggcaaagacttctgatgtgctcataaaatcctcaaatggttctgatgattcaaaggaagagaaaacccagtactatccaggtctatacttcatccttattctgtattattggcatttcttcactttatgtccaggttacttgtggttatggtacttaaa

SEQ ID NO: 43137 - DNA, 1001 bp, Zea Mays
accgaacagcctcgcgtgtggcgccaccccgcaggctgtgcacacgacacgatcagtgcgcagcgaactgcgcatggcggtgcacccaatccacctgttcccgtgacaagcagcactcaagacacacacgcgcgcgaacacgaacagggacacgagacagcggcggccatggcgagaggcggcggcgatcggagtcgggaggatgaccccttctccgacggcggcaccaccggaaccgactcggacgagtcctctccgcgtggggtgggggcccgcggccccggctccacctccaacccgatcctgacacgcctcgcggtgtcgcggaacccgagcccgctggctgcggccaccgcggccccaggggtctgcctcctccgcttcgcctgggagtccgccgcgggctccctcgtcggcgccgccgttggctacggtgcggacttgggacgatggggttggactccgtgcggcttaggtaaaggtttggttacgatgaaggggattaaaggctcatttgctgatgctgcgtcatctgctaagatatttgctgttcttgctggtgttcaaagtttagtagcctgctctttgagaaaactacgtggaaaagatgatggaatcaatgcaggagtcgcaggctgttgcactggccttgctctgagctttccaggtgcaccacaaactctgattcagagctgcctgacctttgggactttctcttacatcattgagaagctaaacaagcagcaacctgcgctggcgctcccacctgcgacaggtgtgatggatccgaaggctggacaaagcgttcttcctcccttcacacttcctcctctggatgccatggacgaatttttagtgttttggtagtgttgatgattctaccttgacatatccaacacaaggcgagcagcttgtcctttgttcaactgattggatcttcggagttttacccacagaccatgccccgtaacaaggaagaacatgcaccttgattcttcaga

SEQ ID NO: 43138 - DNA, 908 bp, Zea Mays
gggaggagtcggcctcctcagggcggcgctgggctccggcaagctgcgcatcgaggggtcgctgagcttcaagcgggcgcaggccgcactgcaggtggagaccgagatctccatccgggccgccgccctgcccgcgccgggaccgagacccttgcccaggggagctcggttcgccggctcggcggccgcggacagccccaagcacgagggtgcggcgcttaggctgcagaaggtgtacaagagcttccgcacgcggcgccagctcgccgactacgccgtgctcgtggagcagagctggtggaagctgttggacttcgcgctgctgaattgcaacgaggcagcctcgccggggcgccgaagcagcagacgaagctcccatggagagcgctgccatggccttgctcctgcggggaacaagtctgggcgaggaggaagaggaagcaggcggcacggtactaccggaagtccccccagtggcagcccatatcaaacttctatgatatcatggtaacaaacatgtcaaataacttttaaccaaaatgagaatgtagccaggtgtaccgaatctttggcacaacgatcagggatctatttcgcaaatgaacggaaaggtagcacaattttttttctttctttttctttttgtgctagtgccagtattgtggaacgaatttataaggtttgtgggttggactgctaacatttatgttcgaatttggacgcctctctctctctcaggttggaaaggggttgctgaaggacgagaatgctcagaagcttgcgttgcagcactggctggaagcgattgacccacggcactggtacggccacaaccttcactgctactacaactgctggctccactccgaaagcaagcaacctttcttctactgctaattctgagattg

SEQ ID NO: 43139 - DNA, 1090 bp, Zea Mays
gccggcgagcctgcccccgcccaccgtccccactctctgtcactcccccacggcctacctcacccctcccacccctccctccttagatccggccatctcctgcccgcctcgacgtcggtcccacgacccggaaccctaaagctcaccccaatggcggtgtcgccggagcccccggtccggcggggagaatggaggcggccctggaggcggcgcgcgccaaggacaccaaggagcgcctggccagggttgagcggctgcacgaggcgctcaacgccgcggcgtgccgtgggctgaccactactgaggtcaccgcgctcgtgcgctcaacgccaacatctgcatctcccagggcggcctccaggcgctctccgccgccgccatcgtcagcggcaaccacttcaagatccacctcaacgccctcgtcccggccgccgtcgaacgcctcggcgacggcaagcagcccgttcacgacgccgcacgacagctcctcattactctgatggaggcatgccacctacttaatatactatccaaagaactcctcggtgattttgagccatgtgctaaactattcatcccgatgctttttaagcttgttgtcataaccgtgcttgtgatcgctgaatctgcagatacatgcataaaaactattctacagaattgcaaggttggtaggattcttcctcgcatagttgacacaacaaagaatgaccggagtgcaatcctccgtgcaagatgcctcagggatacaacgttcagctgatttatatgaggatatgataaaatgctacactgtagtaaatgcgatgagcttttcttccattggtgttatttttagcctatcacatatatcattattctgaactcaatcccttcttgtacgtccataaatccaacacaacatacacattttcacaacatttatctactagtggaggtaccgaccatcacttgtcactataactcgatggtgatcagcggtcgtgagcttttatgttatgtgttctgatacttgagacttttattatgactatgtataatatgttgtctcttatttgtactggatgagatgtgtcttattatgactatg

SEQ ID NO: 43140 - DNA, 540 bp, Zea Mays
agagggtataccaatttgaaattatatcacaagtaaggtaccaatttgaaaaatactctttgaaaaactaaaattttagaaattggtggtggtgcggtccttttgctttgggctcatactctctccccctttggcatgaatcgccaaaaacgaaatcattagagcccttttattactctctccccctttggtcataaataaatgagtgaggattataccaaagatggagtccttttgctttggattctcccccaaaagaaggagagatgcgcggagcgacggcgaaggatgagttacggagtggaagccttttgtcttcgccgaagactccaatttcctttcaatatacctatgacttggtttgaaattcacttgaaaacttattagtcatagcacatgaaagagacatgatcaaaggtatatagaagagctatgtgtgcaattcaacaaaagaagttcctagaatcaagaatatttagctcatgcctaagtttgttaaaagtttgttcatcaagtggcttggtaaagatatcggctaat

SEQ ID NO: 43141 - DNA, 558 bp, Zea Mays
cctgttttcgcttgcatttggggccgctcgtcagtcgttgctcacgtgggtgcgggattgaagtgtcactgcgcccatggccccaccagtcatcccgttcgtgcgcaaacagcccgcgcaacgcgcgcaccgtgcgtgagtccgtcgccgcggactccgtgggcgcgagctcaaccacctccgcggatctcgctgctcaccccggctcggactccgattcctccggccatgctcctcggggtataaaagtggagccgctcctccccaaacaacggcgcgcagaaacaaagggagagcaggggagaaaagaagaaggttgccgccgccgcgtcgtttcctcggaacgccgtcatcctggctcggagtagtcgcaattgaggttcgcgggagcacgcgggtcgtcttcaggcttgccgccaggtgtggcgttctccagaatccagctaattcgtcgccggagtgtttttcgcggcggaaattgtggtcggccgtggccggctgttttgggcgccagatcgaccgcagtgaggtcacgagaatctgaaaatcaccctggta

SEQ ID NO: 43142 - DNA, 1345 bp, Zea Mays
ttctgtaatcagtcatcgtcttttgtcgacaagcccacaagcgttttcctctccgagtcctccctggcctctcaaccactcatcatcgccttcgcaggcatcgccctctcgccgggccgtccgattccgccatggcttccgatgagagcaaaaattcaaaaccagagaagccatcttcagcagctggtgcaggcctccccaatccgtttgatttttcttctatgagcaacttgctcaatgacccatcgataagagagatggctgagcaaattgcaagtgaccctgtgttcaaccagatggctgaacagcttcagaaaagtgctcagggtgctggagaacagggtattcctgcattggatcctcaacagtatatggaaacaatgcaacaagtcatgcaaaaccctcagtttgtgtcaatggcagagcgtcttgggaatgcccttatgatcctgctatgtccagtatgcttgagaacttgaccagtccagctcataaggagcagcttgaggagaggatggcccgtatcaaggaagatccatccttgaagccaattcttgatgagatagagaatgggggtccatctgcaatggtgaagtattggaatgaccctgaggttcttcaaaagattggccaggcaatgggtgttaaccttcccggagattctagtgtgtccactgtgctctctggacctgaagagactgaggaggaaggaggggatgacgatgagtccattgttcatcacactgcaagtgttggtgatgaagagggtttgaagaaagctttagaaggtggagcagacaaggatgaagaagatgccgagggaagacgggctttacattttgcatgtggctatggtgagttgaagtgtgcagaaattctccttgaggcgggggccgcagttgatgccctagataagaacaagaacactccgttgcactatgctgctgggtatggtcggaaggaatgtgtggatcttctgttgaagtatggtgctgctgtcacgctccagaatctggacgggaaaacccccatcgaggttgccaaactcaacagtcaagatgaggttctcaagttgctagagaaggacgctttcctatagagaagagaaccgccgaataaagtgtatcaagccgtcaaactattggttttgcattggtttatttatctcggtctggtatggttgtctgtagcttgtgaatttgatgttcttttcatagcgaatgccgtttttgaaccagtacttgtgtaagaagtacctaggcttgttcttgtcctccatatatgaatctttcacacttgtcaagaattgattacagttattttcaaggctatttcctccgttccc

SEQ ID NO: 43143 - DNA, 2545 bp, Zea Mays
ttcttaaattcatagcatttgagaacaagtccccaacattttcattcgtgcactcttttcttcacttgtgtgcgtggtcttgctacatttgtgctcttgtgtgtgttgcttctccctcccttactcttgttcgtgactgtgatcatattgtgtaaggtgtgagagactccaacttgtggagatttctctcaaacgggaacatactataaggaagataaccaaagtgctcaagtttgatctttggatcacttgagaggggttgagtgcaaccctcatccattgagacaccacaacaaggagtagggctgtgcattcttttttaaaaactttggttcggttttaaaaaacttcggttttccagacattagaaaccatttagttttctagaaaatgaaaaactgagaagtttggttttggttttttactttggttttttggtaaaaaccgaataccaaacttgcactcaagataacacatacaacaagtttacatcttagattacacataatttaaaaagtaaaaattatataggaacaaatatttagagatacatcatacatcacatacaaatatgtgaatgacaatttaattgcatcacacatttagttcacataatcgaataatcaaattttagaattgataaagtttggtattcggttttttggtatttcgattcggtatacagtgaaaaccgtttacgataccgaacttcatagatacaaaaaccgaaaccaaaccgaactaccaaaaaaccaaaattttggttcggttcagtacggttcggttcggtttatggtaaaaaagtgcccacccctaatgtggatgtaggcctcggccgaactacgagataaatcgccgtgtctcattgtccacttacttgcattgcaactttgttcttccgagctctccacttcagtttcattattgttctagtttcaatacacatcttgtgagagtaaattaagtgaagaaattgtaacaccttaaatttgggggtataaaatttcttctctaacatctaccaaattcaggtgttactttctttagtatattaaaaatctaggggagatatgaaatgttgcatcatgctgagcttaaattttgttttttattgatgcacatgtttgaaatattcaaatttgaatttgtggtttggttggatttgaattcaatagagaaaataaaaagaaaagggaatagaaatttcagaataaaagaaaaagccaaaacagcccaagacgccctctccctcggccttttcggtccagtcggctcatctcgcccgcgcgagcgcccgcacgatctctctgtgcggtgggacccgcctatcggcgtcattcttctcttcccccacgcgcccgttgcgccatctccctcttccagcccggtcccacatgttggcgctacccgctcaccctcgcgctgtggcagaacctcccaagttattgggcccacatgcacctgcccttgtttcaaagacctcagacggctatgcatatgcaccagataacttaacaggatctgtccgagtgtcccagggaccccggataaaccacgaacaaccaggatcacaagattaagtaaacacaaatcacacaccaacattttgcagcggaaatctttttaccaaattttacaagttacatcaagttttacattatatttatcggagtggttacagaagtggttcaaagaaataactttaaactattataaattatttatagttttaaaatatatgctagctcaagtgaacatcctcaataagaagtatagaagagttacttagacttataagaaggccgagcccaccggcacttaacaccatcaacagcagcacaaagttaaaacctaaaaaacaacagggaataaaaccctgagtatggaattactcatcaagacttacccgactaaagaaaagactctcaaggatatgctggctagagggattcaaggtatggcttatcaagaattaaagactctgttttgcagaaaagcttactagaagtgggtccttaagccaaaattttacatcacaagttaaattacttttccttaatctagatttgcctaatctagagcattcacttgtcctacactagcttttttttaaaatccaacctttgtttcgcttgttatctacgatgagggtcgaagatccagtcttcatatccgagaagttcggcgatccgaatcgattaatacccagctggggatctccaaccacacgacatatgcttctcttaactcttttgcacatgtctaccattcccacggatcctccaccacatgaacaggtccgcgccacccgagagcacaccaccccttttaggcggtcctttgccaggagggtacgtgccactctcgccatctctccactcccagtgcgcgattgtcttttcatgtatggaatagccgggttcaagcttacccatgatgaggtatgtggccagataaagggtcctagatcagcaggccaacaatcggtacggtccttaaacgactcagacgaagacactacaccgagactcctttctcgtgcaag

SEQ ID NO: 43144 - DNA, 849 bp, Zea Mays
ctcggttcggttctaattacctcggtctgcttaattgttaaataacgacaaaacctgtgaaccccttttaattacatagattatcgaaatgaaaatggcaccaaactcgaacctttgcgagataattaaaatttagtgtccattttattcatcgctatcacgtgttaaggtccgcactcgtggtcgagcagacgataaacacatggggtgttacaaccctccccccttaaaagaatctcgtcccgacattcagaacgaaagacttttaagagtagagaataatataactcttgcccatatcagcggtaaccataaaacagctccaagcaaagtcgagtgtctcagaatatggtttctctagtggacataacatgcattgccctaagctaatttagaaatgtccaccaatagagacgatgtctgccagaggaacacataaggttccatgtgcagtttgctttttctgatgacactgtactatttgagtctgttgggcgagcggtagatatgcgactttacccaaacggaaccagatgcaacgtcttgggtaaaacacacagaaagaagtttaccaacaaggggtcacggtaagttcacagcacacgaggcgggtgtgaatgtcgaataacatcacagttgacccatggccagccagaaaatccaagtccaagaaaaatgatagagactagaaaaatcactagcgaagggatctatagatgcgggctttgcaaccagtccattttatcaagcactaggcatggctcgacttgatcacacatgctggaaaagcacacacgaggcgatcaaggcatgactagagttgtggttaggctgttaacagttagctga

SEQ ID NO: 43145 - DNA, 3595 bp, Zea Mays
tcaggtgtatgggcactccctgtgtcaccgccccggtggttggaagaccatagagtggcgactgtggtgggggaagggtgggtgttggtgctggctgggagtacatggagcccagcaaaatagcctgcgtagctgccatcgaccgggacagttcgtggaccactgtggccacggattccagcgtgagggttggggtaggggtggtggaagatggtggggaaatggtggtgatcggccccgagatggtggaagccgatgattcctactcctacccgagatctccctcatgctatatcggtcatctggtggcagttaagaacgaactgggcgagagggacgacgagacgcgtgatcacgacgtggagaacagtggcggctagggttccggcctccacaaggaagccgactaggaaggagaatgatgagaaagacaggagtgctgtaataaagatttttcaagatatgctggaggttgtaacaagagatatatttgacgaccaccttagtattttagagtcaagtcatggaggctcatatcaaaagcatgatggcacaaccacgtgggataaagagtatcagttgtttcaaccatctggagctatcaagtttcctctacaagtcacgaccacagatgcttggctagaaaagataaaaaggctggaactgctacttacggtgaaggaatctgctatggatgttccttcaaacctagaagccagaaggcgtcttacattttttaccaactccttatttatggatatgcctgatgcacccaaagtccgaaacatgctctcgttttccgcattgaccccttattacaatgaaccagttcttttctctataaaagaacttgaggaagaaaatgaagatggagtttccaccctattctacctgcaaaaaatttatccagatgaatggaaaaactttaaggaaagggttggattggaggaagaacttaaagagagcgaagaaagcgaagaactaaaggaggaacttcgtctatgggcctcatacagaggccaaacactagctcgaacagttagaggcatgatgtactacaagaaagctttgaatcttgaagcatttctagacatggccaaacgtgaagatctcatggaaggatacaaagcagccgagtcagtaaatgatgaacaatggaagatacaccagaggtccttatttgctcaatgtgaagcagtggctgatatgaaattcacctatgttgtttcatgccagcagtatggaaatgataagcgtgctgcacttgctaatgcccaagacatattgcagctaatgaggaactacccttctctccgtgtagcatatattgatgaggtggaagatagagtaggagacaagaaaatggagacagcatattattctactttggttaaggttgctctaactaaggattctgaatctgcagaccccactcaaaatcttgatcaggccctgcaattctgggagaaggaaagcccgaaaaccaaaaccatgcaataattttcacccgtggtgaaggtttgcagaccatagatatgaaccaggacaactatttggaagaatcccttaaaatgagaaacctgctccaagagttccttacggagcatggagtgcggcgtccatctatacttggagttagagagcacatttttactggcagtgtatcctcccttgcatggttcatgtcaaatcaggagcacagttttgtgactattgggcagcgtctccttgcaaaccctctgaaggtccggttccactatgggcatcctgatgtatttgatagacttttccatctgacaacgggtggtgtcagtaaggcatcaaagagtatcaatttaagtgaagacatttttgcaggttataactcaactcttcgtggaggcaatgtaacacaccatgaatatgtacaagttggtaagggaagagacgtcggattaaatcagatctctaagtttgaggctaaaatagcaaatggaaatggtgaacagactcttagtcgtgatatctaccggcttggacaccgctttgattttttcaggatgctttcatgctacttcacaaccgtggggttttatttcagtacactgttgacggttgttacagtttatgtatttctgtatggacgcctttatcttgctctcagtggacttgaagaggggctatcgcagggaagattgattcataatcatccccttcaaattgctcttgcctcacaatctcttgttcaacttggttttctgatggctcttccaatgatgatggaaattggtcttgaaagaggatttggtcaggcactaagtgatctaatcatgatgaacttgcaattggctactgtctttttcacattttcccttggcactaagactcactactatggaagaatgttgcttcatggaggtgctcagtacagaggtactggcaggggatttgtcgtctttcatgctaagtttgcagagaattatagactctattctcgcagccactttgttaaagggattgagctgatgattctgctcattgtataccaactatttggtcaatcttatcgctcaacaattgcctatatttttattaccttctctatgtggcttctggtattgacatggctatttgcaccctttctgttcaacccctcgggatttgagtgggcaaaaattgttgatgattggtctgattggaacaagtggatcagcaatcgtggtgggattggtgtgtcaccagacaagagctgggaatcttggtgggaagtggagcaggatcatctaaaatattcaggaacaataggacgctttgttgagataatcttggctatacgttttttcatataccagtatggccttgtttaccacttacatgtcacacataacaaaagcatcttggtatatttaatttcttggctcgtaattgtggcggttctgctcgttatgaagactgtgtcggtgggaaggcggacattcagtgcagatttccagctattcttccgtctgatcaagtttttgatatttgttgctttcattgctattttgattgtcttgatagtattacttcatatgacctttcgcgatatatttgtgtgctttctagcattcttgcccacaggatgggggatacttctgattgcacaagcttgcaagcctcttgctcgacatgtaggattatggggatctgttcgtgcccttgcacgggcctatgagataattatgggggtgcttctctttagtccagttgctatattggcatggttcccctttgtgtccgagttccaaacgcggatgctgtttaatcaagcgttcagtagaggactgcaaatttctcgaattcttggtggtcaaaagaaggaacgctccgctcgtaacaaagattgattagtcttctttcatgtgtgttccaatatgcacttgtaaatatttgttactgtctcacggggtatagtgtgtttttatgattacaatatgtaaatatcagatcaaggtgtcataattgtattcgttagattactgtgtgtgtttctattgtaatagtctttgatccagcacatgtacttttactacatatatacgcaaagtctactctaatcagggtttccaacatgata

SEQ ID NO: 43146 - DNA, 613 bp, Zea Mays
gccacgacgcggtagagctcaaaccaatggcgcggagagcttcaacgacctaacaaggctacggtgtgcgcgtgaaaccgaccgaggacggcacgggtgaacgggtcgacgcagaggcggtctgcagcgccagttcacggcgtcgccgcactgttccgggcagcacacaatagtagagctagaacagtcaactctgtaagcttcactgacctttggagaacttggaacaaggattacacgggcaatcgggcatgcgactccctggaaatctctggccacagcgaggtgggtgaatcggctgcgtggtcaccagacaaagggaaaacaccacaggatacaggagctgaccaactaagtggttgaggagggaaactcaagcttgtaggcacaaccacaaagacacccgagagatcaactaagctcgaggataggagagcaacttcactgcaacctgccctatggtgactgaataagagggtaggggtagtgactaagcttgtcaagggcacagcatggttgagctctgagggtgccagagcagcatggctagtacacgtggctctcatgcccaagcaccaaactagccacaagcacaaccaactttgaacctggg

SEQ ID NO: 43147 - DNA, 3313 bp, Zea Mays
atcgattcgaggaaatataatatattcgagacctgcaatcgtttcaggcttggtagatacaggtctgggattgccttttcctagttcaacatggagggcgctcttgttcagtctgctattgttccagccgtttacagaagcagctcaggtcggttccgtgtgcgtgcaagggccagaacaaatgctacaatggtgcggaatacgccaacaaggactcttactcttggtggcttccaagggctgcgtcagacaaactttttggatacgaggtctgtaattaagcgtgactttggatcaatcgtggcaagccagattgcaaggccacgcgggtcagcctcaagaggggtggtccgtgccatgtttgagcgcttcactgagaaagcaatcaaggtgattatgcttgcacaggaagaggcaaggcgcctgggacacaacttcgttgggacagaacagattttgctggggcttattggtgagggcacaggaattgcagcgaaggttatgaagtctatgggaatcaatcttaaggatgcccgagtggaagtcgaaaagataattggacgtggcagtgggtttgtggctgttgaaatcccattcacacctcgagcaaaacgtgtattggaattgtcccttgaagaagctcgtcagcttgggcataattatataggatctgaacacttactccttgggctacttcgtgagggtgaaggtgttgctgctcgtgtgcttgaaagccttggtgctgatccaaacaacatccgtacccaggtcataagaatggttggggaaagcacagaagctgttggggctggagttggtggaggaagcagtggccagaagatgcccacacttgaagaatacggtactaatttgacgaaattagcggaagagggcaaattggacccagttgttggtagacaggatcagattgagcgcgttacccagattttaggcaggaggacaaagaacaacccctgcttaattggagagcctggtgttggaaagactgctattgctgaggggcttgctcaacgtatttccaatggtgatgttcccgaaacaattgaaggaaagaaggttattactcttgacatgggcctccttgttgctggaaccaaataccgtggagagtttgaagagagattaaagaaacttatggaggaaattaagcaaaatgaagatattattctctttattgatgaagtgcacacactgattggagcaggtgcagcagaaggtgcgattgatgctgctaatattttgaagccagctcttgcaagaggtgaactgcagtgcattggtgccacaacactggatgagtataggaagcatatagagaaagatcctgccttggaaagaaggtttcaaccagttaaggttcctgagcctactgttgatgaaacaatacagatcttaagagggctccgtgagagatatgaactccatcacaaactgcgatacacagatgatgctttaattgctgctgcacagctgtcttatcagtatatcagtgatcgtttcctgcctgacaaggccattgacttgattgatgaagctggatcccgtgttaggctgaggcatgcccagctccctgatgaagccaaagagctggacaaagagctgcgacagataaccaagcagaaaaacgaggctgtacgcggccaggattttgagaaggctggtgaattaagggaccgagaaatggaactgaaggctcaaattacggccattattgacaagagcaaggaaatgattaaagcagagactgaatctggtgatgtcggtcctcttgttactgaggcagatattcaacatattgtctcctcttggactggaattcctgtggagaaagtgtcgtctgatgagtctgaccgtctcctaaagatggaagagacactgcatacacgtatcattggccaggacgaggctgtcaaagctattagccgtgctatccgccgtgctcgtgttggcctgaagaatccaaataggccaattgccagcttcatattctctggaccaactggagttggcaaatcagagctagcaaaggctctggcagcctactactttggctcagaggaggctatgattaggcttgacatgagtgagttcatggagagacatactgtctccaagcttattggatcacctccaggttatgttgggtacactgagggaggccaactaactgaagcagtccgtcgccgcccatacacagttgttctctttgatgagattgagaaggcacatcctgatgttttcaacatgatgcttcagatattagaagatgggcgattaactgatagcaaggggcgcacagttgacttcaaaaacacactattgatcatgacatctaatgtgggaagcagtgtcattgagaaaggaggccgcaagatcgggtttgaccttgactatgatgagaaagacaccagctataacaggatcaagagcctggtgaccgaggagttgaagcagtatttccggccagagttcttgaacagattggatgagatgattgtattccggcagctgactaaattggaggtgaaggagattgctgacattatgctgaaagaagtgtttgacaggctgaaggccaaggagattaatctccaggtcacggagaagttccgagatagagttgttgacgaaggttataacccgagctatggtgccagacctttgcggcgtgctatcatgaggcttctggaggatagtctggcagagaagatgctggctggtgaggtgaaagaaggtgactctgccatcgttgatgtggattcagatggcaaggtgatagtcctgaatggtggtagcggtgttgctgagccactggaacctgctctcagtacctaaccgaggtcaaaatcatcattggtccgaaatatggccttctttacaagtcagctgggtttctcgtgatggtaaaaactagactgacattacttggccgcccattagttgctttatctttcgtttattttcttttttgttggaagtgaggcagtagggttgctatggaaatgaatagatggagaagcatttagcagacatataatatatgctagacttttgagttgccttgttttgggaagaaacttggaattttcagtttgatgcacttgtattattattaggccttggtagcaacaagatacggatgtcgtctctacgtttgctgttgtacttcagtgtaacttgcctcccgaatgtatgagtattatttatcaagtcccaaataacagtgacggattgctacattctgttttttttgtttgtggatctgaaaattggaattcttagcttatctcca

SEQ ID NO: 43148 - DNA, 1979 bp, Zea Mays
actagagtctagactagagccgcccgcccgcccgcccgcccgtgtgccgtttaccggagcacaacacaacgcggccccctcacggcgtggagtggattgggccgacgccgatcgagagcagaggagaggagcgcggtcggatagggtttgtctgggtgaggttttgagcgagagcgcagggcgagggaaggaggaggaggaggactggctcctggaggaggaggccggccggggcttggatggtcgcggagcgctcccgtaggtggtgtccatgggaaggtcgttcagggactcgctcaaggtgctcgaggccgacatccagcacgccaactccattgcttctgaatttaggagggaatatgatggcgcctcccttcagatgaggatggcatattgccctgctgcccactttttcctttttcttgtgcagtggacagactgcaaccttgctggtgcacttgggctgttgaggattctaatttataaggtttacgctgatgggacaaccaccatgtgtactcatgaaagaaaagcaagcattagggaattttatgctgtcatatttccctccttgatgcaattacatgaaagaatcaatgaagtggaggatagaaaacagaaagcaatatgtctagagaggtacagaagacgagatgaggatccgaaaactgtggtatcagagattgatgataatatagaggaggaatgtggcatatgcatggaaataaatgtcaaagttgttcttccaacctgtagccacgctatgtgcattaaatgctatcgtgaatgtaccaatggctcctttaggaacaaaacaagcagaaccccatacatgagtgagcaagatcaaaaggatgctgagaaacagactcactagaatggtaagaaaattgtacctactttcctaaccgacaacttttgcactgatgtaaagattcacgacctataccgaacctaaatgaccatgaataatcaaagtgcataatagggagccacaaatatggcccagacgatgatgccactgagtaaaaacgaagtcaacacagaaaaaacggaccaacaagatcggcaaacacatcgaaagaaagacaaagccagtgaatcccagaggcactgagtcacagtggtgagatgtttgataaatttatggattgttagtactaaactgaaaagaagtgtcttggtcggtgtgtcattttttgtttgccatgagctccatattacattacaagatcaattcacccttatgaatcattgaccatgaatcttgatggtatgtccgtaactgccattttgctttgctagccattctgtccttcattcttttgccactgtgttccataagttagtggttgatcttcacacgagattagttgagcaacaaactgtaatgggaaaaaaggttgctaattttttttatggctaactaatatcagcttccattcttgcttttcgatgtttacttgctcttgatgtaataatacaatcctatggcatgaggtaggagttttagggcagaacttgaagttatttttcaatacacattttaccacgataccagaattcaggaatgggcgctgcagacttgaataatagtctgataatgtaatgtaacttcaataataaaatgacaacataaggattaggttagaacaatagattaacagcttgtagtgagcctaaaggagaccaagatccatattgtggacttctcttgaacatggttaggctatcttcagcagattccgcatctttcctatttcaaactttattttgtaaacagtgcagtctacattgcaaaatagtgttttgcacggtcatatgcacgatctgctgaggacggccttaggcctgaatttaatgatatcggcggcgactggtgactggtctgtatgttccaatggtgttcctatgtgtcaaccctgcactgcgtgccttgagatatccactgggcttgtttacttgcatgtataacttag

SEQ ID NO: 43149 - DNA, 267 bp, Zea Mays
caccccgggctcatcagcgaggtagtacacctggtcgttgcaccaccggatgtgctactcctctacatacatcttgttcgaggacactcacacaacaacaacaatggtcatcattccagcgcacaagaattcatggtcggtcagtagcgacttacgtggcaggttaggcttcaggtggatgatgagctagacggcgtgatggcgtcgtcgtaggttgcgatgcctagaacaacccgagagtcgtcgacattggcgacgaccatgagg

SEQ ID NO: 43150 - DNA, 1022 bp, Zea Mays
atttgtcaagtctcatgatcgtatcaagatctatttcaattcggctcgcagataccatctgaatcttcacacaccccaccatccaacttttgaacatctcttggggatccttttgtcggcgtgattccaactcggaggcatcacgaagggactgacgtcaaagcgaggtgacgggacaacgaaacgggttgggggcagtgctgaaggagctcggcgtgatggcgaataggagttcgacggagacagaatcgattgtagaaccggaattgtgtagatcgacgaccagcaaggcgaagctcgacgacgatgtcgaacaggggatggcgaacgtgagcgtacgccggggcttgctaaaaatacgacaacgacgatgtggggcgagtagcgcatacacacgttgcaacaaaacgatgggtgttaaaggcttgatatttcctggagcagagaagggtgctgggagttcgcaacggtactccacgacggccatcaccggcgtcgagcaagagcgatttagcgaggtcgacggcgaacgacgcgacgacgaacgacgaggtcgacgacgcgatggggaattaaagccgagcgagccgagaggatacactggcgaggaggaaaccgaacgcgactgcgggtagaagagaacttggcacgacgagggacaatgaaacgctacgcgcgacaaggaagcagaaaactataacaagggagctcagtgcgcagtgagccgaggaatgacggcgatgtcatgaccgagccggacgaggagcacgcggccatgacgagcaaggagcgcgagatgatgggagaaggaaacttgtagcgcgcgcacggcaagctcggcacgccagggagctggggcgcgacgcgggcgagcaggaagggcgcgtggctaccagagagctgcgtgcagagagatcgaagaagaagacgcgcaggagctcgcgcgcagggatatgcagagctcgcgcgcagcagcagaggagccaggggcgcgcgccggcgatggagggactcggccagag

SEQ ID NO: 43151 - DNA, 3037 bp, Zea Mays
gtgagatggctgatatccaagacaaggatgtcactctctttttctgcattgagctatggtgattcagtagaagatgtatgtctttggtggaaaccataatggtcgttactttggcgacattcaggaggagttcttcagcgccttcaaggaggagatggagatcaagcgacaactcgagaaggtgcaggtggcatagagggccccctggtgctttgccatcatctctgcttggatatgaggcactgacaggttccctagatgattctagatttgaagattatcttcacagactgaaccaagattgtgagcacattgtattgctaagacaattttgtcgtacaactttctttcagatgtcaagaggtggatcttgtttctacagtgagttggtgatctggagacgatcgagtgtagagtgttgaaggcacatctccaatattcctacacaaaaacacaatgcacatcaactaacagaagtgcaataccctctcatttattagcctcatcaaactgaattgaaagacaacaaactgaactgaaagtcaacatacatgccaggtaactgtattgcaaaagaatatggtacttatgcacctaaggagaaagggaagaagcatactttttttggctctggtatgtgtagctcccattttagattttaccaagtatcaaatgtacatttcttattgtttgatgactaacatcatgcagaggtattaattttaaaaaatgacgctgaaccttaaaatatattcaaaccattcatttacatcatgcaaaggtatgatattaattccatggatcgatgagttaaatggctattttaagctaaagcttgttttcctttacaagaggtggttttatctaaaagaatatctttggagtggttcttttacattctatgaaaccatcctttttatttgttgccacatgtcagacgtcatatttaaatgtgcatacacaaatatactaattgttttagctgacctagagtttatctaaaagactcggataggctgaatgtatgagttgtttcttgctgtaaatatggattggtaacgaatagagaaattaggtttgctttgtagtattacaaaaatatatgaatccttgagaagagttctttctagaattgataaaatgaattggaatgtggagctgtggattgatgaatctatcaaacctattctacaattgtagcctgcaaatagtaaatacgtacctctgtgtgttcttaagtcttaacttaatatcctaattcttggcaggcttcatgtgttgtatctttctataaatatgaacaaagaataaggttgatggaatttagttgattattaaatgatttgtaagtgctcaaaatggatgacattaacttaattgcagagcaacattgtatagtcgattaaccgtgtttgtaacatatttattctctcatctttgtgttggagtgcttgcaacatattttgtacttgcatcttcttttggtagttaagagtgtaaccagacaactcatccattttcttccatttgcacccaaactttcattgtcttattgttgtcaagcgcataatgtgatcatgttttgcttggggtggcatgaaactatagtgacaatatcagtgtggccatccagtttctgtacaattcttgactacaggtcccagttcaagttagtttgccaaatttctatggcttgtgcagctagcatcttagtgctctttgcaaaaaaagagtattattaagggtttagtctttgagctttctacatagaaggggctacttgaaatcaccataaattttcattgctttcattctctcttttggtatttcagtttggttatggtttaactcttcttttgctatttgtgtcgaccatttatgtcacaataacttcactcaatactctgtacataactgactggtcatgatatcatatttcgataaagtatttatgacaatctaagacacacaaatggtctgtggaaaacctttggatggcaagcttgtatcgtatgccttccaaattttatagtagtaccattttttatttttgtttggatacctcttctaacagagatcttggtaatttgaacttatatggtcatctggtgcctgagcttggaaaattggagcatcttcagtatttgttatgatcaccgtaggcaggttttctccacacagatgggtttgagcaaccaggacattgttgcactttttggtggtcacaccctagttggtggaatcagggaagatgccacaagaacaggtttgggtttgagggagcttagacgtccaaccctttgatctttgacaactcttcaaggagcttctgagtggagagaaggaaggccttttgcagctaccaagggacaaagctctcctctcttatccatccttctgcccacttattgacaaatatgtagcagtatatatatctttgatccttgtcatttgttcggggtcagtttatgttaacctgggtggctgtaataaatatttgtcggccttgtgttttgttatcttcttttctcttgaatggttcatttgaagatggggtgaactaaactgaatatgtagtctgtatgtttttatggttcatttttcttttttatttatctatcatatctatcggagaagctttgtcatatgaagcagagtatggtaggttggtggggcattgcagtgcagtggcagcgacactctgattaactatgccaacggattgatcattgcatttcctctgggtaactcagcaggcaaggggcctcgaaatgcaatggttgtcaacaaagaaattgtgacagattggagtcgatgatatatatgtcgtcactttcatgtaatcgttatacactaacattctgtcgaataaagactagagtcgataataatttgccgtcgcaatgcatgggtactatactatttgtttaataagataaataaaaaaggaaaccctaatggtacttagatgtatagttttgtgagattaataatatgccatgtgtgaattgatccctggtataattttgtgtctcac

SEQ ID NO: 43152 - DNA, 1727 bp, Zea Mays
ctccctctgtggcttgcttcttcttggccatgcgtatataacaactcccaccactcgtgatctcctcttatcgctccctcccaattcctcccctcgattctccgggtcgatccggtcgctgtccggcccggttccagtggaggagaatcgcccggtttgaaggaaaggcttggaaaggaaggcttgaccaaattgacctttcaggataggaataatttcagacaggaaggggaaaaggttgctagtacagcaaattcgtttgggcgctttggttgtgctatgagcaggcacatatatatctagactgattataataggcagttatctgacatggaggagcacatgggaagacgaacagtcggcggcctgctattaaccaagggaggatcaattcttctcttcagagaggacggttcgcgccccagggccaagaactgctgctcgcgccatggctgcagtggtcatcattctgttggcaaagccaaaggcaaggaggtgcacagggcagcggtggccaatgaatcaacaccggctaccccacggagaccaaagatttgtaggaatcccgacagaatgccaccacatggaaccagtgctccaggcagcatcagcaaggatgcaggaggctcttgtagcgaaaccggcaacaggtcaagagacactcccggtcccgggcgtgatctactggctcggctcaaggagagggtcaacacatcaaggaaacggtcattgaacagggagaacagcccacagtcaccgagtggattcactgctagttccccgagcaacagtcgatcagtctcgctctcaaggccgtcgcaccgggcagcttcgagggtaagaagagctgatgaaggtgcaaatgcaggagctgacagtgtgcacagaaatggtgctgggggtgctaggaggagttcacagaggggtgacgcaggcttgctgctagttgagcagcaggtagcaagaaaccatgtgccttctgaagggtttctttctgggttcatggcgagatacagaagcgggcttcaggaagggctttcgtccctggacgacagcgtggaggattcaaatgggtacttgcgctttgatacgggtggaattgaagagctccagaactatttaatattcagcgatcggcacagaggaatgaggatggatatcgacggcatgtcctacgaagagttgcttgctttgggagagcggattggtactgtaaaaacaggtctttcagacgatgcattgtccacgtgcctaaataggagcctctacatgcccacagctccagggtctcatgaagattgtgaaacaaaatgcagcatatgccaggaggagtatttatcgggtgaggatgtgggcaagatggcgtgtaaacactactaccacctttcctgcatagagcactggcttcggcagaagaaccggtgtcctatatgcaaatctgttgccctgaaaaccaagtagcaacgtgtttcatgtttctttatagattcttcatatcctttatcccctccgcacctctcacattttcccttttggaattcttttccttcctttttcttactcaaagcactcatttttgtatcaatttaaatcagaaaaggaaatcttgtgttgtgttagcaacttgctgcgagcctggaccctgttggcccaaggcctagtaagaacaacccaatttattacgggagaagtccactgtctgctcaactgttgaaagtacagaaatg

SEQ ID NO: 43153 - DNA, 2473 bp, Zea Mays
gaactctccttggatgctaagaagaatgcaagcaaaggggctgatatgaaacaatcccatgaaaaatcaaaggataaaaagaagttcaaggattctcgaaaatcaaaggagctcaaggattcaagctggagcaaccagtctctcattcaccaagacagtaccgatgagggaacatcagagacatctcaaatgcttgctgattgtgatgatctgtgttgcaaatgctcgacaagtgaggattacttcaatgaacaagaggaagaacttaggcatagggtacaacttgaagcagaggaaagaaaattggaagaggctctagaatatcaacggtggatagaggaggaagcaaagcagaaacatcttgcagaacaatgtagaagtacacatgcatcttctgttattggcataaagtttggtgactttagctacaccgagaacgagaacaatttcagccagaaactcaatggaatcgagttcgactcatctgatgcacatgcattaaccagcagtgatatgagtgtttctatgttgacgttgaaaatgaatggggtttgcaataatgcacaacctataaagcctcttggtaattttggcacccaaaatcccaagagaagttctagtgaaccacaaaggtattctcaaggtcactctgcaggaatagagaagccaaattttgagaaagttggcagtggtgcaataccatcaacggatgtgtgcatcgaggatgattttgataaaaggtttcaagaagatcttgatgaagcagtgcgccaaagccttggatgcgatgcttatcctgctggtacagtaagcacttcaaatgggacagaagtgtatgggactggacttaaaaatgctgctggtgaatacaattgttttttgaatgtgattattcagtcattgtggcatataaggcggtttcgggacgagtttcttaaaacatcattactgcacaagcatgttgaagatccttgtgctgtctgcgctttatatggtatcttcattgacctgagcaaagcatccaagggacaaagagaagctgttgcacctacttcgttgaggattgctttgagcaaatcctacccaaacagcaaattctttcaggagggacagatgaatgatgcatctgaggtactgggtgtaatctttgagtgtttgcataagtcatacacttctcgtactgtctaccatggtgtatcccacgagaaaaattctattggatcatgggattgtgcaaatatttcttgcataacacataatctttttgggatggacgtatatgaacggatgaactgtcacaattgtaagatggagtctaggcagctcaagtatacttcatttttccacaatatcaatgctagttcactccgaactgcgaaggttgttataatgaatgatcaactagcttgtgatcaagacgttggcggctgtggaacaccgaatcatatagaccacatcctttctaattccccacatgtctttactgttgttttgggatggcagaacaacaaagagagggtggatgacatatctgcaactttggctggtatttcaactgagatagacattagcatattctaccgtggtctagatcaaggaggcaaacacaccctggggtcagtggtttgttactatggccagcattaccattgttttgccttcaaggatggacggtgggtcatgtatgatgaccagacagtcaaggttattggtagttggggtgatgtgctcgtgatgtgtgaaaagggccatttgcaaccccaagtgcttttctttgaggctgcaaattaattattcttcagagtcgcaaaacgcgctacagcggttaacatgccctcaaatataggttttttccctgcggccatgaagattagaaatagggtagcagattcgttttgagcggggatatatagtactagcattcaacggtgcttttcgttgtgagtccgtaataagcagtcatctgagcattctagagcaaaaaagggagctgtttatcccccccttttttgctttaacctttggtgtaggcgctgaacttctgatctcatctgccaataaatcttcactgccgatcaagcgggtggagcattcgacttgaactgccatccaacagttgtagccgaatctgcatgaactcttcgttatacaccaatcatctatagaattttctgcttacattgggccgggcgggcgttctctctctctctgttttttttttggggtgggggtctggtataggagtgacagttttgaggccaccagatatagaatggaatgatatgggaatgggtgatgcggtgtgaactgtattttgctgtggatgatcttttgaaaagagtaaagctatctggaatatggatatggtaagaaatctgtagtacacgagtctatatatacaatgactcaatgggattatgcgagatgattataacgatgaataccaaaatctttatcacaactgttggttaca

SEQ ID NO: 43154 - DNA, 3917 bp, Zea Mays
ccccatcctctctttctccctcgcgcttgactcccctgccaccccttcccgtctccaccccgacgccgaccgcactccgctccccgtccaccatcccagcgtgatggctgggaggaccgcgcctgccccctcccctccttctctctcacgccctactccctcgccgccccttcatcccagatctcgtcatgggcgctaccatgaccaacagttcggtggagcaggcgccgcacgctacgccatgggacggagcccgtccccacccgacaccgaccatctccaccccgagcccgtccgagaagtgagtgatttccatttcttcgattggatggcgtgcggtcgggcctccgcacctccctgtccccctcccctcctgcggcgatagcttcctcgaggagatgagcgtgccgcccccatgatcggtctacctccgccgcccccgcgcgcaccgcaaccaccacgcccctcgtgcaccttctcgcccgagaaggtggtttcctttggtgtccccacgtgtttttgtcgttgcaagttgaactcgccctttcatgcctgatattttgctcagactgcattggagaatggctacacaaagatcatgctgccaacatgtgcttctggaatagcatgccctatgctatctgcaactataaaggctaagctttaccagccgatgtcctgtatgtcgatgcacgatgggaggtacttgtggttcttcaacttcatggttgtctggcctagccgccatccgcccgcgcaaacgcggtacagctccactacagcagcaggaggcggtgacgtcgccaaaggctggcagatacttgatggctcttgataagaagcctattgcaactaaaggccaccacctttgttgtcctcaccctagccgaggacctcatctcccagattcagtggcgacaaaatggtccattagtggaaacaccaagcatcatggagagctgtttcgtcaggagcttcgaacgcgagccatagacggggagttgatgccactgggcttatgggctcttcttttgggcaccaaagcaaagagcagtggataatatttggaatggtcataagtcaaactagacttccctagcgacagcgattcaacgaataagaaccaggccaacatgtagtgagaccgagagcatgaggcttcagtacctgtctactaacatcagatgcattagttgatgtcttgattagttgtagcagggaaccagcttccagtgcctcttgtaccgatcatcagcaagggagtgctagaggaggaggttatggtgagttttgtcgcgactaatggtgagcccacgactacggccacatcaaagctggtctggtggaacctcgtggagcagatgacgatgacgccgacatcctgcacctctgctgcgacgctgccgaccaggacgcgggcccctccgtcgcgcgcgctctacaagtctggatccatcatcgtgctcggcaagactgacttccttaggccagacatggatcccataaccagatggacagccacaaagaaaagtggcctgattagctacaagaagctcttgttccatggactcgatctctggaccgcactatcgttgcctcaacccctaggtcgtgctgccctctggcctcctcatcgtacaattcaccaacatctccaactctcttcttcaagcaagagatggagctttccttggtcgggctccaaaatgctaggaaaacatcacttgcagcagctcgcagcgacacccccgcctcctcatcatggaagttgtatctgtttcagaataagcaagtgtcgtatttagtaaaccagctcgtgttctaattcttttgcatgcttccattttgttgtaggctacaagaacactttgagtaggtgaagaggatttgcgacactaccacattgtctttggccatgcatcatctcagtgataagataacaagccaactagatatttcaaaattgactgacaagctacagtaagggaaggtagactcaactgcattgacaccaaaggagaagtatgaaacttggaaggagattaaaattatgagtttcagaaaaatagtttctccaatgtgggcaatgacattgcttagcttgtatgttagagttcatgtcaccatattaggcagaatctgacgcctttaatgtaaatggacacaagaccttcgttgcaatggatgattatcttgtcactgacaaaatcactgcattcatagtgcaaacgcaacatgcagcaactgaagtccttaaagaaaagcaaccaaaagactgtatgaaatggaccaagtattgcagacaatattacaaatattggacacgttcatggctctttctgaagatactcatggagaaattatcttgtacctgagaatcccccttatttttgcacaattgatggttgtgtcctgtagtggctttgataattcatcactcctaaacgattttagaaagctataccaactaatgtgtggaggacctgggcaaggggtggtagtcgcgctggttcgctatccacggcggcaagccgcctactcgaagatcccacctccgaggacgccgctacggggaggacatgggcactaatcttgaactaaaactaggggggtgtctatgtaagttaatactttctctcacatttgcatcaaaatttgttttccgataatcaacagatcttgacatgtttctatgtactttctctcacattgagagttttttagattcagtgcaagccatctttatttgcttaatgagtcatcgatcttgacacatttttcatattcatcatagtttttactcattctttacatgtttttgtccttttcagattcagtacatgtaagctttctttgcttggacaatctatttctctttacttggatattttcttttagattaagataggccacctttatttgcttaacgtgtggttgatcttgacatgtttttcagattaatcatatttttattcattcttgacatgcttttgtctgtttttatattagtttttattcattcttgatatgctttcgtctgttttctcagattagtttttattcattcttgacatgcttttgacttttttgaaatttagatcagtacatgtaagctttctttgctcgtacacctgaccccacatgtgttagcagtctctaggtcatgttcatattattcatccatctctgttatatagatagtcgacacatccatttatatctttttatagggctaatcattgagatatctcttcctcttggtcctcgtgaattttttgttcgttctatgatgagaaatcacaaattcatatctttttttttattttgggggcttcacttttttaaaaataaaatgtaaatatttggaccccgtacgtcgcgatcgcatccaggacggctggttccgcctacaaccacgtggacaacttcttgcccgacatcatctcccagcttgttccacctacaaccgcgtggacaacttttcacccgacatcatctcctagctcctcgcattcgccaacaagttctgctatgagggcttgaagccaacctacgacaatcgggtcacaaccatggtgttggctcttgacgacgcctgatccctcatcgacatcggcctctaggaggcctcccacctcctcgtcacctcgtgcctctagcattcctatgggagcccccaaagtcactcacccacctagacatcgcccgtgttgttatttggtggtcagtatgtcacaatatagtcagttttttttgcttatgttgttggtactgattttattggatgtgaatttatttatcctttcattgtatattggaattcatgacattatctacatatgtacatgcttacatatctattatatttttgtataaatatttttttgatagtttttaatttgtatggcaaagcaagg

SEQ ID NO: 43155 - DNA, 453 bp, Zea Mays
aaaaacacttgctgaactatctctacaagacagagatgtgaccattcaagtccaagtcaacaggaaatgggaatttaaaggaaataccgatgatggtcctatcttacatgttgacatggttctaacagatgcaatgggaaatgcaatctatgctgaaatgcctagcaaattaatagagcaaaaaggttcgttgttacagttaggcaaagtatactacattcgacgcttcagagttgcaaattcaaagtcacagtacaaagttctcaatgcccctctcatgatctatttgactctttactcgatcattgatctttgtcgtgatccaccatctacttttccactttatgtctacaatcttactacgtatgatgatatagatgcaaatggaccaaaaagtaaagactttcatgtggcgacatgctcaaagttactctttggggaaatcgagcgtta

SEQ ID NO: 43156 - DNA, 1202 bp, Zea Mays
tgtgtctcagcgtacacgcgtacctgcgtttggcgtctccattcgtcggcgaggaagaagctcacgtcgagaaaaccctcggccaagggcgagggtgacatctccctgtctgcaacgattgggtccgccgccatatgggtgtcgaggccttagtcgatctcttccccagcgaagagcggcctccaggatattttatcacagatcttgtcgcggttgccaataaatgatgccgtacgaacaagtgttttatcaagagagtggaaacatgtttggcgaggccacaacaacctaacttttaattcagctacaatgaggaaacattattccaagaccgcctttggttatgggttcatcaatgatgaggaatttattacgagagtagtcttgcatcaccatagtggtacagagatcgagcatatggaagtcaaatatgggttacacgacaagcatggaaatcatattgatagatggattaatttcgcgataacgtcaaagacaaaggaacttatcattgacttaaatggtggtttcaagctatcattgtccagagatgtctcacatggcatacacagaatcagagaagaaccttatagtttacattcacaactttttagtgtcgataacgtttcatacttgcagcgtctagagctcacttctttatctctccatctacccgctgatttcaaaggattcatctatataaagggtaaagatctgaatccgttataagtcggttctcgagttaatcccacatgttttactaacaaatcccgctagaaatttggaacctaactaattttgcgcatgcgcggaccgttcggtcccagggacgggcaatttttttgttcaacacattggctccatggccccattaatatctggttcaacttcaggccgcaaaacatttgtattgagttaatgccctgtaatggtattcttgactacatggtcactggattccatagtactttgccaagtatcgagaccttgaccttacgttgtgcacaatggaagagaactattttacctggaaaccctttcgtatttacccatcttcgtcatttgaagttagaactaattctgcctggcaagaaaaagataaagactgatgtcctcgactatgttatctcttggaggttgctcctttcatcgaaaaactggagctgctaatgtggttgcactgcccacgccgactatataag

SEQ ID NO: 43157 - DNA, 766 bp, Zea Mays
ggctaaattaaatggcccgttaccacctctaggtacaccgtgcaccggagattgtggagttctatcaaagtctcatgaagcgtgaagcaaaaagagagacatctttaggatcaatgtcatccaatgtttatgatgccagaagtaacatgattggagagatcgagaacagatcaacattcctcttagctgtaaaagctgatgtggagacacaaggagaatttgttgagtctctagcaaatgaggtccgagcagcaagctttgtaaatattgatgatgttgttgcatttgtaaattggttggatgaggagttatctttcttggttgatgagcgagcagtgttaaagcattttgattggccagagagcaaaacagatgcaataagagaagcagcttttgaataccaggatctgataaagttacagaacaagtggagcagtgtgtctatgcactactccgtacaagagacatgtccctcacgctacaaggagtatgggatcccagttgactggttgtctgattccggagtagttggcaagcttgcgaacaagtatatgaagagggttgcatcagaacttgatgcgttggaaggcactgagaaagagcccaatagagagtttttgcttctccagggtggcagggtgtgaggttctctttccgtgttcatcagtttgctgggggatttgatgcagaaagcatgaaagcttttgaagagctaagaagcaagatgagtacacataaatctgctccacagatatctgaaggctga

SEQ ID NO: 43158 - DNA, 2004 bp, Zea Mays
ccgcatccgacgacaacgccatcacgccgtccagctcatcgtccacctgaagcccaacctgccacttccatccatcgccgctcactcccacgatcagcgtcgtcgcttatccgcaaatatctctcttcctctttgcagtcggcaccatgggttccgacttcaaatcgatccccttgatcgattcaggtatcctgatcagattctgctctgcgctgccctgagacatccaaatttcttttcctcgcatttccacctcaatcgcgctgtaacaccttcctcccatccccaacctcaagaatttggtatccccgtttgggctgcacgttccatgtgggttcaggcttgagagccagctgcccccgtttcttgttcgcctcctgccgccgccgccgcagtgccagtaacttctgcaagcgaagggacgcaactcctcaaggatttgattcatatatttgactctggcttcagtagatacagcttctgttattcgccctctctctgtgcttcgatctctcggttttataacgagcgtacttgtttgttcccaccactgccagatatcggcccgcttgtcgaaaagattgatgatccaagcatggccaacgataaggatttactgcaggttgtccggttactggatgatgcttgcaaggaggccggattcttctatgtgaaaggccatggtattgatgagtcactgatgagggaagtcaggaatgtaacccgtgaattctttcagcttccttatgaggaaaaattaaaaattaagatgacacctcaaagtggatatagagggtatcaaaggataggggaaaatattaccaagggtaagcctgatatgcatgaagcaatcgattgttatactcctattagacctggcaaatatggagatctcgctaaaccaatggaaggatctaacttatggccaaaatacccatcaaattttgaagtactgctggaaaattatatcaaattatgtagagacatttcaagaaagataatgcgaggtatagccttggctttgggaggggcaattgatgcttttgaaggggatacagctggagatcctttctgggtgttaaggttgattggttatcccgtagatattccagaagagcagcgcactgatactggctgtggagctcatacagattatggacttctaacactggttaaccaggatgatgacatatgtgcccttgaggtatttgttcaggtttggacaaatggaatatatcagcccacccttcacagagttgtcaacaattcccagcattaccgtgtatctgttgcattcttctacgagtccaacttcgatgctgcagtagagcctgttgagttctgccgggagaaaaccggcggtgctgctaagtacgaaaaggttgtgtacggggagcatttggttcagaaagtattgacgaacttcgtcatgtaaatttgctaagtacgacaaataaatctgcattgcagcatcagaactccagacctatttggtgtgtagtgctgtaccagaaaggtagtaacggactaaagcatgcgcccgtctctgaaatttgaccttaacaagagtcgcagacttgcagtgcaggtgatatcacaaggaaatcggggggagatttgttctctctgctgcacggagttgtcgacaaccctgtcgctgaaatctgaatttagcatcagacaactggagatgctacgagtccgtctctgaaatctgaatttagcatcaggcgcgaaattgcctccatttcttcgccaaaccatctaatgatggaagctttgtagctggcaaggccatctcgtgtgacgccgcagccagacgatgccagcgtagcaagttacctaccattagcactggttaactagctagccatactagtgaattactctattccgatcaaatgttggagaattcttttctcatagatactttgatgaaaagaattggtaccaggaaggctatgttcggttctaccacaattcatatgtatcgagcgagtttca

SEQ ID NO: 43159 - DNA, 2488 bp, Zea Mays
aaccgctacccatcgcaaacgctttccctccactcgtccgctccggccgcgcgcctccgccccacgccgatgccgcccccgcccccaccgcctctcggcctccgcctccgtctctccctcctcccgccccaccctatcgctccttctatccgtcatgccttctgctcaccctccgtcgtgtcctgccatctttcggtgcgccccctcgcccaacgccgcggtgggcgcccgcgccccctctgcgccgcgcggggcgaggccgaggcggagggcttcgcgtggccggatgggtccgaggaggagctgcggcggctcctggagctgctccctagggagctgagtcggcgggtggagacccacccagagctcccggcgctcgtggaggtggtcatggacctcggccggcccccgctcgcgcgcttcccgtccggagacttcctcctctcccaacgccccatctccttcgacgacctccgtcacgctacctcccactcccaggttggggactttggagcggataatcgtgctggaatcagccgcacgctgcaccggatcagcgccattaggaatcggaagggcgtcattgtcggcctcacatgccgtgttgggcgtgcagtgcccgggagcgctaatttgcttcaggatttggttaaggacggtggctcattgctgctcatcggcccacctggggtggggaagactactgtcataagagaaattgcccgtatgttagctgatgactataagaagcgcgtgatgattgtcgacacatctaatgagattggtggggatggtgatattcctcacccaggaataggcaatgcacgtaggttgcaagtgcctaaccaagacatgcagcataaggtactgatagaagctgtggaaaaccatatgcctcaggcgattgttattgatgaaattggaactaaactagaggccatggctgcaagcaccattgcacagaggggcatacagcttgtggcaactgcccatggggtaacgatagagaatctgatcatgaacccatcactagagatgcttgtgggaggaatacagagtgtcacacttggtgatgaagaagctaaccggagaggagttcaaaaaactgttctggagcgcaagggcccatcaacatttacatgtgctgcagagatcgtctccaaaaaagaattacgtgtccatcgtagtttggaagccacggtagatgctttactcgcaggtaagctgcctaattttgaaattcgaaagttgggttcaaagggatctatgcaggaagtttctgtgcaaaaggaacaatcacatcttggtatttatgatgcaactgaatttggcagtgactctctaaggaatgccagaagaagcttagactctgcatttagtcttgactctgctgaagggcatatagtgaggtcagatggagctgattcaagctttaatctttatgcatatggggatgttctagatctccgagtcgactgccttgcaagccattcatcagctggagttggacgacagtgttactttaacttataatatcagtgaagctgatgcagtgatcgcgttacattcaaagctcaagaagaactatcagattcaggctgtgctgaaatctcaagatataccggttttcctcgtaaagacaaactccctgcctcaaatcaccagggcactccgtgctcttgtcgacgatcacatggacgaagtgatagactacaatgataaagaagaagcaaggtcatcagaagaaaccgatgctctggaggaggcaaggctggcaatcgagcaagtagtgattccgaaaggcgagagcgtgcagctactgccaaggccatcaagcatcatctcgtcccaagtgggtctcgtcgaaagcttcagcctcaagtgggaggtcgtaggccaggagcctaaggcatgcgtgaggatccttccgcactttgcgccaaaacaagtcgaagctgtcgcgcgagaaaccccagcggagcccgccgactcggactgggagagccacgatgactcggatcatacccagagtggcatcaccaggctacctttcctaccggattagcgcggcgtctggcgtatcctttcagttcttcgtggccctgccgcctgctgtgtatgtattccatttatttatcttggtaataacttgcaccagaaagcacttgcgtggttgcgtctatctacctacgtaatataagtggatagtgctccgatccggcctctacgcgcgcgtacagatatatacagtatctaatctgttgtcgacccgtacagtcatatcatccatgcatctcttcccattttttacatgctctgccaattccccaagtgctgcgtatccgttctaatctagtactaccgaacaagataaagcagcaagctagcatataatcgggtcgttgtgtttgtgccttttgactagttgtccaataatataattaagctccatccttgtacttgtaccagcacatttcttatatatatg

SEQ ID NO: 43160 - DNA, 1111 bp, Zea Mays
gctcaagtcccagatactgagcctggacgcgagctcccttctcacgctggcttgggcgctgttgctgctcttccatgccttgagctgcttcctcacgcgctcgaccgaccatctgtcgctgctccatcgcacacgttccagctcgccggcctgcttccacgccgtgccgacgctcgtcgtgcagccttgcttgttgtgcttgccgcagttccccatcatgctgtgagctgcaacatgctcatggttgttgtctcctcatcggccacgctcaacctcgcagctccttcgcgtcgttgatttccttgacccacagcctctcttccgacctcgtcgtgctcgcggtgtcatcgtaaagctgctagctgcctgtctcgctgttcctcatgcccagcaggccgtcatgctcggcatactttctccatgtggttctctcgcttcatcggctttccgcgtgttagagcaggtatggttcggatatatacgtaaatgtgggagaaagtccgagaaaaatgggcatctaatgtgttcgtgtaaaatgaagttgtttagcatgttttggatggttagatgagttctaaggataagtagctccctggtagttatggcttttggtgatagcttgtaattgtaatttcgtaatgcttcgtaataccttccttgctagtagcatagacacaggcattcataatcatgacatttcatatagagtaccaagaagaagtgatttgtgaagaaggagcctgttctagttctgctgatccagtggtggattccatctaactgcttatcgtaatagaagatctcagatttcctactgtaataagggacaatctgcagcatcaaacaaccctcatggatagcctagcccatcgtggaaccaatccaaccgcccacctcattgatgttcttctaaacttagttgtaagacatgtttatggcatatattggatgtttgtggactcatttatgtgagtacttgttagtgctgtgaactattttgtgatacttgtgactttgtgatctttgtgaagaaacatgtgatctttgtgagctatgtcgtgtgtttgatgtatgtgatgattctgtgagctctgtgatgtatatgtgatga

SEQ ID NO: 43161 - DNA, 1856 bp, Zea Mays
cgcatccaacatgccggacgcgcgccagccatcaccgccgggaatcctgcccgcagcccacacacccgccaacccctgtgcccccgagatctcgcattcgctccgtctatggaaggccaccacgcgccatgcccagccatcctcggattccgccacctcctcctcctcctcgccctcatgcggccagtgatggattccgcgcccctgtgccccgagatctcacatccgctccgtctatggaaggccaccacgcgccgtgcatcctcggattacgcgccccttcctcggacaccatgccctcgcatcccgcctcaggatgcctgtgtcgtcactacccccagcccccgccccgccccatcaacgcgcctccttcctcccccgaaacgccgcgcccatctgtcttctcaacccccgcatgcatcgtcatcccctcagggaccgccgcacccgtcccccttgcctacccgcctgcgagacagctgccgtcatccacctgcctgacgccgctcgcgatgaccccctcgattcccgggtcttcacgacccacagcgtgacgctctacaccgacgacggaggatagctccatgaccaccttctccatcgggagagtcgccgccaccgcgagggccagatgctcgacatctgcaaggccaaacgcgaggaaagcctccaaaagaagcgtcacgatggattcctcgcctctaccgctgacatcgtgccgccgatgggccactccatcgctttccagcagaagcttgatggcttgccagcgatggtacaggtcgtcctctccaacgagcccactgtgcagctcaaggccaccacacagtttaggaagctgctctccataggcgaggttattgaccttcaggcatatgttgttaagggagttggaaaggttcaagcaaagtggtctccagttggtacaattgatatagaatgctccatgagaggtgaaaattagttttccacgtgcagctctacacatacctcttccaaagatatctctactctagcagcgggtagcgaagaggggctcatgtgtctgcatgttcaggggagtcgatggacaaatatcttggtacgctattgtaggtggtcaaggaatccaaatggaggcaatctagaatctctcagatataagcaaggttacagatttgatgtggatattcctgaccaaacatgggtaactatatagaaccatgcctcttctatctgagcattcaatagacactgcaacaaaaaggacttgtctgttttctttgcaacatcagctggtctgcttctctttggttgggtcttgtttgtcaggaacatttcattttcgcaatgtgtgaggaataaacacattttcagaggttcaggagttttgttacataattgaaattgttaggagcacacattttagaactaaatttttgagttgcacacacatttcttttgtttcagaactgaattttggaggtgcacacacatttattttatttcagaattgaatttcttttgttttagaactgaatttttagtgaagagcacacatatttaatagttccggagcacgacatttcagaactaatacaaaactgaatttattacagagcacacacatttcactttttggttgcttgctagaatttactctatggagaggtgccattgcatacggcaaaagttgagagcagcttgtgaacggaatttacagaaatgtttttttgaggctggtagattgtcattcaagagctaggaaaacttccaaaacaactcattttgacaagaatgccgaccattgctgcaattacttcacccttggctcccgcactaactttgacggccgactgcagatcttcttcgacata

SEQ ID NO: 43162 - DNA, 511 bp, Zea Mays
ggttctcggcctagccgaactgtcctacgcgacaggcttcgattcccctcgacgcaatcgagtggtatgtatttctagtagattgaatctgctgctctcattgaggatcgaagaagagaaattcggactgtgattaacaaagagaaaaaaaaatccaaccgaccaccgcgtgccagcagccacgctcgagccggggccgcactgcgcgctggagggctgtgcttcaccgtcagctgcgcccatgccggaagccgcgtcgcgcccacgccggggccatgttgccgctagtggcgcgcctgtgcctcgtcaggccctcgcccgcaccgtgttgtggatgctacagtgctgcaccagcgaccacctgtcgagcgcgatggtctcgtccttcttcctgtcttggagtcatggactcgtggccgagaggagctcctgatccattttttaggggcataaagagagcacgtcatggactcatggccgagaggagctcctgatccatttttcagttgaa

SEQ ID NO: 43163 - DNA, 4348 bp, Zea Mays
gtccaatactgctatagtagcttctccaagttatgacactgttaggaagatggttcaacttctctcgaaatgaagcttctgtcttcctatgtatagacaagttgttcagttaggaggtctagattctcttaaaatggtgctatctacgagttaggaggtctaggagcacactgaatgttttagaggttgatgaaatcgttgttttcctaaaaaagcattttttctgctttgtttgaaattgtttgggttttcctccccaactttcataattacctatttctattgtatgtttgatcatttggacttctactccatccacaattttggtttattcagtgaggaactatgtttttaaccactctatagtttgtatagacatgcaacattcatctcagggtcaagaaagaagctcaacttggcatgcttcctgtttaaagcaaggcaagaaacatccccgccagatctctgtcgccaaagcagggctggtgaagaagttgtgtttccctcccggattgtcactactttcatatttgttcatttatgtttgttccaatttatgttggttttttacagttacagaatatgtttgttccagttgagttccagtttgaaaactggaacaaccactagcagatgcaaagttcacaaagtagcttgtcaaataatgtgcatgaactggaacaagcaacttgtgcacgaatgagcattactggaacaagtagcttgtgcatgaacgagtaatactgtagatgattggacatgtatgtctattttagatttttaatatttaatgttatatattcagctcataccatacatgaatttgcatttctgtactatactcacttaatgtcctacctgttttgttagcttcaactatccgctttaaactgacaaaaccagaccaaacatatgcaaatctcatatacctgtgaaagcaacaactgatttgccagattggttaattaaacgtaacaataaatagccccgattaaatggcttataaatatacttggatctgttcatttttcacatatcagctattaatgaagccttcactgggttcattttgtactactccattacttatttacagttacaagtattctaagaaacttaatatttcatcatcaaagttgtattcagacagtttcatttacattgctctgattttttgtactaggagctactgacaatggaaagcaacgattagagtaacttgatgagtgaggactattcattcagttgcttcgatcaataagtgaactaatggatgcatgtttcttttgataagtgagctaactactttagtcacaaagttcgtgttgatttctaaacatggtatgatggttttgtcatcctattcgattgagtttgggaaaaagcctgcacattctgaaaacaaacagactgcacattgtgtggctgataaggttgagtgggtaaataagatcaaagctattatttagacatactgaaaatatagtgaaggaagcgtaagcaatttttctgctatatttatgcattgtatccttgtaaaattatcaatattgttctgacttgtggggaaaggtatgagagtattcatttttttgcctcttttctgtttgcattccttcttcagtataatgtttgttagaataaccaggtgaatttacaaatttcatatccatatactttcttcgatgacaaatataaatctacctaggtttgtcataactcataggtcaatcattctaacttcaattgacattttttataaaaagtatcataaggaaaataatatattatcataaaagtgacgtccatctatatcaaattttagatattgatggtggtcagagttaaaaaacagtttgccttaagacaaaccaagatgaacttgtatttacaatcgaaggaaatattgcacattgcctagacatttaatttattagataaattcttttgttagttgttcaactttgtacgtcttataagtcacaggaacaatgtttatctagaacttcggtctcaaattatacagtagtgttcagccatacctgccatgtcacaagaaagagagataaaaagtatttaatagtagacctaatgatgctcatttgtaattgtagatattcgtatatcctttttctgcaaccttgtgaaacatgtgatggtttgacttggaacaaactttgggtctgatatagtaaaatgcaatgtatgtggagggaagtagtagaacaagacagaacaagtgccaaataaggttatatagtagaatacaatgtgtggagggaaatagtagaacaacacaaaacaagtgccaaataaggttacaaggtttatagtagcgattgcttagctgctacaacgacactcatagattagcctggcatttgcaatgtcgctcttgtatttgccataacctcacttaaggtcacacattgcctctgggaccttgacctccgctactgttgtcgcctggccgcgtcgacttcaccaatgccggggtgtccaacctcatcagcttcaccgtcgtcgactgctcccacacaaccgagctgtgggtcctggtcacatatggaaagtgaagaacccaaatgatttcttcacaggaagactgctaaccttcacacatctaataagatgaagcaacaagctagaaaatgtggaatttgtcatatgtccggatgcaaaacgggtaacttcatgctttccacaatgtgtgtcgacatgatgcttgtagagatgcttggaccaatcttcaactcatggggcgcttcatcctcggcctcctacgcatgcacttctcctgcttctcctgctggtcatcgcccaaggatgaattgctgctcttgaccatagggattggagcagcatgtagtttatactttatcctggttttctctctcgagatgttgcatggtgtcagtgtgtcagatgtgccgtaacagatgactccaaaatggattgcatgctcttcaaatagctacagataactatcttcacataaaatggagagtacaatgtttataaaagaaggaatatggataaggatccagattctcctatagcatatgaagaggcaaaggaaatggcaagccaaagctgcacaatttctgatgatcactcgttgttactgttatccattatctcctcagaggcattgcttttaaattcaacagcagacatggcaggtacgtgtccactttcttctcaaggaattgcactagaggttggactttgtgggtcaagagaaatttaatgcctattgttaatacaacctttagctatttttccatgatgatggagttggacaagtaccatattgagtataagtgttagcctattatatctttgtacaaccatggcaaacgaataatttcttataacaccatgaagataatgtttaacgaagtgtgtttgcgtgcgtgtgtaatttcttcttttgttttgctgctaagtttgatagttcaaaacatgattcttgtaaagtttggttttagtctaacaaatacactcaagtcctgacatgtaaactgtaaagttggactgttgcttggtggatctgtattgaactttattttttttaaaatgttttatggcttgtatagtttgtattcacttctcacctaagctacaatttgtttttccagcctttcaagatttggcacattgacataatgacatgggttggtcacggattggatgtcaattttgctccctgtaccttgtagattatcggttatgtcaattttcgaaatttctatcgtgatggataacatttgaataaaacatagttaaataaacatgactactgtttcagtctttcgaaattctgatgctatagtgtcagtatactatgtcattttagggaaaatatatgtcatgtttattttgataaaattatatgatttctcactcaattcttgtcggtggcttcaggatttgttattttgtatatcgatctgtgtcatttgacaaagtactttgacttggtataatatgagtgttacttcgaccaaaagagcttggtaaagtgtgagaaactccgcaaacttcttctgcagacgatgactagcaacagttatgacgagggtcaagatagccgccatacatgatacattgagtacaacatcaagataaacactccctccccacacacaacttttgccttccgttcactctgtatgttgtgtttattacggttgcatatgttgtgtttattatggcatcaacacgttccattagaaaatataactattgtttgtcaagtacaaaatcataatcacatcagcttgtaataatattgcatcactgttttgtaccaaattgtaagttgttgtagcaacgcacgggcacc

SEQ ID NO: 43164 - DNA, 614 bp, Zea Mays
agagaccaaaagggttatgttgactcaacatcatctagctccaagaagcggaagaaagagtggaaaggaatgaagacttcatcaagtgacccgcttcttgatgtgttcaatgaagtgagtggtgatctcaaggttgccactatgtcaattggaaaaatggcgcaagctatggatcgtgaggcatccaaccaagagaaggcaagagatgaggatccacaacaaaagctaagagagaaggcgatcaatgaggtctggagacttgaatttactggctcagaagttatcaaagcagctggtgtgtttgtcaggatgccagatcaaatggatgaagcagcaaggagagagagagagaggtcaaagtgaaggtgctggtctagatgttgaatgatggagctttggaagttgctgttggtttggttggtctcaatctgtttacctttagtgttcttcatatgttgctgttgaatgacggtgaatgatgataaaaactgaatttttatgatgttgaatgttgttgaatgttcacgaatggtgttgaatatggtattgtatctatggtttgttgaatgtcggtacctttcaatatggtaaaaactgaatttttatgagttttg

SEQ ID NO: 43165 - DNA, 2587 bp, Zea Mays
cgcctcccgacgctttctcttccatgcgcgcgtcttggtcagagacaggtggatagaatatggtcaatttgcttaccagacatggccggtgcacaggaaatattgggcaatccactgcaatttgcttcagatcagctattgagtcagccatcagaaaatgctttgaaggcaatgctgtttctggagtttctgtctcttctttcccctgaaaaattatccagtacctatggttgcatccatgcaaactacttcggtttgggcattccacaagaactcagtgtttcactggcaacctaccttgagagccatcagctgttgcttggttcgaacttctatgcgagacggcatttggctgacaactcaattggagatgctccttccatggctccagattttgcgccgtccatgtcctctggcgatgacgtgaagcttcctcagtctgttacagaaacaccgtatgcaccttccagctcttacaacaatgaaaatccaaaccgacctcatcacagtaaacctgcacagaagcatcggggagtacctccaatttcacttctggagaagcataaagactatgttagattagtcttgatcgtggttctaccaacagcggcattctcgttcattgctgcttttctaattttctactgctgcggatgcaacaagaacaaggtctctgtcggtgagcaacgagatgatcatcctcttcttcacatgcagttggctaatgtacctggttcatcacccgatgcccgtgtttctgccagtcaccttaacaaggataatcgaagtcattctggagtcagcatgagtcggtgcttttcatgctgttttaaaagatccactgatgccacaccatcttcagaagtgattggaggaacaccagagaataatgtcacaagtgatgctcctaaaccgatgtcgcctccagctcctccacctttgccacctccgatcaagaaggctcctcctcccccacctggacctcccagaggttctaaagcaagacttgctcagctgtcacctgttgagtcaagtcgttctgaaggatcatctgccagcgagcagaccagcgaatcatctgaagcagaagttaatgctccaagaaccaagcttcgacctttctattgggacaaagttcttgctaatcctgatcagtcaatggcatggcatgatatcaaattcggttcttttcatgtgaatgaagatatgatagaggaattgtttggttatagtggtggaagcagaaataaccttaaggataaggaactcccctctgcggatcctgcatctcagcacatttctcttctcaatgttaagaaatcatgcaacctggcagttgttttaaaggcaatgaatatcaggggaacgaacttccaagggtgcttcttgagacaatcttgagaatgaaaccaactgacgaggaggaacagaatctcaggctttataacggggatttctcgcagctaggccttgcagaacaagtgatgaaggcattaattgacacgccttttgctttcaagagggttgacatgttgcttttcatgtcctccttgcaagaagatgcttcaagtctcagggattcgttccaccaattggaggccgcttgtggggaactgaagcaccgcctttttctcaagttactagaagccgtgctcaaaactggaaaccgtttgaatgatggaaccttccgtggtggtgctaatgcattcaagcttgacactctcctgaagctatcagatgtcaagggtgctgatggaaagaccacattgctgcactttgttgtgcaggagattgttcggtccgaaggtgtccgcgaagcaaggctagccatggaaaacggaagaagtccagctcatagtgcttcagatgacacttccaatggatctcttgaagaggacggtgatcactactccaaccgcggacttagcattgtgtcaggacttagcagtgagatggacaacgtcaagagggtagccgcactggatgctgagcctctgtttgccactgtggtgaccctcagacaagagttgctgaaatcaagggagttcctgaatgaaattgcgacagtagaagagacgagtggattcagacgttcgttggaaagctttgtggaacacgcggataatgagacggggtttttgttgaaagaagagaagaggttgagatcgttggtgaagaaaacaatccggtatttccatggaaacgactctaaagacgacggtttccggttgtttgtggttgtgagagatttcttggtgatgctagataaggcgtgcaaggaggtcggggcatcacagaagggtacgaataaatcacgaagcagtggcagtggcagtggcaatggcaatggcaaccctacgttcccgtcaatcctacaggagcaacagttccctgctgttattgatggccattcagatagttcacatactagcaattgacgatgagatactaacctttttttgtaaagaaaaaaaaatccgttttggagaggaaatacattttagcatacatgtagatttacatacgtatcatcctacgggatctttttatttttaatattttaatcaatattttaataataaccgtg

SEQ ID NO: 43166 - DNA, 427 bp, Zea Mays
gagaaatacacccagaccctaactctcctcgcaggtgccgctctagaggcggcggcgcgattccggacgcagcggctgcgagctatggcagcgtgggccaggcggccacgcgcgcaacagccgtggacgccggcgcctcctcgcacatagcagccacggacgcactcggttggggcgttgggccaacgcgagtgtgcaagacgtggattagctagacggtgcaagtacaggctgcagcttccttgatttgcttgcttcggtccattttccttcttttggtggttgccgtaccgaaacacaaacaacagatactgcacgatatttccctattttctattatctattttgattgcagcaagtacatattagtaatgtctatggttacttttagtttgtaattcataatttatttgtaggttgatttcca

SEQ ID NO: 43167 - DNA, 775 bp, Zea Mays
cacggctatgctgctattacaaacggaaaacgaagcttaaaaccaaaaaattacaacacaatacaaactattagttaatacctaattgaccttcaggctctgtgctcttttcagcagccttagccacttctctagcatcgtgaatgcccttttcacttctttgaataatatctcctgccatttctcggccaccattatcccagatatcagtaaaaaactttccaccaattatgcttgcttcggccgaagggtcttttgtgtcttcaaaggacaaagcagtttcggattgtgctaagatttttacgtgttcacagcccttcttctctagaatggtggcaattcctctggccccagagaaagcacatatatccccacggctatttaaaatttcttcgaaggcttcagcttcgtggtcgatccattcaataggaccttcgggattgcctcttataaagttttcttcactagagaaggcgccgaccctggcgaagctagccttcaacttcttaacacattctatagatttgttatagcacttcttttttgatgaacgaagctcttcaacagttgcttccaaatgatccgcccattggtcgctgagctctcgccttgtttcttcaagtatacgttcttccctggctctggccagttgtttccaaagatcttctatttcgcgtctctgagcttcagcctgactcttgaacgcagcttcgtcttcctttatttgatttaccaatgagtgtaatattttatctttttcgaggccttcgttcct

SEQ ID NO: 43168 - DNA, 1925 bp, Zea Mays
ttctttagtgcctctccagcttcagcttcacgtgaagctgacccaaacgccttgttgaaaaacaactcctccttgggaccagtcacctttgggagctggttttgacctggccggccggtggcacgctccccgtacgagcacgcaactacgcaaggccaccccgccggtctctccttccgccgccagatcctccgctccttcgcccacagccgccgcggccgcggccctcctccctggttgttgcactgtagtactggagtggaggtccggtcccacgtttgggcgtggactcgacaagcgccaaaccgagcacccccaaatcctgattctgctcaacactgcgcctgaaatattttctccggtggggctgcaaaggcaaattaggagcgcttccaagttccaatccccgtttgcttgtacagggtataattaaagaggcaacggagtcatgacccttttgagggagtattagtaaccgcatgatcttttcgagggaggcacgatggaaggaaataacctaccctctggaagcttgatgcaaggaacaccttacagtaatgtggacttgcagcatcataaacatatgcaaatgcctgcaccaagctctggaaaccaggctttcaaccactctcaggtgcctggcaatttccccatttgtctgaaccaggttacagattccgaccagctacctgaattccaatttggagagcacggcaaggtcaatcaccaccatcatcctcaccatcacaagcagcatgcaacgaatagcatgagcgatgatgaggagcatggtgtgcatgaggatgccactgatagccagatcggcaagggaaagaagggttccacatggcatcggatgaagtggactgattcgatggttaggcttttgattactgcagcatcctacactggggaagacccaggagctgatttaggaggtggtaggagaagctgtgcaatgatgcagaagaaaggcaagtggaaggccatatcaaaagtcatgggcgagcgaggctgcctcgtgtcgccgcagcagtgtgaggataagttcaatgacctaaataagaggtataaaaggcttacagatatccttggtcggggtactacttgcagagttgtggcgaacccggaacttctggatggcatggctaatctctcagataagatgaaagatgccgcgaggaagatattgagctctaagcacttgttctatgaagagatgtgctcctaccacaacaataattggttcagtttacctgaagatcctgcacttcagcgatcgttgcagcttgctcttaagtgtaaggatgagcatgatgcaaggaagcgagcaagtggagatgctgatgaagatgatcaaagtgcagacactgattatgaagaagagaatgatgatgagcatcccatcacgcatgccaataaggggaccctactcacgcgtaaaagattgcggtacatgccggcggatatggaggatgtaggtttcggcaactcttccagctcacatgactgtagctggagatctgatccccatagcattgcagtggacatcaacaaagcttctccagatggaactaacttggcttcggttcaaaaagacttggctacacagtctgcggagattgagaaacagcgtatggaaattgaagttgaggcattggagcttgcaaaacaacgtctcaagtgggaggcatttagtaagaagaaggacagagagctagagaagatgaggttggaaaatgaacaaatgaagattgagaataaacgtttggagctagaggtaagatataaggagttggagcttgaacacaaaccacaaggccatggcagtcatgcaacatgataatatctttaaaatcgcgaagactgaaatgcaagatagagctggggattcataattattctcgccaatcatctatgtgctg

SEQ ID NO: 43169 - DNA, 1390 bp, Zea Mays
gttggccatgtctagggacgttttctatatatatggtggctctaaaatctggttcagtgaaggattcacctggccttcggattctagcccaagaccagtgtaaaagtgtggaagtccttgtgctccagttgatgctagtctctttccagccattaggtttgatctgcacaagtgttggcacaccatcggcctgccagtagtgaccacgccggtcagtttggccatctcgtcgtggccaagacaacccagcaagggaagaaggggccgttgttgaggaagtttgtgagataaagtagaccaaactgggagctgtgcaatgggacactgatgtcagggaagttgattcagtgtttgggataggaaattgaggaagatttttctccctttcctgtgctccactggtgtgctcgagttgggatacgggtggggtgcaaaaccaaggatctagtgacttcagctctgcttcaaaatatctagttttggattgtttgggagatgtggacaaaagagatcatatctgttttgtctactatctgcagatatctactacctgcagatttggaccaagtgatatttgtgtgttgggggcattaaagtttctttgctggttatttgaggtaataaaaaggggagctgaacttgaggtttcagtcgagtagaacagcaggagcagttttagaataatctgatgaaagtatctccatccaccaaattgatatagggaattctaggatatgccagcccaaaagagacttatgagaatggaaagtttattgtcaaaaatcatgataggaacgggggtgcccgattttccgtcaggtgaaggtaactatcgatttggtggagatgtcacacaaacgatccggcttccaatcaacacgactagaaccccgcaatcgcaacaccacttctcctctagttatcaaccatgcactgcgcgattgacctcaccacgagggctaattcctgcctgagaatcgaagacccaagcaagaacaagaaaaaacacaatctagaatattgcggatgaaaaattaagctctcaagttggggtctcacaaaccgatctacgacgactgttcttgacagatctaaacttaagcaaaactcaaccctaatgtggcggcagctgctgaataaatagagtattagagcgtgcatgacccatggactcgcccctaatgggctccgatgcgatacacagcccaacagacggtgtcgcagcaccaaaacagaatctgaacgctgacttgtttcgacgattcccgttgactctggacgaattttagggtggaaccagttgggttggttagatgatctccttatctttccaaccatatcaagtccgttgcaatcggagtctggatgcatcttgggcgtccattttagt

SEQ ID NO: 43170 - DNA, 651 bp, Zea Mays
ggtgacgcgtaggttaaatttagtattttatgcaattatcgataaatcggttgatgctagttgtgttcagtgcgcgtaagatgaagtcgatgtcttgtgctagtagttagtatcatctatgtttgtgatcgataatgttggggtaggatatgatcgacgattttcttgtctagtgattggtgtgatggtatattgtataaaatatgcttggtaaaatatatgtagtaatatgattttgttaataaatcgtaaaagaaagtagaacgtgaatatatatatattattgttttgtaatatatgagatacctttgaataggctagaaaagcgtaatttttataattagccatatatcactagttagtatctgcttaatgctttgttagaagtgtttcgtcatcttcagtgtagattatttgtcttatgctattcctctgtatattcatacatgtgcattgtgcatcccatgaggtacgataattaatcgcgtgatgtggaagacgagccaagtcgaccccaagcgtaggctactccgcatggtgatgctgatggacgaacatgcctgatcaagtgctaggacaaggatgatcgctaagtggttactcaggcaagccccagtgcatttgccatctccttgttgttttaagatcttt

SEQ ID NO: 43171 - DNA, 643 bp, Zea Mays
ccggctcgctgctgcttctacttgcaaagtggacaagggacggcgttgtctataccgttgcgattcgtttgtacccatgtgttcaggtctccatcagacggggacattgtttttgtttggaaacagggacacgggcgatggaacgaatccgagccaggcaaggaacggaaggccaggacgcgcagccaatccactcccggccccgtcggcgagatctggccgccacaacgccgaggcacggatatcctggcctgcgtgggcacggtgtataggcttgccctgacggacctgcccttctctctctccatcggtatatgaaatgccatcagctgcgcattgcgatttcagtctaggcatccctaggtgttggatcgtcggcggcggcggcggcgtagaaaataaaacctgcagattgcgatagttgtgctttggaacagcctcttgtcctccgacattgtactacgtgacaggcgaaagcctctgttattattctttccatttcatgtggaggttaacttgaaaacgatgcgtacgcgattttactattttccaatccgaggtgatgcaaacagacaaccatgttaatatgccaagtgttaatatgccaagtgtctaatgttaatatttagggttagtttgggaa

SEQ ID NO: 43172 - DNA, 260 bp, Zea Mays
ttctcttcactctaaaaagactatctctatgcacttctactcgaatgtggcgcttggaacttttagaattgcttggagatgttgcacaagtgtttgggaatgaaagcacaattattgttgtttgtctaggtcgtctaaagacgtatttatagcccaaaaaaaccccaattagtcgttaggcgagatccaaaaatatgcaccttagtgctcatatttttatggtttccatgtaaaacatcatatgtaataacattgctaca

SEQ ID NO: 43173 - DNA, 2446 bp, Zea Mays
ttatttgtaaaaagatgacacgggatgaccgttgaaattagtgctttaagtatagtatagaaaaatagtaccggtattaaatgctagaggttggaaatctctttctgttccatgattccatcaagaacaattcctcctccaagaccagttcttcctcctgtacgtcctccataaatacatggccagctctaccacatctcttgcaacattactacacatacctgcagctaggagtgaggtgcaggcatggcctactgctactatccagcaagagcctgctatctcctgttcctcatctaccagcccgtcgtctactacctgttgctcatggctccccacaccatcgcgctgtctttcagctacgacttctccaacccgggcgacctcgaccgagcaaatctcacgtacctcggcaactctatcgccggcgacggaatcattaaccttacaaatatgaatgacacctggagcaccggcggtgtggcctacccgcagccggtgcgcctgtgggatcaccgcaccggcaggagagcaagcttcaccaccaacttctcgttcgccatcagcggcgagcgtacctacaaccgtgcggatggcatggccttcttcatcgggtccttccgctcagccgtgccgctagactcaggcggtggttttctcgggctcatcagcaacatcactccaccgccgctgtcgactgtcggcgtagagttcgacacaaacaggaacatatgggatccccaggacgccattgaccattttggcatcgacgtcaacaacatcacctccatcgtcgtttacaagtcgctgggacaagatttcccaaacccgctctctggtaccatgtcggcaggcgtcaactacgatggcagctccaaggttttatccgttagcctccggctggccaacggagatgttcatgacctcgaaacgtcggtcgaccttaaagccgccggagtgccacagtatgccaccatcgggttttcggcggccaccggcaatcacgtcgagtcgcaccagctcttgtcttggtccttcaactcaagagatccacctaagttcgaactttgggtgataatacttttagctgttgcgagtgtgtcatttgctgctttagtggctgctctactttggattatcatgcacagacattattcccgtgcctcatcgatgaagatagagttgcaagttgcaagggaattctcgtaccaggagctgtctgcagcgaccagcaacttcttcaaggacaggaagctcggcgcgggccagttcggggaggtgtacagaggtgagctgccggaccctctcatgccgccggtggcggtgaagaggctgacgaggcagatggaggcgcggacccggaaggactacgtgaccgagatcatgaccttgggccggctcagccaccggaacctagtgaagctcgtcggctggtgtcaaggcggcaatgagctgctgctcgtgtacgagctggtaacgaacaggagcctcgacgagcacctccacaggtcagagcgcctgctggcgtggcctgagaggtacaggatagtgctcggcataggctccgccatagagtacctccacaccggcgaccagaaccccatcctgcaccgcgacatcaagcccagcaacgtgatgctggacgatgacttcgaggccaagctcggcgacttcgggctcgtgaggcagatccatccaggacatggctcttccctcgagggcaccgtcatgatcgggactagggcgtacatggatcccgtatgcatgagcaccaacacggcgagcacagcgtccgacatatacagcttcggagtgctgctgttggagatcgccaccggcctgatgccgaccgaggtggcgggcccaggaggcctcctctccaacaccctcatcagcactgtccgggaatactacggcaggggatcggtcctcgagatggctgataggcggctgaacggcgacttcgacgagggcgagatggagcgggtgctgctcgtcggtctcttgtgtgtccagcaggatcgccgtcaccggccggaaatcagaatcgctgtcaacatgctctcgaatctcaagcttccgagtcctagaattcgttcctgaaaagattcactcgccaataatagggtgccttgcctctcgaatctcaggcttccgactcccagattcgttcctgtatgtacatagtgctttgtgagttagcatttggtctggctttgatcacgtattcctctataaactagcaagctggctcgcacaagaactaatgtgatgtttggttcacatatttgtaatgtaacgggtaacagataacgttaaatcatgtttatctaagtccaatcgtaatcgaataccatactaaaaattaatatcggtctattcaaacttattataagttttttttcattataacatcaagtttgttttcttagatatattttaaata

SEQ ID NO: 43174 - DNA, 1068 bp, Zea Mays
gaggacaaaccctaccccgcgcagccgcagccttttgccgcgtcggacaccggtgcgtgctcgagctccaccagtcgctgccgccatgtcgctgattgcgggggaggactttcagcacatcctgcgtttgcttaacaccaacgtggatggcaagcagaagatcatgtttgccctcacctccatcaagggtgtcggccaccatttctccaacatcgtctgcaaaaaggccaacatcgacatgaacaagcaggctggtgagctatcctagatgagcttgagcgcctcatgactgtggttgccaaccctcgccagtttaaggtccttgactggttcctcaacaagaaggactacaaagatggtaggttctctcaggttgtttccaatgccctcgacatgaagctcagggatgaccttgagaggctcaagaagattgggtcagtctattaccattgtttttgtgttattattgattttctaatgctatatataagatgacatgcacacatatttgttgtcatggcattgctaaaaacattagttgcatttttgtcttcattagtgatgtcacggttttcataattgtacacaacaagtgtacgctaaggaatttttcatttgtgttcgtaactgttatatgcacttctcccaaaatttgcttgcggtttgtagttgtgttttgtatgcgacacagaaccttgtgttatccaggaaccaccgaggtctccgtcactactagggcctgcgtgtccatggccagcacaccaagactactggaaggcgtggaaagactgttggtgtgtcaaagaagagataaactccttgaggcatattgatgcctatcttgggagtttggtgagtatgtggaaaatttgcgctttgttatgccaataggatgtttattatctgtaggatagatgatatgttctagtttacaaggcttctatgtatattgtagcaatcttttgatgcctgtgttccaagcgagttgtgagttgaatgcttgatagtgcttcctttgtgtcgtgctttgttgggggatattttgcatgaagttttgatacatcatct

SEQ ID NO: 43175 - DNA, 514 bp, Zea Mays
ctactcatacaagttccctttacatcctttgtgtaaaggtgaagccttagagctttttagtgtgggaaaatagcttattagctctcaaaatggagatctatttcccctgctactgagatgcaggagtttgttcattcgctctcttatttaatccatgtattcctggaccaagtcggtttatcttgcataaagaaacggatgaacaatttgaccaaatagatttttaccccaaatacataatctctagttaacaaagagagctctcgaccgttggcttactgatggtaatgagaggacttactcaatgtcaaccgtagttcaacaagttggttttactaacttgtaactgcattgggaataatggtttagagatcgttttgtcgagttgtctaaactcactctggtttaaaccaccctgaagaaaacacttatatgaatcgagattaagtcggccagtaaccacctagccatcgctctagtcgtgtctcgatcgcctcacgtgtgcttttccagc

SEQ ID NO: 43176 - DNA, 4046 bp, Zea Mays
agttcgttggtgcctgagaatccatggtcgatcgtctccagtcgaagcgaaaagcgaaaaggagaaggggcgggggattgcgagcctgtgctgatggcggcggcggcggtggccgcggcggggagcagcaatgtcgagttcatccgcgcgcgcagcgacaagcgggagtaccgccgcgtggtgctcgccaacgcgctcgagatcctactaatcagcgaccccgacaccgacaaggcggcggcgtgcatggaggtcgaggtgggctcgttcagcgatccggagggacttgagggcctcgcgcacttcctcgagcacatgctattttatgccagcgagaagtatcctggagaacatgaatatacgaaatatatcatagagcatggtggctcttacaatgcatatacaagctccgagacaacgaatttctttttcgatgtcaatgtggacaattttgaagaagccttagatagatttgctcagttcttcattaagccattgatgtcacaggatgctgttcttagagagataaaagctgtggattctgaacacaagaaaaatttgttgtctgatggctggaggatgtatcagcttcaaaagcattttgcttcaaaggatcacccttaccacaaattcagtacaggaagttgggaaacactagaaactaaaccaaaagcgaggggcctggatatcagacttgaacttctgaagttttacaagaattattcagcaaacgttatgcaccttgttgtttatggaaaggagaacctcgattgcattcagggcttggttgagcgtatgtttagtgacataaaaaacactgatcagagaagcttgaaatgtccaagtcatcctctttcagaggaacatttacagcttcttgtcaaagcactgccaatagtagaaggggactatctaagaattatatggccaataacacctagcatccagttttacaaagaagctccttgccattatctgagtcacctcattggacatgaaggcgaggggtccatcttccatattataaaggaactaggatgggccatgaacttaatggctggagagtgcagtgacagtaatgagtattcctttttctcagtaagcatgaggctcactgatgctggccatgaacgcatggaggatattgttgggttgatcttcaaatatcttcatctattaaaagaagacggagtccatgagtggatatttaatgagcttgcggcgataaatgaaatggagttccattatcaagacaaagtccgcccaatcaactatgtgatgcgcactgtctcaactatgcggttgttcccaccagaagaatggttggttggagcagcattaccatcaaagtatgcatcacagagaataaatatgatactcaatcaactaatacctgaaacagtaagaatattctgggagtccaaaaaatttgaaggatctacgagttctgctgagccctggtataacacaccattttcagttgaaaatgtcactccttcagttatacaggaatggattgaaaaagctcctactgaaaaactccatcttccaaaacctaatattttcataccaaaggatttatctcttaaagaagtgcatgaaaaggttacttttccaacagtgttaaggaagagcccactttcacagttgtggtataagcctgatatgctgttctccacaccaaaggttcacattatcattgatttccactgtccattatccagccactcccctgaagcagttgttgctactgagctctttgttgatttgttagtagattatttgaatgcttatgcttatgatgctcaaattgctggtttattctattcaatatatgttacttcagctggattccaggtttctttaggtggttacaatgacaagatgagagttctcttaaatgccatactagtgcaaattgtgaaatttgaagttaagccaaacagattttctgcactgaaggaaacttctgtcaaggactaccagaatttcaatttccgacaaccttattctcaagcgtcatactatgtctctttgatattgggagataaaaaatggcctgtagctgagaaacttgaagctctttctaagcttgaatcagattattttgcaaagttcgtaccacacctactgtcaaaaacatttttggaatgttatgttcaagggaacattgaaccaagtgaagcaaaatctatcgtagaagaaatcgaaaacactatatttactacgcccaattctttgttcaaatccatgtctccatcagaatatctgattaaaagggtcatcatgcttgaaaatgacttgaaatgctactaccaaactgagggattaaaccagaagaatgagaattcatcagttatccaatatattcaggtgcatcaagatgacgccattttgaatatcaaacttgagctgttctctctaatagcaaaacagccagccttcaaccagctacgaactgttgaacaacttgggtatataacaagtctttctctgagatccgactatggagtcctggcactccaggttgttatccagtccacagtaaaggatccttcatacctcgatgttagagttgatgagttctttaagatgtttgaaagcaaaatctatgaactctccgacaaggatttcaagagaaatgtgaaatcattaattgattctaaactggagaagtttaaaaacttatgggaggaatctcatttctactggggagagattgaggcaggaactctgaagtttgatagggtcgagtctgaggtaagtgttctcctttcagcaacaatgcgtgtaaaggaaattgtatctagtataaagcaagcagactgtagccttttagtaaacagataatagtgtaatagttgaaaatattcacaaaattttaattgtcactcccttatattcagaggaaacagaaatgagaaggttgtgccagtaattgccaagatgctttgctaacaaatgtaacaggtcgctatgctaagagagctcaagaaagaagaattcatcgagtacttcaaccagtatataaaagtggacgcgcctcaaaggaggacactaagcgtgcaagtcttcggcggcaaccatttggtagagttcaagaaggcaatcaacgaagccaacccgcccaaaatgtacagaattacagacatattcggcttcaaacgatcgaggccgctgtacagctcactcaagggaggtccgggcaggatcaccatggactgacagccggcaatagcatgccttgtttttcatgtatgtagtgtaatggccagtgcatacgaatgatgaattcgattctgaatcctgctcctgcatcagattcggttgcatgattgatctatacttcactgtgggtttcacgaccagcgtgtcactttctgggcaaaatctagggagctgtataaagtcatgtatgttcacatgtttgtttgcgtttcttctcacagctatgcagtttgtacagttacatatccacagtgaactagaactagaagcgcgtcttctacacaccaatatacagcttgagcctggctgaccgtgcccgacgccggccgagaaccgtcaaggtgccgtcatgcgcacatgcaccaccggccgtccggtttcagcacgccccggcgtgttcgcaaacgcccgccggcgcccccactcgaagccgttgcggtgccaccggcacctgaacgagccccggtgcgtcgtgggcgagcacacgcagtagtagtgcggcgacgcctggcgcgcccgtggcacagatggtgggggcgacggtgccacggtcgcctgctgctcccgccgcctgactgcgcagtccggcggcagaggcggcagccctggatggcacatgcttctaggctacaaaagggtgatgcgatcggcagctccaccagctataaaacagatggcgccgaagaatggaatcgggttctggcgttttcggatggtgggagatgactagacgtggggaaagggcggggaatatgtgtgggctagggtggtaatgtatggtatggtagcccgcaggcgatggtttttgcgagctggtg

SEQ ID NO: 43177 - DNA, 9585 bp, Zea Mays
cttagatagtgtttgctgggctggcactcgcttggcgagcatccacttgttaagtccatcattcttcaggtcgtccaccaactgcatcttgtggttggcaccacatcacgtgcacgatcatcatctcttggtcctaaatgagatgcaagatgcatatgtatgaatataatgaaagtagcacaaaagtagcacaagatatacaaagacacagtggcgaactaaacattaaattggaagacaccgtagacaaccagatgttagctttagttatttatatgtcatcgggcatacgtaatcactatcactggaaagatgacgacacttactatatttaactaacacaaacaggacatcacaagtatgagcatttatttaattcgctacagcttttcattagttcttctattaatcacacaaaagcatcccaaacacaagtttaacagaggacataggcataaaaaactacggaattcctatccacaatcaactagagaaataaacatataaaacaagacacatattttatctcaagcttagccattacaagtctatgtccgttaagtgctaactaagtatttttagccaaaagggtgaactaaacattcatttgatcacttgcagatttttagacagcaacacagcagttactcgttttaatcataaatcttcaattatgagtccaaaaatatcaaactataactttctggaatgcttaaaaagtgctctaaaactttggtattgtcatcacaacataattcaacacttaacaatgtcaaaacgtgctaatacaacagctttgtccagatttggacagatttagacttgcaacttcaaaaattcacaactaaagatttagacatccaaagaaagtgatcttagactttctggaaagctaattaaatgttatacaaattatttataaacatccctagctggtttaatatgtatcaagggtaaaatacactatgaaggctgtgctgtccagaactggacaaattcagtcttcacactttaaacatccataacttaatcttcagaccaccaaaaagagtgatccaagactttttggaaagcttggcaaaagcaatacataacttttataatcataaataagtgattctatgtttaaccaaatcaaacaattcagttttcaaaatctgttctgacggtggacagaacacagcaaccagtttgcaaaattcataactcctaaattgtcaggcctatggttatgcaattttaacactagcaagataagaaaaacatctataactttattttaacgaccttgaactgattgtaacattaaattaagcaaacaatgaagtttctgaaatctgtacagaatttggacagattcagttactgaatttgtaaaaagcataactcctaaacgatcagacttatgtctgtcaaattttaacacaagtaagataataaagttatctacaactttattatgaccaccaataactgatttcaagattaacttaagcaaccattgcaatttctgaaatctgttcagaaattcgacagatttaggtgctgggcttgtgaaaagcacaactcctaaacgatcaggtttatggctgtcaaattttattacaagcaagataataaggttatctacaactcttctagatgacttttctacagaaaacatgattcagttcatcaagcatacagcacgacgaaaacagtgtgtgcagcccaaaacagcaaattaataaaatttcagctcctatacaattcaagaattgccgcgttctagagacttgaaattattctaacactttgacaattgttagagttaaaataaccaagtgataactaaacaagtagacttactaatttttatccgtgtcatttcgagcactaaaatgaccacatacttttaacaaacgcattcaccacgtaaatagcaccatcacacatgacctcgacttaaccgcagaggaagcgatgactacttcggcatgtcaccacctctctacagtccaatcaatattaactacatcgatcgaacctcatatcgcgtaactcttataatttattatctcaaatacaaccataccacggcatggacttgagactctttgatcaagttaacgcaatcacgactaccatacacatgcgtaccactttttccaccatgtacctttaatctacgtcaaaaaaaatactcgtgcacacacctacttacaaacctatgcacaacgacaaaaccaatgaccatctcactacaacacctaacaagagctgtgaataaaatcaaaaggagcatcgcaccacttcatcacacccattcatctcctataggcgcactaattcatttcttgcggcatactcactcacaatcaatccttactacagaaaatatacctatttcttatttatgcgcataacataacaattcgtgagataaaatgtcattataaacacattacacataattgcatagcaaacctacttgtccactcgaaaacatctatccgaagcaatgaacacaaccgtacactacgtgcaatgcgaaattcaatgaacgcataaggtgtattgactcgacttataaatatagaggaaatgaggactaccctggcatgtcaccacctctctacttaagccaagacaatttctaccatcgactaaaagttctaagtattaaacacactattactttccatgcacaaataaacctcaacttaacaccagtgacaccgatggatttttactaaacccatcatgtgcataaccccgtctcgcatacaaccatattgtggcgtgtactcgagacactaccgattaacttaacgcaattaccactacaatgcacttcgatatacacgtccgacatcacagtgcttcgacaaaccccacacttccaatctacttgtcacatccaaccacaccacgtttgataacacacctttctaactaaacatatctcgtcttccaaacacccatcatatgtcacataatttacatttcccacttaatctaacctacaccaacgatgaatacataaatataattaccgtagactgactcatcagtcgactgcggaaatcactaagcatgctttgcactttattaattttttgccgtaactaacacactagtttacgacggagcattttagtaacagttaatacatccacgaccaatccctacgacgtacaaaagaactatcgcagccacatttatatatatccgatccaacaacaaaataacacatcggctcaccatatcaaacctcagtcgtggttgctgcacatgtggtgtgaagacgaacgcgttgtcgcgcacgggagaccgaaacgaagtgaagggcgtggctcgctactgcgatccgtcgagcacgcaagcgcgaggtgaagcattgacggtggcggagtttgacaacatgcgtcgggactgcgcagatcgggtcgatgcaagcgacacggagggaatccggggctactgtgggcttgctgtttcgggggagggcagagtgggtgagggctgctggtcatggggaggagagtggcgaagctcgacgacgacaaaaggcaaggggcggggctactgcaggaaatcgacgacgtgtggcttgctgcgcatttcgtcgagcacatagcaagcaccaacagtgcaccgcgcggcagcacgcaagccgggaggaacaaagggaggaagggggcctacgctatggaggaaatggagtccttgctgttggtcgttggggacagcgagcaggcagggaaagacaccatgagcaacatgagctcgctggcgagcaggggcccggcgaggccacgatggcaccttgcaggggatcctcgacgagcagcgccatggcaaggttggtgaggccgctcgctagtgctggtcgtggagcagggggcgctggagggaagggacgccatgggaaagagctcggcggccctggaaataatggaggtcgcaccatggctggagagcgcctgctccaagggagcttggccagcgtccaagcaaggaggtggaggcccgcgcccatggaagaagaagagggcctgctcgccatgggaggggcatgcagagctgctgctcggccatgggagaaggggtgtccacgccttggacaggaaaggaaaggaagggcgccgtgcagaggaaagggatgaggtgcgccatggagagaggagccaagctccatgcttgctgccgtggagcagggaggaagaaaggggcgccttgctgctgcgcgtgggagaagaagacagggaggaaaggttgtggcggctgaaaaaatggaggggtgggaatggaaaatagccaagtgcaagggagagggattcatatttatagaggggcactagggttagggttttctagtgggccaaatgggctgggctgggctgggcttggcccaaaacacgtaattgggctgcgctaaatattttctggaataaaaatgttcctgcggaattcgtctctacagagaacaaagcgaaatagatttcagaagatcgggcgataaactcggccaagagtatgatttgatttcgctcgaaaataattccctacgcatggttcgaaaataaatcgtcttgagatatgaccggctttcggatttatgattgaaagagacaaatcgcgacatctaaaaatcatcgccgatgttgatttttgaaatcggatcggacacagaggtattaagtcgagccggataagaatttatttgaggacaacgcattggagattccacttgaggatacagactcagattaattttcggatatagatcgaatcatcaagaaattggattcggacacagctcaactagcaactgtcgagcgcttgattaaatgagctttagacgacatttataaatcgagatggattatcaagttcgcattcatgccgagaaataaaagttttaacaggctccaaattcggccttctgtgagactgaataactacgaattcggtaaaatgtgaatgaataatctggataatcagagacatacgcgagcgagaaatagaaattttcactgagcatccgagattaggataaatctcccgacataacgcgaaatatacaccggggtgtcacaattattgggtaataaaagtggtcaagggcacaacttgccttcaatgagctcctgcttagcaacttctaccagttgaacaccgggatcctcagccactggctcttctactcgccacaatacaaacaagcatggtataaaggagaaattaacatcacaccaaacatgtatacaaaatacatattaataatctacatattaaaataagatcataggaacaggaaacattaattttagagttatggattttaagttatgaatttaaaaagattctatgtgctaggtacaagattaattaggagattaattttaatatagttttcatgtcaaaacagagactctttgtgatagacaacattattaaaaattatagaaactcgaatggatcaatttggaattagtatgaattttctagggattaaacaagttttaatgattatttttacattaaaaatcactttccatatttattcatctaatttaactgttctctggactgcgcacataaaatacagaagctcgggtgggtctctgcgcaaatagttccaagactcagaacactatacgcagtactgcgggttgattttcattttccccgatggctctttagcgaaattcctcgccgaaagggtacgtgggcaatctgtccgttggatctccaccggacaatcgagattagaaccgatacttacgcgaaccggtatgaaatcttggttgttggatcaaaaatccatggcaggggactcccccacaccatgatctaataccagtcattcgatctagatgggcggccaagatcttatgtgcccaagcgttatctacattctaatctaagccatcagatgcgaatccaatgacccgcgtaggttttacccttctccagccggagcagggcgacggacatgagcacacggcggagccctcccaccggcgaactaagaatcgacgattctatggcccaaatctcaattaatttaacctacgtgacgcggagtccaaagcgaaatcagaggcgaggttctcacccaaaatgctgatgaaggtgaagcagtccgcgatgacgtgcggcgcggtgctttccttgccgtctgacgagaaatttctcgcgccgtgaagacgcagggcccgcctcgaggactcggtcggcttccccggacactggcgcacgtcgtcggccacaaaccgaggccgggacgtcggcacatatgaagataaccggcggcggccctcttctctctctatgtcttcttctcaccctctgtcgatcttggctagctgtaggtagtggatctgacgaagggatcgtgggtgcggcaactgttggtttatgtagggcgagggaaggatggagccgagctccaggatccgcccgccatgcgcgcgggttggttagcacctgttgtggcgtgatgacaagtgggtcccatgcacagtgttgtgaggatatgagactgacctctgggtcccactgccggatgaacgagcgcgcgcggtgggagaaatcgggccacgcagacgagtgagcgaagtgggccaaatcggtttcctccggcccaagtagccaattccttccttttctttttattttagaatttctgatttcttttcccttttcattttcttgatttcaaatttgagtttacattttgtcatgagtctctcagttgagctaaatattcaaattcaaatcctagtgtaagaaggatatatttgtctattttttgtataatattttctttctcctaccttccttgttatttcccattcctaaatattcaaaataggtattagatccacaatttgggacattaatttatttccattaatgtgattactatttttactagatgcacatacaaacaaaagccaacatgatgcataaattagtaatgtgccttttgttgatttgtttacttttagacatgagtgttaacatgtgataataaatagaagtcatacaattagggagatcaactctatttcattgtttacacttttgggtattacaaatcctaccccccttaacaagaatctcgtcctcgatatttaggaaggactagggaaaagatggggaaattctattcgaagctcttcttctctctcccaagtagcttcatcttctccatggtgactccattgtactttgcacatctttatcactttatttcttctaactcgagtcaaagtatcaattatcttaatatgatattctgtataagtcaaatcaccctgaacattgagttcttccattggtagctattcctcagggacacggaggcacttcttaagttgagacacatggaatacatcatgcacatctgatagatgatcaggtagctcgagttggtatgccatctccccaactcgcctaaaaattttgaagggtccaataaagagaggggataattttcctttaactttgaatctcctcattccacgaagtggtgacaccttgaggtacacattatcaccttcctcaaactccagtggtcttcttcgattatcagcatagctcttttgcctggtctgagctaccctcaagttctcctggattatacggacttgttcttctacctcttgaataaatttaggcctagcacttcctgccatataaagctttaaatggtgacatcttcagactggcttggtaactattattatatgagaactcagcatatggtagactcttgtcacaactgcctccatgttgaagggcacaagctgtcaacatatcttctagtacttgattagtcctttcagtctggccatcaggttgagggtgataggccgaactaaagttcaacttcgtatccttattctcatgaaagcttttccaaaatctagaggtaaactgtgaacctctatccgaaacgatcttcttcggtactccgtgtagacacacaattcgagccatatataattctgccaactgagaacctttataagtagtcttgaccggaatgaaatgagccactttggttagtctatccacaatcacccatatggaatcatatcctttcagggtgcgaggcaacccgacaatgaaatccataccaatctcttcccacttccattcgggtatctttaacgggtgcaatagtccagctggtctttgatgttaagctttgactctttgacacacatcacacatagccacatgtgcagtcacatctcacttcaatccataccaccagtacttttgcttcaaatcctgatacatcttagtgctaccaggatgaatagaataatcagattcatgggcttccttcaatatagcctcacaaaggctgtctatctcaggaacacatatccggtccttgaaccatactgtgccttgctcatcctccgtgaattctggacctctaccttttagtaatcagatctttgatctcttggattttagcatcaccgatctgtcctttgcggatttctgctccaaggtaggttccacttcaatagtaactccttcagtgtgtgcaacaattcccaggttgtgtctcctgaaatcctcaacaatctcatcgggtagctgtgcaacaatagctgaatggacatgttcctttcgactcaaggcatccgcaaccagattcaccttgcccggttgatagtgaatctccaatcataattgttgggggtatgcttcatagccgaagatcctaaagaaagagaacaccttcggcagacactctcaggagcaagcgccgaagctattacttagagagcttcggcacaatgatagatcttaagacgaagggctgaaccgacttaaagatggattgacttaaagacccatgatgtttgtgtcattattgtagtcaattgtaaaggacttaaatgtaattttacgcaggttgcaccctgtgcctataaataggtgaacattaccccggcactgttcacgctatcctgtaattgctaacgcattacactggaatcattttctgtcagagacgaagcatttgagaacaagtccccaacattggtgcccacctccggtgaactcacttccacttttttgagctgatggcttcgttcaacaaccaagccagagttgtttcggctccgaagctgatactcccgataacaggcgattcatgctcagagccagccaacaagaagcagaagaaggaggcacagagaagggtacatcatatcggggtgcaaggacccttcatcaagtcaagatggtcccacatcccaattaccttctcccaagaggaccttcagctcaaggattaccctcacaacgatgctatggttatttcttgtgttatcaaaggatttctggtccacaacgttttggttgacacaggcagtgcagcggatattatatttgctaaggccttcagacagatgcaagagcccgaagataagatccatgatgctacacatcccctttgtggcttcggaggaaggcagattgtagcactcggcaagatcacgatgccaataactttcggatttatcaacaatacaaggactgaacaagttgtgtttgatattgttg

SEQ ID NO: 43178 - DNA, 378 bp, Zea Mays
attcctttctgaaaacatgcgactacgacaaagtaatatatcaaatgaagagtatgaagacttgttatcattcaataattggatccttgccattggaaatggggtatataacaacagcgataatttttcctcggactcaacactcattgaaataccaaaagaatttttaatagaaacaacagaggataaaattcaagcattagttcaatttacttatcctgacctacaaacaaaatataatgatccagattatatcaaaaaagagctatattagcaacaactaatgatgttgtagatgaaataaatgattatatcatctcccttttgccaacagtagagagagaatactatagtgcagatagcatatctaaatgcaca

SEQ ID NO: 43179 - DNA, 2597 bp, Zea Mays
ttcccaactgcccactacctctcgttcccgtctccttcctctattcgtgttgtccgttcgctgccgccgtcgcctggttcgcatcgcatacagcgcctcagtccagatcgatcctccctcttcccagatcgggtctagttggacggcagcagccgccgccgcggcatctgtcatattcacgccgcgtgtgctctctctttctgtctccctctctatctgcgacgactgggtgtgataccgcagccgccgccctacgctgggttcccgagccttcgccgatctcttctccggcgaagagcgcccaccagatccgccgcgcatcgatgtctcctttggctcttctccaagctctcatcttcatcctgtgctgctcgcctctggcttctgcttcgtcgtcggagctaacccttgcaggagctgcttgtggagatgatcagcttgtcatcttcgatgcttctgatggcctccttaacctgtcggtcaatggggttctgatgcaagatcgcgtttttgcctgccagaagctcggcttctactttggcagtggatgcctccgctgcagcaacctttcagatgcgtggaggagtgccgtaaagcagtactgtggtgaagggagcgaaaagagccatgcaactttacatcaagatgtgccaaggaagctcttgaggtggtccacagaaaatagctcaaggaatgcatgtgaaaggtctgggttgaatgaaaataatcaggacattggtgattcttcagaaaagcaggagcatctcctggctgtgccaggtgtgattctcttatgctgtggccttatgttaccatgctttcatgctgaaaggaaagaagtcagcaggcatgacaatgcaaccattcagcgcaacgcacttgaatcagtttcatcctatgaaggaagcatgtcatctgagaaagtcccaccaactccacatcgaatacctccaagtccctctagatttgcgccgtctccacagatagctagagttggatctgtcaacttaagcatccagcagatcctcagggcaactcagaacttctcaccttcatttaagttaggtgaaggaggatttgggatggtctacagggctgtattgccagatggcaatgttgttgcggtcaagagagctaaaaaggatcagtttgcaggtcctagggatgagttcagcaatgaagtagacttgcttgctaagatagaccaccgaaatttggtgaggttactgggttttactgataaaggaaatgagcgcattatcatcactgagtatgttccaaatggtactcttagagaacatctagatggtcaacatggaagagtcctagattttaatcagcgtctagaaattgcaattgacgtggctcatgcacttacttatcttcatctgtatgcagggatcgagttcctgtacaaccctatatgaaataacatcttcaccctcccttttacatagtaacgctttacattcgaaggtgtatatttccgaccttccactatatagacatgtcacacacgatttctctcggtcgaagcttcttttaggcgccacttttaaagagaagactataattcatcgtgatgtgaagtcatcaaacatcctgctgacagatagctatcgggccaaggtgtctgactttgggtttgcaagaagtggccctagtgacacggagaagacacacatatcaacgaaagtgaaaggcacagctgggtacctggaccccgaatacttgaggacataccagctaactccaaagagtgatgtcttctcatttggcatattgcttgtagaaattctttctgctcgcagacccgtagagctgaagcgaacccctgaagagaggatcacaatcagatggactttcaaaaaattcaacgaaggcaacacgagagagatactggacccattgctggaagatcacgtggacgacgaggtgcttgaaaagctccttagcctggctttccaatgcgctgctccgacacgggacgaccggccgaccatgaaggaagttggggagcagctgtgggagataaggaaagagtacggaaagagtgttaggaaggtgtgaagatcatggaaaacatttccctgtttctcaagactttccctggaccaaggggactaagggggtgtttggttttatagggattaaattttagttcttccattttattctatttaagtccctaaattaccaaacacggaaatcaaaactttattttagttttagtatttggtaatttagagacttgaatggaataaaatggatagactaaaaataagttcctagaaatcaaacaccctctaagcatgcgaagtatttgtgcccattggataaacacctgatcatctatgtttcttggaagatgtgacctgaagaaatgtacagtgcgataacaccgccatcagtttgtgctttcttgtctcagtttgcagtgcactccctctatggagaatgtatattttggagttctcgcatttcttgattctgttgatatggtattctgatggatgtacccgcatacattactgcaaacggtctgaaataatatacgaagggaaattgtttgtattggaagacactgaagcttccgg

SEQ ID NO: 43180 - DNA, 636 bp, Zea Mays
atgggcgcacgggcgggcggcgggcgcacggggccgttggccggagcacggggcggcggcgaccggcgaacggggcggcggcgaccggcgaacggggcggcggcggcggccgggtgcaccggcgtggcggtgtccggccccccgattttttcgcgtctccggacgtatcagtacaaagacgatatcaagtatgaagaggacttcttcgtgaattcacgcggaaacaagctcttcacttgcaggtggacatcgaggaaatcggagtgcaaagctttgatctttatctgccacggatatggagccgagtgcagcatatccatgggagacacggccgctcgattagtacaccatggatacgttgttcacggaatcgaccacgagggccacgacaaatcttcaggctcgaaaggctacctgtcgagcttcggcgacgtcgtcagagactgctcggaccatttcaagagtgtatgtgagaaacaggagaacaggctgaagaagaggttcctctacggcttctccatgggaggaaccgtggtgcttcagctccacaggaaagatcctctctactgggacggtgccgtgctgcttgccccaatgtgcaaggccacattttgcaattaaccatgaagatctgac

SEQ ID NO: 43181 - DNA, 1131 bp, Zea Mays
gctcattgaaggcatgttgtgcccttgaccactttatttacccaataatgttctctataatcattttatcatgaataggcttaattttgatgggacccaataggccaccctagtctggttatctttataccttgtttaaccctgaattttttggtagtccttgctattgctatatatggttttgagtgttgagacaactattacacatgatcactctttattactgttctatttctattcatgataagacaactatgttaattggaacatcgatcttaacttgagaaacacgtgccaccacaagggtggaatgggacgcccttggctgactaactaggaaagctagtggaggactacctttcccaaaaggggcaagggcagtaggggagtaggcgtgtagggaggttccggggttgattttgctccgatggcggtcagacgggggattcctgcattgctcttcctagaaactgtagcgggttttctgaagctagtggaactttgtaaaagccttgtagtggatccctagctattcacctcggaagtgtctaagggtctagctaacactggctagatgggatacacgacttgtgggtactgggtacgacctctgcagagtgtaaaactggtatactagccatgctcgcggtaatgagccgctcaatactcttgcatgattaatttatggaattaaattcaatttatcatttgcatcgcattgggatttattattaattctgatctactattactctggtttggttctacttacatttagtaactactaataaaatttgaccaacttattaaaagcaatgctcaactttaacccttatttattggtcagccttactcttcacatgaactcccacctttggtaagttcatgcacgttattccccacaacttgttgagctatgatcttttgtgagatcacccttgcgagatataaccccccacaggagaagaacatgtgatctaggaggagccgtacaatgaggagtacgagttgatctaggtggcgccttcgagtcagctttgtggcgccaaggaataatacttagttcgctttattattatcatttattttgttaagacttccgctatgtaataatgacatttatgatatttg

SEQ ID NO: 43182 - DNA, 1965 bp, Zea Mays
ctttcgtttcgtgcagttgtgtggtttgcgagcgcagagcagttcgtggacgtggagccaggtggtctgctgcccgaagaagccacactacgctccacgcatcgcgtagacggcgtagttggctcgcgggaccccggagtcagcatcgcgccgctctctcccgaagctcgcgcgtctcctcggcgcccggagcgagcctgaggcgcgcggacaaacgatgtcctcgccggcggcggcgacgctgcacccttcccccaccttccttgcctccggccctcgctaccgccgccgcggacatccatcttcgaaggtcagcttccgaaggttggcgccacgattaaaggtcaatgcactttttggatggcctaggggggacacgacagcacgtgaactgatccctcctgctgaatcctatacgctctcagggtcagcctcagaggtaggtgcaaaaccacgtgaggtgtctatatctgttgcttcttcaatcatggacattcctgctgcggattgggatgcctgtgcgtgtgatttagatgatcctggaaattttaaccctttccttacttatgcattcctctcaagcttagaagaatcaggttctgcggtcaaggaaactggctggttaccttttcatattgttgcacgggatgagaatggacatattataggtgttgttccactttaccttaaaagccattctaggggagagtttgtgtttgatcaatcatgggcagaagcttactacaactatggccttgaatactatccaaagctccagtcttgtgtgccttttactccagtaactggtcaaagaatattacttcgaaatacatcataccgtgatcaagtttttgacgcactagtcaaaggtttgatgagcctcactaccaagatgaatgtgtcatcattacatattacgtttccgtccgaaggtgaattcagtaaactgaaggatagtgggttgttacaaagaatcgggttgcaatatcactggagaaatcggaattacaagagttttgatgagtttctgatggatttgaagcagcctaaacggaagaatatcagacaagaacgtaaaaagattcctgcccaaaatttgcaaatgaagcgacttcgtggagacgaaataaagacactgggacaccttctataaattctaccgtaacacaactgataatcattggggcagaccatacttgacaagggatttctttcacctcttgggagaaaagatgggggataatgtgatgcttatagttgctgaaaaagatgataaactagttgctggcgctcttaaccttattggaggtgatacactatttggccggttatggggatgcctgccagatgcttactttcccaatttgcattttgaagcttgctattatcaggcaattgaagcagccatagagttaaacctgagtaaggtggaggcaggtgctcagggagagcacaagatccagcgtggttacctcccagtgacaacttacagctgccactacttttcaaatcctggttttgcggcagctattggaaattatcttactcatgagacggctcaggttaagcatgctattaaggtccttcgtgattccggaccatacaaggaagacatactgaaagagttcgctgctcaacaagacgacgacctgtagaatacagaagggacttaaactatttgcatactgttttatagaactaacatcttctatgtagcaacagggatacaggtcgtccaaagtgttaccaaactacgaatcccacatttggacactgctaggactgtaaatatttaacattgtaacatcagtcttacggcgttgagttgggagctatagctatactcagttgtctcgctcttacttttccccaacagaaggacttgatgcttcctgtatattgcgctttgactttgattagatttataggaaaaaaattacataaatatctgcagctgtcattcag

SEQ ID NO: 43183 - DNA, 485 bp, Zea Mays
tcagttttttgttttgatctcttttccttctattcatagctgtagtgctgctgcttcagtttcgcaattagtacttagatctatcggacctcaggtttgttctgagaaaggcttttaagggttgtaatttatagtcactcttttgttgtttgaaagttgttatgttacatattgtgcttaaataggtagaatggagcagctgctaatgacttttttgtgttcataatatttttaggatcatatttttatttagcaacagagactaagttggttgtgcacacatcaagaggcacaaggtctgtgattcccactgctctggttctggagtaaaatcgattagtttcctgcttttttctatttcagcattgcagtatcattgaaggaaccttttcatgtcctctcagatttgcctataccataaccatacatgctctgctgcatagcatgatgaaaatcattcaagggtatctctcaagcattctcca

SEQ ID NO: 43184 - DNA, 1681 bp, Zea Mays
ccaagccgccctcgccttcagatttttcggccgccgtgcgctcgtcctcaccctcctgctcggccactctctcccagctttcaacgctgtgctcatctcctgcccctgcgtgatctctatcgcgcgcagattttttttccgccgccgttctctgaaaaatcctgccgccggtgcttatccccgcgccgccgccgttgtttggtatttatctttcaccgtgcgtcttcttccctggaaaacgcgcgcagtttccctctgttatctccagtgccgcgcgccctgttcttctcctccctggcttgctcgccatccgagctcgcccatggccgcgtcctcccaaacagacgcgtgccctgctcggaatttccccggcatccttcccgtggccaccgcgccgtgctccctcaagcacgccgcgctcctcctgctgctcgccctctgcgcgtgcgtcctcccgcgctgtccctgtgtcgtgtgctcctttttcttcctccctggacgcacgctctctgcagcttgccggagctccctgcgtcgcgcccgggtgctttgcttcttgctcgccgttccaactcctcctaccatggatcgtcaatccgagctcggccaaatcggatctcgttcatggcggctcccctgagctctctctcccattccgacgcgttctgctctctgttattctaatcctccctacaccacgccgtggatctcctgcgcacgcaccgtgccgagctcaccccgacctatgcttgccctgctgctgctcgcccatggcgcccagtcgaagttgctcccacgcgcgcccctgcttccttgttctctgttcccagtgctgcttcctgtgggccgcgccctgctcctgtgccgcgagctccagctcggatttagcccagccgcgtctgctcccattgtcgcgtgcctctgcccatagccgttgctttctccctgctcgagatcatgctcgcgagttctctctgggcgcgccgctgtggaatccccatcaatgcccttgctgtcctaactagaccgtcccagtctacgtacttcgtcgtttcactacgtctggcgtcgtgccttttgtgccggtcgtcgatctcccattcgccatggtgtcgaactctttcgacgttgccctagcccgttgtcgttgtcctagccttggaagctgtcggtttcagcacttctctgaccgtgcccttattcgtggggctcgccggcttcccggtgcgctgtcgcggatgccgtcactcagctcttgtgccttgtcgaactcatctgcctctcttccaactcgccccaaccacgccattaaaccgcttattctgtattagatgtggtctccctttcgctgcagcttggactggtcgcgaggtcatgctcctcgttcgacctcgccatcggttgttcactcctattgccgtgcaagctgccaggtcatcggacgctgctctcagctcgccataggactcgctgaacccccccccccatagcgtctcgatcctcccctgcgtcagcacgccaagtaatttgcctcatagcactgctgtgagccacgtggtcgacctccctgcttgctgcgcttatgatgcagtttggagagaaaatccaaagtttatttgatggagaaagaagcgaagtcgcacaacaccgtcagatgttcgacgacaacctcgagccagga

SEQ ID NO: 43185 - DNA, 2296 bp, Zea Mays
gctgtggaaacggtaagctgataaattattcagaatagttcgaccggtgaataaattaatgtgctagtgcgatgctcatttaggtgctcaataaattgcgcaagtcacgaaactctcgtcgacttcgcagttcttgtgattattgagccaggttcagttatagtgagccatttcgctattccggtcaattagttgaattagtgtcccgagtagaattttagtagacatgtgtgctgatgaaatattttaatcacttataaagatgtagtacagtttataaaacgagggataattttagaatttaattaattagctgatgagttgagtaggctaattgtgtttcatgtgtataatttgttgctcgtgatgtttgcgttaggttcgtttaacttagagaagtgtatttatagcgtgtagtcgtatattaataactagtgtttccgtgtaagattgtacaacgcctcgccactaggtgtttaatacactatcgtataacactatttagatttatgatattcatgtctatatgcattcatatgcataatgcatttcattcaggtgcgataattaatcacgtgatgcggaagatgactcaagtcgaccccaagcgcgggctactccgtatggagatgctgatgaacgaacctgcctgatcaagtgttaggacaaggatgatcgtcaagtggaagtcgtctaacaaacactaacatagtgttacccaggttatagtcttgtgatgttgttgatggtgttaagtgccggtgggctcggccttcttatataagtataccccgtctttatcttcttattgaggatggtcacttgacctagcatatatttcaaaactataaataatttataatagttcaaagttatttctttgaatcacttttgtaatcacttcgatcatgtacaaagtaaaatttttgtaacttgtaaaatttggtaataagatttccgatgcaaactgttggtgtgtgtgatttgtgttacttaatcttgcgatcttggttgtaagtggtttatccggggtccttgggacactcggacagatcctgttaagttatctggtgcacatgcatagccgtctgaggtctttgagacaaggacaagtgcatgtgggcccaataacttgggaggttctgccacaaacttggtcaaaccaaaatgacattgtcgactgcataggagatttctcttgatatagctaagaccagataaactcatctgttatctgaatgctcagattagagcaaaaaacaactcaccagaccatgtcattatctttgatgtcttagactgtactagatttgattcgatttgaaactggaaaattttatccgcggtctgaacacctgattccacagccacagataatttgctaaaagcaaagcgcaattgtaaactctcagacacggtttcttcgttaatgttcagggtctcgattataaaagtcaagtgttttataattcaccatcgcttgaccaaacgatccgaatagcacaaaattcatcgtcaaattataataaatttatttgggacacagatcgcaactgtggatcgagtttccaaattcgtatttgtttaacatattaattttatacaggagcaagactcgatagctcatataataaataggttctgaatttcgcaaaccatttatattaatccaaatgggtagagatgaggacgatatcaaaattgtgataggcgaaaatgatcaggatattgagattactattctcatcgacatcatgtgcttaagtccatattcacagtcaacatacagtaacacctggggtgttacaaccttggcccctcttggagaggaacaacgaggtggaggagaaggaaatggatattcctcctgaatctcatcttcatcactgcagaaatcaatcacagacgtgtttcggcgatgaaccatcttgaaggaatgaataaacaaagtatgagatgggttcgtgcaaggtaggaaacaacaaatgctaagagagggtgtgagtggcatgaacagttcaaccattcatatgaacagttcaactggccatgaacatcatacacactctaccacaacaaatgtgaaaacaaggctaaacttcttaacgaaagtgttccatatgcatagattagcctactccactaaaggattcacaagaaaatgtctagaaatgtagatcagggcaaaatagtgaaaaacaaggaagtacctcaatctatgaatccacctgatgaaacgccaccaaacttgaggaaatggaggaggatcccctaaggagcaatctcctaaaatttc

SEQ ID NO: 43186 - DNA, 560 bp, Zea Mays
acgagacgtacatccaacagggcagggcagcaggcggaaggcggcttcgacttggagccttcgacgctcgacggcggcacagcgccgaggccgaccgcgagtccgccaccggcccaccgccgaccggtctctctcctccacgcggccctctgcctcggtctcttcgaggcttcgacagcgccaccgcgccgtcctggatctggaagcaggcgtgacgaccaccggcgaccagcgcgacttctccaatctctgggctccggcgacaagcacactagattgctaagtgatggaacctttatcggttcattcagttgtagcagcgaaacggaggagcgaaagagacgagactgattcagagagcaactcattcgacaaggtttttataatcataatcaacggcagttgataggatgggtgcgtggcttggaggcttgaggatgagcgacctagaacaacattgtctggttcgaattagtttctatagaatatagttgaagctgatcaacatgtcttttactcacctcaaggaaatcaatctgcaaatacgtggtaatctctca

SEQ ID NO: 43187 - DNA, 2200 bp, Zea Mays
ttttcttttcccgtttttataaataaatcagcccgaaaaaaggacgcggtcgtggaccgaacaaacctttccccaaaatttccccttccccgcacaccgaacgaactctcgatctgatccctatccttgcagggcccgcctcggctcaccgatccggccccggatccgctcgtcgctcgacgggatctctcgattgtttagacaagcatgctgcatcaggagaacagtgagccgttcgtgaggcaccactctgagcagcttgcgtgtggcaacatgaggggagcagataatggtcgtccgaatttccttcctgagaagtgccagattgcagtttgtcctgaagtttgccagaggggtgaaaaagttagcctatttgatgaagggctgatacatggtgttgatctaaccaatcatattgctcagtcacaattggtgccaagtggtgtcaaggaaacaccaatagtggatcaaaacaagagacctgcatccagtgacatgcttgacatagttgaatgcaaacgtctgaagcaggaaggtcaaatcgtaactaaggaagacaaccatacatctgcagaggattttcatgagtaccccacatacacgacttgcagaagaagctttgactcaccactatctgagagcgaggatagtgaagatgaaggtgtagattcacctctccatttttcacatgctcacacctatgttgaagatgatctatggcctgccagctttcatcatgctctgggcccttttcccttgaggaaacctgttcctatcgggccaaatcatcaggctgaattacctgagtgcaggccattttgtggaagaactgaagaaggcgaaagtgtcaagtggatcagaaacggtgttgtgccaatgcctgatactggtgcatcgtctttggtgttggaacctgttcactgcaaggcagactgtgagtgtcatgatgaaggttcaatcatttgtgtgaaaaagcatgtgagggaagcaagagaaaagctgaagggttctgttggtgcagacaccttcagggagttgggtttgaatgatatgggtgaagaggttggctcaaggtggacagaagaggaggaacatttgttccagcaggttgtcttgtcaaaccctgcttctctgtgcagaaacttttgggatgaactccctcttgccttcccttccaagtccagcaaagaactagtgagctactacttcaatgtattcatgttgaggaagagggctgagcagaacagatttgacccagtgaacatcgacagtgatgatgacgaatggcaggcaggtgacgatggtgagtatccaatcacaggaagaactgatgaatacttgccaactgagtctcttactgatcaagatgatgttgcatgcaatccagttcctttagaaagggatctctatgaagattctgatgatgaggatgagctggacaatgccagtggagacaggcataatggtgcccagagggctggtatgttgtcagagggtaatcgtgtaatgtcggtcatagaacataatcaacagacgttcaagttagatgcagaggcgcaagacgactcttgcacatcatttgaggctcatcaggttggtgttgaaggtgggacacatactgatattgctgatgacaatcattacaggagtgacggctttggtggtggtgcagaacatgggttcttcggtaatcagtgtgacacaaaagagtgggacttcggtctcagtatcggttgggaaaagcatgattttttgtcaacaaacaatgtcatagaagaggtgttcgggaagtgctgtgacactgctgaccaggaccttatctgagccagacgcggaggcttcttgtcagctgcgaaaactttagggttctctgaattgtacagcagtagttggctattttgatttaatgcctcacttgttcttacaggaatctcatctctgtccttggaacatcatctgcttgtgatttcgtcacatgattaatgtaaatccgtagtctgttgatagcctgtggaatgtatgtatcatctttgttgtgacggtgtctcttgacctgagcgttttttctatgtgctagcgagggtcatgtaataaaagctgttgttgttccttgaccctgtctgcaaataaatgtaacctgccagtcaatgtattccgaaaggtcatttttatctgatctgaaatctgtagtcgtttccgc

SEQ ID NO: 43188 - DNA, 1945 bp, Zea Mays
atattttctatgttttgttagcgattgatcttttttacatggtcaagttaagatgacattcatcagcgaattttcccaccgctcagcagtgacctcgttcccgtcctcctcgcatccctctcgtccgccgccgcctggctcgcgccgccgacagtttctcggcccagatcgagacacgcccgccatcctacaccaggtgccgaggccttcgccgatcaaagagatcccagacagcagatccgtccgtgccctgctcctcgaaccatggggacctctgcccaggaatcgcctctctggaagcgtatcgacgatgccgagtactatctagtcagtggatcatttgaccaggcggtgttgactgctttatccgtcgccgatgaaatacacatggcttctttggagagcgctagcgaccaggatgagctcctggagatgcttgaatcggctgggatggtgcttgtgcaggcactaaaagaactcaggagggcctctgagatgtttgctcagcttaagatgatgtttggttcagtgccatcagtgcctgctagagttttccttacaggaaggatctatatctgacctcagaccaatctttgaggagtaccttgccaattggagatatacggatgatgaggtttatgtttttgatggaggaaatgacagcacttcaaatggttttgtcgttaaatctattatgtcaactggccagtattttgaggtggcagaattgtatacagtaacattcctctgtattgtctctcaagatagtgaaactgctatctcatgggcagaaaaggctcatctaactgagcaaagccggcaggttttttttttttgtaaacgctacttaataattctactacagcataagaatctgagtgttccattatgctaacataggtcttccagcgtgggatcttataggtccagataattttcatgctaaagtaggattcttatgttcccaaaactatttcttgtatgaattaattcccactacagtatgcttctcatttccgaataacttctatagttccatgctaaactagggctcttcatatttccaaagcaatttgttttgaattcccgtcattctttattttctttagaggttttactgttgcattcttttttcatcaagacattttttttctttctttctacaggacctactaaaaaagcttcatgcagtgcaattagctgcaaataaaaaactgtccactgttgaaggggtaaaacaaacagcagagaggaacctttctacttctacaaatgactcaacaccatcgccacatgaggatcctccaaagatagttcctgcgtgcgatgggctcaaaaaggtcctgctgaagtctgctcaacaagctcagcatgttgcaaatcattttgatccgtttttctggtggtttcattcaattcgcctgaagtttgggaaaatacatattgttctacccagtggtaagttagtgtttctgttctctctgctgttctcagccatgtacgtgctgcgaaggaaaactgctggcttgaagagggctgtgttccagcaagctgcttccctgcgacgagcattttttgatgcacttcagcttgcgttctctgtccagatgaaccctctagctgctgttcaacaagtgccacaagcccctcgaggaagctggtgattggtgatgttctttatgccttgatctatgtaacattataactcaactgaaattcaacaggcaaccagatttcatgtcgcggaaaatgtggctgtgtaaatactagtgtgcttaatgcagcatgaatgtgatgatgacctgggtttttttgtgtccattctcacctgaagcatattggactggggattatttacaagagctatggcttttgaattggggaaacggattaagtgcaaccaaaccaattagtgtaaccgatgaaaccaagacataaggatgga

SEQ ID NO: 43189 - DNA, 948 bp, Zea Mays
gcaaagcctttagccacaataacttcggttactgtccaaaagtttttctggcaaaacattgtttgtcgcttcggagtgccgaaggctatcactgtggacaatggaacacagtttgactccgaagcttttaaagaattttgtgaccaaattggcacaaagatccattttgcgtcagttcgacatcccgagtcaaatggactagttgaaagggctaatggcatcataatgacaggaataatgaagttaatattcaatcaaccaaggggaaagtggccagaagaattaattaaagtggtgtggagccacaacacaacagtatcaaggtcaacaggttttacaccattcaaattgttgtttggtgatgaagcaataaccccagaggaggctaaggcaggatcaataagaacagtggcttcggcgatagacgaaaatgattgttctgtggataaagatgctatagaggggatcaggcttcaggctatggaaaatatcaataaataccaagccgaaacaataaaatggcgtgatagaaaggtttggttgaagaacattaagccaggacatttggtgcttcgaagagtggccaacccagacacagtgggcaaactacaactaaaatgggaaggcccctttttggtagtatcttcgtcaagacccggttcctacagattaaaggatatggacggcaacgacattcctagatcgtggaatgcggatgagcttcggcggtattatgtgtaatttgatgtaatcttttctattttttattgttgttttagtttttccttatggcacccttttcctttccaaagggggggaaaggtttttaatggggccacaatatgtaatttttcttttccttatttcaattctataggagtgatatcccccaaaaatgtaaatgtaaaaagctgacgacgcaccatcgagtgcaatggaaaaagaaaa

SEQ ID NO: 43190 - DNA, 1128 bp, Zea Mays
ctgttcttagaggacaaccatggtatgaggtagtagtgcgtattctagaacgtgctagaaagccatcttggccacattggatgttccatgctgaaggaatgactccttgggagggtgctcaggtagctgccttagaggcgctaacaaccatttgttaccagaaatgggaggaaatacaagtcacatctatgaggttgttccctgcagttgccttaagtgacccattggtgtatcatcaccaggcccgattattggaagcattcctattgggcaggattctgtagaatcggcatctgctcgagtattgatggccgtgctagagttgcagcttactcgagggcacaatcgtcaaatgtggcagcagttgtacactgggagttatgcaacatttaagatgatggaaatggccaagaatagggcttgtacccaggcacaagaacaactggaggacacaaagattcaagctgagcgaattattggattagagcatcaggtgacagaacttcagacgcaacaccaagctgatcagaattgcattaaggagcttgagcatcagctaactaatgctcattctaaatcaaaagttctgagtcagcaacaagaagaaattcgcttgggtgctattgctattagcgaagaccttaaggaaaccctaagcttcataagccatcaggatcaggcgatccaggaattgaatcgtgctcatccaatggaatttcaagtagcgcaacggcttgtcaaccatctgcagcaagcagtgcatatgctcaatgttgccttttatcctactccggcatcagcggactaagggttccttggaagaatggcaacaagtatctggcagatggtgtagctagagaagatgtaataggcaactgggagtgtagcgaagtagatcaatgtaataaggtaggtgtaagatagacctgcttggtaataaaaacaggttaaactttgttgaaaagagttttcctgtttcacctggatcatgtaacatgtgagcttttctatgactatggtgtaagaaacaactgcctgtttcagaagcaacttttaatatctatagccgtttgtcgaatcccaagagttaaaatggctattcctttggatattccctgtggatgcacg

SEQ ID NO: 43191 - DNA, 438 bp, Zea Mays
ttatctatgcaaaccatggtagtacatattatctcatgttaacatatttcttgttcacattgtactacatgacaagttggaacatataaaatgaatacatgaccaaacttggaaggtgctaatgtgcaaaacacaactgaagggaaatggatgactcatatttcatgggaagtgttgacacgtagaataggtgaaggatgtgacaacatcagagccaacattgtgttggtgggcattgggtagcgccacgaggagactaactcttaaattcttgctttcctctaatagttgcaactcctatattattaggtaggatcccattcctatgacaaaacccccgagtgcttgttcggttaatcacctccccaaggagattggagtggataaggggcactttgacttgttggacatttaatccctttaaattcccaacaaacc

SEQ ID NO: 43192 - DNA, 528 bp, Zea Mays
gccctattctcacagcttcgccctcttcgttttacgacatgctggccgctcacatcaattcacgtgtcctagaatccttctcttgttcatagccatccatgtggttgcttttctgccactaccggattgcccgcttcatttggcgatagagtagatggaagcacaggagaggagaggagatgaggaagagtgatgcaacgatggcgaagacgaggaacatgacgacaatagcagtgatgctggccacgaagacgaagacgaacaccaccatgacaacaacctgctgcaaaaagtctcaaactgaagtgtggcttataattcagcgcgctcttcgaatgatgaggacagatgcgtgaagaacacagtaattaaggatgatgaggatccccatcgaggaacacgaggtttagaatccaacgtagattgtggtggtggaggatatgaggtaataagctctgtgccttctctcctcgatattaacagcagcaacgacgacgtggcgttcgtttaggaacacgtatagatgca

SEQ ID NO: 43193 - DNA, 1660 bp, Zea Mays
actgtagtggagctggagcgcgcacgcacacacgagtacacgacacgagacacaagccgggaattgaagcatcaagccctttctctgagcgccgatggcacggtatcttctcgcccccacttccacctcctcctctacctttctccccaaggatggagtcaagaactcgccgacgtcacggcccctccgcctccgtgcgctcggctccaggaccagcaaggcgcggcacatcatggcggtggcgtccgagcaggccgcgccgccggccaggtaccccaaggtggccgcccctaccaccggcccgatccccgccgccgagctgctcggagtcatcgaggccgccgcaaaagctggggccgatgttataatggaagctgttaataagccacgcaatatccactataaaggtgttgcagacctggtgacagacacagacaagttgagtgaatcagtcattttggaagttgtcaccaagaacttcaaagaccacctcatacttggggaggaaggcggccttgttggagattccctatcagagtacctctggtgcattgaccctttagatggaacaacgaactttgcacatggttaccccagcttttctgtgtccattagtgttctcttccgtggaaagcctgctgcttctactgtggtggaattttgtggcgggcctatgtgctggagcacccgtacaatttctgcatctgctggcggaggagcttactgtaatgggcaaaagattcatgtcagtcagacagacaaggttttggatatgaacacgatgatgcctggacgaccaatatgaatctgttcaaggaatttactgacattagcaggggagtgcgaaggctagggtctgctgctgctgacatgtcccacattggacttggtattacagaagcttactgggaataccgacttaagccatgggatatggctgctggcgtcctgatagtagaggaagctggtggggtggtaactcgcatggacggtggagagtttacggtcttcgatcgctctgttcttgtttccaacggacttgttcatggacagcttttggaccggatcggccctcctactgaagaccttaagaagaaagggatcgacttctcgttgtggttcaagcctgacaagtacccgactgacttttgagctgcatcaagggcaccaccaccagccatgggccaccataataaagcagccatcatttttttttgggaaatttggatctgtaccatcaaaagattacaactttagatatataccattgtatctcacttatatgtggggtccatatgaggcaatgacatgtggagccaatggtatatatctaaagttgtaatcttttaatggtatagatccaattattccttttttttggggggtgtccttcaagaagaaacaataatgtttttagttcaatagcactgtacttgtaatggcaatacgatgtacagttcttcgactcgagtttcaaatcagagtttcaagagagccaagctcctgaaagaacagagcttcacaactgaacatggaatgtgcccccattgctctggcttttcgattgttacatgtatcggacgagatcgagattttggaagaggccagctcatttctacatctaagaattgattccatcgtgagccgctttggcctgcta

SEQ ID NO: 43194 - DNA, 2388 bp, Zea Mays
cgcctcctctgagctgcctgcttgttcgagctcccacggctccagtgtccccgacacatcagccgctccctccactcgccttcctttttgacgttccaggatcatccatggcatccaaaccaagtagggaagactagcatcgaacccgctcgtcacaggatccaaccgcctaagaaacaaagcagccgtggcgacctcctagaggagtcaaccaggaacaagaaggcatcaagcatgttgccgtaggtgggagggggagggcaagggcgcaaaaatggcaacaaccatggccggcgatgggatgcggcggcggtgagcgcatggaggaggacgaggcggggacggcgtcgtcgtcgtcgtcgccgcctattgtgcagctgggctacgaccaggtcttgtccgtcctccgtctgctcccgcccgaggccgtgctgtccttcgccgccacctgccgcgttttccgggcctgggcctcctcggacgcgctctgggaggcgctgtgctgccgcgactggggctcccgcgccaccgctgcgctcgccgagcgccggcgcgaccgcggcggcggccttcaggcgccgtggcggagggtctacgccgaggtcgccaggctcggcgcgctgtccgcgcgacgcgtccccgccaggggcgcctcaccgcggccccgcgcgtcgcactcacttaacctcgtcgccggctggctcgtgctcttcggcggcggctgcgagggagttaggtcaccatcttgatgatacttgggtggcttatgctggaagtggagctggaaataggccgccccctatacttagctggcagcaattagcatccggcactccaggtggtcgtttcagtcattcttgccttctagttggtgacacattagtcttgtttggtggaatcacagatcagggacagcgtttgaatgatacatggactggtcaaatcatctgtgaagagcctcgaaggccacggatctcatggagattgctggaggtaggtcggcttgcaccacctccacgtggagctcatgcagcctgctgtgtggatgacaagtttattgtcattcatggtgggatagggctctatggaagccggcttggtgatacatggcttcttgatctctcaaatggccttcagtctggcagctggcaccaaataggcaacacatggcctttgcctcaacctcgttctggccactctttaacttggattggcagcacatgcatggtattatttggtggtagaggatcggaatttgaggttcttaatgatgtctggctgtttgatatcagtgatcaataccccaaatggaaggagctaaagtatggcttgtctagtgctcttggtgagcttccttttccacgggttgggcattcagcgatacttgtgttgggtggcaaggtccttgtgtatggcggggaggactcacaaaggcgacgaaaggatgacttttggatcttggatacaccagctctacttcaatacgagtcaggttccaagaaaatgaccagaaagatgtggaagaaactaagaattgatggtcagtgcccaaactaccgatccttccatggggcatgtgtagatgcttctggttgctgtgtgtatatttttggtggaatggttgatggccttgtacacccttcagaagccttgggcatgaggtttgatgggcatctgtatcaagtggagctcgtgctacatctttaggacgtgtttgttcccttgtatatccgagaaattccataggtttgatgtttagcgtctggtgtagtaccatgtcacccaggttttcaacattgtaaggatactccagatggtgcctaacggtcgtttgcgcatggatgcttgcgcacagctgtcgctgatctgtgaaaggaacagtgacccttgtaattttggcctgatgtgtctgcatatggccatatgggtttgaattgtcattcctttgtcagattcatatgttccaaagaatgtccgtcaataccatctggagcagatggttgttttgctacctgatgagccatcatatagtcatgggaagagagagaaagatattcttttccacaataatccaatgcgcgaggattgctcgggaccatatggagctgctattggatctttgcatcccagtcacagattatggaccatttgcagtatgattgctcgagagaaatctggagctcctgttcagatccactttgtgacagcaaggcatgcttcagcatgaagatccatgtatgatacctctgaaaggtttacttaggcctagactcagtttgtctctgattctgtacattcttgatagattatatttgctcaagatgttgtttcagtgcagcattcaactgcaaattttattgctggatgaatcgctatccactagtacat

SEQ ID NO: 43195 - DNA, 636 bp, Zea Mays
tccaatcagtcgcagagcaaataaattacactacctagcaagatatggacggattgcgaactcggctgcaaaagacaaaatacatactgacctctgaagcataatgttgatgacataatgctgacctccaaagcataatgcagatggcatcatgccgatttttacaagcagaaaggataatctttagcaaaaagacgcaaaaggaagaccttcgaatggattatcctcaaaaatccactcgaaggtcgggggctacacccattgggtgcaccttcggtgcaccccgtggatcatcatgccgacttctaaggcatggggaaagagtaaagacaaggccggccctctgaaagctctcttgtgagttttggtgtttggatgacaactcaattaaaggactaacaagtgtactaagtgttgaacaggtgcttaaagtaaagcctatagggttcaatacaagtgaacaaatgtgatggtccaagaactggattatggatacataatggacatcacaagtaagatggacattgcataaagtgagactcgggtgcgaagctcggagacaactgatcacgccaaggacggaggcaagagaagcttcgaggtaccaagtgcacgggagaaggtcaaggaggctga

SEQ ID NO: 43196 - DNA, 746 bp, Zea Mays
tctgaatttagttttggtacaaaaacaggcataaattctgtctttccacaagttgcagatgaacctgctcccaagaaggttgcctctaagaagccagggagctccaataacagaggtaatttattgaataattgtcttgtcatcaagattgagtacaagttgataattaaaaccagaaacatgatctgcactatcgatgcatggcaaaagcgcgatgctcctctctacggccctaagtttggtactccagtgtatatttggtggagcgccactcagcctaacttagctttatcaaaaacaggagcatcaatacttgaatgtgtcgtaatgtgggatccccatgaagttgaatatctacagtagttctaggagatatattcaaattttggaacgtttgttggaacttgagagatgctttatctttcgagtgccatggattgatgacagaggtgaagcacatgtcaatatagttctctgttccagttcagtcatgtgtcagatccatgcaggggtggtcttcggtttcacccacccatgagctttagtgtggcaaagtgtctggcctttgaacatgtaatattgtacttgcccaaacttccctttcattctagaacacataagatatttgttttttccttgtttacaagacattgtcatagccactctacgtgaactatgaaggtgcatttgtgatgctgataaattgcagcctttgcttagccacgggtgtgattttcttaatggat

SEQ ID NO: 43197 - DNA, 992 bp, Zea Mays
atggttgcggcctcgccagagaagctccactgcggcgcggcggggtcaagtgacaaagaaaaggaggtggcggggagggatgatgccgaggttatgttgccgcagctctcggatgagccgctgcgggagaaggcgcagcgcatccaggtcatgctcaccggaggcatgtccgaacgcctccctgaccgcggcaagaagctgctcgccacactcgatgccatccaccgggagcaagaccgccgccaggcccaaggcgacggggcacgagcgccgctgggatctctgaccagtggaaactggaatgctgtaattgtacaatatagtgacggcttgggctttgtggccaagccggcgatgctgccggatggttctgtcaatctcatgctctggaactgcgtcgtccccggcaaggaaggcactgattgggaaggtggatatttcccggtcactctccatttcactgaaaattacccaagtaaccccccaacctgcaagttcccacgaaggtttttccatgtcaatgtctatgattctggggatgtatgcctgtcaatacttggtgatgcatgggcgccttctatcacagtgcggcaaattctaataggcatccaggagctgctggagaacccaaacccagcctctcccgcacaggattttgcttacgatgtttttgcagagaatatgccagaatacaagagacgcgtccgtgagcaagccaagaggtatccgtcgctcgtgtagccgtggacctctgcaacacaattgctgctaaccaagtagtcactcactttggtgtagtggaacttgttcatgacgtgcttaactatggtgtctagttagccgtacgcttgttggaactgctaaagtgcagcttattggaactgctaaaatgcccttgactacgtcttattattatggtttatcagtatagtgttgtcaacatccaaaatttgttttggccctgtagaatactcaaattggtaacccctaac

SEQ ID NO: 43198 - DNA, 2081 bp, Zea Mays
tcgcggttctaccgctccgctcatgcccgcggccgaaccctcccccgcatcccacagccgccgacgctcaccttccatcctccccgcagcccgcagccgccaacgctcaccttccatccccgcggatcccacgctccctcgggcgctccttccgcgcccgcccacagatctcccatcgacgtcgatgctctgcgattaagcccagctaaactcgcgcggtttggctttggcgcagcgctggagctctcgagacgctcgcttggcgccgaagcggacgaggagcagttgtcggcgtccgctgccgtgtcctcagctccgccatctccttctccagctcgacgatcctctgcttcctgctcgtgaactccagcgcggcagcgtcgagctcggcgcacagccacccgttctcggcttccacccgctctgcggtgtccctgcacctctggagctcggtcttcttggccgcgagctcggcctccaggactgcgccaaagccaaactgctactgctacaactccgccgtgctctccatggaagcttctgcgcctagatcaacagcgttcggccgctggtgcccggcgctaagctccacgccgtcatcgagcgtggcacagtgattccgtcctcgacctccccttcctctgcaacatgtccaggaccgggaactagtagtgggaggatcaccgtccaccgtcgagcgtctgcaaggcaaatcagatcaaccaccacatcggagtgaaaagtctgcgccactctgcctcacacagccaaaaaatgtatcaggtgattaagaaccatcccagctcattgaagctttatgagcagaaactgctaggaacgagtgaagtcatgaaagaagatgtccagaggatccatgacaaggtgaaccgaatcttgaacgaagagtttgctaagagcaaagactacgttcccaacaagagggattggctctcagcttactggactggctttaagtcaccagagcaaatatcacgtgttcgcaacactggagtgaagcctaaaatactgaaacgtgtaggtcaggcaattactacactgcctgaaaacttcaaaccacatagagcagtgaagaagatttttgagctgcgtgcagctatgatagagagtgctcaaggaattgattgggctgttgccgaagccctggcctttgcaacacttatagtggaaggcaatcatgttaggctaagtggacaggatgtggaaagaggaactttcagccatcagcatgcagttctgcatgatcaggaaactggagcaaagtactgcccacttgaccatgttgcaatgaattaaaatgaggagctatttattgttagcaacagagactagttggagcttcattgttgatttttgcaaataagcaagacatgcaaggagctctaaaaccaactggaatcacgaagattttacttagttcgatgtgggagcaaaaggatatgccaaattgaatgtagtttcatcaattatgctcaattatggatgttcagaggcatccaatttcagtgtgtactgcaatacttgggtccacctgtacttggtttaagaagcgctccgcggacttccacggccgcgccgccgatctcgtccacggcctccggggcacggcgatgcccaggagacaggccctcaaggaagagcagtgcagagaagagaaaggtatctcgactattccaaagcacaagtatgcatccaaagcctgttccccaaaagaaattgtgcaggatcgaaaggaacttcaacctgaaccagcgagagtatcgatacaaagactgtttgaaatcttctagaaatgacatcgaatggaacttcaagctgaacaagcgaaagcatctatacaaagactgtctgaaatcttctaggtaacaacagccatgacttcgaacatattgtattctaccttttcagattttcttgtttttaatggtatcacaattattgtgctattgtgaataaaccacttgtaatgctgttttgctcagttttttcgtgttgtacataaatcattttatatttatactgcgtcacaataatttactgatgtgcaaatatgatattgcttt

SEQ ID NO: 43199 - DNA, 579 bp, Zea Mays
ttcacatacatttctcagtgataaattgctacctgttctgcaaggagtccaacctgtgtctcgtgctttccaagtgcaagtggctaatggttctgttgtgtcttgtcagcatcaactattaagagcatcctggacaatacaaggctgtgaattcgtgtctgatatgatatttctgcccctaccgtgttatgacatggtactaggcatggattggttggcatcttttagtcctatgcgagtggattgggaacagaaatggttggctattcccttccaaggatctactatggtgctacatggtcagtcatccggaattcctagctgcactgtggtggaactctgtgtgttgaatactgctacggcaccaatgactcagtcagttttgcatccccaaattcacgacattctcattcagttcgctacagtttttgaagatccaacagagctgcctcctagtagggaatgtgatcacacaattcccctcataccgggtgcacaaccaatttcagtcaaaccatatcggtatccccccaaactcaaagacgaaattgagaagcaagtcgaggagatgctgcatca

SEQ ID NO: 43200 - DNA, 1934 bp, Zea Mays
ttctcagtatataatcgtaaattaatataaggacaatattgaattgcatttggtaccttcggcttgacagaaaacaaagatacgagcgtgacgcaaaagcaaatgccaagtcagcgtgaatagtacgagagtactgctcatctatttataggcacgggacgcagcccatgcgaaattacatccatgccctttacatttggtaatgactctacggtaatccatcgaggtctaaatagccttttctcctttaagtcggttccctttcctgctgtcatgccgaagctcccttgcgcgtagcttcggcgctgtgtcaaccttcgtattgttcgtgcttttgacactgtggttctgatccgagtccgaaggtacctgttcatgtaatacattccggaaacattgttaaatcatgtttttgaggaccttcagaagacgaaggccctcaacagtagcccctcgcaatattaatttgttagaataacgaattcagattgcgatatggacaaaggccctaagccgaaggtccaaaaaaacacctttcccttgctagaatagcaacagtcaatgacagaaggggccctccatcttggagcgtgctgggcgtataaatttgttacactacttgttccatttgccttattttctcaatttgttaacttgtgcttactagcacttgatagctctcaagctttttggcttcggtttgaaggacatgatttcgtcatttccgaagatgtcaagaagatagttgctgagacgaagctagccgaagaggagaagctcctcgaggagaagactgttggatttgttgaatcaatagcaaaaacgaatacagagaagattactaaagaaattctggaaggcttgtctgaagatactgatgatagtgacaacaatgatgtggagagtggaggcgaagactctgaagatcggccctggcgaccaagtcatgctgtcttcgggaaatcaactatcaaacagagtcatcttgataatatgagaggaaggtattttcgagatatgtctattgtgagggctgacgtagacagggccgttcctgctcctgaagaaaacgaagttgtgatcttccgaagcttcttcaaagctaggcttcggttccgttgagcagatttgtggttgaagttttgaagacataccagattttccttcaccaaatcactcctaaagcagttattcgaatgggtatcttcgtctgggctgtgagaagtcaaggtctagagccaagtgcaagatgcttttgcagtatgcatgaactctcttatgagacgaagccctagggtaaagaacaatatcataacaatttttgttgctacagcttcattgctcgctgtggcgcaagctacccagtgccgacgtttcggaagagatggcctgtgtggcagaacctcccaagttattgggcccacatgcacctgttcttgtctcaaagacctcagacggctatgcatgtgcaccaaataacttaacaggatccgtccgagtgccccaacgacctcagataaaccacttacaaccagaaccgcgggattaagtaaacataaatcacacaccaacaattttgcagcggaaatcttattaccaaattttacatgttacaaaaattttacattattttatcggagtgattacaaaaagtataagtttgaaaatatatgctagctcaagtgaccatcctcattaagaagtatagaagaagtacttagacttataagaaggccgagcccaccggcacttaacaccatcaacagcagcacaaagttaaaacctgaaaaataacagggaataaaaccctgagtatggaattgctcagcaagacttacccgactaaaggaaagactctaaagggtatgctggttaaataggaatcaaggaaaaggctttagcaaggatcaacttagatatttttgcagaaatag

SEQ ID NO: 43201 - DNA, 3208 bp, Zea Mays
ccccatcctctctttctccctcgcgcttgactcccctgccaccccttcccgtctccaccccgacgccgaccgcactccgctccccgtccaccatcccagcgtgatggctgggaggaccgcgcctgccccctcccctccttctctctcacgccctactccctcgccgccccttcatcccagatctcgtcatgggcgctaccatgaccaacagttcggtggagcaggcgccgcacgctacgccatgggacggagcccgtccccacccgacaccgaccatctccaccccgagcccgtccgagaagtgagtgatttccatttcttcgattggatggcgtgcggtcgggcctccgcacctccctgtccccctcccctcctgcggcgatagcttcctcgaggagatgagcgtgccgcccccatgatcggtctacctccgccgcccccgcgcgcaccgcaaccaccacgcccctcgtgcaccttctcgcccgagactgcattggagaatggctacacaaagatcatgctgccaacatgtgcttctggaatagcatgccctatgctatctgcaactataaaggctaagctttaccagccgatgtcctgtatgtcgatgcacgatgggaggtacttgtggttcttcaacttcatggttgtctggcctagccgccatccgcccgcgcaaacgcggtacagctccactacagcagcaggaggcggtgacgtcgccaaaggctggcagatacttgatggctcttgataagaagcctattgcaactaaaggccaccacctttgttgtcctcaccctagccgaggacctcatctcccagattcagtggcgacaaaatggtccattagtggaaacaccaagcatcatggagagctgtttcgtcaggagcttcgaacgcgagccatagacggggagttgatgccactgggcttatgggctcttcttttgggcaccaaagcaaagagcagtggagtaaggtcctcaatttttgttgcatgttggagatgggttcaattgggtgacaaatcttaacccaagtcagaagtaatatttggaatggtcataagtcaaactagacttccctagcgacagcgattcaacgaataagaaccaggccaacatgtagtgagaccgagagcatgaggcttcagtacctgtctactaacatcagatgcattagttgatgtcttgattagttgtagcagggaaccagcttccagtgcctcttgtaccgatcatcagcaagggagtgctagaggaggaggttatggtgagttttgtcgcgactaatggtgagcccacgactacggccacatcaaagctggtctggtggaacctcgtggagcagatgacgatgacgccgacatcctgcacctctgctgcgacgctgccgaccaggacgcgggcccctccgtcgcgcgcgctctacaagtctggatccatcatcgtgctcggcaagactgacttccttaggccagacatggatcccataaccagatggacagccacaaagaaaagtggcctgattagctacaagaagctcttgttccatggactcgatctctggaccgcactatcgttgcctcaacccctaggtcgtgctgccctctggcctcctcatcgtacaattcaccaacatctccaacgtaagtgcagcaggttcagtaatgaactcaaaagtggcatcagaatactctaagagttttttgttctttttgcctggatatataccgagggcaatgcattcaaaactcctatagatgacgaatcccatctctccctcttttcccggacatcgatcccagtctcttcttcaagcaagagatggagctttccttggtcgggctccaaaatgctaggaaaacatcacttgcagcagctcgcagcgacacccccgcctcctcatcatggaagctacaagaacactttgagtaggtgaagaggatttgcgacactaccacattgtctttggccatgcatcatctcagtgataagataacaagccaactagatatttcaaaattgactgacaagctacagtaagggaaggtagactcaactgcattgacaccaaaggagaagtatgaaacttggaaggagattaaaattatgagtttcagaaaaatagtttctccaatgtgggcaatgacattgcttagcttgtatgttagagttcatgtcaccatattaggcagaatctgacgcctttaatgtaaatggacacaagaccttcgttgcaatggatgattatcttgtcactgacaaaatcactgcattcatagtgcaaacgcaacatgcagcaactgaagtccttaaagaaaagcaaccaaaagactgtatgaaatggaccaagtattgcagacaatattacaaatattggacacgttcatggctctttctgaagatactcatggagaaattatcttgtacctgagaatcccccttatttttgcacaattgatggttgtgtcctgtagtggctttgataattcatcactcctaaacgattttagaaagctataccaactaatgtgtggaggacctgggcaaggggtggtagtcgcgctggttcgctatccacggcggcaagccgcctactcgaagatcccacctccgaggacgccgctacggggaggacatgggcactaatcttgaactaaaactaggggggtgtctatgacggctggttccgcctacaaccacgtggacaacttcttgcccgacatcatctcccagcttgttccacctacaaccgcgtggacaacttttcacccgacatcatctcctagctcctcgcattcgccaacaagttctgctatgagggcttgaagccaacctacgacaatcgggtcacaaccatggtgttggctcttgacgacgcctgatccctcatcgacatcggcctctaggaggcctcccacctcctcgtcacctcgtgcctctagcattcctatgggagcccccaaagtcactcacccacctagacatcgcccgtgttgttatttggtggtcagtatgtcacaatatagtcagttttttttgcttatgttgttggtactgattttattggatgtgaatttatttatcctttcattgtatattggaattcatgacattatctacatatgtacatgcttacatatctattatatttttgtataaatatttttttgatagtttttaatttgtatggcaaagcaagg

SEQ ID NO: 43202 - DNA, 2109 bp, Zea Mays
gtgtactactggattctcacaccgcagcatccgttcacgtgtcttcaccccgagtgctgtctctctccttcctctctgctacggctgggtgaggcggggggctactgccgccgcctaacgccaggttccgaggccttcgtcggtctatttgccggcgatgaacatccaccagggatggttgcaacaatttgggcatagcgttggtatcagtggttcgaagatggttctccatatgacccacaatgtattcagttttcgatgctttgctgccaatgggcgtggcttcagtgcggattctaccaataagagaaaaattaaaagcaagaagaggcgaaaggatgttgcactggaatcaagtgaggtaatatctggaaatccaaggaacagggaccaatgggtgccagaattaagaactgaaagtgaaaacaaatctggtaaaaaagtcatggataagaaatttttggaaaaagtggaagcggttcgaaggtctgctcttgagaaaaagaaagctgaagagaacaaagattatcaagctattgattatgatgctccaattgagtcagataaaagtactattggctttggtactagggttggaattggtgttgcagttgttatatttggactagtcttcgcttttggggatttcctgccttatggaagtgttagccctagcaaagaaagtgcagtagttaaacaaaagctttctcaagaggaagaagaaaaatttaagaatgcactgcaaggctttcaagcaacgctgagtaagtcgcctaatgatcctactgctcttgagctcttttgcgctttcgagaaaaaaaacaacattgatgcttttgaaggggcaaggctgaggggaatgccaagagcaatgtgaagaaaagcatcaggggtgcagcagtatcgttgtccgaactaggtgagtatgagaaggcatcaacattccttgagaagctaattaaggtaatccctgataaagcagaagcataccgtttgcttggtgaagtaaagtttgaactcaaggattatgaagggagttcatcatcatacagaagtgctttatcttcatcagataatattgattttgaagttctccgtggactgacaaattcattacttgctgctaagaagccagatgaggcagttgatataattctgttatgccgtcgaaagttgaatgaaaagagtcaaacaggactagcagatttggaggctacaaatgacaatggtcgccaaaagcctcaagatattgacccgatccaagttgacctgcttttagggaaggcttattccgattggggtcatatcagtgatgctatttctgtctacgataagctaataactgatcatcctgaagacttccgtggttatttagcaaagggaatcatattaaaggaaaatggtaaagcaggtgatgcagaaagaatgtttattcaggcaaaattcttcgccccggaggcagcgaaggcactagttgatcgctatgcgcaaagatagtcgataagagattgaatggtgttgttttaaaccaatgagatcattcggattccagaaaaacgatcaacatgtttggaacgtcttgtatgatagcaacattatgggatctgggacattttgaattgtattgttttagaacaggcctgacgcagtatcgaaaaaagccttcccactgagacaagagattctgggttcgacagtctctgaaaaaatgcagggcaagccctgcccttggttattccttctttctgaaaaaaatgcagggtaagccttgcccttggttattccttctctctgaaaaaatgctgggtaagccttgccctgggttattccttgctcagacctcgctcacgcggaagccgccagcagcccttttattgctttagaacagcagaaatgaaacatgtatgctttgcctgggaacaatgctcagttaaacattttgatatacgtgtttagtccattatataaaaaattatttcgatgtgttggaacaaattgtgttgtcacggcacgagcctcagtgttctccatatccataatcacgtgaaatatgatcgtggttgaggtaatatatgtcatcttgccatgaatagttagggtcatatccct

SEQ ID NO: 43203 - DNA, 1800 bp, Zea Mays
ggagagctcctccaactcctcctccgacgaggacgccgccaacatcgccgtcaccaagggactcctcttccccaacgtcggccacaagtgcctcatggcaaaggacggcaaaaggaagaaggtaaaatcaaaatcctccactaaatatgaaacctctagtgatgagaataatgctagtgataaggaggataatttgcgtattctttttgccaaccttaacatgcaacaaaaagaaaaattgaatgaattaattagtgccattcatgagaaggatgaactcttggactcccaagaggacttcctaattaaggaaaataagaagcatgttaaggttaagaatgcttatgctctagaagtagaaaaatgtgaaaaactatctagtgagctaagcacttgccatgacattatttccaaccttagaaatgacaatgctagtttaattgctaaggttgattcaaatgtttgtgatatttcaattcccaatcttagagacgataatgttaatctacttgctaagattgaagaattgaatgtttctcttgctagccttagaaatgacaatgaaaaattaattactaaggctaaagaattagatgtttgcaatgttacaatttccaatcttagaagtgaaaatgatattttgcatgctaagattgttgaactaaaatcttgcaaaccctctacataccgttgaacatgtttccatttgtactagatgtagagacattaatattgatgctattcatgatcacctagctttaattaagaaataaaatgatcacatagctcaacttaatgcaaaaattaatgagcatgacttggaaaatgaaaaatttaaatttgctagaagcatgttctatagtgggagacgctatggcatcaaggatggcattggcttccaaaagggggacaatgtcaaacttagtgcccctcctaaaagattgtctaactttgtaaagggcaaggctcccatgcctcaggataacgagggttacattttgtaacctgccggttataccgagagcaaaattaggagaattcactctaggaagtctcactctggccctaatcatgcttttatgtataagggtgagacttccagctctaggcaatcaacccgtgctaaattgcctaagaagaaaactcctattgcatcaaatgattctaaaatttcatttaaaacgtttgatgcatcttatgttttaactaacaaatccggcaaggtagttgccaaatatgttgggggcaagcacaaggggtcaaagacttgtgtttgggtacccaatgttcttgtatctaatgtcaaaggacccaaaaccatttgggtacctaaaatcaagaactaaacttgttttgtaggtctatgcatccgggggctcaagttggatcatcgatagcgggtgcacaaaccatatgacaggggagaaaagatgttctcctcctatgagaaaaaccaagatccccaatgagctatcacagtcggagatggaaatcaaggtttggtcaaaggattgggtaaaatagctatatcacctgaccattccatttcaaatgttttcctcgtagattctttagattacaacttgctttcagtttcgcaattatgcaaaatgggttacaactgtctttttacggatgtaggtgtcactatctttagaagaagtgacgattcaatagcatttaagggagtgttagagggtcagctatacttagtagattttgatagagctgaactcgacacttgcttaattgctaagacaaacatgggctggctctggcatcgccgactagcacatgttg

SEQ ID NO: 43204 - DNA, 1272 bp, Zea Mays
atgaagggcgggcctggtgcagcggtagagcctaccgtctgtaaccggaaggtcccgggttcgagccccagcctctgcatattatgcgggttgatcgatggaggtttctgcggcataacagttggctccggtggcgatacattgatttgtccaagggtggatggaagtgtcacttgcatgatggttaattgagtctatgctccaaggaagctctacaacaattgtggaattgtttaagatacctgtaaatcctgggatttgtgttaagttgatatgggttgactgttttgcattggtggataagaaacaactgatcagcatttacaaacaaaagacctgttcatggcggcgtaatttcgagacaactgtttcatgactacatcatggtgtggattgaagacactcaattgcagttacttgataactgcaaagctgagaagctgttgctgatgttgagagagaaattatgaaggcactggagaagcaatgcatggatattctgatgcctctaagagatggcataccagaaaaaattgagaagcaggtccaaagattaacaagaagacaatctatagctccctatgttgtgccaaaccagttaggagcattcatgaacacagtaaaaaggatgctagatgtgttagactgccaagtcgaagacattctcaagtcatgggcaacgtaccttactatatcaagtgggaacactgtttttggagagcaaatgaactccatcactgtcatgctgaagaagtacaagaaatatctgcaagcgatagtggacaagtttgtcagcaatacacaagctatccggaatatgagcctcaagcgaattcttgaagaaacaagaggctgatggtgaaagtgatatatgagatagggtgcccagctctcggattccgttcacaatctaaatgagatcttctctagtagaatatttgttgctatttgccaaggtttatgggagactgggatcggttaggccaggtaataaacgtggcaacaagaaaagtactatgaatatttccttttgttgtgaatccttattatgccaaactcacttttgagcggattgtgttgagatttcttgagagcagaaaggagaacatgatttggtaccaaggatctcactttgctatagggtaagactcaacttatatttccctcattattaagattcttaatggtatcccctcattatttttagattcttgagagcaaaaaagaatcaaaggaaaacaaaggctaacagtcattttaagattcagattt

SEQ ID NO: 43205 - DNA, 2195 bp, Zea Mays
gtaggacgcgttaaggatgaggaggcggaccgagtcgacgaaagtggctccggtgctggtgccatcgaggcggtagacaccggtggcctcaaacgaccgcagctcgtcgctgacttccatctgcggtggcagcggcaagggtttggcagaatctgaacttggaactactgggtctccttccttcgagccggtgcagagggccgagcgtcgccgtcaccgccgacgcccgagtttgcgggccgcctccagtcctccctccatctcaggtaagcggccgccgagcagccccgggccaggaggcgggagcgagcacgcgggcgtggggaggtcagtcagggaggcacgcgccgtcagtcgggttcaagtatcattggccccctaccagtcagatactctgcgagcgaaacgtgagttggcacagcagacaacacccgcgtgcagcgctgcaatccaaagaagcgaagcaaccaacccccgaaatcttcaacggcgccatcgccactgcgtcatgcccgtcccgcccctcctctcgccacttcgcctgccctcgccagcgccgcccctccaccgcaatggagcgccatggcggcgcccgacgcaactacgtgccgcactacgggtcccccctccgcttcacctggggctcgccgcggcccgtggcgatggcgtgaggcggttcgtcgggacgctgggctcgaagagagcgcgagctgttggtgcaattagggtttctgcgatctctggagacggcggtggcggtgctggtggtacgggaattgcggcggcagcggccgccactgtggtctttgctgtgatgaaccgggtgctctacaagctggcgctcgtgccaatgaagaattaccccttcttcctcgcccagttcgccacatttgggtatgtcctagtgtatttctcaattctcttcataagatttcgcgctgggattgtcactagagaaatgttagcgcttccgaagccacagttcatgctaattggtttactggaagcgctaggtgctgcttcaggcatggctgctgctgctatgttgcccgggccatctattccagtgttgtcacaggaaatatagagcaaatcagatccttggctgcttgcttgttacagctggagtaattctagcagtggccggtggagccagtaatggtccgattctctttgaagtcaaattcttttggccagcagtaatgatgatttcagctgcatttcaagctgctgcttccattatcaaggagtttgttttcattgatggtgcaaaacgccttgagggaaagaagcctgatatatttgtagtcaactcttttggttctggtttccaggcactttttattttcctactccttccatttctctctaacttgaaagggattccttttgctgaactccctgcatacctaacccgtggtgctgcatgctttctgaatgtgggagggaatctgaaggattgccatggagctcctttgctaccacttctctacataactctgaacatggccttcaacatttctgtccttaatcttgtgaagatgtctacagcagtggttgcttcgctgacatcaactttagcagtacctctttccatctatatactgtcactgcctctaccatatctacccgaaggaacaaatttgagcgcatcttttttgattggtgttgctaccttagtgctcggattgcttctatacaatcttcctcaagaatcaaccaatcaagtaaaggaagattaatctaaacccatatcagatataaggttaacaggaagctattggtgctccactaagaaaatagccgcattttgttgacagtggcttcacagtttggtacataactcatgaagagcagtgttcttctgccacaaacatttgcggtgcaaacatttgaggcaccagctgacttcaaagtttagaaacagcaagttcttgtttcatctgttaacaaaatcctaatggattatgcagctatatataagctctacctgagcggatgtaactactaactactttcagatgagtaagggctttacaaattcattggttgtataattgttctcaccattttttggtcaattcaagactaacataccagactccgtgggatttattatgtaaataagtaatgattgtaaccattataaatcttgattgtatggccaaccatttcaagtgaatgctagatacacg

SEQ ID NO: 43206 - DNA, 1463 bp, Zea Mays
aaaacaaatttagctgttttttctttcgacgttttcgtccctacctcgcggttggggctcgcggctctcgcggcccgcctgtgctactgctgcacccgcacggccgcgcgcacctccaccgcaacggtcacttctagctctcgtgcagtcgtgcgtcctccatcgtcgcctctcctcccgcggtcagggtaacgccgcgtgtctcccgtcgcatactcgctcacacccatggccgcaccgccggccgcctcgctagtggcacgcgccgccctcccgccgcgccttcgcccaaccaccgcttctccccttggccccgccgtcctcggtcccagcagccgccgccggtacctccgtctccgccgctcgccatcgctggcggggactgccgcggcggcggcgagctccccatccgtgccttcctcgtttccggggcccgggccaggtatcggcgatgccctcggcgacgtcgaaatctactccgcggccaccggcgagcccgtcctgttcagagacctgtgggaccaggacgagggagtgtctgttgttgcgctgctaaggcatttcgggtgcccatgctgctgggagttggcctctgttctgagggacacaaaggagagatttgattctgctggagtaaaactgattgctgttggtgttggcactccagctaaagcccgtattcttgccgagcgcttgccctttccgttggaatacctctatgctgatcctgatcggaaggcgtataatctcttgggtctatattttggtgttggtcgcacgttcttcaatccggccagtgcgaaagtgttttcacggtttgactcccttaaggaggcggtgaagaattatacaatcgaagccaccccagatgacagggcaggtgtcctacaacaggtaaagaactgttgtacgcaaggaaagacgagggcacaggcgaccatgcacctttggacgatgtgctcaatatctgctgcaaagttcctgtaacctaacccgacggcttgtcccacagctcagtagtaggtacttggaaagcactttcggcgtccttgattcctgaacttccaggatcgcctgctgcaagagtgtcttctccaccaatgtgccgatattttcttttgagatgcttggtttactttgatatctttttggtgatggatcgtgagttgttggcttgttgcattatgaattgcgtactgtaagtatccagtttgctgtttagcacttatacaattcgaaagcaaagttcgaagtcctggctgcctggctcttccttggagatggaagtttttgcacttccagaaatatcgggaacataaagtccatgtgatcttttgtgcctttaaaattttggatcgtttcctaatggaaatctgttccagttttattgacatcagaaatcctatctcctgtagtcctgttattcagcgtctgagtggagctataaaattgatcttatcatt

SEQ ID NO: 43207 - DNA, 2315 bp, Zea Mays
atggccggcggcggcggcggctctctgtctagcccctccgcctccttcctttccagtcccaccccaacaccgccccctcgtctcctccgcaggtgtagcacgaagtctgcctcacgagatagccccatcctcagaccaaaaaagccgcctccactcttctgcgcggcggcagccactcccacccccgctcccgcggccgcgtccaagtcggctgggtcatggagggacctgtgcagtctcaacgcctgggtggtgcgagactaccgccgccttgtcgactccgtcggcgcgctcgagccggcgcttcggaggctctctgaggaacagttgaaggcgaagacggccgagttccgcagccgcctaacgcgcggggagacgctcgccgacgtccaggccgatgcgtttgctgtggtacgtgaggcggctaggaggacgcttgggatgcggcatttcgacgtccagataattggcggtgctgtgctccatgacggctgcattgcagagatgaagacaggcgaggggaagacgcttgtttccacacttgcggcttatctaaatgcccttacagggaaaggggttcatgcgtgatgctgaatggatgggtcgtgttcatcgctttctcggtcttactgttggtctgattcaggcgggtatgaagtcagatgagagaagagctagctacagatgtgacattacatacactaacaactcggaacttggatttgactatcttcgtgacaacctatctcgaaacaaagaacaactagttatgagatggccaaggccattccattttgctattgtggacgaagtggactcagtacttatagatgagggaaggaatccattattaataagtggagaggataatagagatgcagttcggtatccaattgctgctaaagtcgcagaacttcttatggagggtgttcattacaccgttgaactaaagggcaataatatagatctgacagaggacggtgtagcacatgctgagattattcttgggacagatgatctatgggatgagaatgatccatgggcaaggtttgtgatgaatgctttgaaggcaaaagtgttctaccgaagggatgtccagtatattgtcagggatgggaaagctattataattaatgagttaaccggccgagttgaacccaagagaagatggtctgatggtatccaccaagcagtagaagcaaaagaaggcctaaaaatccaggcagactcggtaattgtggctcaaatcacatatcagtcattgtttaagctttatcctaaactttctgggatgacaggaactgctaagacagaggaaaaggagttttcaaagatgttcaagatgcctgttattgaagtacctacgaatctgccaaatatacgggtggacttgcctatccaagcttttgcgactgcaagaggcaaatggcaatatgtacgggctgaagtagagtctatgttccaattaggtcgccctgttttagttggaactacaagtgtcgagagttctgaatacttgtcagagctacttaaagttcacaagattccacacaatgtccttaatgcaaggccaaagtatgctgcaagagaagccgaaataattgcccaagctggaagaaaacatgctattacaatatctactaatatggctggcagaggaactgacattattttaggtggtaatccaaaaatgcttgcaaaagaaatagtagaagataacatacttccatttttgacccatgaacctcctaatattgacatggaaggggaatccacatcccacaagggtctctcaaatgtagaacttagtccatcatcagtaggtctgcttgccaaagctgcaatcatgtcaaaatatattcacaaaagcgagagaaatgaatggtctttgagtaaggcaaaatccactattgctgaatctatagaaatgggtcaaatgattgggatggagaaactgcaagagcgcatgactgaagagtctgagatgtaccctctttgtgatgcaataggacttgcttatctcagtgtcttaagggattgcgaagttcattgttcttttgaaggtgctgcagtgaagagattaggtgggcttcatgtagtaggaacctctttgcatgagtcacgccgaattgataaccaactgcgcggcagagcaggcagacagggtgatcctgggtcgacacggtttatggtgagcttacaagatgaaatattccagaaatttaatctggacactgaatgggccgtgaggctaatatcaaggataacgaatgatgaagacatagctatcgagagcaatgttgttgtgaaacagg

SEQ ID NO: 43208 - DNA, 338 bp, Zea Mays
gacaggatcaagtaccacaatctcactcgagggtgagtcacagagcaaatacaataaagcataaaaccatacattatagagtattaaatttattacatcatcatcggagtttttgcaaaagtagtcatcattgtttgaagtgcagtggaatgaaactaacgataattaaacagagagatggggaagcctgtcccatcactcctcatgctcctcctcagccgaggcgagatcccactcgactgtccaacccggtggcaagatggacggccaagtcactccagcaaccatgtcctccagagaacctgtaaaattatgccataagcaaggctgagtatact

SEQ ID NO: 43209 - DNA, 607 bp, Zea Mays
tctcacacatgcacaatctctttggcatcttgtgccttttctattactgcattagactctttggacttgtagatacttcttttcattgtgtatagcttttgtctgatggacaccatcactatgcttaggatttggtacgaatgaaagttgaatggtcaattggtcatattgtttgttatcttatataaactcattggttcatgtatggcaatgcaaatgtatggaagacatttacggatctttttgattattttcctctgacagctctggtgtgtactcttaagactggaaccaccttttttcagttgtatctggagcatctattctatgcatcatcttcccaatatgcagaatcttaaaacactaaaatgatgtagtagatagaaccacaaatggcttagtagctagaatctcatcgttcttttttagcaccagtttcagattcttcagtcggcagtatatttatgaattatgagttatgaccaacttcttttaacccgttagagcatgttggattggaaattgagaaccatagcatagagtatgtattcagatgttccaattatttggaacaccctgttgaacatcaattgtcttcatttgtttg

SEQ ID NO: 43210 - DNA, 408 bp, Zea Mays
aataacttggaggttctgccacactttcagatgacgaagcttataacaagagaatagaggcaagagctcagccatatgtaataatagaaggggagctgtacaagcatggtgtctgctctcccttactcaaatgtttatccagagccgaaggtgtagagttgatgaaggaaatacatgcaggcttgtgtggatctcacattggatctaggcctttgctgggaaaagtctttcgccaaggattttattggccaaaagcagcttcggatgcagcggaactagtccaaaagtgtgaaggttgttagaaatgtgcaagagataaaaaacaaccttcgtctctaactcagttaatacaacccacttggccgttacaaaggtggggccttgatttgttaggtccgctaccaccag

SEQ ID NO: 43211 - DNA, 732 bp, Zea Mays
tatcgctagaagcttaacccagacaagtgcatgttctgggtaccagccgggaagctactcgagttcatcgtcagtcactagggaatcaaggccaacccaaagaaaatcaaagccatcctaaggatggaaccgccatgatcacaaaagaaggtccagaagcttactggctgcatggcaacactgagtcgcttcatctcacgactcggttagagaggcttgccattctacaaacttctcaagaatgtggatagattccagtggaccctctaaactcaagaagcattggaggcacccaagaaaatcttgaacactccgccaatcctaaaaccacccaaacgagccatcgccgaccgaccagctaaagatatgttgttgtacatcttatgcacgactcacatggtaagcatcgcattagtagtcgagcagacagaaaaagggcatgcacattcagtctagcaccccgtgtacttcatcaacaaagtccttgggccctccaagatcagataccctcaagtccaaactactatatgcagtattcctcaccacgcgaaagttgcaccactactttgacgaccataaagttgtagtggttacaggcttcccgataggagacatgctttgcaattgagaagcaatgggaagaatagccaagtgggcatgtgaactcggaggtcatgacatagaattatgacctcacaaggcaatcatgacctaggctctattagatttcat

SEQ ID NO: 43212 - DNA, 674 bp, Zea Mays
tgttgatcttgatgatgtagatgaagaagacgctccaacagccacaatacgccaccatgggcaattggagaagtgcggccacaggaacaaaaggagcaagatcaaccctcttcctcaacaatggtgcatcccccaactcaagatgatgaacaagttcatcaagaggaggcgtgtgatcaagggggagcacaagatgatcatgtgatggaggaagaagcacaaccggcacctccaacccaagttcgagcgacgattcataggaatcatcccatcgaccaaattttgggtgacattagcaagggagtaaccactcgttctagattagttaatttttgtgagcattactcctttgtctcttctattgagccttttagggtagaagaggccttgctagatccggactgggtattggccatgcaagaagagctcaacaatttcaagagaaatgaagtttggacattggtgcctcatcccaagcaatatgttgtgggaaccaagtgggtgttacgcaacaaacaagacaagcacggggtggtgacaaggaacaaggctcgacttgtggcaaaaggttatgcccaagtcgcaggtttggactttgaggagacttttgctcctgtggctaggctagagtccatttgtattttgctagcatatgccgctcaccattcttttag

SEQ ID NO: 43213 - DNA, 2870 bp, Zea Mays
tttttctcttggtttgaattttctgtactattccatggcaattgttgaacatatacaacagcacacctttagcgctcaatttacatgtcaagcaggcaccaagaggctagtcataataagcttacaaggcagatacaaagctgcatacacaagtactaagcagcaatattttattaacattccagagatataaccttacttcagaatggtcctccttcgcacggcaatgagccaaccttcatgccttttttctgagcgattgccttcaattcctccgacatcgcgctctcctcgatgatcacatgattcaacctagcggcgcgctgggcaaagagctcaacgttacctacagcaatgcccggacagcgggagatgtcaaggatctccagtgactgcccacagtgcctaagcagcgagaggagcgagcctcccgtcaggccccggcaccccctgagcctgatgtcgatgagattccggcaggatgaaagcatggcgccgatcaccttgtcgttcagtgtctcattgtaagacaggttaagtcgacggagccgcggcatgctctgactgaggaatgtcagcaacccgggctcccgctccaccacgtcgcaactcaccaaggcgagctcttctatgccggctccggcggctgtgcgtgccagggaccggaggccgtcccctgtgataaggacgcagctctggaggcgaagtgaagctaggccatgtgtagcattgtgaactgagtcagctccaatggcgaggagatgatcgttgtgcaggtcaagcgggaggcgaaggtccaaggtgtgcagaccagcagcacgctgctggatgaaccggtgaagggcctcgctgccgccgccgtcatagaccaggagggacgttagcgtgcggcaatggtcggctgcaaggaggagtacacggtcggcgacagcacggcaagcacgaagctcaagcgcgagcaagccagcaaggcaacccgcgaaggccagcgacgcgggcccgtccccggtaccgtcgcaggcgcgcagctgcaaccacttgaggctcccgcaccgccgccacagccacccaagcccgcggtcgccggagcggatgccgcaaagtgacagcttctccagcggcaatgtccctgcgacgtcctcggcctcgccgtcggcgtcatccgagctcgagcccgcggagtcaacggtggcggcggagttgacaagggcgaacgacttgaggcgcggcaacagcttgagccagcggaaagatagggggcggacagcggtgaggtggagcgacgtcagaccggcgagtgcagggcagaccgtgagcagcgcggcgggggagaccgcccaatcgggcaagagccgcagcgtggagagccgggaagcggccggcgcggccgcgacagcgagcagcacggcgtcggcgtcgtggaccggcgtaccagcggagaccacggtcagggcggcgaggaaggggtagtgagacagcagggcggcgagggtcgccgccgaggaggcaggcaggcggaggctgagggacgacgtcgcggccctgaggagtgcgagccagcggcgggagacgagggacacggccggtgcagcggagggcggtagaaggccgaacaccacctgcagcaggtcgtcgcagagcgcggtgtccatgctgccgccgtagcagccagcgcgacgagcgccgccgccgccagcggcggcggcggcgtgacgggagcttgtcggcgccgtcggtgcgttgtgggaccagtcaagccatcggattggggcacccggccggacgcgcgggtgggggagaggtggggaagcggtgggatggggaatggaattgctgcggattggggaaggtggggggtagttcttgtgcttttgtcgagccgtgctgaagtttcacgtttccagagtcttcagtccgggccccaccggcctcccgttgcaccaattgcaaacgcaacggggataacgctccacagctacaaccgcggcgggaccttcctctggcctggaactggaagcaagcacatcaacaacaaaaaatggcagcgccacctctcggcctcgcttgcagggtcgccggcgccttcaccaccccggccgtggcgcattccggcttcctcccccgacaccttgcccgtggtctcctcccttcaaagagatggagcggggtggtgaggatgggggcggtggtcggaggaggaaaggagggggaagaggacgaggagctgagacagaccaaggagcaggctgccgccaggaggcggtgggaggccctgattagggagcagaaaattaaaacccttacaccgagggaagctggctatacgttcaaactgacggacaaggttcttttggatgttaggccctcaaacgagcgtcaaaaggcttgggtgaaaggctctacctggattcctatatttgatgtggatgcatcggttgatctgggcggacttagcaaaaaagtcagcaactttgtaatgggtggctggtggagtggcagctcaacattgtccttgaataagaactttgtacagcaggttgaggagaagttttcaaaagatacagatataatgctagtgtgccagaaaggacttagatcacttgccgcctgtgaacagctgtacaatgctggttttgaaaatttgttctgggtacaaggaggccttgaagctgccgaagaggaggattttgaaagggaaggttcccagcctttcaagcttgctgcaattggagggatttctgaattctttgggaaagcaacgtaacaagtatcagatacatcaagatggggttgccagcgacaaaagagcacaaaccactagaccctccgggactgacacagacttaagctagcaatagcaacaaaagaac

SEQ ID NO: 43214 - DNA, 896 bp, Zea Mays
tatgaaagacatcaacttcgtataaaccacaaaaaatccattcgatggccagagttcgttcgactgcaagggtgactcgtgaaggagaggagaccgaggccaccgagacgactccgatttctgaaatcatgagacaatcgggtttagttgtgacagagggaatcattgacgaagatatacttgctgccgaagctaaacaggctgatattaaggaagaaaatgctgatgaagaagaggaggataatagcattttgatcccgtcaaaacccagccacctagattttgagaagtctactgtgtctgaagccgatgtgcccatgatgatgaaactaggctactttggagaagctgagaggaagcttgttcgttttgccagagaagaaaccactccaacaccgaaggatgatgaagtagtagttttcaaaagtttcttcagagcaggattacaatttgctctgaacgagatgatagaaattttgaaaatttttgaaatttaccgtcatcagctgacccctaacgctatcgttaggctcagtatcttcatatgggccctccgaagccaaggggtgaacacagatgccagatgctgaagcattctgccgagtgcatgagctgcactatcaaacgaaggccagagcagatggtttacatgagaattttggctgttataatttcgtgtatcgcaaagatacgaaggctccggtcctcagctattgcaccaagtggccaactggttggaagagtgaatggttttatattaaagcctatgaaaagagaaggggaaactgatgacgatggtcatgtgcctgttggctttaagcttcggaaagaccagacctttgtgcaacatgcagccagggtcagcatgccaactgttgggggtatgcttcgtcgcc

SEQ ID NO: 43215 - DNA, 2265 bp, Zea Mays
ctcacaaaccgatctacgacgactgttcttaacagatctaacttaagaaaaacccgcccctaatgtggtggcggctactgattatataagggttaggagcgtgacccctccctggacgcaccctaatgggcccaacaaagatacacggcccaaaggccaattacggtgtcgcagcaccgagacagattacggacgtcagtttggtcctccaccttgatccgaacgtccttgctggccttccacgcctccaagtccttcaccatgtccttgctggtcctttccttcattcctaagtacaattaattcattaggtagcacactattctcaaatgcacaagaataagtacataggaacgagctcacctgcaaattcaatagtcttgcgcgtgtgcgagtaatcggaccttgaacatcaactaggggagtgttgtttgtatccatggtagtgatgtcctcatcacccaccattcaagctgataagtcctatgagatcggaactgaccaaccttttacagaagaaggaagcgccttcggctacggaggagaaggttggagggcagaagaaacagcggattgtgaattaatgcaagcgattgagcaagcaaacgtcgccttcagcttcggtggtgaaagcagcgattcctgccgacgctgaagatgctagcaaagtcgaagctaaagaattcgcaaccataatgtcagaaattgacaaacttatatcagatgtggttgcggagaaaagcatggccgtagtgcctgataaaggaaagaaaattgaagatgttcttttggaaaagaaagattttgaccttcggcacttgggtggccaggaactttctaaggaagataagtcagagttaaaagaatttgctatgtcttgtggttaccaaccatactcttcggtggggtcgatgaagaaatcttgggatgcattcgcgaccgcgccggggcgaagattgtaggcaccttatccaagagtgttggattcccaaatttggagactgacattagctgctacaggcggcaacatattgtcggtagtttgttttattccaatttcaaggtgaggtttttctctaaactttttaatattaccttcgtaatggtttgagtattctaattttaacttgttttgcatagtatgttattaagcaaagccttgaaaatgcagcaggataccaaagatagaaaaaacaaagatattattgaaggcttagaagataaaattaagaaacttgaagattctttaaaagaaaaagacagcctgctgcaatcaaccgaaggctctctcgtggaaacgcggtctcagaatgataagctgagcggagagctagacaaagctcgagcaaccttgaacgagagatcagagcgctttgaccacgaaacgaaggaacttaaagcaaaggtcaaagccgaagctgaaaagaatgcgaagctaagtgaaactgttaagaaccttcaggataaatgctctggctttgtcactcgatgtattactcgattgaaggggatatttaacacagttggagccacttctgaagaaatcaccccttctactgaagatatccccggggccttcgagcatatcgagaatgaagttgaggcccttgatgaagttataactgggcacagatatttctgtgttctggtggcttcatgcggcacaactgcagcattcatgaaggccgggtgcaatcacgcgagagctgtcaataagctaaacttcaatctttcatcattggatttggttgacgttccgaccgaggctcgaagtataggaaataggtttattacccaaatttgggcaaagggcgggtgtgaattggccagggatgaaacacgaaagctgcttcactcagtataaaactttgcctttgtccttttaccttgatttttccttattaaatttccgattaccttataccttgtttttgtgcagaatgatggcactgaagatcgctaagccgaagcttgttctgaaatactgaaaaccctagaatctccttttgtatttatctgtagaaggacttagaaactctttgtatcatatgacaaaaaattgtaattgacagctagacaaattattgtaaatatttgttaataccttgtaatagcattttacctttcgctcatgtgtgggctgctttgttgtggacgaaaccaatgcttgtagtcttttgagccgaaggcgaaaaacaccttctcttctttttgttcacatcaaagcatttttcattgaagacgaagcatcttcgtatgcaacga

SEQ ID NO: 43216 - DNA, 6611 bp, Zea Mays
ctgggcccaccgccgccggtgaagccctcacagctgcgggcaccgcctcggcccttgcggctgtggcggatgcaattcccgcgggtgttgccggtccggaggaccctccctcgccaattcccccgtcgatggtcgtcgatcagccgcctcctccaccggtcgcccacccaggatacaccggcgccgccctcactgctgcccgtgcggagcacgctgcgcgacaggccagtttgcgggaagcggccctcgtgtgggagcgcgaggccgccgacgctatcgctgctcagattgccgcggcggaatagctcctcgcctcgcctgcgacccacgatggcggggccacctcctctgacaccgtgggcggcgtgtacggtgtcccgaccgtcggaaccaggccccgcaccatccccacggtgctctagcatgacacggttgacccgctcgtggctcggctccaccttcaggctggaagtgtctagaactttcgcctgatggttcttgtcgtcctggagcccgagtcgccgtcatacgcacgctggcgggacttactcctcatccatcgccgctacgctctggatgaacacgtcctctttgaccccaccggcgtggcgccgactgccgcgtgggtgcgccttgacagcatcgtgctcacctggatcgtggggacgatctccgttgacctccacagcctcctccgcaaccttcctcacgctcgggctgtttggcttgccatcgagggccagttcatgggcaacgccgaggcccgggctcttcgcctcgacgctgcttttcgcaccttcatccagggggacctcagtgtcagtgcgtactaccgcaagatgaagaccatggcggactcacttggtgatctgggctgccccgtggaggaccgcatcctagtcctcaacgtcctccgcggcctcggcaatcgctacacccacctccggtcgttgatcatgcgccagcgcccctttcctaccttcctccaggtccgcgacgacctcgccctcgaggagatcactctgggtgctcaggctgtctcgatctccggcatggggtcctcgtcctcttcgacagcactggcggctttcaccccgacccgtccacctactccgtctcagtctgcccttggccctcgccctctcgggccaagcatgggcggcgggggcggtggtggtcgtcgccgccgtgatggccgtggtggtggtgcccgtggcaacgcaccgacgccgggaccccagcagggtgcgccttggcccactttccaccacccgtggtcagggcacatctccatgtggccgttccaggggccaggctctgaggctcgtctcccggcggccatgttcgctggtgcgcagccagggttcgccttcgcctcttcgtcgccctggacctcgacacctgccgcttcgtcgtggcccacgctgccggctactccaccgtccgggctggttggttgggacgcggccgccctggctgccttccagactcccactctgactccgccgatgggtcccgagtggatcgcggacaccggtgctacctaccacaccaccccgaccctggtatactcacctctgttcgccctccttcctctctcccttcgtccatcatggtggcgaatgacttgtgtcttcctgttacatctgtgggtgccgccggccctcccggctcttttcgcattcccgatgttcttgtcgctccttctttggtccacaatcttctttctattcgtcggtttactgctgataattcttgttctgtcgagtttgactcttctggtcttactgtgaaggactcggcaactcggcgccccctactcagatgtgacagcaccgaccccctctacacccttcggcttccacacgccacatcttcgtcttcgtcacctgacacagctgctgtttttgctgccgtcacgttttctaccacctgacatcgtcgccttggtcaccccggacgcgatgccttgatgcaacttactcgtagtgccactatcccatgtactagatcacatgatgagcatctttgtcatgcgtgccagttaggccgccatgttcgtcttcctttttcttcttcctcgcatgctactcatgcatttgatcttgtacacttcgatttgtggacttcacctattaccagtatgtcaggctacaaatactatcttatggtgcttgatgatttttctcattatgtgtggacttttcctttgcgtgtcaagtttgagactttctcgccctccgccacttcttcgcttgggtgtccactcagtttggcctcaccattaaggccgttcagtgtgacaatggtcaggagtttgataactccacctcccgcgacttctttctctcccacgggatgcagttgcggatgtcttgcccgtatacctcctcccagaacggcaaggatgagcgcatgatccgcacgaccaacgacaccatccgcactcttcttctcgaggcgcacctaccggcacgtttctggactgaggccctccacacctctacctacctcctcaaccgtctcccttccactgcgtgcccggcccccactcctcaccaggcactcttcggtatccctcctcgctatgaccacctccgtgtcttcgggtgtgcttgctacccgaacaccgctgccactgctcctcacaaactagcaccctgttccaccctctgtgtgtttctcaggtactccccggaccacaaaggctaccgctgctttgacctctgctctcgccgggtcctcatctctcgccatgtgttgtttgatgagtccgtatttccctactccaccaccacaccaccctcctccgacccttaccttgacgtcttcactctctttccgactgacgcggtggtcgagccacctatccttcctctctctgcaggtactcgatcaccgcctgtcggtcctactctcggcccggtgccttgctcgggtccggcagtgtcgcctacggtggtgttgcctctccgtggagccccgtctccgaccgcccccaggccgagcgagggtggtgggactgcaccgcctacggggccgtcggtaccgacccctccggcccgcttcgcccagccggtgcaggtctaccagcgccggctgtcgccgtcggggtttgcatcaccaccgccgccgtcgccacctctgccgctgtccccatcagtgccctctcctccggcgacactgccggtggcccaatccccgccagggacacctacacctctgccgtggcccgtgtcgagacgccggtgtaccacccaccgctccttcaccacgacccacgacacgtccacccgatggtgacgcggcacgcggctggtaccctgctgcctcgagtcctggcggccacgaccggagacttgcaggtttctccggtaccctcctctgttcgcaccgccctgctaaacccccactggcgtcgggcgatggaggaggagtacgcggcgctcgtcgccaaccagacgtgggatctggtgccccgtccgcccggcaccaacgtcgtcaccggcaagtggatctggacgcacaagcggcagaccgatggtaccctggagcggtacaaggctcgctgggttcttcggggcttcactcagcgccctggagtcgattacgatgagaccttcagcccggttgtgaatccggccaccgtccgcacggtgctattgctatggctagcccttgctcgctcctggccagttcactagctcgacgtcaagaacgtcttcctgcacggcgccctcaccgagaccgtctactgctgtcagccagcgaggttcgtggactcctctcgtcctgacatggtctaccgactcagcaggtccctctatggcctcaagcagccccccccgggcgtggcactccagattggctacgttcctggtgacactgggcttcgtggaggccaagtcagacacgtctctgttcgtccaccatcatgaagcagagattgcctacttgctcctctacgtggatgacattgtcctcaccgcctccagtcagtcactccttcgccgcctcgtcgacgcgcttcagcgggagtttccggtcaaggatctgtgtgtgcttcaccatttcctgggggtcactgctgagcctcgcccctcaggactccttcaccagcggcagtacactcttgacattctggagcgggccaagatgattaactgcaagccctgctctaccccagtcgacaagcaggcgaagctctctgaggccatgggtgacccagtcgaggaccccatcgggtataggagtcttgccggtgcccttcagtacctcaccttcactaggccagacatctcctacgctgtgcagcaggtctgtctccatatgcacgacccccgagagccccacctcgcggctctcaagcgcctcctctgctacctccggggcaccgtcgactacgagctgcttcttcacaggtctacctcctccgagctggtcgtctacaccgacgctgactgggccgggtgcccggacactcggcgctccacctccggctacgccgtcttcttaggcggtaacctggtgtcctggtcgtcgaagcgccagctggtcgtctcccgctcgagcgtcgcggcggagtaccgtgccgtggtcaacgacgtggcggaggctgcgtggctccggtagctcctcgccgagctccacagtcccctctccaagagcacgttggtctactgcgacaacgtcagcgccgtctacctctccaccaacccggtgcagcaccaacggaccaagcatgtggagatcgatctacacttcgtccgagatctggtcgctgttggtgatgttcgtgtcctccacgtcccgaccacctcccagtttgccgacatcttcaccaagggtattccgtcctcgaccttcgccgagtttcgctccagcctcaacatcagtagtggctagttgagtctgtggggggatcctagtccagtctgtaaactccgctgcgacggaagttcagactgcggggggtgttagagtatagggttaggcccatgtggcccatgtacaaacactatatagctaccctctggggttagccctaataatatacaattattacctgtaacagtttttggttgtaaatgcttcattcttaacaagaaagtcaagagccctaataatatacaattattacctctaggggtagcctgaattcctcatggatttgtttctttatgcttgtttctggcctccgtaaggagcgtcttttgtattatgttttttccctcttcttaatataattaaaggcgcagttcccctgcgctttcgagaaaaaaagagctcgaagtttgctcctagaatggacgagggtttcttgcttggttatgcatcaaatgcgcatggatatcgcattttcaacaataccaccggtcttgttgaaactgcgatagacatgacatttgatgaatctaatggctcgcaagggcatgtttctaatgatattgcaggaaatgatatcccacctaatgaagccatcaagaagcttgcaataggtgaagtgaagccacaagaaaaggacgatgatgaagggagaatttgatacaattttgacatcatggaatagttggctgatttcttcaccaaggcgcagaccagagctcaacatcgcttctctctctccaaactcgctgtcttgggccgtttacctggcactactgtgtacaggaatacattgcagtaccctgaggcttatacgtataatgggatagtagtggttcgaattgatgcaccgatctactttgccaacattagctacatcaaagacaggttgcgtgagtatgagctcaatcttccaagttcaaacaagggacttgatgttggaagggtgtattttgtgatcctcgagatgtcccctgttacatatattgattcgagtgctgttcaagctcttaaagacttgcaccaagaatacaaagcacgccatattcagattgccatagctaacccgaaccggcaagtgtaccttctgttgtcaagatcgggcatcattgacttggtaggagctgggtggtgctttgtgcgagtgcatgacgccgtgcaagtgtgcctacagcacgtgcagaattcatcttcaaatgcgttgaagctacccgtgcaggcatcaggcgtgttgaccgattctgtttcgactcctaaaccagagcagcagcatcaaaagcagcacggcctcttcaaggacctatggaaggcacaggacagtaacgcggatgctggtggtgaggtgcagccactgctccggcaaaaccttgtgtaatactcctacaaaatacggagtacttcctgggatggactcacgccctcgctggcctatacatatacgtgtttatttatttgtctatgttgttgttaacatggtatcgtggtgaacaaaagaaactgaacatgccattgttactgtggtgtggcgttttttgtacacttttgatacctaaatggaactcctatgatttgggtctggaaagggtgtgtgaagatgttttgttccaggttttggagttccgctcccagattggcttgacaagcatgttaattccatgaactctcttccacaaaaacagtacagctgattatcagttttatgtttagaatgagaaaatagccctggc

SEQ ID NO: 43217 - DNA, 3405 bp, Zea Mays
ccttcatcctagccgtccaccagcgcaccgttcttgccccgcaagcctccgcacgaggcctggaactttccacgggtccaaaaccttctctctctctcctctcctcttccctttctctctcctccgcctcccccgactcgcgagtcgcgatctccacctccctcgaccaccactcccgtaacccacttccgggtgggccccacgtcgccgccggcgaccagcacctcccctccttgactccctcgctacccgccgcccgcgtcccgccggccatgacgacctcgccgccgcccgccgagcagcagcatgaggaagaggaggtgctggtgccgtatggcccgcacctggagttgcccaatggagcgcagccaatggaagatagaggatccaccaatatcgagatttacttggaccattgagaacctatcaagagttagcacgaagaagctgtactccgaaatctttgttgtcggaggctacaagtggcgaatcttgattttcccaaggggaaataatgttgaattcttatctatgtatttggatgtggctgattctggggtattgccctatgggtggactagatatgcacaattcagcctctctgtggttaatcaaattcacaacaaattcacaataagaaaagaaacacaacatcagttctctgctcgagaaagtgattggggtttcacttcatttatgccgttgggtgaactctacaaccacagtagaggttatcttgtaaatgatacttgtatagtggaagctgaagttgctgtatgtaaagttgttgactattggagttatgactctaaaaaggaaactggctatgttggtcttaaaaatcaaggtgctacctgctatatgaattctcttcttcagacgctgtaccacatcccatatttcagaaaggctgtttatcacatgcccaccactgagaatgatatgccctcaggaagcatccctttagctctacagtcactcttctataagttgcagtataatgacagcagtgtctctacaaaggagctcacaaaatcattcgggtgggacatgcatgattcatttatgcaacatgatgttcaagaattgaacagagttctttctgagaagttggaagataagatgaagggaactgttgtagagggcacaatacaacaattgtttgaagggcaccacatgaactacattgagtgcatcaatgtagatttcaaatcaacaagaaaggaatccttctatgatctccagcttgatgtcaaaggttgtcaggatgtctacgcttcatttgacaagtacgtagaagtggagcaattggaaggtgacaacaagtatcatgccgataagcatggtctgcaggatgcaaagaaaggagttctttttatcgacttccctcctgttctgcagcttcagctaaaacgttttgaatatgatttcatgcgtgacacgatggtgaagataaatgatcgctatgaattcccacttcaattggaccttgatagagatgatggaaaatatttatctcctgatgctgacaggaatgtgcgtaacctttatacccttcacagcgttcttgtccatagcggtggtgttcatggtggacattattatgctttcatacgacctaccctttctgatcaatggttcaagtttgatgatgagcgtgtgacaaaagaagatgcaaagagggcactggaagaacaatatggtggtgaggaggagacaaatcctggcttgaacaacactcccttcaagtttactaaatattcaaatgcatacatgcttgtgtacattcgtgaaagcgacaaggacaaaattatttgtaatgtggatgagaaagatatagcagagcatcttcggattagattggaaaaggaccgtgaagagaaggaacgtcggaagaaggaaaaagctgaggcacacctctataccataatcaaggttgcaagggatgatgacttaaaaactcagatagggaaagacatatattttgatcttgttgaccatgataaagtcccaagcttccgtatccaaaagcagatggcctttgctcaattcaaggaggaggtagcaaaagagtttggtattcccacacagttccaacgattttggctgtgggccaagcgacaaaaccatacttaccgacctaacaggccattgtgtcctcaagacgaagcgcatactgttggacagctaaaggaattggtgaacaaggcccacaacgctgaattgaaattgttcttggaagttgaacttggactggaccttaaacctcttcctcttccagacaagactagagaagatatatttcttctcttcaaactctatgaacctgaaaaggaacagctacggtatgttggtaggctctttgtaaaggcttcaggaagaccacaggacattctgccgaagctaaagatgttggcaggtttttcacaagatgatgatattgaactttatgaggaaattaagttcgaacccaatgtgatgtgtgaatacattgataacaggcttctgttccgatcttgccagcttgaagatggggacataatctgttttcaaaaatcttcaaaggcagatagtgctgaccgatatcgatttcctgacgtaccatcctttttgacgtatatacgtaaccgacaggtggtccactttcgttcactggagaagcccaaggaggacgattttttcctcgagatgtcaaagattttcacatatgatcaagtcgtggaaaaagtagctgaaaaacttggcgtggatgacccatcgaaaattcggcttacatcacataattgttattcgcagcagcctaagcctcagccaataaagtacagaggcgttgaacgtctactggacatgctgattcattataaccagacttctgatattctgtactatgaagtattggacataccacttccagaattacaagcgctgaagacattaaaagttacataccatcatgccacaaaagatgaggtgtcagttcacagtataagattgccaaaaaacagcactgttggcgatgtgctaaacgatatcaaaacaaaggttgagttatctcatcccaatgctgaactgagattacttgaggtcttttatcacaagatatacaaggtgtttgcaccaaatgaaaagattgaaaacattaatgatcagtactggacactgcgtgcggaggaggttccagatgaggaaaaaaaccttggtccctttgatcgattgattcatgtatatcattttacaaaagatactcaaaaccaaacgcaagttcagaactttggagaacctttttttatggttattcgtgaggatgagaccctatcttctatcaaagagcgtatacagagaaagcttaaggttccagatgaggatttctcaaaggttcctgacttccaaatgttttgttcttaa

SEQ ID NO: 43218 - DNA, 467 bp, Zea Mays
ctgcgtacagcgcgtacgtgctcggcgaaactctctctcatgcaactcgcaggcctgctgtgcgcgcgcggtgggtgcccgcatgcaatgagcgctgcgcgcattgcgctgagtgccggccggaccaccgcgtgtggcgccgccgagcgtggagaccgggagctaccgagtcgtccgtcgtcgtcgaggggggccggggccgggcgagcgcgaggaacacgagagttggcgacgatccgggaacgacgcgcatacggccaagagacgggcttcaatgccctcgcacgcgcggcagctaacgattgaagcgagctaaatgcacatcgatgtcgactcgatcagcctcctgcgaattattccaggcagggacgagggatcgtcggaggctgcttcattcttccccggccggctgatgtggatgcatgcagcacatgtgtccggcggaagacgtcgatcgttccctccgc

SEQ ID NO: 43219 - DNA, 1178 bp, Zea Mays
gtggtactgcctcgggaacgcgtgggccacctcctccatctctagataggcacaaggcccaggtgctagctcgcactatttcgccatcgcgtagtacgcggcctggtcttgctatctcgtcctagttgggatggcacctaggcgtgatcccaatctattctcagccacagccttcgacctaggcccaagttctggaaacttctccccttatctgtgctccggggttccgtcacgtgggttagggttttcatcagatctcgttggggctcattccttccctcactgtgccgctttcctcttgcgtctccggtcgctccatgtgtcgattcgttccagtttcaatggcggctggcttgatggatccgaaaggcggaaaccctcagtgggatcgatggggctagagggagaatccaccaggagctcaaacatggaacagaaataggaatctcagttggagattgaagccatcgcctgggcctgatgtcttcatcctcgggtgaggagattcaaccagctaagtacataagtacgagaagagggcgaacatcgttgaatacctcaagccagggacgggacgacgtgcggaggacggcaagttgaggatggtgggtgactttggacagcggcggaggacgtcttggtcgcgatcgcgtcgtggacaatcgttggcgtttatgtggacgtcggcgaagcggatggtggcacgcagacggtggctccaaggcggatggcggcacgcagacgatggctcgcggtctcctcccctcctcccctcgccctcggtcaccacccctcctcgctggcggcgctgtagacgtcggcaaggtggacgccggcacagaggatggcggcgcgcacacggtggcatctgcagcgtgcagactttggctcgcgattgcctcccctcctcccatcacccacggggaatgttgctcggggttctgggtcgggggagcgttccccgtgtgatttgccggggtcgctgggagcattggcttagggaagcatgctccaaatagattgacaaatttccccgtagccctcggggcccgtttgtttgccttcattttgaggaattggaatttaactaatgcaataggctatttttttagaatgtgacatttcacaactttccaaaatgtatatataaatctatctcaaattcatgggggcgagag

SEQ ID NO: 43220 - DNA, 1555 bp, Zea Mays
cccttttgttccgtttcgtgcacttaagccgtccgcacgccgtcttccccatctcgcgcagcgctactgccggctgtccggagtcccgaccaccgtcctcggctccccgccgtgaatccatcatcccgtaatggagacctgcccctcggtgaagaacatcctcttgctggactcggagggaaagcgcgtcgccgtaaagtactacagcgatgactggcctactctatccgcgaagctggccttcgagaagtcggtatttaccaaaacccagaaagcgaatgctggaacggaagttgagattgtaatgtttgacggtcaaattgtggtatacaagttcatccaagacctgcacttttttgttactggaggagaagaagagaatgagcttattttagcatcagttcttcagggattctctgatgctgtcgaacgacttctcaaaaacatggttgacaaaaggacagcactcgagaatttggatatgatcctattgtgccttgatgaaattgttgatggaggagtaatatccgagcgtctattttgtaatggttttaatcactggattcaaaggtttagcaataggatcattctcaagcttagagatgaataacgtcccacattagtatgtaattatttgtggcattatacctaattttcttgaatgattacacaggattgtacttgaaacagaaggaagagagatagctgaaaaggtgtctggacatggattggagggtgcttcatcagctgagcagactttagtcaacgccctaacgcaagcaagagagcattttgcgaagtctcttctcatgtgatgctatgctttatatattagggcgacgatggagtatctattactgtgtctggataacacagtttttttttttggttagcagtggaccaaaaaaaaaaaaggtctgaaatctttgaatgtgtagaatggcatgttgtgtccaaaattttcatttgtaagccttcaaagttgtgtagcatgtttttttcttctaattttgactggtttcgttatcggtcgttttgtttaatctcttcctgttgtaaacggtaaaatagcatgcttgatggcatgttgtaacttaacaaattagggctacactttgtttaagatggtaatgtctccctgaaaccaaaacattattggaatctgccaaaaattcaccttacaattttgtatccatgttttttatattaatgggtgcaaaaagcaaagggtgacggtgagtgtttactcgccggcggtgacatggtgagacagatcgtctctccgcttgattgcattgtcgacatgtcgagacaggtcgtctctctgcttgattgcattgtcatctgcggcgtcactgaactgctgcttgtagccaaggtcatggttgcctgaaaccagttcgtctctgcttggagtcccttccatgtcgatgatgatgttggttatcaagcagcagacaaagatgatccgtggcagccggtgtttgtcaggcctccacagctctccctgaatgacacgccacctccctttgagcgtcgccaatgcggtctgcac

SEQ ID NO: 43221 - DNA, 4912 bp, Zea Mays
aaacaacaccattgctcttctctcttctcgtttctctcctgtatccagttgtggctcaccactgctattctctctaccagcaagcagctcctgccttttgtttttcagctcctgctgcagcctttcccctcccaccacccaccacacccccaaacccgtgcaagaaaccaggagcagcaaagcaaccggcgctgcaacttgctccggtggcttaaagttggacagagtgggctcttggatcaccgttcaccggtccccgacccaccggcgtgccactgttcttggacagagggggcaatcattcgcgccgcggcagtagccaacctcctccgttcttggattggctcacagcgtgcgaccgtgcgggcccctcgaaccgagcaacaagccaagcaagaacacccactcccctctctccggactccgcatgcgattgctggctcggtgacgcgctgctggcctatctcaaatcctcaacttacttgcctcctcggttctttcttgtgcttcatgtggctcctgcaactcgctgcagcaccacttgcgctgtgtcgccacgcgctgtttcttgagcctctttggtagctttagtggttgaagcgaggtctgctcacccgatggttccgaacggagcaggggaatgcggcggcggctgccggcgagggaaagcagcgcacgccggtgtcggcgctgtggctggtttcttcttatgtctcttgatggtctgggcagttggtgggtctgaaagatcaggttgtggccgggtggctgagcaccacggggtggtacgggtggggcagttcaacctcagcaggagccagctgcaggcgttggtgttcctcctctcatcgacacataaagaatgtatggtaaattctggaatggtccatgatgggaatcaagtcaatggtgcgtcttttatcccagatattcgttgcattcgagataggatatatgatggaaaacagaattggttgaaggatgcaattcttcaagaatcttgcacagcacaagataaatatggcctaaatagtcatgcacctgcagtattggaagataagttattgcaaaatgttatacaagaagacattaattctaccacgcagtgcaatccggacgaatgtgacttatgtgctggaatcagtggcgtgaatgtggtccagaatattgggtcaagttctaatcgcacaataatattatgtctatctgcttttttggggagcattgtgatatcaatagttaaaactacgcacaaaagagggattcaaacccacaagctttatgcagatgagaaagttctccaggcaccaagtactaaaataagtcgaaagtggtcaaagagagccctgcttattggtgtcttatttgggctctgtagctctgtatgcatattttcatgcatgtatgccgatgttgttgctcggagaattgagaatcttgctaatatgtgtgatgagagagcaaggatgttacaggatcagtttaatgtaagcatgaaccatgtgcatgcgttggctatactggtctcatcatttcaccatgggaaggatccttctgctattgatcagaaaacatttgaggacttcacagcaaggacaacatttgaaaggccattgatgagtggtgtcgcctatgcattgaaggtattacacaatgaaagacaacagtttgaggaacaacatggatggaagattaagaagatggaagatggagatcagtcccttgttcatgactacaaccttgaaaagcttgaaccatcaccagttcaagatgagtatgcgcctgttattttctctcaggaaactgtgaagcacattatatctgtagatatgatgtctgggaaggaagatcatgacaatatattacgttcctggtcaacaggtaaaggggccctaacatccccttttaagcttctgaagtccaaccatctcggtgtggtgcttacattcactgtatataaatatgatctgcctccaaatgcaacaccacaggagcgtattcatgctacattgggctatcttggtgcctcatttgatgtcccttctctggttgataaactcctagaacaactcgctagcaaacgaaagatagtagttaatttatatgacaccacaaatcatacctctcctattgaaatgtatggttctgattttactccatctggtgatctgcatattagtagcattgattttggagacccaacacgcaaacatgagatgcattgcagatttaaacatgaaccttcactgccatggtctgcaataataatatcaacagctgtagctataattgttttgcttgttggacatattatttatgcaactctgaactcccttgaaaaggctgaacatgattatagagtaatgagagaacttaaaggacaagctgaagctgcagatatagcaaaatctcagtttctagcaactgtttcccatgagattcggactccaatgaatggtgttttaggtatgctgcagatgctaatggacactgaacttgatacaactcagcaggattttgtagtcaccgctcaagaaagtggaaaggtattaataaacttaataaatgaagtccttgatctggctaagatagagtcaggaaggattgagctggaagcagtgccttttgatgtccgtgatattcttgacaatgtgatatctcttttctacgataaatcacaagctaaaggcatagagttggccgtgcttgtatctgaccaagttcctgatgtcctaattggggatccatggcggttccggcagatcattacgaaccttgtggggaattctatgaagggccacatctttgttcaagtccatttggtcaaggaactaaacaggaaaggaaacaatttttgtgatgtttctgctcataacagagaaattctgtatgattctgacaactcgatgctatggaacacactaagcggacttgaagtagcagatagctggaggtccttggagaattttacgatgttcaagaattcaaatggtgaaacagatacaattaggttagctgtcagagttgaagacaccggcataggaataacaaaagatgctcaaatgcgtatttttacacctttcatgcaagctgacagttccacctcacgaacatatggtggaactggaattggcttgagtattacaaaacgtttagttgaattgatgggtggagaaatagggtttactagtaaatcaggagttggtagtacattttcttttactgccattttcaaggagaacagaggatgtcctggagatatgaaaagatactattctgaacctactccgttggattttcaaggaatgagggctcttattattgatggaaggagtgcacgtgcagaggttactatgtaccatcttcgtagacttggaatacagtgcagtcttgttgccacatctgaatctgaatctgcatcttcagctttgatgaaagcctgcacctcaagcaaaaacaatccggacatggtccttgttgatacagaagcttggggtaaaggttcaggtttggcattctatcatcgttttgtagattgtcaactaaagggcgcacacaagttttctcagcccatgccaaagactattcttttgggaagctcaataagccctgttgaatctgattatttaagattgacaggatttggtgattgcataaggaaacccctccgtcttagtactattgttgcctgtcttcgcaaaaccttaggggttggggttacaaggcagcagagtagagaccaatctttggttcttcaaagtgtactaactggaaaacagattctggttgtggatgataatgcagtcaaccgtaaagttgcagctggttctttgaagaaatatggatctaaagttacatgtgttgatagtgggagtgatgcaattgatatgctcaagccacctcacacatttgatgcttgcttcatggatgttcagatgcccgagatggacgggtttgaagctacaagattaatccggtccatagagaaaaaaataaacgatatgatcatgatgggtgaaatatccgctaataattatggaaataaggcccattggcatgtaccaatattagctatgacggcagatgtaatccaagcgacttttgaaaaatgtatgcagtgtggaatggatggatatgtgtcaaagccatttgaagaacagcagctctactttgctgttgctcatttcttagagactgatgaaacagaataacaaatccaacttcgtaggagattgatttgccgcaacactgtttcaacatctgccaaaagaccatctgttcaacaggttctgaaaaacagcgatcggcagcatatttggaaacaaaatacattggactcccactgaccagaagaaagaagataagatagtagggggtacaaaatgtttggtctggtttccgcagcaattttttttctggccgtgttttctggaaccaatacaacatgaccttgcaacagtggtgtcagttgcttctgtaatgccttatgacaccacgatatttccaaatgctgtgttgtaagtgctttacagacaaaccgaggtccagctttctaaaacattgagttcaatgacatcacttcatccattatttaagaaagcgagggtcttcaaatcaggaggatacaattgtatcaccaagtcaggcacacagtttcaaggtgactttgttctgatctgattgttaatgcaatctgtaaagaggcaactatgagttagggattgtttgatgccttgaatgtcgtatattcatattccatcatttttgtgggcacttgtatatacattgatgattaattgtattgttagataattgtgcattttaagattaaatgaattcctaaagcaaatcgttacataaacaatgtataaagcacacataacaaataaaggcatgtcttagtagattaaac

SEQ ID NO: 43222 - DNA, 1410 bp, Zea Mays
catataggagccttggaactgacctgagctgcaatgcatttcttgtttaatgcgtggcctcatttagtaccaaattctcaaggagctcagtctgagaatgatcctaacaataccactatatttgttggtgggcttgaccccaatgtcactgaagataccctaaaacaagttttttctccttacggtgaagtcgtccatgttaagatccctgttgggaagagatgtggttttgttcagttcgttaccagaccttctgctgaacaagcgctgctaatgctgcaaggggccttgattggtgcacagaatgttcgactttcatggggtagaagcctgtcgaacaagcaggctcagcctcagcaggaatccaatcaatggggtgcggctgctggtgctggtggctactatgggggctatggacaaggttatgaggcttatggcagtgggtatgcacaaccccaggatcctaacatgtatggttatggcgcttatggcggttatcccaattaccaacagcaaccagctgcacagcagcaacagcaacaacagtgatgcctgtttgctcgggtaggtcattgggttgtcgcgacggaattaattaaatattatttcaggacactctcatattgcattcttgtcaattgaggtggttttgaaaggctcctgattttgatggccccatggcacggtttcatctatttattagtatatgacatatatgcgctgtgaacaagtggcgctctactgtgattgctgtgttgagacatgctttcttagtttctttccatgtttctcggatctgttgtgttacctttattactgtgtatttgcatatctactgtgatgctatatatgcactgtgccgtttgtttcctattccatttttttctcgttactttattatagcgttggattctttcttctatcacaacgaacagccgtgggcacatgggcatgcacgatgtcatgacagaatgtgtcgatggcaacatgggctccatcttttatctgtttcgagtccttgacatcaggataatgtaatgtgggttttgttgccgctgtgactgatatggaagcatgagctgccatcgttttcatggccgtccgagtctgaaaaatacatttacagtacgatgaatccttttcattcggtctattattcggtctattaggttaattcggtttggtttatttgggtttgtgaaattttgggttttgaaaaatgagaatcgaaattttcaaaattattttagaaaccgaatctgaatagactcacaattttagtttggtctatttagtccaccgaatagacccaaatagtagagagactaatatcttttgttaaaatatataataaataattaattgaaagtactattattaaaaaaattataaaaatatcatacaaagata

SEQ ID NO: 43223 - DNA, 1419 bp, Zea Mays
tagtagggatcttgttgagttagaatatgataacagaaaagctttcatgggaagaacaatttggcaagtggcgactgtgatgagtcagtaaaaccttccaaaattaatggttctactcagaaacatcaatcagatatgccaccaccaccagctcgaccccctcagaacaataatttcactggaaaggagaaacaaccagtccctgttgcaagagcagacgatgatgacatttttgttggagatggagttgactatacagttcctaacgaggaaatgagtcagagccctgtttctgatatggatgaatccccacataaccatcagaagcagtccaatttcattgaacccatgtatggccctgtaccaccatctgaacctgctcaagcttggcaacagccgaatgggtatgatgctgttcaagcccagatggcagctgctggatatcaaggtgactggtcaagctatgtgtatgcagaacagcagttgggttatccagagcagtacgtgcagcaaagcacacaggaatatgatgtgttagctgaccccagtatatcacaggatccgaggttcatgactcaggcagacaaggatcggggtttaggttctgttttcaaacgtgacgatcaaaggcttaatcagctgagggaaaaggacgaacgggagagagatccaaattttatttcagatagttactcagagtgttatcctggttaccaggagtataataatgagatcgcaggaagcgatgatgaagatgatttatcgaagatggatatgggtggacgggcgaagggccgtcttcacaggtgggacttcgagactgaagaggagtgggccaagtacaacgatcagaaagaagccatgccgaaggctgccttccagttcggggtgaagatgcaggacggcaggaaaaccaggaagcagaacaaggaccagaagctgacgaatgacctccacaagatcaacaagattctggctaggaagaagggcgagaaagatggggcggaagatggcggtcactacgatgatgatttacctagctcaaagaaacagcgtggctgaagcagtcatttttttgtttttgtttctcctgctcgtactgtaggcaggcgaacattctatgaagagtcacagtgtcatgtttagctggcagctgtatcctgctgcgtttgtttaaggtgtcctggtaggaaatatgttgatgctattgagccgaaaccatggaaggaatgtggctatatatatatatatatatatatatatatatatatatatatatatatatatatattcttagaaagaaaagccagatctttatgttacaattacagtgatgaacctgcaagtatttaatttgtcatattgggaggcttttgcaatgtggttagagctgagaatatccaagagtgtggctcagtg

SEQ ID NO: 43224 - DNA, 981 bp, Zea Mays
ctgacactgacctgacgtgctggatgatgctgtacctatactacgcagcacaccagcataagtacaagtcgaccagatccgaagccacgcttccagcctcttgttgtcacttattagctatctctcagctaacctccctaggaagaataataagctgcaaaaggcacaagggcgacgccgataccgatgcaaataccatagcgttgatgtaaagtggcgccagaggagaaaaaaaggaagcgagccgagaaacatggacgaggaagaggtccatatcgcagttgggaagaactcaagaaaggagaaagccaacatactgtgggccgccgccaatttccccagggccaccatcgttcttgtccatgttcactggccctccaagtggatgcctttcatgggtggcaaagtgctatacaagttcgctgatgagaaggagaaggagatgcatagaggcagagaaatgaaagtaatggtcaatatgttatcacagtacaaaaaaatgtgcgggacgagaaaggaacatgtcaaggcaagttgtggttcgccagtgctgtcaggtttggctggtactcaacggcaaacacatctccaccagcaatgatcacctggaatatagtgaaaatataggatatggaggggggagctcaggtattttggcatctatacatgagctaggtgaggaatctgacggctacgtgacaccacgaagtgatcttgtagacgaaaccatggatgaggagtcggctgaaatgaatgattctgatcaattagtaacggaagatgaaacattgactgaacaaggcacagaggaatcagtcacttctgaagacatggaaaacttttttcaagagaatgctgatcagtctgatgagatacagaatttcagaaacatagctgacaaggctgaaaaaatcatggtgcaatccgatacaaacgaacaaggccttagttaactacaaacacagatggtttcaacttgcg

SEQ ID NO: 43225 - DNA, 1954 bp, Zea Mays
tttcctccatcgacctcgtccatatcttgtaggccattgaagtcgacgctaaagcaggaatggagagcatgagggcccattcttcattctcccgaatctcatcgcgcctcgcactctccccgctccagccatagcggcgagggccggatcggttccggagacagcgcccatgtcttcgaagtcttggatctggtgggtctaggacgcggttatggggctggtggtgagcgccgccatgaggagcggctggacgatggtgttgggaatggagggaccaccgatggcaagctgagtctgcgggcaggcccgaggtgttgacactgccttggtccctcttcacaaaatcaccacggtggcgcatgcgggtggccttcgcctgcagcgtatgtgggcagcgtacgaccaaggccatcaatcctcatgcctacaccgatggaactatgtttgttcagatttgtaatgcagttgttcaatgcaactcttgtcctcccaatttttttgtgcagtaatgtttggctggccaaaaggatttggcaatcgcttatctttgactcaataccttatgacctcgaaaaggtttgaacccgttagggactaaagatgccaaaggttgctgtggagaagttcgtgagtttatctattctgataatgggactgtaaccatgatacaatcaatctcaaatgaacttaaggataataagggtcaacatgagatatgttgttctaaaattgaaacaataaagggtaaatggcttccaactatgtggattcattcgtaactttcaagaaatggcagtcgctcactactaacagtttatctacagcctaatgaaattcgttggtagtgtccacttcatatgccataagttgaagagcataaatattctgaaagctcacggtaaaagcatcaaggatagttacatgctaaatggctatgcactaaagactaaacataggccgtgcaggtcaaggaatgcctacgagagtaactcctactagaattacttctcttgattttaacattcataagacaaaaatgcaaacagatccaagggaacttgataagattcgtcagagttatttgtattctatgttccaatactttagaatttgtttgcctatatatggtagaatcagcactataaatacataatatttatatcttccttcatgttacttgtttctaattcgttcaggcaatagtcctctgtctttttaaattttttggctcgaaattcattggtccaattttgacctcggaaaggtttgaacccgtcagggactaaagatgccaaaggtctggaagatgagtaggcggaacgtggttgcaatagatcctattcaagtgtactatgtggaagggatcttggagcagttggcgttcgtggaggagtcgaagcgcaaggaggactgggtcgtcaggaaccaggagcgcagggcggccaaacgcaatcgcatccgcgacgagcacaagtatcaggaggatgagccagaagcacaagaatgggctgatgagctatcccctgatgagcttgagcgcctcttgaatcatgaccatggttggttgattgccaacccccaccagttcaaggtccctagctggttcctcaacaggaaaaagtactacaaggatggtaggttctctcaggaaccactatggtctgtcactactggggtctacttgtccgtggccagcacaccaagactaccaaaaggcatggaaagactataggtgtgtcggagaatagataaagtcaatttggtgcctaccttggatatttattatctgtaggatagatgaaccgttctggtttatgaaacttttgttgcgtattccaagctggttgaattgaatgttcttaagaaccaatgtcattagaaaagttaaaagattcaataatttgaaatggttttaccacacgaatttggtatatcatagtgatgcttatcgttt

SEQ ID NO: 43226 - DNA, 632 bp, Zea Mays
ttttgtgttgccttgttcttgattcacaacatttgagaacaagtgaccaatattggcgcccacctccggtgaactcacttccgtgacaatggcttcggaaggaacccaagccgtggcaccttcggctacgaagttggtgctcccaaccataggccattcaagtttgaaccagctaataagaagcagaagaaggaggcacaaagaagggtacaacatgttggagtgcagggacccttcatcaagtctaagtggtctcatgtaccaatcaccttctcccaggaagaccttcagctcaaggactaccctcataatgatgcaatggtcatatcttgtgtcatcaaggggttcctggtgcacaacatccttttagacacaggaagtgcaacatatatcatctttgcaaaagcttttaggcagatgcaggagcaggatgataaaaatatatgatgcaacacaccccttgtgtggctttggaggatggcagatagtggcactcgagaggataacaatgccaatcaccttcggttatgttcataacacaaggacaaagcaagttgtttttgacattattgatatggaatatccctacaatgcaatcattggtcaagggacattaaattcctttgaagcaa

SEQ ID NO: 43227 - DNA, 1216 bp, Zea Mays
ccctctcactaaaagttctcttgctcacaatcttttgagttagcttccaaagttatccgcattgattgagcaactcatagcaagaagaactatcttccacactccgtattcactattatttgtttctaatcctaaccccgggtgagtgcgtgttcaaagtttataatttacaggttttgcctattcaccccctctaggcgactttcagaactgctgccactttgattggatctgtggccaccccctcgacgctaatgacatgacccaaatatgagatagtttatttgcccatgaacatttggagagctaaatctgccactggtctcgaataagcaactgcaacaccaactccaagtgtatcaaattgttgtcctaggtgtcactgtaaaccaagatatcgtcgaagaagacaagcacacattagtgtaatagtggctgcaatgtcttgttcatggcaccttgaaacgtggctggggcatcggtcaacccgaacgccatcactcgaaactcaaattgatcgtgatgagtctaaaatacagttttgtactgatcttggggtgccatacgaatttgatggtacccggctctgagattaagggtggaaaaccaagccataccatagagctcatccaagaattcatccataatgggaacagggaacttggtcttggccgtgattgcattgaggtgacaataatccacacaaaagcggtaagtgctatctttcttgcgaaccagaatcacaaaggaagcaaagtgactcttcttgtgctggataagacctgactccaacatttctgccacttgtttttcaatctctatcttaagcgcagggcatagcgatacagatgcatctgaactgggcgagcctctggaatcaggggaatgtggtgatcgtagtcacgtgtgggagggagtcccttgggcaaatcaaacaccgaagaatatttgtccagtaatgcttgcaactcagctagaagattgtggataagtgtttgttccttgtttgacaggtcactgatactgcataactgaacaaaagcaccctgccccatggacgctttaactccataaagtttgactgatgaagaacccactggaatggttaaccacttgccagaccagtgcaccatcattgggctttgttgagctaaccagtccagccaatcaccatgtcataatgttgtaaatccaacaccctgagaatactgaagaa

SEQ ID NO: 43228 - DNA, 7068 bp, Zea Mays
cgcagctccgaaatcggtcactttttcccgcccattcccacccccgagatctccaaagcccgaccgcaaaatttccccaaccgggcttcttcggtcatccacctagacggcaatggaggccgccgctgccgacctcatcgccgccctctcgtccccatcctcattcgctggcctctactctcgcttcgccgcctacctacagcccttcaccccctacctgcacagctcaaaccctaacaccaagccaccgcagaagagggcgacgaagcagaacaagcagccgccgcctcccgacgcggccaccctccgcccccttgcgaagcgattcctgccgtttctcggtcgcgcgctccacctcctcccgccgctcgtccgcgcttgtcctgtttcgggcgataagggcggcgaagccgccgacgaactgcttgagatctacggcctcctcttggactgcctagaggccatatcaccctgccttgcggggaaaccctactccgtgttgctccaacgcggccgcttcatctgttgcctcgagtcgcgcggtcacttcgcacgcgccagtgcggaggctgccgctaccctcgacgccctccgctccgcgctctctccacccaccacgagcaccaagtcgcgacgtggtgctgcaggcgttgatcccgtcctccttccggaccccggcagcgctggggaggctggcacggatcctgaagtcaccctccttgcggttgagctcactgtttgccttgctaattgttccagcaagggcaaggtgaaggaacctaccccttatgaacgactcatcagccttttcaaacagctaaaaccatggcttcgtattcttactaatgaagtcagcaggaagtatctcccgttgcttatgaatgccatgagccggtgtaccctttttctggtttctgagtcttcccttttcaatactgatctagtgcatggattctgtcgttacacgatgcaagagtgtgtgggggaggggatgattgagcttttgccagcaattgctcgcaagatttgctcttctgtagatttgacttggggagggagcacacagcttttgctccatgtgctaaaaactgtcactgattctgttgtacgtttaaaggatgatttaccaaaatctgtaaatgagcttctggtatttgtggcgtatttttgccggttcattctttctgccaatagggatttatctgttggcgcttcagaactactttataaacaaggtggttatttctctgaggtttcctctcctactgcctcaatgcttcttctttatgcgactgggttatacttgagtgcccagcaagcagaaagtgaaataccaccctatttatcggtgggtattcccaaggatcaaaagtatctacatgccttagagaagggtcttggcacattagcacgatgcccacatgataatacatctttggtcacatacttggactctttggagtttattagcaagatattatcacagcaagtgaatacactttggaaggacttctctgaaggaaaaccaacccattattctggtaacatggactatgtcttgacagcactgcatcagttcattgattcgagcttcacgtcttttagctgtaggcaaatgtctcaaggggacaacgagagacagcatgaacaacatggaaccttactgacagtccttgtttccgcgatcaagttttcctttcttaccaagaaagatatccagaagagcttgggtttcatcgtctgtgccatttcaagtaaatggtttacacttgaggagctcaaattcttgataccttcacttggcaacatcggagtgacacttcataacactggacatgttaaagaggcaccaaaggctttagaactgtgctgccaaacaatatgggcacacatcagccttttttactatagactatcttcaagaacaaaaggaaacgacattatgacagatctgtcgatggatacactgaaggatatggatatcattttggatgcattttcaagaattgcaaagatggttgatgctctctgtagatgtggcacagagatagaaacaccacttgtgattgttgcgaagagtttgtctataatgttgcctgatggcgacaattctgaatataacaaatgttcttttatactgatcaaggcatgggttaaggcagtacacaaggattttagggatactaaggtggatgatgctccacttctctatccctttcttctgaaatatcggtctccatggccaattaagctgataggcttaatagtagagcaggagttattagcatatggattaactgaagcccgaagcatagaattctgctctaaaatgcagataaggatcatagatgttctgcttcataaaatttactgtacgaaagaacattttttggagagatcaagggttcttattagaaaggcaggtgcacttcgtgcatctggagtggaaaacataaaaaactgccttgagtctctacgtgatgccatatctttactgcaaaagatctcacatgattcaactcgtaccaacactactgcaaacaatcagttggccattgcgtactgtttgtatgcgcagtgtgctcaggaagacaaacttggtggggaggtaatatttgatagcgctgagaaagcacttaacttgtggttggacatggaggcttttgaccattcttcttctgatatggtcttgcaacagccatcaaaaactattgtaccacttatttgtttcctggttgatttgttgtctatgaagggctgttttgagcttcagtttaagttgtgcaaggttatgataatgatatggaagcaagaaaaattacccattgagaagttgttgtccttgctgagaacgctgcctagtgccttatttattcctcaatcatgtaagcatccctttggaaggcagttcagtttcgtcacgagtgttgatgaagtcagcaaagttgcctcatctctggtatctggagatacttcaaatgagcaatctacctttctagctggatgtttatactatgacttgtcagaaaaagttttttcacgcggacaacttttccaggccttttcatatggaaacaaagccctccatttgcgcaaaaagctcctaaaaaagaagttcaaaatcaattcgggcatatctggaaatatggaaagacaacactgtgggcaggacatctctcttgaagtgtgtggccctacaatagttgagatttggccaaattccagcagttcagtcaacactaaagattttttccttaccccatggaatgtccttaggtgctatcttgagagcactttacaggttgctatgatgcacgaattgattggcaatggtgctgaagctgaagttctcttacagacaggaaaagagatatcaaatttccatggtttatcagttttctgtattgtatttacatcatttctaggtcaactatattgtaagcggcagctatgggatgaagcggagagtgagcttaattatgcccgagatcttgtgaaaaatgatgcaacaatttcatgtaagctctgcagtctgactttggggatatctgttgacatgcaagttggtgatctgtcttggagtctgtttgaaaaaaaaattcataaacagattacagctggtttgtctaacactttaggcatgtaccaatctgcaatagacaaattgaatagcactaacttggaatattgtaacgggtcctttgatagacatacaactggttatcttgtgtgcagcaaagactgtataccgagcaagtatgaagcttgtaatttgggggcagaacccctaacttcaaatgatggattgttatctccatgtagtgtttgcatggtaatacaagttcgaaggaaaaactcagggaatgctgaagctggtccacctttagatgcaaaagcaaggaggtcatcaagaaattcatcacgtttagctaagggacagaatgtagagactcttgcaaagactagaactcgctctagtaaacgaaatgcatgtatgaaaagtgagaaggttttaactgagctaaatagtaaaaataacgtaactgggagtaaggaattggctgcagatgcttctgtttgtggtgaagcagagtgttttcctgatggcattgatcacagcaaagacgacctatgcaatatgtttggttgctggagctgccttttcattaaatccctcaattcggggtgcattcagaatattttgcagctgagattggactatgttcaccgacactaccttgtgtcacttcttttaaaaaaagctagagccttgggatctcatagcaatggggactgtgaagttcatagtgtctattggaagtgcatatcactgctgttcttcaggtcccttccacaagattgctgtaggacttatgggccttatttaattggactaatcatggataggagcattggtgattttcttcctttagagtgtgcagaaatactattcaatatgagcttcttcttgctaaaaagccccctttctgaacagtcaagggacatctgctgtatcttctctagtgtaacaatggcagacgttgtcccctggttgctcaaagcttttgttctatccagagagagcccctcacttgttcaggaggtttgcaagttacttgcatgcatattcttgctatcaactacagattcctcaattcaactgcctttgggttctcataaagaatctctttctttgaatcactgggccacatacttccatcaagtttctgtgggaactaatctcaattgtcattactttgctagcttacaagcatcgtccgaggaaaaggttccaaaggacacctataaagatttcagaaatgagacagatgacaatgtctcgaaatttctcaggttgtcatcaagggacatcaaatatattgagaaacatatgacagaattcttccaaaaacttcctgatgtaccagttctgtgcattagtatgcttggaggtgattatgttaatgcccttctgaaattccattgccatcctccgttttttcctgcttggatgttgctttcaaggtttgattcaacaaatgaacccacaacattgcttcttccagtggattctatttcagcagaaatgcaatttgaagattcctgcaccaaagatttgggcaatccaacgagagttttagataagtggcaatgcccttggggctatggaattactgactatgtagccccagtttttagaaatatactcgaggagaattttatgtccctctccagcgcaacccttactattgatgatgtaaatgcagatcgtgtcaggtggtggtcccatagaatgaagctcaacaattaccttgctaacacattgaaagacattgaagattcttggtttggaccctggaaatgccttctgttgggccatcaattatctgatgaacacattgagactgcctcatcaatgattatcactggtctggatacagaattcgaatttgaagtcaatccaatgctcatcaaggctatccttggtggtgctgtgtcagtggatgaagtacaagaatgttttctccaactcattttgtataaaggttactttggaaggggaggatgctgtgggaaagatagacttaaagctttctcttcctgccaaatggatgatggatctatggagacactcaaacgtataataacggatgcatcatatgagttgcctcagccagctgatagagatccagttattttagttcttgatgtcaatgttcagatgcttccttgggagaacctgcctgtactaaggaatcaagaaatttatcgcatgccgtcaatgggtagcatctttttagcattatctcgaaccaataatgattacaaagatcacagttctccttttcctgtcatcgatcctttcaatacatattatctgttgaatcctagcggtgatctgagtagcacacaagaagaatttgttcagttattcagaaactatgagtggaagggagtggctgggaattctccgaaggctgacgagctggttttggccttgacaaatcatgacctattcctgtactttgggcatggaagtggaacccagtatatttctagtaaggaagtcgaaaagatagataactgtgcagctgctcttcttatgggatgtagcagtggaacacttcattgcaaaggaagttatgctcctcgaggggccccattatcatatttatttgctggttcccctgctatcattgcgaatctctgggatgtttcagacaaggacattgacaggtttagtaaggctttgctcaattcatggttgcatgacaaatctctagatggcaacaattgttcaaaatgttgccagctaacaatggagcttgagtccatgagtattgcttccaaggaaaatggtaaagcaagacgacaaggcacacgaggaaagaagcaacaacatataaatgatagtaccaagtgctgcagctgcaagcagaggcgaatagcttcatatataagtgaagctaggagggcttgcaggcttccacttttgataggcgcatctcctgtgtgttacggcgtgcctacaatcattaggaagaaagtaatgacggattctaccacgagagagatgacctaaaagtgtggtagtatcggcatggtattggtgactattgatagtgtgatctatggcgttgatggagttggcacgaaagtgtgccagctcaaatgcactgactaatttatgctttatacccagtgcttggacgcatggtcttgctggacgacctgcagtgggcgtgcacctattggtattccagagctgtaacgagtgtatattgaagtaaatgttctgtacaatggcgctgtacataactgtaatgtcactggagcatcacttagagaaagtatgttgaggctattgatttcaattgtataacgtgtactatagttttgtccaggaacatagagaatgcatgttgaggcagttaatttcaattgtataaaatgtgtactacagttttgacccttgtaagttacttataagaagctgttgtctatactgtactgaattctacatgaagttacgtaggcagtatgacggaagttttgaaagcatgtagg

SEQ ID NO: 43229 - DNA, 1752 bp, Zea Mays
atgaggtattacatttatgaaaaaaatatgttaatgctttggatcatgagtggtattaaaatttttctgcaggcaagttttgagatgtcccatcaacaagccttagcacaagtaacagcacaagcagtccattctcagtacaatatgatcaatcatgcagattacactatctctttttcgtcgacgacaacaccagctttggtcacagcacagcatgccaatttttctggcaatttgacatcagcacaggagaaaccagctctgccgtcacatacaggcaatagcaacattgaatcaaatgaggtttcacaaggactcaaaacttctgcacccacttttgataaacctgctgacgatggatacaactggcggaagtatggccagaaggcagttaagggtggcgagtatccaaggagttactacaaatgtacccacacgagttgtgcagttaagaaaaaagtggagcgctcagcagaaggacacatcacccaaataatttatagaggtcagcacaaccaccagcgcccaccaaaaaggaggtccaaagatggtggtggtcaactaaatgaagcagatgatttccatgagaatgaagacacttctactagatcagaacctggctctcaagatcactctggaaaacatgaggggtcaaatgatggcataccagggccttcagtgtcaagaaggggagaggtatatgagcaattgtcaggctcaagtgatagtgaggaggaacgagatgatgaacaaagggctggcaatggatgtcctggctatacaaatgcaaacagaagacatgtgccaactccagctcaaaggataattgtgcaaacaaatagtgaggttgatcttctggatgatggttatcgatggcgcaagtatggacagaaagtggtaaaggggaatccccacccgagtagccgctggtagctggactggagcaggctagcagccaagcaggctgaggggtgcaaccggtatctggactggaacaggcgagcagccaagcaggcggaggggcgcaaccggtatctggactggagcaggcgagctgccaagcaggcagaggggcgcaggcgccattgaatggagcaggacagcagggggcacaggagttactacaaatgcacgtatcaagggtgcgatgtgaagaagcatattgaaagatcatcccaagacccaaatgccatcataacaacgtacgaagggaagcacagccatgatgttccagcagccaggaacagtagccatgccgctgccaatgccaatgggtcatgttccaccagcgtagcacacagggtccagagttcagcatccagtagtcgcagaatggcagacttacaaaacacatcctcagcttcttctatgcacctaaaagaggaagatgaaataacgtaaaattttagagtgcgtagcagggtaaatcatttctgttctctcactcatttccagtagcagtgagcaagcagtcattggttgtagcaagggcgagctcttctgtttgtgcccttccaaaagccagcgcaccctgctggctgcgtggcgtatattatgttgtcattaaggccattggttgtaaatgccaacagtcgttcccctggagaactatagtagatgacaactttcacctgcccaagtgtatatactcgattaaaaacctgtaaatgagacatggtttgtagatacacggcttccttcctgttcttcgtaaatgttatttctacaggatatataaaggtacagttgctg

SEQ ID NO: 43230 - DNA, 2199 bp, Zea Mays
atggagttatcctgtgcaatcaagcagattggtttgattcagagagtgatcgattgggtatccctgtgcaaggaacttattgagaaaaaaacatctcctgaagcaacaaaagccttagaattgatctccaatgcattgcacatatgtccatattcagacagcctcaaggagatgaaggcagaggcattgctgatgctacgaagatacgaagaagtgattcaactatgtcaggagtctgtaaatccgactgaaagaaagccagctttattcaaagataatggagaaccaaagaattccagtctctttgaacaaacacacttctctggaaggtattggcggccctatctcatttgcaagtcttatttcctttcaggcaagctggatgaggctgtcgaattattaaagaaacatgagcaagtcacacctgtcaaagaaagtgacgtgaacacatatcaagaaaatttctcatcattgtcagcgattataagagaactactttcccttaagctgtctgtttttgcaatcgcgcagctgcgtatcaagcactcggtcaagttactgatgcaatagctgattgttcacttgccatggttcttgatacaaattaccccaaggcaatttcaagacgagccaccttatacgagatgataagggattatggacatgctgctaatgatttaaggaagctaatctcacttcttgaaaagaaagtcaatgtgtctggaatatcaccaaaagcttttaacaagcataaagatatcaagcaagcacatgcgaggctttcacacatacatgctgaagcaaaaaacgatacccccctgaatttgtatttaatcttgggagtggagccatcctgctcttcagcagatattaagaaggcataccggaaagctgcattgagacatcacccagacaaggctgctcaattattagtaaggaacgagaatgctgaagatggattttggagggatgttatcaaggaagtctatgcagatgcggatcatctgttcaaaacaattggggaggcatataatgttctttctgacccggacaagcgtcaagagtacgactttgaagagaatctaagaaatgctcggagagtatcgagttcaaggagcatgcgtaggtcacctgaacataactacagcgacagaggctttaatccacggcagtggcagtcaagcagagcatcacgttggtacagcaaatcagacgattactggtaaagaaggcactacggcgtggtcatgtggtgagaagcaacttttgcaactatgtcatgtgtggagcaaatgcctccttgcaccaaagatgggatgggatgcacctgccttcccttaggtgccggtgctaatgcaccagccttgcagtcagcagctttcctgtttgtttgctgcgtttctttttcagaggatggaaatattaggattgatcaattggggatctgggatgattgcttgacactggtagcgtcgtgacttgactagcacaggaaatatggaggattaggaagtggtatatcaaatagtcttttgttggcctggtgatgtctgaacactgactgcttgggagtggctggcatgatggtatctgctctgaagtcaaaacactgagaacaacatcaaaggttagaaatctgggtaaagatgtcagtttgtccaataggtacaggcattcttttgctgaatgcatggcccgctgtcgtaagtttacagcagatcagctgaaagaaaaagagacaggctcttctgtttggcgcgtgcgcgtgcagttttgttctgttgtttccttattaccaaatgatgtagcgttggaaagagtgggtacatattgtgactgcccaatgttgaaatctcgtaacatttatttattctttattactagacttgttagcctaatgttggaagcattttgagataatcaaggttccttcaaagcaagaagaggatctggttatggtaccgtttcgtttgtaaccatggtaccgtggagattcttttgattcgattctcgattgtgctagttcaaagttcttagtggttaaaaaatcagaaatatttgaagcttttagcaggattttggctttttttcacataaaatcggattataaggggaaacgagccatatgtgaagtgcatgttctctcatgttgcttatgataaaaatatttggatgacttgaacccgcccatggtttttt

SEQ ID NO: 43231 - DNA, 1022 bp, Zea Mays
atgggggcattcatgtatggcgacgttgggtccctggtgggcggtcagggagaatcgacgtctgtagaacgtgtaggtagcgtcttgaggcacaaagtgcagttcacctggagtaaccaagaggataatgctgaggccaacaccctgcttctcccaaggagacaacttccagtcgacctggctgaaggaaatctcgaagctctaagcctgccagcgttgggtcagatacaatcagtctcaaatgaacttaaggataataagggtcaacatgagatatgttgttctaaaattgaaacaataaagaatctgacatcaaaggagcgaattgagaaaattctcaagtctggagctaatattgtgttgaccactaagagaattaatggtttagaagataaccctattgggaagctcaaggtctatgtccatgatctccttagcaaatacaacaagaagctgctccagaaggatcctaggtgcctgaaccacatgtttcacgtgtctcagaagataagcttctcatgtccattgctgtcggcaccaatatgcaagatttacagatggtcagaagatagcagttctgctattgctagcaattgcattccaggctcaatgcagattgtgatcgagtcttgttgtgcgtcatttgcagagggacagggacaaaaaggggagaatgttgaaattccattacttgggagagaccgcacgttccacaacagggagcgtgacatcctgcagatgaggacccacttcaaggttagcaagcagccacccaccgaggcgctcgactctaggctctttgcaattcgcatccctggctccatggacttgcattcgcacatcaggaaggtcttgaggaagctacgtctaatgatggtcctcaccggcataaccttttctttgcacactaactgattgaattgacacatgttgtgtaccattgacatctgaccacttcttttgccaacccctcttttgttaaaaataaaattaaaaattagattgtcaatcttgaggccaca

SEQ ID NO: 43232 - DNA, 1529 bp, Zea Mays
tcttcctccagccgcgtccatctcctctgctcccccagctcgcccagcagccgaggtccttcccatggcgccggcctctgccctgctcccacgactggctcccttccatggttgctatgcgcagatccttctctctcctccatggccgccgtgccgggctcctccgacctccccacctggcgttcccggagctcgcgctcaacttgctcaccgagctccctggtagccgcgtctagctcctgttcgccatggcgccggccgccctcatcctcttcccagcgctcgctgttgccccctgctgcagctcaccccaacggctccctccgtgtgtccttggtcccggcatggaactcgtcctatctgcgcgcgctccgctcctgcgcgccgcggctacctactccaactcggcgcccagctcatctcccttttctctgttggcgtgcccctgtttttccttggctggagctccatctccacgccatctcccatggccgctgcgtgctagcccagctccttcttctcccctgccgaacggctcttccccacggcgctccctccttgctcggattttgccaggtccgcgtagctcccatggcgcccggctggatcccctgcagagctcggttccttggccgccgcgctcttccctgcaagcagctgagctccctcagctcgctcctcccatggctgcgccctgggatttgcctggagcctgctcccctcgcctcgtgcgctgctctctggtcgcttatgtctatcaagcctgtgtgtgacaagcctgccagcggttgcagaattgcttggtcatcaggcaatttcctggttgccatatgtgcccgagtgggcgaatgagaatggcaggccaagtagccgcgtcagaaacagtatacactcgtttttctacgcctggtgttcggcaaccattaaccaggataggcaatttgccaataatctccctcccatgcgcgcgtgagctcactggtgatcccggccccagctcggatcttgctcctgttcgccggtctcgcgcactgctgtcggtgggcgctatcatcgccagcgactcgtttcttgccgtggccaggccacaaactttcctcaagcatgagcataacatcgcctaaactgctagctgctactccatcatcgttgtcgttcgcctgtgtaacgcgctcagcagcgtcgtgtcatggagcgcgatagggaacaccttggtcgcgtgctccaccatgccgagctccctagcgtcgctcgccctgctatttcctgtcgagctcgccccagccgttctcctgctccttgcatcgtgattgccgagttcaccggcaaccacagtcacgtcgtgccgcgccacgagctcgctccccgctatcgttgtttcctcgtgcccgctggccgtgcgctcctgcagctccccgttcggcaaaatgagtggaccagtgctcgtcgcgtgttgggaagatcggcatcgatgttattgccgaatattgaccgtttgattttggggagaacgacacacacatggtgtt

SEQ ID NO: 43233 - DNA, 768 bp, Zea Mays
attaaaaaccatatacgaggccacccagggtacggcggcgctcggttccgtggcggggagtgttttccaggcggcggcgcggtagcgtgaaaccgggcgaccgagcaagcgacggccatggcgttctggcagacgcgcgattttctcttctgtggcatatgcggcaccctcctcaccttcgactccgtccgctccgcctcctgccctctatgcggcttcaagcgcgatgccaaagaaattgaagggaaagaaatacagtacacgatgaccgccgaggatattcgaagagggttaaagacacaaacggaggacgttgttgggcaaagaccagtgacaaataaagcctgtccaaaatgcgaccatccaaaagctgaattttacaacatacagcagatgagggagagacgacgttctacatgtgtaaaggatgcggctgtaatttcaaagacgaatgaggagttatcctaccacttctacggatatatggcattggtgccgaagaaatttccagcgttgacagactagtactccctccgccctttttttatttatcatcgtctagttcaaaaatgaacggccgataaatattcgagaattgcaatctactccttgacattgttacattacatggatgcgcagatccatgcgttgtgcaaactttcttttgatggaacctgttttgtattttattcgagtgtgtagatgtctacttgcaacctttttacatttattccaaactataagacgtttaaaactttactcttttca

SEQ ID NO: 43234 - DNA, 3951 bp, Zea Mays
atgatgctgagccagaagagtctttttagaggcagagtatttgttgcagttcctgaggaaccgagggatgggaaatccatactgtcttgggttattgaccgtgtatctgacagcgcagagatcatcatcgtccacatagtaacatcgccagactttgaaagccggcagcaaattttggactgctacctggatcaatgctcaaggaaaaaggttagagctgagaaacgggtgtttctattcaccgatatcgatgagggccttattcatctgataaatttatatggggtcactgaacttgttattggtgcagctgcagacagacattacaggaggaaaatgaaagcaccacagtctaagacagcactgagcgtgatgcagaaagctcactcacactgcaatatgtggtttatttgcaaaggaaagctaatgtttttcagggaggcaaattactgcctgttaaccaagtcaagatcagcacggccaacttgtggtgttggcaatcgcaaaatggatcttcggagtttgcttcaacctaatttagaggctaaaagactggaatatatgtatactaaggatattgaaataaggaaagaaatagaggcagaaatctcgcaacagagagaagagacagaaactctgaagaaagcaactctgatgctccagaatgagctcgattggtacagataccaatggaataagaacgccaatgcattgcaacaggcaagcaagcagaagcgccttttggagcatcgcatatcagagttagactctgttgccagccacttaggagagagcatgagagcgtccgattccctcgtgctctcgctgaagttggagtacagtaaagtgaagcgggaacgggacgatgcggtcaaagaggccagggacatgcgcatggagaaagagctcacagaacctcgtgcctatggagcaatgagctctgagttctccttggcggagttggagcaggctacccaggcattcagcagctcgcttaacattggtgaaggcggatttggatctgtctacaagggtctcctccggagcaccacggtagctatcaagatcctcaacactgaaagcttgcgtgcccaatcacagttcaagcaagaggtggcaatactcagtagagtgaggcatccaaacctagtcaccctcatcggagcaagccctgaagcttcagccctcgtttacgagttcttacccaacgggagcctggaagaccgtctgaactgtgtcaacagcaccctgccactcagctggcaggtgcgcatccaaatcatagcggaggtttgctccgcgctgatcttcctccacaagcacaagcctcacccggttgtacacggagacctcaagccgggcaacatcctcctggatgcgaacttggtgagcaagctcagcgacttcggaatctcccgcctcttgctggagtccagtgccaccggcagcgaggcacacttcaccactcagccgatgggcacgccggcatacatggacccggagttcttcggcacgggggagctgacaccgcagtctgacacgtactcctttggcattacgatcctgcgcctcctgaccggaagggcgcctctacgcctcgcgagggtggtgcaacaggcggtgagtgacaacgaccttcgctcggtgttggatcactcggcaggtgagtggccgctggcacaggcagagcagcttgcgcggattgggctgcgcttatagatgtccaaacggtgcgggctgcccgtttggcccgcagcccggcacggttttggcccggcccacgcacggcacggcccgatccgcgtgccgggcttgggcgccatatgcagcccgcgtgctccggcccggcccggcacggaaagcaggccggcccgttagcagcccgcgccccatcctaggatacctaacccgcgcccccactcgcccaggccgccgccctcatttcgaccgccccgtctcccaagtcccactcctccccgccccggttgtgcttggcgattttcgtgctcccgctcccggcggctcagcccgtgcctcgccgtcgccttgctgcctcctccggtcctcccaccgtcgacggccgatggctcgccacctccgacgtctctggtgctccctgactccctctcctccctccctacgtctccctgttcctaaccctaaccctaatcccattcggatctggtgattggtgataccctaacccccaatcccatttggatctggtgattgttgatgctcgttcatcgttggtgctcctcgctggtcggctggtgctcctcgcctcatcggatcgagttgtagcttcacagctagacgactggtgctccgtgcggtgccggtgcgggtgcgtgattcccttcctgattcttctctgtctccggtccggtggtccgctgctctgcgccttgtatggtcactggctcactcctcactgcctcactggtgcagtagtgcccctgctggctgcttggacatctataattttattctgttttcattttcctcccattctcgtcctccttctaacctgtccggttgcctgactttctctggtgctcggctggtccttgcttgctgttgctggtcgatctgcgcctctggtgctccggcttcgaaagccgttgaggtagccggagccgactgtacgttgtagcttatggaccttgacgcggcagcggaagcagaggaggaggagcgcagactcgaggactttaatgaggctgaggatgctaggttcttcattggtctcgtggtcggcccggttgtcatgagagatcctcacatggcagcagatggcttcacctacgaagctgacgctcttagatactggctcgacagcgggcatgcaacatctccagtaacaaacagaagtctttcgaatcgtgataccatccccaatcacgcactgcgttcggccatccaagaatacctccggcagaacgagctgcaagagccattttcacagtggcaggaggattttggagttgtcaattgataatcctagagtcaaggttatattcaacagcttacttatcttcataatcatatttaggacgtgtttgttttcttctagattatataagttggattatgatggaatgttaggaggatataatattattttgtgactacaaataagttaaaataaactagcattgagtagtttatttcagtttatttgtgattccaaagtgattttttactcttctatctttccattataatccaacttatataatttagaagagaaataaacaggacgttaaactccacccgtacggtcatatgtgtatgctgtttggggtggtctctaaggcatgcaaaaaattatgttttttttcatgatgtgcgcatgatctattttggatccattcgctatttgaggagatttggcaccgcttcaggtttcggctttaacgtggagatatagtttataatatatatttaaatagtttaacaatatatttttattaaaaataataaattatcaaaatgtcttataaaggtttgtaacttcaccttcacgattttctgtagtatctaattgtctactttttcaacttcatcaaattttctgaagctagagcagttctaaacatagtctagtttgtggtacaatagttctatctactacaatatgacaagtatagatggcaaaggccgcaaggctcaatacaacgtaggcccatcatggcacgacctgtttagggcatgacccgtttggcctagttattattcgtgttaggtaagcgcgacactagtgtccaaccccagatcgaggcaccatactcaggcgtcttggtcgtgttgtcccacacgatggccactccagcactacactcatatgtccacacaacaataaacaaaacagttagaacattgaaaaagcaaataatgagttgtttagtgtaatggaaaccctagataggaaaaaagagcacaacctag

SEQ ID NO: 43235 - DNA, 1533 bp, Zea Mays
agattttgagtcggcatatatctatatttcaaataagtatcggtcattatatttatatgtgaatagcgacgcttcgtcggtcggcaattctcgctaatagcatctcatcgttagtcggaataaagaccaaagaccacagtcgccgcgcacccacgctcgtacactcagctgccgctgcgccaaggagaagctgtgcgcggtccaggcacaggtgcagggtgaacaggaggcggcgacaacactccagaggagggtggatgagctagagagcggcggataggagagggccggtgtgttggcggtggagggcgtggagctgcgcagggcaaacactgtgctagaggagaacaacagggagcttgccttgaggctgcaggacgcgatcgagcaggctactgcatctgcctccgctaatctagctcctaaggttcgacatgccccgtgcctaccatcactctcgatttgaagaagagtctcaagattttgcaggtgttgtgttactcctgattcagttaccttactggcagtaggatgccattgcaacaatctaaaagtgcaatcatctaattgaagctcttttacttatacaagatagatctagaattgttttacttgagattcaagcaatgttggatgtgtctgtctcagatcaattggtattgtgtgtttggtgatcctggtttatcctttgggatggttatgtgatagtatatttgacatcttattttgctggtgagctatgtaattgacccaaaaggcacttcaagcgggcaggaaagtctaaggcccttactaattacttccaagtaagtagagcaatcaccatcacacagatttattcaaggtttttttgtgttaagccaattgttcgttttcatgtaatttttgtccactaatattttattgaataatttgtgtgtcgtcgcaacgcacgatcattgtactagtagtattgaatgctccatttgtagttcttgtgatattacagtactgcagtctaaaatactgaaacattgtacactgtaataccctgaaagactgggccaatcaattttgactcttctttacttgggcatgtgtttattcaaaaaattcttggtagctacggtctgatttggactctatattctatagtttatattgggaaggatttcttaaatagtctactaatgatttggtttttaatttggtcaggagggaggtcctagaggtagcaagcagatcgtggtggtacctatggatgagcgctatagcaagatcaaaagttcttgtggatggatgttattttgttttgtatttctcgaaaagagaaatttgcaagtgaacttaaaattgtgaagccacatgttctcatatgtggttgtactagctagtatctctgaggtttaacaagtcaaacttagggttgttgtctgcttattttgatctttattacgacaagagcaaacttgtgacctttatgtatgaatgcagtacaattgttattgccatgaatgaaaatatgagctatgtttgaccaaatctgtatctaat

SEQ ID NO: 43236 - DNA, 392 bp, Zea Mays
gttatggccatgtcttattcatttcattgggccatgatctatttgtctctctacttgtaaccattcttacaggtggagtctcttttttatattgtcatccttgcccagtctagttgtgtggcgcgagatttctcattggttacatctggtaatggtgttatgactaaaaccgatggtgccgcgatgagaccgagggcctcctgtgaatgtacacacatggttgtgctgctcggcacatgctggtatcatggttagtagttgtaatccattatgagactatatcaatgtgttatcttagcacaatctgtttttgctacgtgagattcattattggtgccagttcggtgatggtgtcatgattaatgacttacggtgccgctacgaaactgaga

SEQ ID NO: 43237 - DNA, 2085 bp, Zea Mays
caagtcccaaccaaaagacacacggatgccagctctctagctaccttgtgcccaaagtgccaaacggccccttaagtcttaaccacctgctttatcatctcccgtacgcgctctccctcggtctctccctccctccctccctctcgctcgtggccacgactgggcgactgcctccgccgcatttcgctaggcgccacacggcccttggccggcgacgagcacccacagaaaaagtgttgctcctacgactagttctttttatgtgtaaccttcaatgaaggattctcagagcacgacagagttgcagtcaccagtgcaaggtactaatgaagtgcaaagtcagcaaccaaactcaatggccgctgatgctcctgctggaaattcgggttccttgtctgtagctagtaatgacaataagaaggtgtctcgcgaagatattgaacttgttcagaatttgatagagcgttgtctacagctctacatgaacaaaggagaagttgttagaactctttctactcgtgctagaatagaacctggcttcactactttagtatggcagaaacttgaagaagaaaactccgagttctttagggcttactatatacggttgaagttgaaaaggcagatcatcttgttcaatcatttattgcaacaccagtacaatttgatgaaatatccagcacctccgaatattccattggctccaatacaaaatggaattcatcatatgccagttagcaatttaccaatggggtatccagtacttcagcagcctatcatgcctgctcccggccagcctcacatggatccaatggcctgcggtctgtccagtggtcatgtggttaatggaatacctgcaccaggtggttatcatcccatgcgcatgaactccggaaatgacatggttttggacaatggagcgcctgaagcaccacatgctggtgctaccggtagtgctatgtcatctgagatggctgtgagtccctcgtcggcggcttcaagcaaccatgctccttttacgccgtcagatataccaggcatgaccatggatgtatcggccctagactcggcatttgggtgtgatgtggggaatcctgaatctctgcaattgggaccagatgggtcgtcaagagactctattagatccttagggcagctctggaatttcagcctctctgatctaacagcggatttgacgagtttgggagcagatctggacgtgctggagaactacactggcacccctttcctgccatcggattcggacattttgcttgattccccagaccaagatgatatagtcgagtattttgctgacgccatcaacgggtctccgtcagacgaagagaaaccgtagtttttccggggttgcatggcatgcattcaggttcatcatcaggcagggctgtcatctcatctcatgtagtgtaaagcagccaatctaactgtgtattcggctcgcgcgcggtgatccggtaatcgggcctctgccactaaaaagaattttgtagcggttaattgaaatcctaattctttggaataagtagctgggactggaatgtccagagagtagcggtcgttgttggcttagggattgctgctggtggatgcaaacctcacagctagctggtgactctgaaaccacaggaactccttttctttttctttttacttgtatctgtatttgctgctacataagtaaacagaagtggggtgtacctagttttctggttctcgagtgtcttgaaacagtgggcgcgggttttcagctgaaagatcatgatattgtgttgttggcaaagtgctgaggacacgcgatgcaaagtttcttagattagccatacacaggaggctgctggagttgatctcacatctcagggtgtgtttggttgaactggagaatagagcctacccatcgtcaatcattttagtggagcaagaacatcccaataatttatagagttcgcccctctttcgtacaaccgttctccactcaaccaaacacacccttactcaatccatctgtgctgctctctgagctcatctttcctagtcaaacttaaatatgattacaaccaaataacg

SEQ ID NO: 43238 - DNA, 472 bp, Zea Mays
attagtcgttatactgctttgaaattgggaagaaggagcgaaacaggaagataaaagagagtaacgcctgaatttggtgagtattaagtaagaaaaaattccacccccaaattcagggcgttacaaacctatcccccttaaaagaatctcgccctcgagattcaaggttggccagcaaagagttcgggatacttggccatcagatcattttcacgctcccagggtgtatgcaataagctatctcatgagattccttgaggatcaactcccgaatggactagacattgggaacacacaagcggtccttgaaccataccacaccttctacatcctctcgaaagtctttgcctcttccttctacaatcagttgccggatttcactgaacttctcatcattcttctgtgtctctttgatctcccgctctaaggtgggttctactcaactgttactcctcacatgttattcagaaat

SEQ ID NO: 43239 - DNA, 1027 bp, Zea Mays
cggcctctcgtctcccgtcccgttccatggaacgggccccggaagcccgagatgcggcctgagactgggagtctcgtcccgaaaggtgtcgggtgtggaacttatcctctaattcccttcattctcttgctttgaagggtggggggctagggcgggccgcactgcgcaccgagcgggcgccgggcggacgacgaagcggcgaggcagtgactggggagagatgtcgggcggcaggaggagggggcttgtgtggagcctccccgtggcgaggtcggatgcgctcggcaaactgggccctgccttcggcatcggcgctggctgcggcgtgggtcttggcttcggcctcatcggaggtgcaggcatcggagctggattccctggtttacaattggggtttggagctggagctggatgtggaataggaataggttttggttacggctttggaaaaggcgttgcatatgatgaaagtggaaggtattcgaacatcaggagaccgttccagagctccagaagcattgctttcgatgagaagttcgatatcatgtttgacgaactgatggagagcaccaggaagctggtcaaagcaacatcaaaggagatcgacaaatggaggcgaatgtagaagcgagcaggggcagcacttataggatgaactgcgtagcgagagaaagcgatgccatcagaatctaagagtacgaagccaaaagttgtcgaggcactctacacgtgcttcttctgtgtccgtgggaaccaaactgactaaaaagcaagttgctcgcttgctgttacatggaatatttttcagcgattcatgaggatgagatactctggcctgccgatgctgatgctcaaaagcattagtttttccagccacgtgctcggtgctgtccatgtgatcgcgacggcgcctggaattgaaatatcacccacgacgtcgccgtcgaaacccttgtttttcgtatccaaatatttggcacttggcaggacatattttctagagtattgtcgtgcccatatgttgacc

SEQ ID NO: 43240 - DNA, 366 bp, Zea Mays
gcaaaggttcgagcttggtgtcgtatttaattccgtaatctacgcaattaaaaaggggttgagaaactcttggattatcaaatctttgtttgctagcaaattttgaactgttcggatcacgctcgtaagtgaatacaaaaatcagaaggcttctgattttatgtaaaatctggaacccacgctatccgaaaagaacaatgcgccagcacattaagtgaatcgttcctctcaacatgtgatcattggtgtttaatcaaatgatcgaccgctggtgaggatcgtaaaaattagacgaaactaattaacagtctctctgtcttaatctgtttcgtctgtcgttagttcgacgtcatttttatctatccg

SEQ ID NO: 43241 - DNA, 1361 bp, Zea Mays
gaaatttggatcattccaaacgagactgtgaactctcccagctcaagcccacctccctgctcaagcccagccgtccactgcctggctccctcgtccggtcgttcccgtctccctcctcgcgtcgcgtccaccattgttcctgtcgacgctgcgccgcacggctcgcaccgccgacagtgcctcagtcctatcgagcctccctcttcccagatcaggccctagctgggctacagccgccgccgccgctgccgcatccgtcaccttcacaccgcgtgcgcgcgcgctctctctctctctctctctttgcgacgactggacgggctaccgcagtcgccaccataggcaccacgcccttcgctgatctattcgctggcgaagaacgctctcaattagaagatcgatggagtgcgtggtgcagggaatcatcgagaaccagcatgtcgatgctcttgaggttctactccagggactctctggtgtcccgaaagagcgttttagggtgcatgagctctgccttaaaagtgggcccaatctaggtgttgtcccatcggaggttcgtttgttgtgtgacttagctcagcccacaccatcctgacatgttggtggtgccatgagaggtgctggtgcggagcaaatctcagttctggttcgtacagttgtggagagcaaagctagcaagaacgtcttgcactacttctacaccctagggtacaagctagaccatgaactcttgaagagcggttttgcatttcgtttccaccgaggtgcccaaatcactgtcactgttacatctgctaacaagatgtcaaggctccatgcaaccgatgaagctacgccagtcactcctgccatacagctagtggaaatcacagctcctgctgctgctgataattacaatgatgttgtttcagctgtcactgcgttctgtgaatatcttgccccgctgctgcatctgtcaaaaccaggacactcgacaggaatcgttccaacagcagccgctgctgctgcctcactcatgtcaagtggcggtggcaaaaccttgtaatgctgctaggacagccaaagtccgttcttgctgctaggacagccaaagtccgttctttgagatgagtgggcgtggctaatgaggtggccttcttcgtgccgagcatttgagcagtcagttttgcctgctagtgttgtccatgtctgacacatcgttgtgccaaccttgctcttggtttgactggttgcatgattgctgatgggtaatgccctgccttgtagttgcagggtgtaacaatctagtattaccaatattaaaatttctcaaaaatccaaaccataatttcttttctcaaaaagaagtttatctcatgtgt

SEQ ID NO: 43242 - DNA, 301 bp, Zea Mays
cgagccatctacaaaagacatcgcaagcaaaagagtgagaacagaattatatgaccagcaaataatgaatcataaatgaatgaaggattagaataaaacataattttcagcaaggtatattatatagtagaacataggtttggtcggtatgaccaacttttgaagggatatcaaagtcaaggcagggacagaggtctatagtccttagacgaccattctattctaggttagcggtcctacagtcagcacggctttgataacacttatgtcacacccggttttagaaggcaaaccgaatgcg

SEQ ID NO: 43243 - DNA, 2169 bp, Zea Mays
atgccgcttctcccggcggccgccctagccctgttcgcgcccccggacgtgccgctaccgacgcacaccctcgcgctcctgctccgccgcctgttcaccacccgctccatcgccgccgcgcagggcctcctccacaagctccaccttccttcgtgcagcgcccttccagcccgaaacctccgcgcacaccccgcgcttccttccttcgcgcagcctccgcacgccgccaagctcccccttgccctcatctcttcccatgcttgcctccgcacgccgctagatcccatgccgcttctcccggcggtggccctagccctgttcgcgcccccggacatgccgctaccgacgcacaccctcgcgctcctgctccgccgcctgttcaccacccgctccatcgccgccgtgcagggcctcctccacaagctcctcgacatcggggttgatgccaggccacagttcctagagcaacaactcaagaaggccaaaggcccaaatctgatgttcgggaggggagatgaaacagaaggttctgacaattcaaagtctaagtttaaggatgatgagcaggatggtaattaggatgaggatgaataaataataggatgggggaacatcaactttgcaattgagtaatgtcacaccagtcacttatgttgcgacccacaagactcatccaccatccaatcaagactgtgaactagaggcatcaagaggttttttcatttgcttgtggttcatcgtacctcccgttttgtgcatgttgtaccacaggtatctagcaggtcacttaagaaggccattggattcaaaactcatgtacgctactgtgacacattgatggtcctgaagttgtggataatgtcaaaggttccctttagatcaagcactggccaccgggtgctgcacgtcaacggccaacaggggcaccgtgcaggtgggcagaagcagccagcgacaacagtagggcacagctttctatcctatatttgcatgttcttcaaagggatgtatatggaccttccaaatacactagacttttgcaagcaaccaaagatactctcagagaagaaggtagaaaatggccgatgtcgaggatatccagccccttgtctgcgacaatggaactgcatggtcaaggctgggttcgctggcgacgacgccccgagggtcgtcttccccagcatcgtggggcgcccgcgccacactggtgtcatggtcgggatggggcagaaggacgcctacgtcggtgacgaggcgcagtccaagaggggtatcttgacccttaagtaccccatcgagcacgggatcgccagcaactgggacgacatggagaagatctggcatcacaccttctacaacgagctccgcgtggctcccgaggagcaccccgtcctcctcaccgaggcgcccctgaaccccaaggctaagagggagaagatgacccagatcatgtttgagaccttcaacacccccgctatgtacgtcgccatccaggtcgtgctctctctgtatgccagtggtcgtaccacaggtatcgtgctcgactcgggagatggtgtgagccacaccgtccccatctacgagggatacaccctcccccacgccatccttcatcttgacctggccggtcgcgacctcaccgactgctcatttgcgctagactgtgtttgttcaaaagatattattcaaaatttaactgaaagattttatttgttgcacaattattgtattgctttgtttgttgaatattatttgcttggtgatgggctgctgttgctgctagcaggattgagaacggatgggctgcaatctattgttggtgcctggtatcagagggtgcacctgttcacaatcttgagatcaaaggttttgggaggtgaaggtctcgacaatcatcaagtcgccaactatgagactataactgtggatgagcttttcagaaagtggcgtggtggatctaaggatgaatgcttcaactgcggtgaccctgatcactacatcgctagctgccccaagacgaagagtagggcagaggccgacaagggtgaccatcactctggtcgacgcaagggcaagcaggaatacacctccggtgaacacaagtccaaggggacgtttgacaaggaggctctcaagaaggcataccttcataaggccaagatcaagtag

SEQ ID NO: 43244 - DNA, 2269 bp, Zea Mays
ccacaccctacaccaccgaccaccgtctgcgcttcgcccccaccccacggccgaccatcgccatccgcatccaccactatgtcgcgtgcctcctctcatccaccaccgttgccccctcctcgtcgtcacggctgcccgttgcgtcctagctccacaccgatgatgacgatgaatactgcgcattctgcaagctcagccgctcggccccatagatggaaggtccgccacctcctcccgcgccgtcaatggaaggaaagcctaatctcctcgcccgcagtcctaggaaggtccaccacctcaccacctgccgcgccgcaacgtcaatggaaggcgtggttggtgcaaggagattcttctctgcgacggcaacgccaccagctccttggaggtgttgcggcttctctgcaactacacatattttggttagccttactcaacctttgcatcctgtcttacttgctttctctaactgtagggatttctcgagttaggattgtgtttgcttctgacggtgggcttaactgggtgctatgtgttactgatgtgctattgtagaattagagaactgttgggtgctatgtgttactaatacattgggaattagggaactgttgggtgcttgtgttactgatgtgcttttgtagacggtgccattttttaagtattctcaactatcgagggaggccagattgacatcatcctaactgaggttgatcgatggtgtggtgttcaccgtgaagagcctacaaggagctcaagatcttgtaaaaggtctgttttcctaggattatagttgttctttccattagcgctgctgctacgaacaggatagggtacctgctgctgaaaagcaatcctcttcccaaaaagtctcgagaagctggagcaggttctaatgcttgtcctagaaaagtgacttccaatggtccttaaagctaatgctcgctttttgaaatcacaagaagaattgagaaggtcagatgatgggtcaactacaattggtgatgcaaaggaagaggttgttgcagcaatcattgttgtcaagtcgtctactctatttcagtctatcatacgtggtaatttgcaatatgcttctctaagtgcactaagaaggctttcacttgatcctggtaatcaaacattcctccaccgagatgtgcaaggcaggctatgaagtgctataccatggagaggttggtagatatttacaagatgtactgccagaggggtttggatagctcaacaaattctgatgatttgagtggttatctagaaaaaatattaagatgtctgtatgaaaaatattttaggattttgatcttctcaacatgttaaagaaggaagaagaaatgcttctagctgtaaaggaaaagaacgtcgaaggagctcgttgaatatggcgagcaattgcttgggatattccgtgaggagcttgcaggctatgaagtgctataccatgcagaggttggcagaaactttgagtcaccacaaataatgactgaaatagtagtgaataaaaaggaagcaaatagctgattgatcaagttgtccattacttggaggaaagattgagagaattcgatgaagagaaaagaagaactaaataagtgccaacagctagaaaaacagagaagatcacttgagtatactattttggaccatgagcgcccctgcgtagctccataagttccaccgccaccaccaggccctcaaggtggaaattctaggaaaatctaaaaggtttttgatgagatctaggaggagaggacagccatggcgctcacgtggcggcctccctcttctcgtagaagggcaagacaaggtccaatcaggaagtcgtcatactctatcagggcaactaacaagagaccatgaagttgaacaatgttttggcaagtgttaatttgaaattcatatgattgttcacgtcatatggtatatggatgatactgttttgggcaaaaaccaacagagtccttgtttgcacatgtactattcagtggttattatttatttatttattcacatcacatataaccaattagtgtcattatcttgcgaggaggacatcaaactatcttagagagtagatgttactgtttaatatcaatgcctactggatagaacactgtattttcagttataacatggtttatggaatatgtgagctaacatgcaatatatggcatctgtatcatttcaaaattttcatctgcttctcctgttccttggagcacaatggatatatgtgttgctttacccattgctt

SEQ ID NO: 43245 - DNA, 2094 bp, Zea Mays
atgaagggcggcggcggcacgacccgcacacggaagaagaacgacgacagcggactgctgaagaatggcgacacgatgcagacgacgcgccggcggtccgcgacggcggctgcagcaggggagatccgggacgccgtgacggaggatgggggagatgcttggaaacgccatggtgaaacgcttctgttcatcgacgtggaatctcgacctgcacaatcattaacttgtgtcagtagaaccagtctgcatgagatcgagttgtccatgtgtgctctttttagtgggatgatagttaatggtgcatgtttgcttctgagctggcatgcagagacactgctttctcttgaattcatccattgtcagctttatcctaccgtcatggataaaatttgcatgagtgtgtacctgaagggatctcaaagccatggaatccaacaatttagtattaagtcgtcacaaatctgtgaaaccaagcctctgaccatctcttctggtctgttcaaaattttgtcatctggcaagtcgttgcacctgctgtcacttcgtgatattaagatgcagtcaccatttgctcggatgattattcacactcttctcgagtcgtcatgtgatttacacacacttgagatatcagaaaacaatattgctggctggctttcggaattgaacaaatgttctacaaacttattagcgctgaaatcagatatttttatgaactccctgtctgttcttaacctgagggaaaataatttgcaaaaggatgatgttgtagatcttcacaaaattctaataaaaatgcctaacttaagagatttagatataagtggcaatccagtcatggatgaaggtatcagatcattgatccctttcatttcatggtctattcaaaaggaaaatccacttctgagattaacagttgagaactgtgagttgtccagtattggtgtgattatacttctggagtgcctcacaaatgcgaagcaactccttgatgtgctatctattgcagacaatcatctagggagttctgtggcagctgcattggccagattcttgggttcacatgtacgggctttaaatgctacagatatcggcttgggaacagtaggcttccaaatacttgaggaaacattgccaacagaagtagctctttcccacatcaacatcagtaagaatcgtggtgggatcagagcagcatattttgtttccagattaatatgtcgagcaccagaccttgtctcagtcaatgcagcagggaaccttttaccacctgaatcattggaagtcatctgtaactccttgaagcaagggacttgtaatttggagcgagtggacctgactggcaacatgcatttatcaagcaatatttttcctgcattccttgaattcaagaagcatggaaagccaattctggtagtaccaccaaacttgagcacttctgctccatatgatgatgacccatgactactatgtaccgtataagccctagtgctgctcaagtcacttcagttggaactaaataaatagtgatagtatttttttggatcattcccaagaatcctaaccactagatcaaaacacaacacaaattgtacatctgtttagattcgacacggctttcgtcggtgaagctttgcgctagggcagcgacggtcgggaaagcgagcttgatgtcgacggtggactttctgttgctgacagacttccctctagatcggttaaggtttgaggtggagatcgaaaatgattgtgaatcttgtacctttaggtgtcggcctccacctctttatttatagggctacgcaacagatgctcaacaaccttgatgctctcgatcagggcgtgaggtcaggggtctagttttcggttgggtcaagttgggtcaactagtggagatcaattctaacattttcccctttaatctcattttataccttcagctttatacctttaatttttttgatattccattatagataagtgcatagagcatgtttcatcgtcacgattaatcaccgatagacttagcaactacagtacatatctctatcctgaaatagattctttaactttgggccttttattgttcggaaa

SEQ ID NO: 43246 - DNA, 226 bp, Zea Mays
ggcagctagcgcctaacaaaatgcctgcgcacttgacagttgcagtccgacctaacaaaatgctatgatctgtaatcagccagtacggcagtaatcttatagccctcaaccaaagaaacttgcatacatggtaaggccagaaaggtaacatcattcaacggatggcggcgtggaggctggaactggaaggagccacggatgggatggccggatgggcggaccgcgg

SEQ ID NO: 43247 - DNA, 3454 bp, Zea Mays
gcaccgtgcacccgccttcgccgcccgttgccgagaaatctgcgccggtcaccgagaaatccgccctctcctagccgcccgcagatggaaaccctacgacccctccctcccctcaccgcctccccagcccgcagtctctcctcaacctccctgcctcctcataaatctccttccttccctcaatcgcacgccaggaatctcactcgaaaccctagcgcagccgaaccccactgtcgtcttcttaatcgccatcgtcttcgtcgtgttcctcccagggtcgggcatcatcgagaggcccaagctgacgctcctctcgaaccgcgtgggagagggacgcgtcagaggcaggattgaggacgacagccacgacgagcgatctgtggactatgggagcgtgccatgagatgtacccattggcttttacgccgcctgtaccaccggaggaatcgccagctgtgggctcacccacatggtcgtcacgacgctcggcctcgccaaatgcaacatgcagatatgcatggggtggtgagactcatcacagtgttgggaaaataattgacatcgagagtgatggcctgctcaccattgatattcctaattgggcaacaccatggcaggcagatccatcagacatggaaaagattgagaactctaatgtgagcaattggattagagtcaaagcgatagttccttcacccaaatatggatgggagaatgtgactcgtaatagtattgtgatagttcatagtctataggatgagaaaatgttatgtaattctgaccagcaggtaaagattgatgtgtagctaattataaccattccgttacatttgaatatctgactaacgagaatttagagatattttccatggagctgcaaaatgcataagatctttttgtgggcattttgatctatattaatgttgtaaaaaggtattttgacaattcttttaactggaaacaatcttcattcaattggcgacctgtagtacaattatatacctacattgttattattttacataattttttttggactgatatggccttgaatgtcctttatattcactcttgactgttacaagtgtcatctagctagaaaacacatttgtagtgtggtggttggtcaccaagtagtgggaccaactagctgggtaataacagtggtcatcgaccttggttaccctatgccctatggggtgaggctaggactcagggtctaaaaattagcataacatctttttgtgggcattttgatctatattaatgttgtaaaaaggtgtgtttgacaattcttttaactggaaacaatcttcattcaattggcgacctgtagtacaactatatgcttacattgttattattttacataatctttttttggactgatatggccttgaatgtcctttatattcactcttgactgttacaagtgtcatctagctagaaaacacatttgtagtgtggtggttggtcaccaagtagtgggagcggagatcggatctgcaaggagctgattccttctctcgcaggtgagggtgcccttgctttcttcgatggactcctcatgttattctgtaaatctcagctttgttattagcactaaatcagatgtttctttcgctacttggagtcgtgaattggtctagcaggtaagcatccaaggaatatttttagttcaactttcagcaaacaatacaatcgttacctatccacttaccaaatggtttactctgcacgtgttattatcttggttcaatcctacgattaggtttggaattttggactgcttggtaaatcctaaattacacttttttgtaaatatgtatcttgatcaatatggattcttgcgacagttgatatccaacgataatagtttaggtgcatgtttaaattaatagaacaaataatataatgaaattgttttgctggatttgcttctcatggttttactctgcaagtttaacctgcaaattttcagtaattttctgtaccttctcgctggggtggagcggagatcggatctgccaggagctgattccttctctcgcaggaacttgatcatgttgtgcctctgatcagagctttggctcttcttaattctcatacttcttctacctcaagttggtaggctcaagactcttgattcactaaagaatataggtgtaaacccctatcctcataagttcctggttagttttgagcctagaggaatatgaatgctggctacttactgataatgttttcttttgtgtgcaaacatgtcctctgatgcttagggttttcacaaggcgaaactttgttgcaaatagataaaaaccttcccatcttgcaaaagggttgaagcttggcctctacaatgacgcggggacacaaacctgcagccaaaaaatggcagtatcacttgatcatgaagaccaaatgtgaaaattttcatcttgggctaaaaaatgctagtatcacttgatcacaaagagcaagatgtggaaaaaaacatcatgggtaaatctatttatgtttatttcctgacaactgtgacaagtcaacagtgacaaaagtatctgatcgtctcttgttctaagttcctggtattgttccaactcttcttcattctatttaatatctgatcatctatttattgtacgtactgattaaaaatatgatgactataataatgctggtaggagtgtgacagagatgtaaacaagaacaatgattccctgagttgtagttggcggggtcagagtcgatgaagaatctatcatcgttaacccatgtccgccagaatgtgacattgaatggagtgactctgtgctagatgacattgatcatgtagtctcaaacatctgagacgatatccagtctatctgagttgtgttgcctgatgtgatgtaggtaatccaacttgctgcagcaggcgaggagcgagtgcccctgctagaagagtgctagctctacgcatacggtcgcttgacaaacatgtgttgttaactgttgtatacaatgttactaattattgtcctttattctcttatgctacttctgtagttgatgctcacattgttctctcatttccgtctaaattttgtatgttatgccaaaagaccatatgttttttgtagttttttttaaaaaaaactagctctctgtttttatgattgtgtcgtcgcaacgccaagccctctgccgcctccactgttcgccctgccaacctaggtatgcgaatctccaatccatgtgaggattcagagctagactagatgtagcttccggcctatatgattagttgtacttgtattgtaatcgatcagtgcaggcaccgcagatgtgctgccgtatgtggggagcagacagtcaatttacgtctaggtctaaataaaatagtagtgattaaatctttgaatctgtagatcaaaccatctcaagtaattttagttttgttatgaaaattttt

SEQ ID NO: 43248 - DNA, 358 bp, Zea Mays
cagctctcttcctcgcatccatggccgccgtgtcctcccctacaggcaaccaagctccatctcccagcgcgccctggtgttcgctcgttgctgtgcgcgcctctgttcctggccgtggtggtgttgtggcatggcaacgtcgtgcgcgtcgcggcagccgtcctggccacggaacagtccgagcaataaagctcgcccagccgcgaccttgccttgctcctcgggtcactgttcgtcgagctcatcgaacacttgccttatcctagccaccgttcgtgcctcctcgaattccctccctggccgatcgtcgtgtgtgctcgcactcagttgcgcttgcttgcatccgcgtcattcttcg

SEQ ID NO: 43249 - DNA, 985 bp, Zea Mays
acttggtactagataacatgaaagagtagcttcgacgtagaagaaactttggcgcccttcaaatcccatggccgcactcggttcttctgtcacatccagaggcttggcactccatacctccgtgtgtgtggtttttcttcatcgtcgccacgggaatccagtgatcccggccgcaccgtctcgtccccagcgaagtcttgcgagtgggttaacaacgagttcttcaggcatgaacaatgccttccctattatcaaaggaactacacgcaagtttcatgaagctacgacgactgcacaaacccggctttgtttatgagagtttgatctgcttttggggttcacagaattcctgcggttggtcctggccctgcaaatccgccaggaggaaacctaccgatacccagcagcatgcctccgtgggccaagtgggtggccggggccgtcatacttgcgatacctatctacaggaggttcagaactttagaagacaagatagagaagacggcagaggtggccatcgaggtggtcgacacggtggcggaggcggcggagaaggtcgccggcgaggtcgccggcgcgtttcccggcaacgacggtctcagggaagcggcctcgaagattaagacggtcgcggatgagatcgaggaagacgccgagaaagccgaggccctaatcgagaaggttgacgagatcaagaaagaggttgattcaattgtggatcctataatcgacaaggttgtcaaggacaaagaaatatagagacaggtggtgaactgaagatgtaaacatttgttgggctggtctggttaggaatggatccggatatttattcagatgttaaattactttcgattgcaaacaaatatgatatataatttgttatgtaaatttatattggtgattttagtattaagcttatcaagattcataaaatttaaatatcaaatatgttatatatcattttaaatatttgatttaaaattcg

SEQ ID NO: 43250 - DNA, 1357 bp, Zea Mays
ccattacttccttggaattgagttctacggatggaactggatatacaaaactttatgcagaaccctcagctgcaggagtttgaattccagaactttccgacttcttacctccgctgtgctgctcatcgtgttgcacaacattatggcttagagactatagtagcagatagtttagtagaaggctcagttagcaggattgttgcaagaaaaacagcagaaagcaggtatcctgcaatttttttatcagaagttcctagcaatcaagcaagaaatgatcatgaaacagctgagaagcttaagtttgtcatttatcaaaggcccaaagcattccaaaatggaagcgctgattctagaaacaagagtggtgtaccaaaaactgttgatgagagaatagaggaatataataaagcacgagcacgcatcttcaatggttccatttctgcagattctgatgctgcaagtattatgggaactctttctactggcaaagatgaaccagtaaatgttgacccttctgttgatgaaaccaaagtcagcacaatgaacagtcgttccagagttgctgtttttaaggatactgaaaaggatcgtagtgacccagactacgatcgaaactacaaaagtttatgcagtatgacattggttatgtgcaatctcctggcatgtccacaaaccagcatactatgtactttggccagcctgatctaacaatagggtcttctggagctgctgtttatcgacattggccaaccccaacaatgatgtatccccattgctatgataatgttagtccaatgatgtctcaggttcctctgtaccagtctttcaaccatgattaggagattctgcttgctggaaagttgggaacaattctctgttgaacttgctatgttgtgttgtcctatgttaagtggagttcctttagattcgagccgtttttattacaaaaaattgtataaggagtcctaattcgttgaaactatttcgtgaactagtctggaactgtgatgcttgtctaatgtctagttctcgtttgcaatttgctcccggtttatagttagtagtgtgctgcgactggtcttgaaccgtgtcgcgtggtcgtactggtagaaccaggttgctacttgccagcagtcattgctttgattccgattttttatttaacttctttttaatcaagtatttcaaataatctaccctagaagttacttttacatctagttgtgccagaccacaaggacgacaaaataagattgttaaaatatgaaatgtaaatagaatttgccattgtttttcccattgagtttagagttcaaatgtcacaccggtatattccttaaattttcttatattcctc

SEQ ID NO: 43251 - DNA, 2077 bp, Zea Mays
cgcccagagcttctgttcgatgccccctccttcaccacccgcctcgcaagtgcgcacgtgcgatgctggcgccgcgcagtcgcccacgcgcgggacggtgagtgagatggcgcgatacttccgcagcagcaacctcgcctctagggtcttcgagcgtcagctcatctccccgcgccctggcgctaccgttaacactattagacagttctatgaaaatttggtcccaagctatactatatatgacatagattgcccagattattcgtttcgcaagttcactgatgatgggaaatattttgtggcctttagccgaaaccatcaagatttgattgtataccgtccaatctggttgacatattcatgcaatgaagaatgtgatcctcatgagcttccgccaaaggcaaagaagtttgacagcttctttaagcagctttattcaattcctcttgcatctggcaatgagtatatttgcaaggactttttcctgtacatggaatgccatcgatttggtttatttgcaacatctactgcacaaagtaacgaatcaactgccactgagggtgcaatacatggggtgccattaattgagaaaataactttccatcttgtgaggctagaagatggtgtgatacttgatgaaaaggctttctgcaatgattttatcaatctggcacatagtattggtgcttacatgtatgaggaccttctttgtattgtttctttgcgataccaaacaatacatatcctacagatacgagattcaggcaaccttgttgaggtacgcagcattggtgcattctgccgggaagatgatgagctatttcttcactcacatgttcagactggttatgcgggttcctttcttcctggcataaagcaacggttgttgtcgtatattttttgcaagacgtggaatgaggttccagatcagactttgagggtccaacatctaaagaagttctattttcacttccaagattatgttgatcttatcatatggaagtttttggatcgccatcacctatttgtcaagttcggtagtgtggatggaggggtttctcggagtactgaccaaaacctagctttctttgccgtgtacaacatggagacaacggatatcgtttcacttcatcagaattcttcggaggagctctatgccttgtttgaacaattttatgaccattttcatgcaaacccacaagcttcatcacatggaaaatttatctcctctcattccaatgatattcatgctctggatcaacttcgggttataaaaaataaagcaagtagctcctcacagtttgtgaaaaagatgatgacgtcattaccttacacttgccaatcacagagtccatcaccgtactttgacctgtccctttttaggtatgatgagaagctgatttcagcaattgatcggcatcgacattgcacagagcatccaataaaatttatatcagtgaggcaaaatgttgtcaaatttaagatcaagccaggttcagattctggtgcttctgacagcagaataaaaagaatctcgtctttcttgtttcacccatttttcccgcttgcactttcgattcagcagacttatatgcagccaactgttctcaacatccatttcaggagatagaaaagtaggggataagatccattgtctggcggtgagaatggctagtttgatttctcttccaaaacaaagtacaaaatgcaaatgggctcaatattcatctattgatgtggcttcatgggctcatcagtcatcattgcggcttcacagtgttgatctatgctttcatatgcctagctcggagtgtcagatgtgcttgttattggatttgaggcataaggacacgtatattggatggcatggagttggtatattggatgcttcatgcttgaggcgagggtgatctaagctgcgaatttgttttcgaggatatataggaaatatagcattacaaatagttttgagttgtcatattatgatgaagtaactactatttactgaaactgttatgcaaagataataattatttttctgtgttcaatatattacaaaaaacttcataatctacaa

SEQ ID NO: 43252 - DNA, 1061 bp, Zea Mays
cgagatttgaattcaaattttaggtttgaaataaaagggaaaacaaaccggaaaagaaaagaataaagaaaaaaatggaaaacggacgttggggtgaattccctacctcggcccatcacctcttctctccctgcgcggcccaagctcactatatcagcgccgataggtgggcccataatgtcagcctctatgcgcgtccgcggtagcaccttgtcttgaccgtggggctgaatcgtcagctgctgtgtcctccagcgctccactagtctccgtcgtgtgggcccgcttggtcaacactgtttatctcctacgcggaaatcacaacgtcggcgagctggaatcgtggcgcaacccaatccctctcctttgacccagattgtgggataaattggagcctcgggaccaccctgctaaccaacgaccgagagcccgagctgtcttaatccctgagaagtcgcctgtcgcacaaagcttcaagccgagggagaaacatcgccacagggaaaaccctggttcacgccgtcgggtggtcgtgggaagcagcgcaggagcttggccaccacctgggggatctgcgcgtcacgttattgcgcggagtcgcggcgcggatgaaattgatttttaatacaaaaataaattcaaaaacttgtataaatcatattaaattcattttagctccaaattaattcattccggtggcattaattttgttttaatattgtttatcccttagtaactttgtttagccatgaaacttgaactaaaaatgttcacatgagttatgctatttcaagtacttaataacttcagaaattcataacttaataaccgtagctccgaatttagtgcttcttgttcctacgatcccgttacgtagcgtagaatattatcatgcattatgttctactgtttggtgtgatgttaatttctgctatactatgtttgtttgtattgatgcgagtagacgagcaagctactaaggatctgggggttcagcaggtggagactgttgagtaggagctcgttgaaggcaagttgtgcccttaatcacttccttttta

SEQ ID NO: 43253 - DNA, 892 bp, Zea Mays
gtggtggcatgaagccaatgaagctattcatggccccttcagagatggctggttcaatgcattgggttgttgacaaagtccctgatcaatctctactgaacacagctaattggaaatttatcattcctcgtttatactggaattacccaaatgacgatatactgctaaatatctcaatggcctcatccccggtgataagggttacatcagaaaaaattgaagctaccattaatggagacatgataattgatgttgtagataacaaggagatagttccagttgcatgcatctcagtgattgtcagtgcttcaggtgttgtggatgcatcaggcaataaagtatatggtagagttggattagataatttctcccttgcgttgaagtggagtaaaattggcaacttccatatgtctttgattcagggagtgattcgggttctcctgaacacagtatgcatgccgtatttgaactcacggcttgggaatggattgatcttgcccgtggtccatggtttcacacttcaagacgtctacgttttaacctctgctgagcagctgacgctttgttcggatgtcaccttcaacgcaagcagcatggcgagtttattatgatacagggaagtgcgtgtctggcgtatttcatttagcgttgaagtacaacactcgcacatatgtgtacattatattgtacatactacacaacatctcgttataaatattgtttacattcaattctaccaatccatgaattcaaacatctgtgtacaatatcttaggtaatcaaagttatccacagcacaaaatcctgtacagctctggaatgggggctggataagataaacagcttatattaatccttatgaaactaggagtaaaggaatcgtaaaaaaaag

SEQ ID NO: 43254 - DNA, 2116 bp, Zea Mays
cgcatatgcacacaaagggcaggaccgcaggagcacacacctcagtgcgccagcgttctgcacctcgctagctcgtcgtcttgcctgcgctgtcgtcgctgatccttgagatctgcagactccatggaggctgcagcagcgacgacggcggcggcgcttcttcctcccgctcggaaggtgttcatcctgcccctgcttctcctcctggctgcatcgtcgctggttccacgagcttcgtctgatggagcgcaatatgattatagagcttacactgagtgcaaacctcaccctgagccagctctgtacaacggtggcgtcctgcgctgggcgagcaaaataacggacttcagaacggaggacgaaggcaactactccccggcatttgtgctctacaacatgtcggcggcgactgcgtacagcttctcttgctgggtgaaaatcgacgggccagaaagcgcacacgtgaaggcgaagatactgaccgtggagaacgcagcgtcgcagtgcgtcggcaccgctatcgcgcgcaacgactgctggtcttttctcaagggtggctttactctcaactccacgtctcaaacctcggtgctctatttgcagccattctcacccgatcagtggaatcagcacagggaggagcgtatccaacagattcggaagcgtttcgtgaacctgcatgtctccgacggcaacggcagccgcgtggtcggggcggacgtggccgtgcaccagatcaccagagacttccccttcggctccgccatcagcaagagcatcctcgggaacgggccgtaccaggactggttcaacgcgcggttcaacgcggcggtgttcgagaacgagctcaagtggtacgcgacggagccgtcgccggggaaggaggagtacggggcggcggaccagctgctgcggttcgtgcagtccaacgacgtgacggcgcgcgggcacaacatcttctgggaggaccccaggtacacgccggcgtgggtgaagaacctgacgggcccggagctgcgcgccgcggtggcaggccgcgtccagagcctgctgtcgcggtacaagggcgacttcgtgcactgggacgtgagcaacgagatgctgcacttcgacttctacgaggaccggctgggcggcaacgccacggccgacttcttcagcacggccaggcgcgccgacccgctggccacgctcttcctcaacgacttcaacgtggtggaggcgtgcgacgacctcagctccagcgccgactcctacgtgtccaggctgcgccagctcgccgacgacgccggggtcaccttcgagggcatcgggctggagggccacttcgccaagcccaacgtcccctacgtgcgcgccgtgctcgacaagctgggcacgctccgcctgcccgtctggctcaccgaggtcgacgtcagcgccgccttcgaccacgccacgcaggccgcgtacctagaggacgtcctccgcgaaggcttcgcgcacccggccgtcgacggcatcgtgctgtggacggccatgggcgccaacgccacctgctaccagatgtgcctcacggacgccgacttcaccaacctcccggccggagacgtcgtcgacaggctgctgggggagtggcagaccaaggaggtgctgggcgccaccgatgaccgcggctccttcaacttcagcgccttctacggcgagtacagactctccgtcacctatctcaaccgcactgccgacgccaccttctcgctgcctcgcagcgacgacactaagcacatcaacatccgcctaccgcctggacctgcagcctgatctcatgcatgggatcggtccgtcgagtagaaatgtactactagaatttaagaactaaatatattgtggtgcctcagctgtgttaattggtacgtgtcactaaaaaataagtccgtggactgatacaactactactatacgcgcgcaactatctcctgcttgacctcttatgatgaaactagtgcaatgagtgtgttgtgatggtacacaaattattcgtgttagtgcacctagcgcgtagtatctttaaaaactctgttgtagtcaaccatgcttgtatatgaaagaacgcaagaaacgaaggatgatgtttaag

SEQ ID NO: 43255 - DNA, 824 bp, Zea Mays
gctttacatgtcttcatgtcagtggtcgtcaaattttctccagtattgccttgagtagctgcagtggtgaccacacaagtgaacgagatgcaaacaaggcaggtaagctactgcaaatttatacaataatttattgtcaagaaacggacgctagattactgtgccggatagatcttagcaggcaaacagtaggagaactgatgtaaatgagaatacaaagttcttcatgtgaggtgagaagacaaagttcttcagataaacagtaggagtataaccagggagtgtggattttctgaatctaaatggaaaagaggggatatgtgttcttcaaactattcagcaattaaactgttcaaacatgttactgaagattggcagctgaaacacatgatcaccggctgaacatggtaggtgtgaaaattaagatcaccgactgaacagtttatgatcaccagctgaaacacaagatctgggaggcgtggaacatggtagctgaactcttcaaacatgttaggcaatagcaggcaacaacagtgaaacacaatcatcaactgaaaagctgtccggcacctgaactgagcaaatttggttgcctggtagagggaggtctaatggctaacgctgctattcaattatttttttactttagtttgtatcctccttacagatgttggatgaaagcaaaccttcattttttgtttagcaggcctactaaaacaagcttagtgaacctgggtgaacaacatgcactgattcaaaattttattttcattcattgcatttagcttgccttgatgaccctgtcattttaatcacagtcttgg

SEQ ID NO: 43256 - DNA, 1182 bp, Zea Mays
ctatttccctttcaattatctaccttgaacttggtcttttacttctttacacaatctttgaccatgttggtgatgctacacaagcattcaacctccatattcataaaatgatgaataatgatcattcaaaggtgtagccaatgattctacctctgatcgttctcatagcataaagtttatccatcatcctccattgaatgatatgatacacttgatgtcatcatgtggccttgttgatttaataaatcgcaaatttgcttgctcatcaccgttgccttggtccattagcgccaagctctctactcatgtctcaatggcatgtgattcattgctcacaagcctctagcttaccctttacattcacaacttagttcgtcatagacaagtcatatctcttgatcttctccatgtatccacataaaaccatgtcatttctcatatgtaatgagctcctttatcacactagttgagcatttgtaacaacaccaagctatttattgacattgacacaagttgctaacactagtgtatatatggactaatcttctttgcatcttgaaataaacatgtaatagtttcgataagatatcactcgattactaaaatcaaattaaaccgatgctttttttgtaaagtcccatgaagaaacaattcacaaacttgttgggctaggatagagtgccctagcagtctaaccaccagccctagccggtcagattactatccctatagcagtgttggcagcatgccaagttgaaatttactcgagcacattcttagttctatgggcagcgcgtccacctagactaataggtattgctatttgggcagaaggctcacatgctagtgtctgtcatccagaccgtggcttgctactggtcagacctctgcttggtgctgtagcgtgtatagtcttcccatttttcaaaatggcatacatctttatccagcatgtaaaacctaaatttttgggggtgtgaaaacccctctttagagctctctagtgactctagatttatctagtggttaatacataggagaagatgactaacctgctgttgaacatatattctattgttagagctggaattgactgttggagaccaggcaacttgactgccagtcctagccagtcagaccaattggtgttcagaaggttagaagaggtgattaacaactcat

SEQ ID NO: 43257 - DNA, 2491 bp, Zea Mays
ctaaactttcccccctacataatcggcaatagtgcgggctgcggcaccgcagcagcgccatgaacgccgtcgaaccctccgccgccgccatcgccgaagaccccattactccggccgcctccgcagccccgtaccctggccgcctccgcgaagcacttaccgccctttccgaggcttgcgagtccggcaacttcaatgcttccgaaaccgcctccttcaccatctccgacattcttgacaccgcagccggcgtaagtggcgagctcgatgacgggagcgacgacagccaagacgcgtcgaggtcaggggcctccgaagtgctgcttcgcgaggtgctcgagttcctctctcgcccgtcatcgatctcgaaccagatggcccttgacgcgctctcgcttgtgcttcccaaacccgtggcgaagctaggggctcgaatggggagatgccgggatgttgccgcagctatcctaaagttcttcgtgacgaattgcaatccgagggacatgctctccatcctctgtgaggcattagatgcaccaatggagctaccaaatggcttatccagttttgttcttctactcgatgcacttgctaaaggctcttgtatcacgaagcagacagcaggatattctctctgcttgtggttcagttgtttttcagagtttcagatttcttaaaactagtggattcacctatcgtggcctactaactggcagtgatgtcacagctgcaacggttgaactttccaaagaggaagatgctgattttatggagcatttttcctttgctatggatggtgcagcactttcagttgtgtggacacttatgcatgatgataaagatatgtcaaagtatgctggagaagagttggaattagcagtaaaggaagttcagggcaaccatatggaaaaatgggaagcaattaacatgcttaaatatgtcctatcctcaattcattacccatggataatcaaatcccacagtttaaacttaatgctgattctatccggtgaagatcatgttgaagagatcaataatcatgtagatttcacatgctttgctcatcgcatttttgaaacactcaaggccattgaaagcgttatgattgctgcccctatggcattggtgcggaaaaaagcatttgctgctttgaaaaaggttatttcaatggtgccatcatcccagagatttgacatcttacatggtcttgtaaacaatagtacatctccagctttgactgcaattctccttgatctagtgaggcaggaagtttcgagagagagtcgccaagctgacaatgattgtattgaagacgaaggatttcgaggtaatgggttaccgcgctgggcatctcatgcacttgagttagttgagctgattttgaggcctccagaaggtggtcctccttgccttcctgatcacagtgaacaggaccttcgcacaggggaagtgattgggactggccgtcgccgtagagccgctcctcgcctctacatcttggactctttccggcttccttccttggctacatctccagcgcatgtaatatcagctctaaacttgctaagatttattctgataatagattcaagaggacaaagatctgcaaaattgtttcggaaagagacattgcacaaggtgcactcggagtggctgaccccattaagaccaatcgcggagcaaattcagttggaaaatgaaaaggatgctgatgagattacaaaacaaatagtgtgcatgttaaatcttgttcaactggtgctataccgctgcatcgagttggtggaggaaaagatgaaaggctgctaatgtttttggtacctgtcatttctatacagtagcatctgctgtatctggatggaatgttcttgaggatataaattccatcttctcaggttattgtatatttacatggccaggaagtctggttttatttaaagtgtgcataacgtattcacaggaatatatggtgttattatcataaactaacaaataggatgtggttaacccgtcaccggttgctccggtagcctctatgacaacgtgcgacacccctgattgcacgtaacgagcgcctctgaccgtgtgtcatgagtgcctcctgtgtactgtacattcagcctagatggccaaattggccgaccggcctgtcatgacacgggcctgaaaaatagaacagcttgatatttactactagtagctaacgcgcgataatttatttctttgaaggtgtttgataacgagataattggattttcagtttacaaataattatcatgaacaattacagtgagttgtgatcttcaaaataaaataacaatcttcgaacttggtttataggaacagatgtgatcctaactcccaagtttgtagatttgacaaagtaccaagataaatgtcattcaaaattattggtttgacaaatatcttaagaggtaacacatcattagtgcaataaaaattaacgataaaaactaaaaaaagaataaga

SEQ ID NO: 43258 - DNA, 1473 bp, Zea Mays
cagtagcaatgatgcttcgaggctgacattctggctctccaacacagttgtcctcagggagataattgtacaaagttttggcatctcacatcaatttactccatccatgacgaatatgagcatgaatggtggtgccaaaaaacttgatgggaaatctatgacaatgctgtggagaaacaactacaatggcatgcaaggcagatgccagatgattggcacgaaacaagtacacttttgtctacattagagaagattgagtcttggatattttctcgcattgttgagacaatatggtggcaggtgatggagcagtgtgtagcccgtttggatgttgccatgtttaatgccatccttcatgaatcagcaagtgagataccaacagaccctatatctgacccaattgttgacccaaaagtcctaccaattccagctggtgatctaagctttgggtcacgcgcgcagctgaataactctattggaaactggtccagatggctgacagataagcttggcatagatcatgatgactttgaggacataggagatgttgaagacgaaagaagagctgcagctgaaacgaaatcatttcaacttctcaatgagctaagtgatcatctattttttagtttttcataattttcctttcatggcctccttacatgtttgatttcctatgatccatgagttgccaatcatgataacgcggtttcactatgtaggagatgaacaaggatgctgtcacaactgatgctatcggcagtatcagaacttgatgatgcttgtagactgttcatggtgcttgtagactgttcatggtgcttgtagggatgatgtatgtctatggcttactgagctccaaccaactatggaaggagcgttagctaggacagcagttagtctaacagttgtggacaaagttcagtataccatacactgaagcgcacccttgttgctaaaggtgtcaacagctttgctcagcagaatggaggatcattgtcactagcagcaagacctcaagcccaggcagagagcaaagaaggatgatgcactttccaacctatgtagcacgttgggacaactcaagaaaatggcagtggatatggacatagaaattgacaggcaaaacaaagtgctggttcctttcagcgacgacgtcgatgaactgaattttagactgaaaggcgtgaatcagtgtggacgccagttgctgggcaagtgatatggagccagaattcgggcagtttggagactatcgcctcgattgcagaatttaagaacattgttgttttacatgttttttgcagtgaatcaggccacacatgttgtattagtgagagaatgatgatttattttgtattattaaggatttcatagattattttagttttccctgaactgcaatcgtttcaataacatagaggggactaccttgaatgacatttaggtgaatttttaaggtatgtccattattcc

SEQ ID NO: 43259 - DNA, 670 bp, Zea Mays
ttgcctaactcttaagagaacagattctgcacagaattatgagactgaaaaactgctataatcaaactgccataactttctgttctgatgtccgattgaggtgttcttcgcggccacggaaagatctacaaattatctacgactcatatatagactttttatttttttgaggccactaagaccacggaaaactggcatgaacagaaactgtcgaatctgccattctgcagaaaactaaattcgagatcaaaacctaaccccacatctaatccaacctctaatcctttaattcccatgatccacaacctccaaaagcacataattacagggaggaacaaggatctcatccatacctagggtttccccaagaaattctgcaagaagagatggggaagaacatctccttgatcctctcttccccttcaattcaacgtgctcctcctcttctcgatccttgctgcgcggggagagatctagagggaggaggaagccgtggagaggggctaccatgggaggagaggacggccagcccaaggggaaaggagggaggggcggccaagtgtgggaggggggggaaaggggtggcggccaagtaggggcaaaagggggaaaaggccaccactagggttttcttttcgggagaaaagaagcgacaccacagatgactccg

SEQ ID NO: 43260 - DNA, 2163 bp, Zea Mays
ccccctcccctgttttccttcccatctcatcacaagcagaagaaaatcgagataacgagagctagggttttgattccagtactcacgccgcatcctgtctccttctgcccctccctctcggcaccgcctccgccccctcattctctctcgcgtcatccggcggaggctcgaggaaactgaggccgggagcgccccgaagaatattctccacccagtcgccgacacccctgcgcgcgcgagagttaccattgtactgttgtagcttggcagttggttgactgtgtgacaactttgagctatgtcatattacgaaagaaggggtggagacaggggtagtggccgtattcaaggaagtggtgggcgaggtggacatgtcctgcgtggaagatcaggattggctccccgaggacctcttggggttaactcccgtccatctgcacgcactattgctaaggcaaggccaaacctgtcactatgtttttgttcatggtcaggttcctgactaaagtagaaactgaatggggagagcatgcctaagcttacattatatggaggggcaggagtatctgtgatgtctgtgactaatgtgttctctgtcagtattgtttggaggcttggaggggcagatgcaactttggtagaaattttgcagtagatcataaggttgaatttattgaggggcagaagtaaatggtggtcatctctaatgggaattttgttggaacaccaccatttcttcaaacatatggaaggaaatagatgaaaaataaagctggcggactccagtttgatgtgtctaaatcatgatatgctgaagggaagactccatcaatcttcttgccatatatggaaattgcaatgtgccccttattcaacagttctggattccatactcccatggaagttcttctagtctgcttccatagcaagtgcacaagccatttgtctcctggacttttgtgatattggtggagctctttccttctcagctgttaacttaatgcagtacttcatggttttgctatttctcggttataattattgctactcttcctctaaagaccaatgataagtcaatgtggttcgtgatgattggcatgatcatatgaaaagtttgaagagatattcttttataatgacatgttccctcacatgcttggatgtttggcatttttcagtcatttagcagaaccaaagacatgacatggcgacctgatctatttagtgatagcatggcggctagtggaatagaaactggtacaaaattgtacatttcaaacttggactatggggtctctaatgaggatataaaggagctgttttcggaagttggtcatttgaaacgctttgctgttcactacgatggttatggccgcccaaatggcactgcagaggtggtgtttacacggaggagcgatgcaattgctgcactgaagcgttataataatgttctacttgatggaaaagctatgaagatagaagtcatcggaaatgacttaggattgcctatgacacctcgtataaatgttgttggggcttctaatggcagagctacaagaacagttgttatgacgcctgagtttagtcaacgtggcagaggttcaagcagtagacctctaagcaacaggtttaataaccgtggtggtttccaagctggtcgaggccgtggccagttccagagctgggggagaggccgtggtcagttccagagccgggggagaggccgtgcccagttccagggacgagggagaggcaggaagcctgagaagactgcagatgagctggataaagacctggaaagctatcacgcggaggcaatgaaaaccgattgattgcaaggccggtagtgccacaaggttgtggttttatccatcattttctgggagcaacgaacatgctttgtgctttggtttcaggagactagactcttgtagtaaattcgaacaaaagattgccagtttgtagtgtttgcatgaagtttgcaacctgatgtgtttatttttgtatcggttgctttggagattgtgttaatttttaggttcatgcttagaataaccgtaattggccaaaacatgcacccggccctgttccgctctgcgatgtgccttcgcagcattgtgttatttttagcatattgcagtttgtcggaggttagtccggtgc

SEQ ID NO: 43261 - DNA, 2745 bp, Zea Mays
atccttattacgagtagaaggacaagtctggtgcagtggtgagacctgcctcactgagtcgccaggttgtggttcgaagcagcctcttgcatttgcagggaaagtcttgctttggttgatctcttctgcagaccccactcacgtgggagccttcggcactgggtctgccttttttatttagtgatctgcatatgtacactgcactcagcagaagaaagtacacttctgtcttgtagtaacataacatttgtaggttttggttagtcttcacccacgcatacatgatcaaccagcagcctggtttcttctttaggttgatgtcccaacagctgctgtttctgctttatccttattgagacatgacgattcattcatcagaaggccaacttgggatgtaggctggtcattggctgatgctaatcagaaacaggaataattcatctttggagtcagtagactcattgatgttggccaagtctgccacaagaattgctattctaggaatttcaacctccaatttaaatgatgcaagacgtatcaatgtttcagtgatgcaacaacgaggggaccctttgcttatagtaggatctccatttggcctcatgtcacccttccatttcttcaacagtgtatcagttggtgctgttgcaaattgccttcctccatgcactgcaaggagctcattactgatggctgacatgcactgtctccctggcatggaaggcgctccagtgtttgaccaaaattcttgcctcgtggggctgctgatgaacccattaacacagaaaggcagcaatatagaagtccagctcgtgattacatgggatgcaatatgcacggaatggaacagcaaaaaactggaggaaattgaacgacccccaagaaaactacctaatgacaaaaatacagatagtaaatctatggaattacggcatgtatataactatgtgagggttttctcttctacggacaacaaaactaatcagcattgcatatcaccccgttcgctcagagaggctatatctgcagttgttcttgtcacggttggtgatacgtcttgggcttcaggtattgttctgaacaaaaggggtttagttctgacaaatgctcatctcttggaaccttggagatttggaagaacttcaccttcagatttacaagcctcgttcgctggagaacatctcaatgctggagaaaacaaatcattgcaaccacaacaaggcaaaatttccaatgaagatgctgtcaagcataaggtttcgtcatttaacttgggtttcaaaagagggaagagaatatctgttcgtttggaccatgaagagagacagatatggtgcaatgctagtgtggttttcatctcaaagggtccacttgatgttgcattgcttcaaatagaaaaggttccagttgaattaaatacaatcagaccagaatttgtttgtccaacagcagggtcgcctgtttatgttgttgggcatggcctttttggaccccgatcaggcctacactcttctctatactcgggggttgtgtcaaaggttgtccaaatcccagcaaatcaactttctcatctggcccgtgctgaggctgacaatatggacataccagtaatgcttcagacaacagcagcagttcatccaggagccagtggcggcgttcttgttaatacacatgggctaatggttgggataataacaagtaatgctaagcatggtggtggaagcacaatacctcatctgaatttcagcatcccctgcaaattactggttgcagtcttcgagtattcagcaaatggaaacctcgtggttttggagcagttggacaaaccaaatgaagtgctctcatcagtttgggcattggcaccatcatcatccccatttgtcaggagctccccagaaaaaggcaaagaggaaaaggtcttggagttctctaagtttcttagtgacaagcaacaagctctgaaatctaacgtagatctgaaggaactatttaggtacaagactcccagcaaaatatagagtgcgtccactagaattcatacaaggaaaatgtttgttcccagaattttgtatgagacgtttgatcccagaaatccccagtacaaaatgagttatcagagcacagtgccttttttttacagatggttaaggcataagcatcttttcttcgagtgtcaggtagcgcgggctatatggcatactgttcaaatcgctacaatttttaccctccctctagtgtcgtgaatatgtttaggtcatagctagggggattggtaaagatttaaaattgttagctcttttaggggcagcagcagtttgttgggccatttgacattgcgtttcaaagaaaatatgtgacaaactctttacaggttcttcgtttggttattcactggctccgttcctaggttgtgctacagaagcctatctttcaggagttggttttggctacctgacaacgtttggagcaaatggtcaggttgttttttacctaggctcgcgggtggcaatctagtcttaggattgatttctactagagttattaggttgttagtcttctttagactgtgtgcatctagcgcgatgtagaagttttgttgtcaagaaagttgtgacttatggttatcttgatgcaataaattttctcttctcgaaaaaaatgatgatgccgctgggaatgtaataaacttatataggaacagtttttacaattgaaaatgtcaattaccaattcttgtactagttg

SEQ ID NO: 43262 - DNA, 243 bp, Zea Mays
ttcgtccgttcgttcgtccaaataatctttttcctgccgctatcctgccgaaattccgatcgttcgttcgttcttagttcctattcatcgttcatcgttcgttcatagtccctattcatcgttcttccagataatctttttcctgtcgttatgctgccgaaattccgtccgttcgtccgttcgttcatcgttcgttcatacgactattcaccattactattcatcattactattcattcttac

SEQ ID NO: 43263 - DNA, 2008 bp, Zea Mays
ctggctgctctcggaccttggacgacacgtcgacaccagtgcagcagccaccaaagatccggcccgcccgcgccgcacgagaccgccgcccgcgccgcacgagagtcatgacgacgccgcggcggcacgctgatccgtcgccctcgccctcgccctcttccccgccgcagcttctctcccgcctccgctccggggcctccagtttcctggcgcggcagtacagcacggggaagggaggcgataacaccggtccttcgaagccgaaaggtggtggctcctccgcgccaaggcacctcaggccaggattcgtggatccttcatcatggaaacattttgactcaagggctgttggcattaaaccgggtgctatacatacagatgcatgggcggttttaaaaaagctcagacgtgaaggttttcaagcttaccttgttggtggctgtgtgagagatttgctactcaaaagggtacctaaagattttgacgtgattaccactgcaagtctcgaacagcttaagaaaaatatattcaggagatctaggattgtaggcaaacgctttccaatatgtcttcttaaaatgcgtgactctgtaattgagatttcgagctttcgaacagttgctaattatgggaatagaagtgaagtggtagattatgtggcagagttgaatggctctgacgttagggatattcttcgctggaaggattctatgagaagagacttcacaataaatggtcttttctttaacccgatgaactgcaaaatttatgattacgtgaatggagtaagggatatgagaaaaaacaaagtgtgtacagtgattcctgctcacatttctttcatggaggaccctgcaaggattttacgtggcttcagaattgctgctcgccttggtttccagttttccagtgaaacttctaatgcgatacgtgatttttcttcatctataaataatatcgataaggcaaggctgatgatggaaatgaattatataatgtcttatggagcagcagcaccttctgttaggttgcttagaaaatatggactacttgatattttgctgcctttccagatgaaaggtggttcaagtgacagacatctgatgcttatgaaattactgtctaatcttgataggttactctctgcggaccgaccatgccatagctctttgtggctggcgttgttggcatttcacagtacattggttatatatccacaagacaccttggtaataagagcttttgctgcagtgttgtatttcggaacatgggaaacaacagtcaaatttctgagagaagaagttggagctgaagttccatttgccccagagacaatggggccttctcggaccaaactggattgtcttaaggaacaaacgtcacatctagcatcactagtcaattcttcagtagatatattgacatgtcctcatgatctggagcaatcgctagccagattctcggaacctctgcaattttcaggagtggtagtcgcatctaacaatgataggaaaaagttgtcggccgtatttgagggccttgcttctgacctacattcatatgatgggagaagagggatgcgtgggattgattactcgtcgctgaaacttggggatcttgccgaggtccgatttgttctcggtaaagtgatcatggacacaatgtacgacaagttaccatgcgaatctactgaggatgagggcgctgctgcagatgttgctggtggaagcctacctccattgtccgcattgttttaatcgtagtgaagcatagggttcactcaacaaactaggcagcccttttctggttttagtcagtgctgcaaagcaatcgagttgttcagaattttcttgtgttgcaagatgaccacaacgacaactgtagacgtatttcagaatttttatcaaggaactcgaatgtgcagttgtagctaaactcccatgaatcctttcggtgaacatagggcgtgcacttatcaatctctttgctagggaaaactttaggcctg

SEQ ID NO: 43264 - DNA, 707 bp, Zea Mays
aaggcatcctaggcactctgaaccgctccaaccctaatctaatttgtactcgccgccgcctgagccaaggttgccatctccgccccctctactgtgctgtctccgtgcatcgcctgcagtcgcttgcatcgccgccgtctccgtctcctaccccgccatacagacccatgccttcttcctgcatccgtgggccatcgtcacgccatgaatgcgaaggtctcttcgccatcgagacctccgtcttcaagaaggaaaatgtctccctggctggccatgaggaggtttgatttgcaggcctagccacctcctccaccacctacctcgccatcgcccgcaaaaccctaaatcctgttccctccataggcacagtcgccacctcgatccccttctattccacgcaggctccatgccttttcttcgtctctgcgggccgctgtcgcgtcatgtctgcgaagaatggaggaggcggaggcatcaagcagtagtacgacttctggccgattgagcccatcaggtttagtggtgccggtagagacgacgccgtcgtcgtcgtcccactcaagaacatggggatatcaagaggaggaaagaggcgctgaagaatggtgcagatccacattcactacacgacggttgatctttagcgacccttattagggaccgacggttggtcgctaaaagttatggaccgacggttggtcgctaaa

SEQ ID NO: 43265 - DNA, 356 bp, Zea Mays
ttttttgttctttctgtcaaaattataattgttgcgcaaacatagactagatgcatataagtttgttaagctcttttatgtatgacatgaacaatggttggtctttacttaatataaaaacgaaaagaaaatccaaaaagatttatggaattttcaattgtcgcatcaagcaaattctgttcgtaaaacttataaacttttaaccacacatactggtcatacattgatattttccatgttttatcttccattttggtaatagagtaaagaacactttgatgcagatttgtaaacataaacaataagctttttgatattcacgttatacaattcaagtggcaaaggaggagctgaca

SEQ ID NO: 43266 - DNA, 1067 bp, Zea Mays
cccttctcgtgcaagtcaaccgcccagtctcagctttattaatttcaacccaaagtgtggtacctggcagaggtacatcttttccgatgttgaacccaacaagacctttgacagatccaccatcaagttttatttttgaaaacattcccacccactgaagcatcacctttgttttaaaacaaaacatttttgtatgctaaagcaaggctaagcatcataaaattcttttcaaaatggatatcaaggaagggaaatcaattttcaaggaaggaaatgcatcaacggtttagcacacaactcctatcacctaatgcatcaaacaaggtgataaagattttaaaacatcaaggaggtggcgaatgcaccgaggcttgcctgaataacactaggttagtgtttgttagacgacgtccgcttgacgatcagcttttatcccaacactcgttcagtctgcccttcttcaggtgtgtccatccgcaccaccatgcggagtagcccgcgcttggggtcgatttgggatcgtcctccgcatcgcgtgattaattaatgtacctgaatgatatgcataatgcacatgtatgcatataaggaggaatatcgcaaacctaaataatacttatacgacagcgaattaaacaccaaacctagaataagctgactaattaagcagggcatcgacttcatccattaaccaaaattaacataatacactagaaaatctattttttattcctagctttttattaactctttaaactgtgtaacttaattacttgatttaccgatttatctaaatcgatcatcacaatatacgtatgctaaattaataacatttattgcgaccaacaattctatttatagatctagttgactggaatacgaattaacttacccttatgacatccgacttgaaaccacgaaatcgacgacgcctttcaattcagcatttcactgaaaatagggtgagtgttgcgtcgaatcgcgcttcttctttgtccacatcaagaattctccgaccgcgtactgatttatttttctctccgcctaatcttctcagagcttagcga

SEQ ID NO: 43267 - DNA, 484 bp, Zea Mays
ccgtgtctgcggttgttggccgcgaccgcagggtggggcggagtacctccgctgtccgctctgcctcttcggagctagctggactgtggtcagccggatccgcgacgtcccaccagccccattccagcagcttcccttcctcctcctagctccccccaccctcctcctcacttcctggagccgctggagctccgacccagaatcccactcccgtcctctcccgctacagtcgctacggtacagtgtacagtgcatccccgaaatctcgccactcgttcgcaacccagtccggcgggcccgagtggctctcgtcggctccaagaagctcgcaccgtggtcatgggcggatggcggcgatggcgctggcgctggcgatgcgaatcccccgcccccgcccacacctctctgcagtgcccgggagctggttcagggcggctgcggggttccacggcccacgggtcgcgctgagcatgcggcatgcggc

SEQ ID NO: 43268 - DNA, 491 bp, Zea Mays
ttggccgccaccccctttttctcccccttggcgggacgccccctccccctatggcagccatcctccattgcttccttccccaagatctccccctacgcagcaaggatcgagaaaaggaggggcacgttgaattgaagaggaagagaggatcaaggagatgttcttccccatctcctcttgaagatttctttggggaaaccctaggtatggatgagatccttgttcctccctgtaattataggcttttagaggttgtggatcatgggaattaaaggattagaggttggatttgatgtggggttaggttttgatctcgaatttagttttctgcagaatggcagattcgacagtttctgttcatgccagttttccgtggtcttagtggcctcaaaaaaataaaaagtctatgtatgagtcgtagataatttgtagatctttccgtggccgtgaagaacacctcaatcggacatccgaccagaaagttattgcag

SEQ ID NO: 43269 - DNA, 365 bp, Zea Mays
ttagaattggatccgactaaatttgaataccataactatagttttaatgtgatctcgacatctagtaatttcttttaagtgttattatatgcctcccgctaagtttttaattctctatcgtgtagtattaattaggcttgtgctatacctgctcatattcattcatgtgcaccatgcatctcattaagcacgttaactgatcaggtgatgcggagggccaaagttgagtcgaccccaagatgacgtaacgggtggactactccgcatggtggtgctgatggacgaacctgaagatggacagatggggcaagtatcggaacaaaagctggtcgtcaagtgatcgtcgtctaacaaacactaaccta

SEQ ID NO: 43270 - DNA, 1354 bp, Zea Mays
attgagacgagtcatctgatgagcgttcgtttgaggactggtggaggaaggctaacaaaggttttagaggtattactccctgaaggtgtaataattcctacaggttttgaaacaatagggcatatagcacacttgaatttgcgagatgagcatatgccttacaagaaacttattgcttcggtggttcttgataaaaacaagccaaaaatccaaactgttgtcaataagacagatgttattcagaacaactatagaactatgcaacttgaagtcttagctggcaatggttcccttcgtacgatggtcattgagagcggccttcgttttcaagttgatcttggtacagtgtgatatgttctcaggggttggtcctctagcgatttcagctgcaaaaaaggtcaaatatgtctatgcaaatgacataaaccctaatgcagtgggataccttgagagaaacatggttcttaacaaacttgaaaagaaaatagaggtttttaacatggatgctagaaggtttgttagtgcaatatattcaagcaagcacgtgcaaccaatcacacaaatagtgatgaatttgcccaatgacgctgttgaatttttagatgtgttcaaagggattttatgcaatactaaatcagaactgcattgtgtgatgccaatgatccatgtgtacggattttctaaagctgaggatccagagcatgacttccatgagaggataaatttaacgttaggcgagaacatcgacactgttgaaatgcacagagtacggcttgttgcacccggaaaatggatgatatgtgcaacttttactcttccacagtcagtggcgtctgcacagccgaattacattacctgttgattttttgtactctctccgtcttaaaatattggcaacgactgttatgcaagcagtccttctgtgcaagcgtgcaagcaaaccatatgatccattagattacgatccaatcacagatacaaccatgtttgttagaggttttttataaagattattgagctgttggtggaagggtttaagtgttaaatgtgacatacggttggatcacgatctaatggatcaaatggtttgcttgcacgcttgcacagaaggactgcttgtatagcagtcgttgcctaaaatattagtcgttttagctcagctctggatttttatgtctatatccaaagacatgtaaaacatataaatcaaatgttatatgaatttattaattgtcgaaaatgaattttaatttgggatagagggagtactattcttactgcagcccctcgtatcttctgtactgtcgtcgaatacttcctatcagattatatagatgatgcccttgatcatctc

SEQ ID NO: 43271 - DNA, 1520 bp, Zea Mays
ttgttttacaagtgtttatgttttcccacctctcccttgtgagagtttacattgcatatcattacataagcattcatgtacttgtaattgacttgtagaacacctagaagaagaggttgaagtggaagtgggagaggaatcagttcctcaatcagaaacttctccagctgcagttcctcctgaaggtactctagtaggttacccggttaattgtgatattcttgtggaagagcctgacactcctcctcatcaaggcaagccccggtgcatttaaccctttccttgtgttttaaaaacttttatcacttatatgctgcattaggtggtaggagttgtgtgaataaacatttgatgcattcccattccttggaatattgattatcatccttgatacctgtttttcaaagctagaaatgcttagtatgcttatagattaggaacaaaatgtttttgatttatgaatcatgtttttacaaaagaaaaaggctgggaatgatgaaggcgtcaaaggccttgatgaattcatcattccagcggattacctctgacaagtacaagtttctgagaaatagtttaaaatgagaccagacgttgagcaggaaaggtcgtccgtctatgtcgtttaaggaccgtaacgattattggcctacatgatctaggaccttttaactggccacatgcctcatcatgggtaagcttagcttcggctggaccaataccagaaaggccggcccgcactaggagtggagagatggcgagagtatcgtgtacccacctggcaagaggttggacggtggggtactgagctctcaggtggcggggacccgttctggtcttgagaaacccgggtgcgagttgacatatgcaagggttaagtgctacatatgtcgtgtggttggagatcctcagctgggtactaatcgattcgaatcgccattacttctcggatatggagactagatcactgaccatcatcgtagataacaagtaaaacaagatttgattttaaaagaaaactagattaggccaagtgactgagctagaataggccaatctagataaaggtaagaacttaacttgaaaagtaaaagatggcctaaggaccaagtattagtaagcttttatgcaaaacttgagtctttgaacattgatagcctttaccttgatttccaaatcaactagcatacccttgagagtcttttgtttagtcgggtcagtcttgctgagtaattccatactcagggttttattccctatgttgttgcaggtgaagttcttgataagtttgatttctgttaggctcacttatggagacttatttacttatgcctaacttgtgtgtgcttgtgggaagctgagatcttctcatgtgatgtaataagttagcactttgactctacctcgggcatgtaataataataaccacttggttttgtaaaattaaaagtctactaatgtttattatcttattgtaaagtcttccgctcaaactcctatgtctatgtttatgttcatgtttc

SEQ ID NO: 43272 - DNA, 351 bp, Zea Mays
gtaagaatccggtggctgtggtcaccactgggcaggtcacggcatgcaaactctgggataggacagacgtagtggctggggagaagattaacaccagcagtggctgcatggcccaagcagccgtgtggctgcagggattcgagctcaggtctctacagcgaacttggctagcaaccatggtgaccacgagcactcttattgagcaaaacatgatacaaagaatgcaacacgccgcgcgcagctgcttcttatcaccagggaccagcgagctgggaccggcgagctggcgcaagcagttactgggactaggacgcgtatcagcaaccgcacagaaaaacaatgaacctggac

SEQ ID NO: 43273 - DNA, 334 bp, Zea Mays
gttggggttcggccggggtctttgccgcggattgcgcaatctcttgggctcccgtgaataagtatcgtgccccgctatccccgctattcgtcttcatcacgggaacaccacaatccgtgctcgtggggggaggccttgatgtcgccgcgcgcgcacctgggcgtcgtcgcggtgttcctctgctgcgctgtcggggagcatcggcaagggaacctaggcacttcaccgaagtacctggggcaggcgcaggtcgacggcaagcctaggcctggccgccaccgaatcgcgcagataccttcctctcttcatcgagcttcatcgcaagcaataaggt

SEQ ID NO: 43274 - DNA, 2118 bp, Zea Mays
cccaacgctttcccttctttcctcgctgctattcccacacctcgtgcggcggtggcccaaccaaaggtcagccggggcgcttgaggcggtgagtcctcgtcctcgtccgatatcgcagcggaacaaggtcatgggcttccaggtggctgccgtggcaccgccgccgtgcgcgcgctcctcctccgccttatcgtcgccctcgacctcctcgcggccgttgcccgccttcctcggaggcggcggcggatgcgccgggctcgcgagatcccgggcacccgtaaactggggaaccggcgtgatggtgcggcgcccgcgcccggctcggacgccagcgaggtgcgcgctgagcgcgagtttggatgggatgggtggcggggacgcggagttcatgaagaggatcgaggagctcgctgcggcggctggggtgcagccggccggcccggcgggttgcggctggcccgcgagcgtggagctgagcgcgagcaacgtcgggctgccgctgtcgctgcggatgctgaagcggaaaaagcagcaacagcaggcgcagctgcatgctgtagcgcgtccttcacgctgggacgatgggctgctgggctccgccggggagtcggtgggccgcgccttctcctccatggtgctcatcgtgcgggagctgcagagcttcgcgctgcagcagatgcgcgacgcgctgctctgcgacgacctgcagggcgtcctggcgcgtgtgcagggcgagatgcacgactccttcgtctggctcttccagcatatcttcgcgggcacgccggcgttcatggtctccctcatgctcctcctcgccaacttcaccgtccaatcgatgggccgcagcgtcgccgctgcggccgccaccatcccgcctactgcgcctgctgtcgcccttgtcaacgcccagcgccccgagccgtcacgtccgcggttcgacgcggcttcggtgaagacgttctccgtcgaccggatggcctcggtcgggggggacatcggcggtggcggcaagaccccgcctgtcgcgggtgccaccggcgacggccggtcggacgagtccttatatcggctaagccgtgtgtcgccgcagcagccgtcggcaccccctgtggctgaggtcgcccaagacgctgcggacgcggacgagcaggccatttgggaaatgatgctcgcggaggccctgaaggccagcccgcgcaccgaggagctgagcgatccggacgtgctcagaagcctcgtcgcgccggtggaggcggagctggagaccgaggaccacgccgagcacacgctgacggagcagagatacgagcaggccgtcgccgctgagcccaacaatccgctcatcctcgccaacttcgcgcagttcctctacctcgtgcagaacgaccacgaccgggcggagcactacttcgagagagcagtgcgcgctgagccggcggactcggaggcgctgagccggtacgctactttcctatggaaggcgcggaacgacctcgccggcgcggaggacacctaccaggaggccatcgcggccgatcccgggaacgcccaccacgccgcggcctacgcgcacttcctctggaacaccggagttcttgcagcatgcacgggcacgggggcggaggccacgcggcgagacgcctagaccacgacatcacaccatggcccgggcggtggagtggagctgacacatgatatcgtccccctttttacttagtctgattagaagattgcgtgcgtgccgtgggcagtggagtgagttgtgatccaggaggacacggtggtggtggtggtggtggtgtttcttcccgcgctccgggaaccgcggcggagaaggacgggcctcggtcgtcgggaccaaccggcggccggaaggcatggacggctggctatagaaacgtggtagagcgcagagtcgtcgagggcgacgaggtggcatggatcagggatgggatgttctatggaatactctagtgtatagcgactcgcatcatgtaattatgtactagatgtggaaaaaataacacccgaataagaagtatcccggtaaagtaccgacctcggatctagcgtgtttgtacccccgatactcctcgtgaccgctgtcatcggcga

SEQ ID NO: 43275 - DNA, 2033 bp, Zea Mays
ttggtttctgattgattagctggttgttgttcagttagttcgagtagtagacgatgtactctctaccaggagcaaccatgtctgctgcacctgcacgcgtcatctcttcctcctcctcctcctccttcgtggagcctcttctccttgcagcagcttcgtcggcggctgcaaacagccaccaccaagtccgccagcgcggccacttggtccgtactttggcggcatcatcgtcgtccaacacgctgctgcggagtgacttcgatctccaggagggcctgacgacggacgtcaaacggatgctgcgtcagcgtcagaagaagagcggcggcgggcgggagatgctggtcaccatcgacaacctcaagcgcctctgcatcgaccacttcttcgaggaagagatcgagggcgccatggcgacgggcgcctgcacgcgtctcctccacagcgacgacctcttcgacgcaacactcgcgttcaggctcctgagagaggcaggccatgatgtctcagcaaaagaggatgttctacggaggttcatcgacggcgtcagcggcgacttcaagctatctctgaacaacgacgtcagagggctcctgggcctgcacgacatgtcccacctggacgtgggaggggaggaggcggcgctgctccacagggccaaggagttctcgagcagccacctcgcgtccgccgtcaggtaccaggacaaccctagcctcgcggagtacgtgcggcagtccctggaccacccctaccacctcagcctgacgcagtacaaggccaggcatcacctccgctacctgcagagcctgccctccagctgcagagacgccgccgtggagagactcgcagttgccgagttccagctcaacaagtcgctgcatcagagagagatgcgagagattaaaaggtggtggatggacctagggttggctgaagaaatacctgtggtacgggatcaggtgatgaaatggtacatgtggtccatggcagcactccaaggatcttctttctccagataccgggtctacgtcgtggacgacatattcgatctcgttggcaccctggaggagctctccgccttcaccgaggcagtcaaaatttgcatgagatcatgctataaggccctccacaccgttacgaacgagatcgcagagattgcccacaaggagcatggatctaaccctatcaatcgtctcaggaaagcatgggtggtgctgttcgacggtttcatggttgaggcgagatggctagcgaccgaccaggtccctacggcggaggactacctacgaaatggcgtcgtcacatcaggagtgccgctcacatttctgcacatattcagcatgctagggtatgatgacccaagcaccgaggaagaagaagaagcgatcatcgaccacatgccctcgatcatctcctgcccagccaagatcctcaggctctgggatgacatgggcagcgcagaggatgaggctcaggaaggattcgatgggtcttacagggacttctacctcatggagaaccctagccgcagccccggcgaggcggaagcgcacatgcgcggcctgatcgcgagggagtgggtggagctcaacagggagtgcttctgccggaggaccttcccctcggacatcgcgcaggtctgcttgaacaccgccaggatggtcagcgtcatgtactcgtacaacaaggagcagaggcttctcgtcctcgaggactacgcggcgatgatgttggtgctttgatttgaagcatgcatgcatgcatttgctctctccgatccgcggatatgaaagtaaagtagtgattaggttgatgatttgttttgagaccagtaatgtagagtagcgattaggttgtgtaaaattagatagctaggattagaataactgggcaaacgaatatggtatgtgtccatatgtaatgatgcaatatatagcaacatatatggtatcggcgttattatctttttctttcaaaaaatgtaataatattcacatatgcagtgcaatgtaatatggcccctgtaggag

SEQ ID NO: 43276 - DNA, 426 bp, Zea Mays
actgttccgacggtagcctcagcctcggcgacgaggactgcggcccaggtcgtgaatgtttccacgtcgatctaggggttccctccgaaggcaaccatcttggtatgccggagaatggtgatctccctaggcctgtgcctcgccttgacatcctatgggagctagctgtggtccccgttccggtggggggtcatgacccacagctcgagcaaatccgcggggtgcaggccagtctcgacgagggagcaggaacacttgagccgatccgtcgggacatcggacaggaatgggcgggccaacctccagccggagaaatgcgtcatctaccccagggcttccagcaccgcatcgccgacgatgtcagggtgaggccgccacctacttccagtggagtcggccagaacctggctgcagcagcaatgcttc

SEQ ID NO: 43277 - DNA, 774 bp, Zea Mays
aagtagagcaagttgatcttgatgagataggtgatgaagaggctctgtgcgtcgcactaaggaacatgtccattggggacgtgtgtcctaacgaatccgaagagccaccacatgcccaagatcaaccatcttcctccacacaagcatctacaccaactcaagatgaggataagactcaaaatgatgaaggagatcaagaagttgagccacctcaagaggagagcaatgatcaagtgggagatgtccatgatcaagatgaggaagatgaacaagttccaaggccgccacacccaagagtccaccaagcaatacaacgagatcaccccgtgaacaccatcctcggcgatattcaaaagggggtaactactcgatctcgtgttgctcatttttgtgaaaattactcttttgtttcctctattgagccacacagggtagaggaagcactacaagattcggattgggtggtggcgatgcaagaggagctcaacaacttcactaggaatgaggtatggcatttagttccacgtcctaaccaaaatgttgtaggaacaagtgggtcttccgcaacaagcaagatgagcatggtgtggtgacaaggaacaaagcccgacttgtggccaagggatattcacaagtcgaaggtttggatttcggtgaaacctatgcaccagtagctaggcttgagtcaattcgcatattacttgcctatgctacttaccatggctttaagctttatcaaatggacgtgaaaagtgtcttcctcaacggaccaat

SEQ ID NO: 43278 - DNA, 1244 bp, Zea Mays
cttccctggcgctcgtccatggtgccatcgtcctcgatctccatttccctggcgcgcggagcttctccccagctccatctcccagctcgcggagctccctgactggcgcgccctcgccttctccctctgctcgcgtcgcgcgcagctcccctttgctcgcccagcccatgccgcgcctgctccctcgccatggtgcgcctggaagctcctctcggccgcgtctggtcgaatctcgcccagtttgcagctcgccggcgcccaaactctctgcccgctatccatcgcgacccccagcttcctctgccgagcccagctgaagctccctatgcgcggtcttctccaatcgagctcgtccctgcgcccgtttctctgcgcccggctcccagcgccgcgcccccttctcggcctcttctaaccatggcactcggcgcccaagttccctgctccctctgtctgtttgctgcgcgagcttgtccctgctcggagtgctttcgtaccgagtccctcgcatctctctccctcgtgttttcctctctcagccatggcgccggccgccctcatcctctacccatcgctcgtctctatcctccattgccgacgattccccagctcggacggcgtccatctccctattcctccatggctacgtcgcgcgtgttcagttcttcctgcgcgtgctgccgcgagctcctctgatcccggcgcagtcgaatcccgtcctcctctactcggcgatgacatgttcggtcgtaggctcgctgctatcctccgcgacaacggcgagcgcgagttcatgttctatcacaatccagcgtcgtgtagatctgtcctgcagcagcaccctgctggttgtcgtgtagtacgccgcgcctgtttagacataagttgtcgtgtgcccagtctccgtgctgcagtactccctctcgcggggcatggttccgtgctgcgctcgcctaggtcgtcgccgttaaatcgttggagtcgctcaactcgccaatcgcatcttggccgattgttaattttatattcgccatggtacaacacagctgttagatccgatctccaaaccgtcatggcgttcatcgtcctctggtcccagcccgacccatccatgcactcgctcttcgtccatcgggcttcacgcgtgctcgcgtttgtcgtcgagctattgaacccatcctcccttgctcatgacttcatcatcgccagagccctcactcgattcgtgtcctcgtcagctcgct

SEQ ID NO: 43279 - DNA, 1525 bp, Zea Mays
agatggtcaggaagactatatccaggtctcggctttccttttgcaccatttctctgaggttgctgattacagctttacagctaagatgagacagagatttttaaacatttctcagcttatgcttatagtttctgtgtgctatatatcaaaacctccaattcacgactaaggttataaaaaaatgtgctcctgacgttgcgggacaacgtgcacaaggtcttctaccctgtcatcgaggtcgaggccgctgcagttcgcgcagacaacaaccatcttggagggttggtgaggtatccggtctctgcaactcttccacagattggatccagattattccttacgtggggtgtcttctggagttttcctgaggtgatcgactgactcgagagtttgccgatgcttgaagaaggacctaatgtgagcttttacatacttgatgaacagcttgagatcttgagcaagattcgatgtcgcgggcacccagatggcattgcttgttcttgattcacgacgagatggatgcggtttccttcagagttccgccgagcaacctcttggtttgactcttttgggatcttctaggaattccatcttgtgatatcctccagttcatcacatgataatatacggttccactcactagcccttgcagactaaaaagctcttgagaaatactctgttgtaactcttcatatttttcttttgtttatgtagcctagcacccagtctgtactgtggtgtccagttccattatctctgccttgcattttagattttggttgtgattgggatactatcttaaagctgcttacttgcttgtggtgtctaattttagaatgtattgcattttgatgctttaaaagaattgagggacactgtattgctttttcttaattatgtgatgtttttaggttcctagagcaaggtgcctatattagtgtgaccatccagtttgactgttgcactacttgattcaagttgtgttttccttatgaaaaatagatggattctttagctaagatgaactgtcgacacctaaaatgccactggaagtagtttggaatgtgcatatgttagtgtgatcatacagtttcattgttacacagcctgattaaagcaaccttttccttatgtaaaaagatggtttctttagcatgtgttgaactgctaacacttaaaatgccactagaattagatttgaatgatagttttgtatgaacacatttatgtacgagttatatatatgctttagttgtagtggtcattttgataactagaatttcatatcatggttgactgatgctcaagtgagaagaacatccattagtgagcaaaactaaaagttgcagttgctctgaaggaacaatctatgtggccttcgcctcttttgatcggaaacttgttcctctaatcacctgaaggaacaactgacaatctgaaacttgttgagccttcatgatataaagaaacaatggtgatatgtgcaacacctgttcgcattggtcagcacaacacttgcttcagc

SEQ ID NO: 43280 - DNA, 2099 bp, Zea Mays
agtaaataatctatatctagtaagggatgtttagatacaccaactaaaattttatcggcgacaccggatgtttgaatgctagttagaagtattaaatatactgtaactataaactagtgctgtgatatagtaaacattttctaattatagactaattatgtttaataaactttcttctatgattaattttataattaaattatatataaacgctggatgtgatatatactaaacctttgtttgggggaattaaacacccttggatcattttctcgtaggcagagactagagagagcattacccatgggcacttggcccaggaagagaagaagctaaaaaatccagaggaactgtctgacagcttctgccatttcctgggaggctggtaccatttctctccggattctcagctttaatcacggtgcggcgtcagctcctcacagataggaccggcgggcggctgccggctttgtggcgttaagcagtggccggactgccggaggagggcagaggtggtcaggtggagttcgccagttcggagtcgccgattgagtcgggagccagagaggccgagaacggatgcttcctgttgcttgctgcgcacctcgtgggctggaagttgggcgtcagctaattttccgctccgcaccgactgcagccccgggcaccgtatccgctctttagcaatcataacaaacatacccgaaggaagccaacagatttcagtatttcacggtcaccatcaccactcaccagtccctcctacccgcttcccataaaatcttctgatctgtaacgcattcgtcgacgcccacctccgcttcgctctcttgctcttttagtcccatctcccatcccacctggaggcgaatttcgtctggggaaaaagtcggcggccatggccgggcgagactccctcccggagggttctctcttcctcgggttggacagctccactcaatcactgaaagctacggtgctcaataatgagctcaccatagtagcttctgaaattgttaattttgactctgaattgccacactacaaaactgaaggtggggtgtacagagacccagcagatgataggcacattttttcaccaaccattatgtgggtggaagctttggatgtgctgcttgagaagctaaaaccaaagatcaacttcggtaaggtagtggctgtttctgggagtgggcagcaacatggcagtgtttattggaaaaagggcagccatgctgtgttatcctccttggatgctagtaaaagcttgttatcgcaactaaaggatgcattttctacaatgaactcaccattatggatggatagtagcacaacaaagcaatgcagagaaatagagaacgcagttggaggtgcactggagttagcaaaactcacaggatctcgtgcgtatgaaagattcactggcccccagataaggaagatctatcagacagagcctgatgtttatgaagataccgagagaatatctttggtgagctcgttcatggcatctatccttgttggaagctatgcaagtattgatgaaactgatggtgcggggatgaacttgatggatatcaagcaaaggatctggtcaaagtctgctttagaggcaactgctcctggacttgaagcaaagcttggaaatctagcaccagcatattcagctgctggtcgaattgctccttattttgtagaaaggtttcagtttgataagaactgtttggtcattcagtggtctggagataatcctaatagccttgcaggtttaactctgaatacccctggtgatcttgccattagccttggtactagtgatacagtattcgggataacaacagaagctaaaccaagccttgaaggacatgttttccccaatcctgttgagcctaatggttatatggtcatgctatgctacaaaaatggctccttgaccagagaaggtgggaagataggattctactacaaagaccatgagatcctccctccacttccagtgggtttccatcggtacactgtcgaaaacctcaacgacgtctcatcagacgctctgttggagcgtgaagtggaagaacttgacccaccgtccgaggtttgcg

SEQ ID NO: 43281 - DNA, 508 bp, Zea Mays
ctggtcatgcaggaggttgtaaatgatcttaatccttcaggtcatcacaggaaagagggttgtaagcttccactgtcatgaggactccttgaacatcgctggcctttgttggagaaactgggaagcatggacgctctctacagatccggtgcacatcccagtttgtgatgtctccattgcacaaggtcgcggtggccggaacatggcatcgactggtcaattgaagattgcgacggcgcgacctgcactatcgcagacgggtgcaacgcgcatgggcgggaaagcgcgggggcggtacaggtcgcggacggctgcagcgcgcatgggcgggaaagcgcaggggcggtacagggagggtgggagatcgggcgggagggcgcgggaacgggatggctgggagagcgcgggggcggtacagggagggcgggagatcgtgcgagagggcgcgggaacgaaatggctgggagagcgcgggggcgggatatggcgatttggcgagacacaatag

SEQ ID NO: 43282 - DNA, 1345 bp, Zea Mays
tattgttggaaagaaatgtgaagaagactatattgttgctagaaccgaagaggaggcgattgcagaagctcatgaaaaatatggaaaatcagttgaaatatatcaagaccctgatgttcttgatacttggttctcaagtgctctgtggcctttcagcacgcttggttggcctgatctttccaaggaggattataagcatttttatccttcaactgttctggagacaggccacgatattttgttcttctgggttgcacgaatggtcatgatgggaattgagttcacaggatcagtaccattttcttatgtctatctacatggtcttatccgggatgctgagggtcgaaaaatgtcgaagacattagggaatgtcattgatcccctagataccatcaaagagtacgggacagatgctttgagatttacactatctttgggcactgcaggccagaaaggttgacgtcaaataaggctttcacaaacaagctgtggaacgcagggaaatttttgttacagaacttgcctgataaaaatgatgtctctgcatgggatgtcttgttgtctaataagttcgactcagaagcatcactccagaaactgccattgccagaatgctgggtggttacaggactacatgaactcatcgataaggtcagcagaagctatgataagtttttcttcggagatgctgctagagaaatatatgattacttctggggggattttgctgattggtatattgaagctagcaaaacacggctttaccactcgagtgacaagatcgctgctgctacagcccagagtgttctggtgtatgtgtttgaaaacatactgaagttattgcatcccttcatgccattcgtcactgaagaattatggcaggcatttccatacagaaaacaagcacttatggttactccctggcctaccactgaccttcctaaagatttgaggtccatcaaacggttccagaatttgcaatcattggagaactgcgcatcttatataaaagagaggaagaaaagccatacaaaagatggcatcttgctgagcaagttccccaaggatcctacacacaaccgtaggacattacaaaccggaaccaagacttgaccctacctcgctaagagctgcaactaagcctaggtgctttagctcttcagctcctgccatagcccagctagtacattcatccaggaaccttcgaagaattctagataatgagggggactccccttcaaacactgttctgtttctctggatccatagacaccaagctcccaggaggccaggatgatcaaggagttaagcccctttttcatgttcttggaaaccctgaggctca

SEQ ID NO: 43283 - DNA, 1058 bp, Zea Mays
gtcttcaatctcgcgctctctcttccccaaaaacctcaccttcccccgctcgtctggccatcggtattctccaccggcgctccagagttccagtggagcggcttacagttgaagaatttgtgcaccacccatttctttctgaacatgctccagagaggaccttgagccggacattatctgaaataagagatggctttccaataaataatatcagtccaacaaggccttcaagccaaagttcacaagaagattgtatgccttttcctttggatgatgagtcaagtggacaggaggagggtccaattcctgacagtaagagtccgatgaaatcttatgggtttcccacaggtaaaagattggataaaacttcaggccagagtccatcaaaacataccagtctgttctccaggtatgtcttgggaaataatcatgcacctagtaaccaacaccatggccatactgataaaatgaccaaggaaagcaagattcatgaagtgcaaggtccaaaaggtgtttatccagaaggtatggaagtcattagtagtgcaattcctcatttttattatgaacaatccttactgaaattattatttcattactttgtaaatgtagatttccctatcattgattcattagagtttgtagatcaggaatatgtatttgtgtctggaccacacccagagggatcatcgtcttcaacaaatgcctctcagcagcttaacttaccggcaaaatatgataatttgtctgtttcaccaccgaagttaactttcttgagtgcaccaataccgataaacggtttgccgattaatagacaacaatctgctgggactggtagcttcgacaaccactattctcctgcatctgtcacttcatagggatctgcggatataagtgatgccatggatgagcccccatctgattatctgatgaggattagattgttggagcaatatgcatcagccatagcagggttggtcagggatgaggtaattttttatctgcttggtggtacccagattctttgctttccctatgttatattttcactgagtcac

SEQ ID NO: 43284 - DNA, 3383 bp, Zea Mays
ccggccgcgcacgtccctccggcacacgcgcgcgtcccgacgcctcgccggcccaccgcgccccaccccgccagcgccccgcctccgcctgctcacgccccaccgcgcgccatcttctccccccgctccgctctccgtcgatggaagggtcgctactgccgttgccctctcccttgcagtccatgtccgtcgatggaagggtcgctacagcccctgccctcgcctccgcaatccatggacgcccccgccccgagacgtgcccacctagagagccgctcgctcaccttgctacccggcccacacccgtctcgttctcctcctcatcccggcgctcctactactcccctccatggcgcgcaggtacacctcctcgttcccccacctgcctccctgttccacttttgttgcctccttacaggcaaaagctctgtggggtccctttgctacgtgggggacgaatcagcgagggcgcttagcgtcggcgaggagctcatggccaagagaccatgccgttgggtgtacaggatcgacggactgccctatctgtgtggtacgaaatcaagatctgttgggggacaggctctgttggtgttcaatttgctatcttgttttagttcttgcttgtttcgatagccatattaattttcgtacagatctggtagggttttgtttcccctgcgaggcgatttcctttttctctgttgtggttggggttgggtggggttaggtttggttaaacaattccccttttggattagaggggacagggcaatgaactaatttgccaactcaagcccttgctgtacacatgatttaatcatgggttacggcacatgtaccttttagatcgcttgcaaaaggttgtttagctatcctattagacatgtgtagttctttacttattcgtcggatgaagatgaagtaatggaggagattaggttggggccaaaaggcggtctcatgtactgcatggagtatcctattatttttgcagtgtctttgttcattctataggctgccatataagcccattgtttcctttggctttttccatacgtgattagtcgtacctgattttgccacctaatttttcattatatttttcttttttgttttgttgtcatgtgaattgtctccattcatgtttgtggttcgctttattacttaactattttctgaggtatatttttttttgtaaaaaacggattatcgatctgtcatccttgtataaccatctggtgtctacataagtttgatatctaacaccaaggccagacaatgattgtataaccatctggtgtccgtataagctttgaaaatgtcatccttttgcaagcgatcaaatatcttctagcattattattcagttggcaagactggtcgccagaagctactcaagcagaaaggatgtgttgtttgcatcacgggcctttagtgcttcaggtaaccaaaccttgctttctctcaaactggtttgttgtgttatagaacaaaaggaagaaaattacagattgttacagtattcctggaagaaatacttccattgctggaccatgggttacttaataagtagaatttctgggctcctaataaagtaccataatgttctgttaggactatgtttttatgcagcataatcaggttatgaagcacgaattgtacatcagctttcaggtgccaagttcagttaccttgaatattttaagtaatggtatgttgattccacttttattagttctttgagttccatttccagcgctgatcttgatgcctaatcaactattgagagcagacagccatgagcctgagacaaatggaaagtacaaattattgcatggattattaatcatcacatgccatagataaaaattcctgttgttatagccataacatcgtaaggttagttgataattacgcacatacgagaagtaaaaaaatagaagtttgacgttaatagaaatggggatacttctcttttcagaaaaagagcttaagaaggtcatcagaaagggaatcaacaacacgtggtgggcaacaaaaacaacttcaatgtcctaagaaatctagaaattctttctctgagtttttcttttctgttctagagtcaatagctgactgtttctgttaactgaaaatgtatttgtcacacaatgcttatataaaccacttgattaagttatattatgttaggacattttggcagtccactatttatatctggtttgatgttgttataaagtgatctctgctatctaatctattttggtggtcgtaaagttttgcttgcttgaaatttgatcacattagttgaattttgtctataatcacatcagatgagaaattatacagccttcttgcttaaatgtacagaccactgtttaattttttgaactttatttcccaccgcgagaaactgatttatttccaccgagagaaactggtttatttccatcttttcttctttttagaaccggaggctatcctctagcttgataatctcacctgcaagattcgtttttttggctaatccagtctggcgacctaggtctcttggcttgcccgtagcccgccggtcagtaatggcgcaggatgatccggttgtttctgctcagtggatgcacgagcacctagtgatgcctgatgttaaggctaggcaaatagttggttcagctgtacttgtgaaagctcgagatagaccagaaattgaggatgatgaattctattcacttgacctttattgtcaaggatacaggcaagctcgtaggaacagttggtcagggtttcaatttcggaggtggagatcttctacaggtgataatgggctcttctgagggtactactgttgatccagattcagaaaatcaagattcaatctcatcacgtgagcatgtgtggactccatttgctgaagatattgtacctgatgttgatatgggaagcagagaaatgcggattacacctccgaaggggttacttgagctcaattctcgttctgacaagagatcgaagaaagaaaggcatgcgatggttaggtctgcatcatccttttctagcatccatgctcgcatctacagccatgatttgcatcttaaaagaaataaagaatgtgtcaggtccatagtactgaaatgttgatagcagcagatgtcctggctgaagattgtagatattatcttgcatgtattataacaaatgactcctcccctcacgatgactttgcggacagatgtctcaattctagtggtggagctacgaacaacaatctgatgtcctgatcgagagcgatggagctaatatttgaacttgtgtgtttgaacttgtgaactaaaaatgtgaactatggatgtgaacttgtgtgaatttgtgaacttatttatttggac

SEQ ID NO: 43285 - DNA, 1767 bp, Zea Mays
acagcattaacaaaaatatccctccattaactctccaactcctcttcctcttcctcttcttctgcctcttcatttccaattccggcttcttcctcgcatcacaaaattccgattgcggcgcaatttcagattgcttgctccagggcgcaaatggtcatcatcagcggcagcaacttcccagcggattcgtgatccttccgcgatgaggtcacacttgcagtagatttgaaggcgagttttagcatagcttaccttccagggctgggttttcggcttctccttctcctccctagacagatttcctccctccggcagggtcccgtcgccaacgatgcgtggcagaagcggttcttcagcgtcgcgccgccggccacgctggtcttcttcttcgtgctgatattcgtcgccggtgcaattgttacgcttgatcataaggagagcctggccatactgcagctgcagccaagaggagtgatcgcagcagagcagatgaggcctccagcgacgagcgagctgcgcgctgagccagcagcagaggaacccgacatctgtgagaataaatgtaggcctgcaggcagcgaggcgttgccgaggggcatcgtgcaggacaagtccaacttcgagatggagtcgctgggtggcaaccctgaacggaaggagaagaagggcaacggcaggcactcgaaaagcctcctcgccatccccgtcggcatcaagcagaaggcgatcgtcgacaagctcgtatccaagttcccggacaccaatttcatcgtgatgctgttccactacgacggcgaggtggacgggtggcgagacctggagtggtcgggccgcgcgatccacgtcggcgtacgcgaccagaccaagtggtggttcgccaagaggttcctgcacccggacctggtggcggagtacgactacgtcttcctctgggacgaggacatcgaggtggacagcttcgacccgctccggtacctgcgggtcgtgagggaggagcggctggagatctcgcagccggcgctcgaccggcggtcgcagatccaccaccggctcacggcgcgcgccgcgcggagcgggggcgtccaccggcggtactacaagacgagcgggcacggccggtgctacggcaacagcacgggaccgccgtgcgcggggtgggtggagatgatggtgcccgtgttctcgcgcgcggcgtggcggtgcgcgtggcacatgatccagaacgacctcatctacgcctggggcatggactacaagctcggctactgcgcgcagggcgaccggagccgcaacgtcggggtcgtcgacagccagtacgtgctccaccggggcatccctacgctcggcgacggcggcaaggcgacggcgacggctgccgcgtcggcattggggacggcagaccggttagcggtcaggcagcggtcctacaccgagctgcagctgttcaacaggaggtggaagaaggccgtggcggaggacgggtgctggaccgacccttacccgaacccggcgacgaccaccggctgaccgttggacggagcgaggcagcgcagggaagtacagtagttggtagctgtcagattgaccttgcctagaagatggtagtagatcatacactcgcattaatttacaggttcacagagagctatacatataatgtacagaactacagattgttttttttcctgtctcttgcctgtgatccatacaagggaataagcgtgcatgaataaaagaaattttgaaaatcataaatgaaattgccaa

SEQ ID NO: 43286 - DNA, 297 bp, Zea Mays
cgaaacttgttggcgtcgtcctccctctcgtggcgcgcgccgccaccgactcccctctccaaacgctccgccagcctgtagctatatccagcgccgcccctaactccccctctccacacactccggcgtcctcccatcctatcacgcgctgccctgatctctctctccaggcacgttggcggcctcgctgccacgcgccggtggcctccttgtgaagcgccatcgccagccactcgtcagtcgtcacccccgaagcgtgtctccatgagtgccggcaggagcctatagctatttgtg

SEQ ID NO: 43287 - DNA, 1104 bp, Zea Mays
tctttcacagtgctctggtcttcctccgatgtctgaagctgaggctcatgcttttgaagtcaactcttttggcctctacaatgaattatcagagcttgttgagttaggaggtgcggataacaacttaaacaccagcaatgtggaaactacagattacctcatgttgccacctgacagagaactgtcggctaatgattacatggaactaaacgatctccttgctcttgacccaagcttctccagtgaattttctgctcaggacaatcaatatatgcaacatcctcttgctcagtacaatggacattatgatctgtcaggtccttcagagccaacaatgcctagcattttcgatgtttttcctcccaataatggagtcctcgcaacagatgatccagccaactacttggacccagccatgcagttccctttctcatgattggtcaccatttgtcatggagctcgctgttgctacaactctatccaccctgaacgtcaaggacgtcattgatgtcatgcctgggctcatgaaatcgtctgttgctcttctgaaccaagccgaccttggctggtatttcttgtaagcacggtgcttggaacaatctgcatcgactgctgtatgctcccaactggttgagctaatggccaatctcggctcactctgctgaggagatcatagcctgtaaatctttgtttatgctattacttgtgtgtatcgcaacctgcctgattaccattgtcttgtgttttgagttttgacaatatgcaaaccataataatgtcgtaatatggaactcgtttatcatgtttattccatcctcccgttatgtgagcttttggatggtcgatgctttctaagctgttacgttctcttctgtgttatgtggatttccttaaaacagggctaggtttcaactattttgtggtctctgttttaacagtggctttcaaaagtgccctcgaattcattgactcagggttgataagtaggacctactcgtcatagagttgcacaaggccaaaactactcggccaaaagaaaggacatcaagtgccaccaccggtagagagaagacggagccgaaacttgcttgactgcatcgacga

SEQ ID NO: 43288 - DNA, 2578 bp, Zea Mays
atttgatcatttggatggatgtctttgctggtttgatctgcgcaccaaagatgcacttttgaccatggaggcagcaaataaaccaatttcttcaatttgctttaaaccaggaaatgaagattttgtgtatatctctgctggaaatgaaatattgtcctttgatgttcgtatgggaactcaatcaaagccattagagacatataactacaatagagatgaaatcaatcagattgctgtcagctctaaaggttttctcgctgctgcagatgatagtggggatgttaagatttgcagcagcgtgcaattcattccttggagaccttggacagcaattactgggggccttgactcaaagctcgctgcatgggatttctccaaaggacgaacactgttttctattgattatgtagcagtttctgaagagggtattttgggagggctctacaaggtttgtgctgttgcaaggggggatggtgctgttgatgtggttgatcttgagtatgaactggcccctgcgaaatcgaagggacctcctcgggcagctattttgacaacgagatcaaaaggcgctgaacttggagatgggagctgcaatcaaagtcgagcgaaaagaatccatcttgactacaccatgggcggccatactgcagctgtgtcttgtgtcatttggtgagaaggggaagttcctcatttcaggtggcaatgatgcatcagtgaagctgtgggattggtcgaaaggattttactctgaaacaaacagcaaagttgatttggttttggatattgatgtaaagaaaaaggtaaattggctgtgtactgctccaactgattcagataacttgattgtgtgtgacacatccaaggtggtcaaagtatatagtttccggtagatggatcaaggtgtagcctcagtttgtcaggcagttatctgagggagtgaagcttgtctgaccgttggaaccaatctggtcctgactctggtatccagatattacaagcctgccgcagacagttcctgaattgtgaggtcattggttagcaatttgcaatgtcagttgtggcgcagaacagatctgataaagtatatattattttgttactgtcagaactttttgtacaacttccagtctgctagcttagctggactcggcatgtatatctctgttgtacggtgaaatgaatttatgtgtttggagaaaataaggcttgtttgtgctggaagagattatcttgattgtgtttatccttttggtttctatagattgtaggcttgtagcttttatttctcggtatggtgcaacctgtggtagcacatataatataaggatgatgtatgacgaatgtttttctgcgctatactgacggcttgttgaaccgtctctgaatgatctttctgttgcactcttgggcaacttgtcagtctgagactctcagtggctgcaaactcttgttgtacccattggaacaggaggaagaagaggggagttcaaagcttgcctctttaccagcaatagctaagaaagttttatcttacgaggagggtatttatgcaaaactttccaggaagtggatagaagaaggcctcagaaccgtatccattggaagacaggaaccagggggttttgctgctgttctttggaggagaagagaaatgggaggcttgctcttgccgcatcaccgaacctttccaaattctttgcaagcttccatcccgggacctctctctcttcacaaaggcgaccgcaaaaaccttcattactttgcacctgatgtgcacctcttctgttccctgcggcaaggctttccacgctcatcttggtcggccgtcatcagatcagaagccagcggcaacgcggtggcgtcgccaggcacggtcatcaagcgtagcaaggaggagctcatcaccttcttcagagacatacagacatccattgccgagtgctcgcgtaaagcttccaagaggacgaggaagcagccgcctgatctgttccaagaggtccgcaggagggaggaacagtcacacggtggaggagatagcggcaccgacgacgtttcagagggaccgaggaaagtgaagagtcttgaggacatgaacgtggctggattgagagagttggcgagggccagaaggatgaggggttactccaagcttaagaagggcgagctcattgatcggttgagaggggctactacgtaataaactaccatgatgcagagcagcttcgcagttaatagggacacatgttcttttcgaacgtatgatgagattaccgatcaaaaaattgtatgatgatgagattaccgactttccaaacgatctagtcagttcattgataagaactagaacaatgtgtgtagttattatactatagaaccggtggagctgtattgttgtactacgccgaaacttttgtgtaggcatggcaatctcctgttgttacgtaagttactttgttatgtacggaattagtttctctaaatctaccatggattgtgtatttctacaacatctgtttggaatttgatgtacattctaactaggtggcaattggcaaataaagaagtttaaaatggccta

SEQ ID NO: 43289 - DNA, 2087 bp, Zea Mays
aaagaggaacgaacaagagagagagaaagcactggctctgtagctagctagctacagcgatagcaactcacaaaaaaagcggcaccacacacccacacacaccagaaaacacaagcacaagcaaataagcagcaccgccagcccggccaccaagaactccaagaataaccttcactgccgtcttcgttcgatcccttacgctaacactagctgcttcaggctgcagccaccagccaaaggtagggcgcgcgcgcggcatccatggaggcgcgggcagcgtcggtcccggacctttcgctgcacatcagccttccgagcagcgccgcgtctccgtctcccgccccggggctgggcgctggaggagtagggcgtggtgcgcagccgtccggaggggacccgtggcgccgtctgaacggatccacggcgtcgaccgagctgtcgctctcgccgccgccgccgcggcaggaggcggctgccggggacgtccttccatggcggctccggccgccagcggcgaattactcctcgtccaccgcggaggcaacgttcttgccggtgaccgtgccgcggctttcgttcgacgccgcggcggaggcggcgccggcaaggccaatcaacggagtgcccgtctacagcagcccgcggaccggcgccgcccatccttttcttggcgccggcggcgaataccggcagtgccaccaccacaaggccgccgtggggctatacaatccctaccactcctcgtcgtcgtggccctcgtccctgcggtcgacgacgacggcgccccttggcgccgtggcgccgccggcgtccgaccccacggcgtcgtcgtacctctcgccgtccgcgtaccaccggatgctgtcgagcaccggccggctccacctccagggcgtgctcgccgacacgctccgcggctacggcagcgggcaccaccaccgccagcacttgggcagcctggccgcggcccgctacatgccgaggctcccggcttcccggcgcggcatgcgcgcgccgcggatgcggtggacgagcagcctgcacgcgcgtttcgtccacgccgtcgagctcctcggcggccacgagcagatctgcttggatcatttcatgcgggatgtgattaatctccctctccacggccggcggccggcctctctgcgcgcgcacaacaggggcgacgcccaagtcggtgctggagctgatggacgtgaaggatctgacgctagcgcatgtgaagagtcatttgcagatgtataggaccgtgaagagcactgataagccgcctgcagcaacctcatcaggagggggagggccgcctgtggacggtggtggcgggtccggcgacgacgaccacccgagcgattggcggcgggctccatcctcatcagctggtcgggacgtcagcccgcaggcgttcactggacaccggtcagcctcctcggacggcgcggcaagccatgcgggcggcgacgttgaatgctcctccgccgacgattccgacggtggcaggccgcgcagtgcttctccgccaaggctgccgccaccaagtgcgtgcaatgcagcagacacccttcattcagttggcgtaccatattccactactgaggatatggagcctgcttgtcgatcagctggcttacaacattcactcaaccatgaaatgagctgccctcctagcctggagttcacgctagggcggccaaactggaatggtgcagaatagcatcaccagcagctagctactagacacatgcatggatatatggcacattattagttcgacacttcatctagactgcttacaacacctgattggtttttgcatctattagaaatttagatagttccatgtttaatccaaaaatatcatatatatagtagatttatgacaacatgtacgtgcacgtgtgaaatattactactcacaacaataacagacacctacatgaaaaatatactgcaggaactatatttaacttaacaaatttagagaaaaaaattctgcattgtcgaggtacctatatatgctcaagacaccagtgactacattcacacgaatcaacactatgtgttgctaaaagtagcag

SEQ ID NO: 43290 - DNA, 2373 bp, Zea Mays
tgcgttgcattgcatggctccgccacacacaccccttgcatgtaccccacccaccacggcggcataagtatctccgccggctacgcgcgatccaggcccggccgcgtgcgtgcgtgcgtgcgacgactgcacccatacacacatatacgcgctctggctggctgcctgcctggcttgcggagctccgtttcggccggccatctctcgctacgctacgagcgcgcgcggcccccgcgcccgtgtcttcccgctgtcgaccgtcgtgttgatcgtacatgcagctgctagtagcgaactatagttgcagaccgcatcagtgcgtgacaagaggatatatattatcagacacgcacgcgatcgcgcggagatgaaccagtgcgtgccgagctgggatctggtggacgacccgacggcggcggtagctggcggcggaggcggcctaaaccatcaggtctcgacgaccgggggcgcgcaccggggcctgctcctgcaggcgtcagctggaggagcaggcggcgggggcgcgttcgctcccgtcgtcgtgcccatgtcgaaccagtactacgaggtggcggagctgacgtgggagaagggcaacatctcctcccacggcctgctcaaccgcccggcgcacaataagtacccgcccgccgcggcgccgtcgtcggctcagctgcatgccatagcaggaggaggcggccgcggcggcgggtcgccatccggggaccgcgagacgctcgaggcggtggtcggcgaggcggccgcgcggtcgcacttcctctcgcagccggcgccgccgtggctgatcggcgccgacgccgtggcgcgggccgcggcggacgcgctagtgccgtgcgccgcaagggcgggcgagtccgctgcagacggcggagaagcgggcgcctcgaggaggaagcggccgcgcgtggtcggcgacgacagtctggtggtgtgcgccagccaggggagcaccgcgcctcgccgccgcggcgagagcgcgctgctcacgcagctggacgcctgcggcaccgaggccgacgacgtgtgcggcttcagaacgaccacaaccaacaactccacgtccatggaccgtgacgacaaaggctccccggatactgagaacaccagcatcggcggaggggccagtgattcgcgctgtttcagccgtcgctcacagagagacggcttatgcgacgacgacgaggagaacgtggtgatcaacggggacgacggggcgatgaggtcgtcgatttccaccaagaggagccgggctgctgcgacccataacgaatctgagcgttcatcagaaaggaatcgccaaaggtttcgaagcatcccagcgatcgagacgacaacggctatagctgttgttgactgcggactccaaataagatgcaatactacaccaaacgaagggacaggatcaaccagaagatgaaaacgctgcagaagctcgtcccgaactcgaacaagacagacaaggcgtcgatgctggacgaggtgatcgactacctgaagcagctgcaggcgcaggtgcagctgatgagccggatgggaagcatgatgatgcccatggcgatgccgcagctccagatgtcgatgatggcccagatggcacagatggcgcagatggcgcagatggcccagatgaacatgggctccctcggccagccgggctacgcaggcctcacgccgcccatgatgcacccgccccccttcgtccccgtgtcctgggacaccaccgccaccgccaccacctccctcgccccgcaggccggcagcggcacggtgccagcggacgccttctccgccttcctagcttgccaagcgcagcagaacgggcagcaaccgggtagcatggaggcgtacaatagaatggtggcgctgtaccagaagatgaaccaaacgcagcagagcgcgcccagcaacccgtccaagcagtgagcatgacgtacgtacagctgctttcttgtacattgtttgttcagttttgtttagatttttttggctcattttatcgcatttgttcagattctttcctctcaattgatgaggcctggaactgtgtaacagagtctatgacagctggggcccgcgagcaggaggtggcgcatgcagtcttctgcagagaggagagagaaatcgtggaaaaagggagtgcagggaaccgtttgtctgcctagaatattgtcacacccggcttttagaagaaacacaatacatatgtatgtgttcccagtaaattactcacacatactacgacatcgttaatgataatattacactataccggcttactagagcatgcaaaacccacataaatgatatatatcttaagagatatcaagtgggtaagtgtaaaaaataccaaag

SEQ ID NO: 43291 - DNA, 545 bp, Zea Mays
tggcggacctacagggtatgccaggtgggccgtggcataccctgtagattctagtccacctatacatataggtccatttacagcccaataacccaataaaccagcagcaaatacgacgacgacggttcatttgtttcgcttccgccgatccgtcttcgcgctgcgatcagccagccgtcacggcgtcaccgtcagcgttcagcgatctgtagactgcatctggggtctccgtctggcccttgccccttggcgtctgccggtctgcactgcgcttctacgtttgtcttcgagttcagtggccggtggctgtctgcactctacagtctgcttgctgcttggtggacgcagcgagccagcgacgcgccgacgcctcaacagccgccagcggtcagccgaagccaagcagggccgcaacaagaacaaggcaacgaacgagcgtaagttttgatagtttaataattcatttattcatcaaattgcaaattaaataattaatatggattgcacttctatggcatacccttgaccaaaatcctagatccgcc

SEQ ID NO: 43292 - DNA, 2403 bp, Zea Mays
ccgcactggacccggaccccacaccggacagcgtgtcctgggccacctcgcagtgaaatacgcctcacaagccacgccagcgacgcgaagagggcagcagcaagcagccgttcccccaaaaaaggccagagctcagcagagccccgcaggccgcacccaccagaaaccccagtcgatcggcggcggcgatgtcgctgtcctcggtgaagatcggcgaggaggtttggctcacatgcctctcccacgccctcactaccgagaccgaggaggtcatgggcctcctcctcggcgacatcgagctttccagcaagggcgccaccgcccttatatggggagcgtctccgcagatgaggtgcgagcggaagaaggaccgcgtcgaggtcaacccggagcttctcgccgccgcatccgcgcaagccgagaaaatgacggccaccatcaagaagactacgagggtgatcggatggtaccactcgcacccacatatcactgttctgccgtcccatgtaggtaaaaaattcacatttcctccatcggtgaatcattttgtgcccagggttgcacatttgcttcaactagctcaagtggcctgtggccccggtttgatgttggcgtttgcttgtctcacagaatagcggtaatgctgtcaaatatgtgtctgttcgatattcacagactacctcaagtgatttatcccttactagatcccaacttatgttcacttgccatttctgataatggatatcaagtatgataactgtcatagcactaagtactaagtagctttgcttttgagtgctcaggctttggaacgtgctaaaaatagacattacctttgctccagagcttcaagatgacagtgacatataatttccttcattacaagggcagagggtctatttgttgaccatttgacggtggctatggtcctatggagtatggagggcttgagaattcactagtatgttcgtacccaagcgatgtttcagttgctggatacaggctttgtgggccttatattttcttgttttagtgaagatgctcaaaaggttggaaaaatccaagtgactgcctttcagtcagagggtggacaacagcatgcccttcctcttgccattgctccagttattgaccttgattcatcccttagttcatcagataatgcactcacttcacattctgcattggttgaaggcatggaacaggacacaggggattccagggcctcaaagcataacaaggcctggaaaagatctttggatttctactctcatcctgacacaaatcattccacgaattatcaacccaatgaaaacactctcgctctgtacaatcctgataacacacaagaagcgcctgttgatccatacgattcagatatgactcaaagcctccaggaggctttgcaccggtcaactatggacataagtggtgcagagtatagagggaaggaggtgccactttttgtgctcccgacaaggtatctcctcaagctggacaccacgatgacctcgtactgtgatatgcaacgagtcctgtttgaagaggagcaatcagcatataatcaagctatgcaacaaaatatttgtgatgggaaaattcaccctcttacatccattcactgtacgtctacatacaactcctctctatgcaaactaatggagtattgtttgagtccagctgttattacgcttcaggaccgcctgaaggaaaatgaacttcggctatctatgttaaaagaggagtgtaagcaactggaggctgatacccaaggcatgagaaatggttctcctcgtcgcctcatgaatcacggagctggtggcagcggttcacctatggctcagagcaggcatcctttctccagccaagggagccctagaagcccgagcggcggcagccggaggagggcttgatgatgatcttgctccgcctgatgcgttgatgaactgtccgttgtggcttaaccagatgcttcctgaaaacccagatatttgacggacgaagtgcccccagacaacagacactgtacctgtacatacccattgccgttcagcgctgtgctattgtggaactccaacggtctcattgtgctttttttttgtagtattgggggggttccttatcctgttgccggagctgtgccattatcctttccatggttcatggttggcatgagcttttatagcctgtacactgtagactctgtactagaggttttccagaaaggctgaactgccgctgctgggatgtgttgttccgggcatattcaaagatgaaggctttctttgcttttgtaattgaaaaaaaaacccgacttcggtagcaatacattttcttgaaatgctataactctaagctacagccacagtgccacaccttgcctggatagtgccatagctgttt

SEQ ID NO: 43293 - DNA, 2019 bp, Zea Mays
aacattttcaatcttttagcacgtacaggaaaataagaactgaaacaagcgcatgtcccccgtcccgagtcctagcgcgactccgtgcgacggcgaggcctctgtcccgtcctcgtctcctcgaggcccggaggctgcgagtctgtgacacttgaccgtgaggcggacggcgactcggaggacttcaccagcgagtccctcaagcaccgaggccgagccgcccaccgcccgccgccgcctcgcctggcgctagtcgccgttgccgagcctgttcggcacatccgttggggtgccggggcaccgatcaggctgcgcacagccgaagtcggcctccgggtgccccaagctgcagagcagcgcgccagcgcccgtggaccggtgaatcaactacccttgtttcaaatcctgggtccgccattgggggcggtgaggccaccctagtagaggctagaggatgatatacacggcgatcgacacgttctacctgacagatgagcagctccgtgactcgccatcacggaaggatgggatcgacgaggccaccgagactgcgctccgcgtctatggctgtgacctcatccaggagagcggcatcctcctcaggcttgatggccacggcacaagtattgttccatcgcttttactgcaagaaatcatttgttcgatttagtgcaaagagagttgctgctagctgtgtttggctggcagggaagttggaggagagtcccaggaaatcaaggcatattatatttgtcttccacagaatggaatgtaggagagaaaacttgccaattgaatttttagatgttttttcaaagaaatattcggaactgaggcatgacctgatacggacagaacggcatctgttgaaggagatggggtttatttgccatgtcgagcacccccataagttcatatcaaactaccttgcaacacttgaagcccctcctgagcttactcaagaggcatggaaccttgccaatgatagcttaaggacaactctgtgtgtgcgatttaagagtgaagtagtagcatgcggagttgtgtatgctgcagctaggagacaccgggttccccttcctgaagatcctccgtggtggactgtctttgatgctgatgaagcaggaattcaggaagtttgcagggttcttgctcacctctacagcttgcccaaggcccaatacattccagtatataaagacaacgattcctttactgttaagagaatctctgatctacaggcttcaaaggaaagtccagcaagggctgttgctagcgataagggtacccctgtaccctcaagttctagccaggagaaggatccagtggctaagactatactgaacaaggtgaaggaaaaaagtgatgacgaaggtaaaccattgcccgctgaatttgatggaaaagaaaacccggtggcaaactcaaaaaatgacaagtctgattctggtgtcgaccggagtcgagaaagagagagatcaagagggcgggaacgtgatgccaggggtagggattctgatcgtgatagcaggggtcgcgagtctgatcgtgagagggaccggagacgctgctctagggaaagaagttcaggacactcagacaaggagaaatcaaggcgccattcatcacgcgaccgggctgactactacaattcgcattcatctcgtgagaaagatcggcataggcaccattgatcaaggtgacgaggatccccggtctgcagggcttcgctgcatggagaccaccacttggcagtgccgaccggatcatgaaaacttgtggattatcatcccactggtggttgtattggcttgattgtgttttgcaccttggattgtaacttgcaagatacgctagccatgagctgtgtgcaacttgaatttataaacacaacatataagatacaattgacgcacgtgcactaactgccattccagcagagcttgtggaatgttataaagaaacagtttgtggaatgttggcactgttagacctagtttggtgactagggaaacgaag

SEQ ID NO: 43294 - DNA, 301 bp, Zea Mays
ttgtgcatgttatcagaggatttatgtaattgtcgtagtcgttttttgaggagggcgtataagttaattatgcttacagacgactataaaacatatcaaggtatgttgtcattccgtataagatctgctcttctcatttgttggtcgtgaaaattttgaattcctgtaataatgttttgttttaggaatatttagaagatgcagagttcatcaacaaagatattctcaattttctagtgatgtatatgttgtttggtggaagtgttgcctggtcggagaaaacatcaacgaccaaggcatg

SEQ ID NO: 43295 - DNA, 396 bp, Zea Mays
cttcattctggtccactaatgcaagggcttcaaatcatggtacattttggtgctccctggatgcatggagaatttggagagatgggcctcatccaagattctcttcctgagatccttatttttaggaactaccaatctgccttcaaaccacaatataccctttccatcttggcagaaacatttatacttcttggtcttctgatggaggttctccttgataatctgtactcccttgtcaccgagctgggccatgatgatctggtcttgcaaagctagctcaatggaaatgtgagacaaagcaccagaagaaattacttcaatcttcatcttgctcaactcatcacacaaggtgtcaatgtgagaatccatcctgacatagttgcattgcaacttccg

SEQ ID NO: 43296 - DNA, 880 bp, Zea Mays
cttcttattcagttctgtttcgtgccaatcagacggcggccgcctcctctccccccgctgccgagctcacccttccgcctgccgcctgaacttgtctcgcccgcggcagatctgctccttccgctcgctgcaccgcaacccggataggagaccgcgcgcggtcgagaactacctggggaccaacgtcctcgaccagctccggtgcggccggcacacagctccacagatttggacagcgcaattacttaagctatttgtattcggatctgatccaaccctggtggtcagctggactcatcgcccatggagcacactaagtcaggccccagcagttggccagaactggccgacgtggtgccggtgccgcaggacgatgggcctagccctgtggtgtccatcgcctatcgagatgactttcgtgaggtcatggattacttccgcgccctctacctcaccggtgagcgaagccctcgcgctctccgcctcaccgccgaggccatcgagctcaaccccggcaactacactgtctggcatttccggcgccttattctggagtcactagattttgatttactagaggagatgaaatttgtcgaaaaaattgctgaatgcaatccaaaaaattaccaaatctggcaccataagagatggcttgctgagaaattaggacctggtattgcaaacaaagagcatgaattcacaatgaagatacttgctattgatgcaaaaaattatcatgcttggtctcataggcagtgggttcttcaagcgttggggggatgggagactgaattagaatactgtgaccacttacttaaggaagacgtcttcaataattcagcttggaatcagggatcagctattaagcttgcactgaagt

SEQ ID NO: 43297 - DNA, 273 bp, Zea Mays
gtccaccaagcgattcaaagagatcaccccgtcaactccattcttggtgacattcataagggggtaaccactagatctcgagttgcatatttttgtgaacattactcgtttgtgtcctccattgagccatacagggtggaggatgcactaagagatccggattgcgtggtgtctatgcatgaggagctcaacaacttcacgagaaatgaggtatggcatttagttccacgtcctaatcaatatgttgtaggaaccaagtgggtattccgcaac

SEQ ID NO: 43298 - DNA, 2320 bp, Zea Mays
agccactcagccgcctctcgtcgacacgaatgcgcaaagcaaacaccacgcgggccaggccaggcgcgcacgcacgggacgggggcatccgaacaccaccacccagcacccaccagctcggcgaaaaaaaagaaggaaaattttagataccctgccgcacgccgcgaccttcggccccgtctccggtctccgccttcccccacctattggggagcgctcctgattcgcgggagccagcgggcgagacaaagagaatcccccgctcctgcgccgccgcggatcagcgccgtcgccgatcggaggctctcgcttcccccggcgggcggcgcgcgccgggagatggacggcggcgcgggcgcgggcgccggccggaggaacgtctcatcgtcctccggatccaggaggagggtcctgcccgccgagaacgggcacggccatgacgccccgccgccctccaggcggtcctccgtctccctctcccgcggccactccacgtcactgaccggcgagaggaccgtgaaaaggctgaggctgtccaaggcgctgacgataccggatcacacaaccgtgcacgaggcttgtcggaggatggcgtcacgcagggttgacgccgtgctgctgactgactccaacgctttgctctgtgggatcctcaccgacaaggacataaccacaagggtgattgctcgtgagttgaagatggaagagacaccggtctccaaggtcatgacccgaaaccctgtatttgttctcgcggacacgcttgcagtcgaggcgttgcaaaagatggtgcaaggtaagttcaggcatctgcctgtcgtggagaatggcgaggtcattgcaattctggacatagccaagtgcctatatgatgctattgcacggatggaaagggcggcggagaaaggaaaagcaattgccgctgccgtcgagggcgttgaaaagcattggggagcagctgtgcctggtcctaacaattttattgagacgcttcgagaacggatgtttaggccatcgctgtctactattatctctgagaatccaaagtagagttgtcactgttgcaccatcagacatggtgttgacagcatcaaagaagatgctggaattaaaagtgagttcagcagttgtagcaattgaaaacaaacctggaggaattctgacatctagagatatattgatgcgtgttatcgcccaaaatcttcctcctgagtccaccacggtcgagaaggtcatgactcagagtcctgaatgtgccacagtggacaccccaattcttgatgctcttcacacaatgcatgatgggaaatttttacatttgcctgtcctggacagggatggaaatgttgtgactgttgttgatgttcttcacataactcatgctgcaattgctacggttggaaacagcggggcagctggatccgaggcaacatctgccatgatgcagaggttctgggattcagcaatgtccattggacctattgatgatgacgatgactcgagaagggtcgactagagtggtatctgaggcaacagatataggaagaccagccttctttccagcttctggcttatcaaacacttttgggttcaagattcaggataagcaagggaggatgcacagatttaactgtgaaacaagcggcctggcagagctgataaccagcattcttcagagggtcggcgacgacattgacagaaaacacctgccgcaaattttgtacgaagacgaggaccgtgataaggtcgtgctttcgtcggacagtgaccttatagccgctgtggaccatgcgagaaagatcggttggaagagcataaggttgcatctggattacgccggcgttggccggcggaagggagggggtggaccttcggacttggagtacgctggcaaggacgcagcatgggcttctgcgtacagcgccgtcgcggcaggggcggctctggttgctgggctcggtgtgatggcctacttgaaacggtcggggtaaaagcttggaggcggagagcacgacggcagagggagcacacgcttctcatcggatctgtgtgatacaaatgatactgcgtcggaacgagcagaatggctgtgtaagtaattcttgtgaaaaagagagagagagagggagattttaataatactagtgtcaaggcagtgaatggccgcctgcatacgagggagtacacggaactggtcgagcctttttggtgggttcagagtctccacgactaatttaccacggctgttagcgtcgtcacgattgtatttgtatcataaatcacacgatcattatacaagaagagtcttgttgagcctcac

SEQ ID NO: 43299 - DNA, 167 bp, Zea Mays
agctcgagcttgcagcccccggcccagacggtgtggcgcaccctcttcacctcgctggggagggaaaatgtatccgcccagaagagatggagccacaagtcctagtggggctcgatccccaggtacccttcacaaatggtggggaagatggccacctgggcgatgga

SEQ ID NO: 43300 - DNA, 164 bp, Zea Mays
agacagtcaagaagatgtttcgacggtctgctaatttatttttggtggaatttatggttggaaagaaataacagaatttttcaaagtcagcatagaagcgtagaacaagtggctcttgcagtcaaggatattgctagtagctgaggtcttgttggacttgacta

SEQ ID NO: 43301 - DNA, 795 bp, Zea Mays
cttgaccgcgctagcacgcgactgtggtcgtgttcatcgaattcgccaacgctctgttgctgattcgactgtcgtcgctggtgatagcttcgcgtgttgtcgagcccgtcgttttccctgtctagtgctcgcgcggttttctgctcgctagcgcgctctctcggctcgcttggccttaatccccatagcgtcgtcaatcttgtcggttatcgtcgttcgccgttgacctcgcttggccctatatcgttaggctagtcaaccaaagtcgctatcgcgcgcgcttgtccctgatgcccatcgcgcgatatttggatctcgtcgattggtcgctcttgttcgcagttaatttcgcttcgcagctcacctgctgttgtggtgttgctatcccgcgacactcgtgccagtgtatcatcgcctggccgggagttgtcgccactagtttgctttcgtccaaatagacaccgcggatgcttgggtctctggtcgcgcgtctttctatctcgcgctcatctcgtccgatgcctcagcaacaccgtggtcgtccttcctcgcggtgttgttatttaccctgttactgtaatcatgcctcatgcgctgctcgtctgaaatactcaagtcaagtgagcatcctgtgcgactcaagcccggttcgtcaagatttttcagtcaatgagagattccaagagtatgtggacaaacaagccccaggtcgatgccccaagtgctcagcgaaaggcctgagcaaggatcatcgtcgtttattcggattgctagttgatatggtacgttagttga

SEQ ID NO: 43302 - DNA, 1121 bp, Zea Mays
ccggacgccattcccacccgcgccctcggcttgtctctccgtccccgcttcactgcatgcatccgctggtggaaccagggcccaacctgcctggggacgtgcccgggcttggcttcgttggtggtcgtgtggatccctgcgttagctgcgcaggttgccccatgtccgcaccctccgacctaaatctcgctcatgtcgtccggtgccatgcgactcgctgttgtgcgctcaggtgcccaacgcggcgtgatgagaccggcaacgtggctggaccggcgacgcggctgcgtggcagatacatgtgagcatgggcactgtcgccacctactcgaccaggggctgctcctccccatctcacgtggaactcctcccttggttgcttctcaaccgcatcagcgaggaaaacaagcacagaactatgcacacttgttctagcatgaatggaggtcgccaagatggatttggcaaacttcatggtggatactagagacgtacaccaagaagaaactcacgtagtcattgtcgcaaggtgttgctagggacaacttctattcaatgtttcacattacccagagaggaggaaattctcaaaagaggaatacaaagcattcacgagagagatgaataaagctatgaagcagctgttgtcgtgaccggatttcaacaggtgggcgttggctaacgcggacatgatatctgtgtggctctgccaggaggaaactacagcagcagcaacagcaaccaacagcggcatcgtttcttgggactatttttgatctgcatgtgtgtagtgtgctttcttagcagcaataggagtgctccctactcagtcatttcatgtgagttgattagcaagggtagggtaacatctgagtgttccacattatgaagtggcagcaaatatgtagaatattgtagtttagtgagtcacatcttaggtccaaaaagtccaaacagcatctgaatcttgtaacattcagtgctaaggtgagtgaatctcaatttgttgagttgtatatcatgcttgatcatcatgaggatagaatgaacgtatttaagtgtttctaggcctgcatatgaagcaagctgtggcatatgaagcaagctgtgctgaagtgtcg

SEQ ID NO: 43303 - DNA, 1772 bp, Zea Mays
cggttctaccactgtctcctctccgtgacgcacgcccgagatcctctccgcgacacacgcctccctctcctctgccccaccctcctccccacgccatcggcgccgccatcatcggatccggcccaagatgcctccgccccacgcgcccgagtcgtcgaggcacactccttcccgcctccgtcgtccacgcatatctccgcctcacctcggcgcccgagtcgtcgcacgcgttcgcggtggtgtccatcccggcaccggcctcacgcaccgtctacagctcccaactctgctcctctcagttctccctccgcatttcgccttctctcccttcctctccaagcagcgtcctcctcgcctagatccgtacaagcggcaaataacctctccggcggcgagacagatggagtcgacctccggcgaggatgctccgaagcacaacccgattccgtccgcgctcgtctccaacctacagtccgtgctcaccgcccgccgcttgtccgcagccgaggtcagcaccgccgccacagctagcgaggttgaggccttggcttaggaagcagaggcgttcgctgcccccacgggagatgggacgctggcgaggcccatcgtgctactgacctatgccggggggatccggtcggcgggtctcgcggcgctcgtcgacgccctcgttgccgccgaccgctgcgacgtccacgtgtgtgcccccgaatcgtacgtgctgcgacttagaaaaccaaaccacagcgggaccagtgctcggatagggtccgacgacgatgcaagcaaggagtggcgcgcggccgacggggcgcagatcggctcctgcacgtgcagcgcagccgcgtgacagtgaagcagggaggccgcgataggtggcgcagggagggtgcgacggaggcaaagtgcaagcacctggggacttcagaaagaaagagtacaagtctactactgcagaaagcaaggagaatgccaatagaagcagatttcatgtatggatcggataaaatcttgagcaaaatgggagaaggtttgggttttctgcaatctgtcgtctcctcttctgctgggtatctccattattattctaatgaagagggctacgagttggattttcgtaggtacatttgagcgtgttttggaatgctgggatcgtgaaacacgtgaatatgttgccataaaagttgtacacagtatccacaagtactgtgatgctgcaatgattgagatagatgtgctcaatcgccttgtagaaaatgaaaaatatagatttctgctacacttggggaatcaaagaaaagtgaaagtgccatgtcaaagttgatgaccagaagcttgctattggaaccctctctattgaaaaatacccctagatagaaattgatttggttttcaataaagagtgtgagctgtcacacacatcgaaaactacacgtgtatttttctttggttacaaggttgagcaaccaatcgaggaagatgaataatggatcttgattctgaagatgaagagaaggagctaaacattccagtaatcaaggaaaatggcaaaggtgatgggaaggaggaccagagaagtgaagagaaggcagttgctgcagcttcaaaatcaagtcttgggcttgaaaaaaagcaaggatgagtatgagtctgatgattctaatgagggagaaggtgaaaccggagaatgagcagatgcggctgttcatggacaacagcatcaagaaacctgcaacatgcaacctgattttaagaaatttgccacctgcaac

SEQ ID NO: 43304 - DNA, 800 bp, Zea Mays
tccttccttccacaagagagacaaacctagctcgcggattgccggatggaccctcagcagccagaaccagtcagctacctgtgcggagattgtggagctgagaacacgctgaagccgacagatgtgatccagtgccgtgagtggggctaccgcatcctctacaagaagcggacccatcgaaaaaggaggcaagctgaggctaaccgcatcagggagaagtaccccgatagaattcctgtcattgttgagaaggccgagaggagtgacatcccagacatcgacaagaaaaagtaccttgtccccgccgacctcacagtgggacagtttgtgtacgtggtgcggaagcgcatcaagctcagcgccgagaaggcgatcttcatcttcgtgaagaacaccctcccaccaacagctgccctgatgtctgccatctacgaggagaacaaggacgaggacgggttcctctacatgacctacagcggcgagaacacctttgggctgctatgagtggcgccgcgccgccgtggatcgacgtcggacaatgcccctcctcctgtaaatacttaaaaaaaaaataggcgtctcaagaatccgtgtacataataatctggcatgtcttgcatcaaaagcaactcgttgcgtccactgtctgttgaaactattgaagcgtactaaacatttaagcaactcgttgcgtccactgtcagctctgggttgcttcagaagttctgtcacctgctgcgtcctccgtgagcttgtcgatgtggcaaagtaacacagggtgcctgtggtcattccacccg

SEQ ID NO: 43305 - DNA, 2930 bp, Zea Mays
ttcacctgctccctctcttctccccttcgtccaggggctagatctgacacccctcccacccaaccttgcttcgctcccgcgcctcccagatccgatcttcccatgcctcacttccgctgatcccactgccgccgcggaccgccgcgatggcgtcgcgcccgcctctccgcaccacctccgtcgcctccgtctcatcctccaccgagtcccccacctccaccggcccccccggcggcgtcccgcagtccatcaccgcgctcctcaacaacccgctcccctccgccgccgcctcctcgtactcctggttgtcctggccgcctcccaccatcacgctacccgatgcggctccaccaccgccgtcgcatccctgcgaggtcactcgcgccgacttcgcgccctaccttgccgctgtctccgaccccttcgcgcgcttcgccgacatccgcctccacgccagcgccgagctcgccgccgcctctgacgccgagggcgccccagcggtctcctctggcctcgccgcctgcctccgcgaggtgcccgcgctcttcttcaaggaggacttcgcgctcgaggacgggcccaccttccaggtcgcctgcccgctcgatgatgaagcgctgcaggagcgcctcggacagcaccttgacgtcgttgaagcccaccttgtgcgggagatagcgctccggtccgagtccttctacgaagcgcagggccggctgcgcgggcttgatggggagatagtcacgactgtagggaggatccgcgagctcagagaggtggtccgggttctcacgggggacctcgtcggggcagcgaggcaggtgcaagagctcaatgctacccgaggcaaccttgtgacgctgcagcagaagctaactgtcatcctgtatgtcagccaggcgcttaccgcgctcaagctgcttgtcgcagcagcagattgtgctggtgccctcgatgtcattgataacttgcaaaatctgctagatactgatgaacttgctgggctttattgcttttggcatattcgagatcagctgggaacatcactagattcagtgaacagcattctttcagcagaatttgtgcatgctgctgttcctgatggaaaagctgtagatgttatgattttatcaactgtgaaaagaaaggcttccagcccattgaatgggacggaccatgaggacaaacttcctgctgttctcagaatttaccgggatacacttataactgttatgaaagcttcaatcaaaaccacagtaggagagttactcccagttttaactgccagaccaatagattctgactcagtaactggagacagagctaccgatgctgatgctggaggccagtccttagcaaataagttgcggagtctttcatctgaaggatttgttcaacttttatctgccattttcaggatagtacaggtacatttacagcaagcagctgaagtgaaaagaatagttgagtgggtcatgggaaaccttgatggaacgttaggtgttgatgctagtaatcctacgttacaacatggtggtacagttattcctgatacccaagaaaatgactcttcaagaggctctaatactcttacacggagtacttccaagatcccatttgtccaaggaaaaacaaatgatttttccattataaattcgttaaagaatgttcgggctgatgtcttgagagagaacactgaagcagttttcgcggcttgtgatgctgcccatggacggtgggctaagctgctaggtgttcgttctgctttacatcccaggttaaggcttcaagaattcttgatcatctacaacataacagaagaatttatagctgctacagaaaagattggaggcaggttgggttacaacattcgtggaatcctacatcaacaatcgaagcaattcgttgattatcagcataatgttcggatgacaaaaatcaaggcagttctagatcaagagacgtgggttgctgtggatgttcctgaagagtttcaagcaatcgttctttcactttcatccacttattcttctgttaatggcatggagatgcctagcactgatgataactcaaagtttagtgatcatcggtctacaagtcaagaaccgacatattcagctaaaaatattgctgataatggcaaagtaacatccgggactggtgaaaacaaggttgaattcacttcacagactgaaaataatgttgccgggaatctaaagtccaccttgcaaacgattgtacatggaggtgttggctatcatatggtaaactgtggtttaatactgttgaagatgttatccgaatacgttgacatcagtaaatgtttaccatcactatctttggaggtggtccaacgtgttgtggaaatattaaagcttttcaacactaggacttgccaacttgttctcggtgcaggagccatgcaggtgtctggacttaaatcaattacgtccaaacatttagctttggcgagtcaaatcattagttttatgcattctttaattccagatatcaggcgagtacttttcctgaaaatacctgaagcgcgcaaacatctgttaatgtctgagctggatagagtagctcaggactacaagatccatcgagatgaaattcacaacaaacttgtccagataatgagagagaggttgcttgcaaatcttagaaaattaccccaaattgtggaaggctggaatggcccagaggataatgacgtgcagccgagtcaatttgctaaagctgttacaaaggaagttacctatttgcatcgcattctttcccaaacattgcttgaggttgaggtgcaaacaatattcaggcaagtggttcaaatattccattcacatattacagaagcattttcaaaattggaagtcaatactccctctggcaaagaataggtatgctgcttatttgtgcatcttttagca

SEQ ID NO: 43306 - DNA, 1153 bp, Zea Mays
caatgaggatgatgatgaagctgtactttttgaagatgacgaagacgaaggatacctattcgctgggcaaggtgaagataagaacaatgttcggtatgcaaatctcgtttataaggaggtccttacccccgcacgttctgaagatatggagggacatcacgactccagatttatttttgtaatactgcgcccgtcccaccgcaaggggttatcacaggaattctccctgcaagatgatttccatgatataccatcatccatgtcaccggattcagtgaagcagggacattttgatccttctatcttcacctccatttcattattgagcgctgaatcagctttctccagtaattcagcaataaacttctctttaaacaagcacttcagttcaaggagagctcccacaaccacaaatgcatttggtgggcaagctcttggggtgacaggactgctatcgacgttcgaggtgatgcgggacacggccagggacgagcagatcatgttcgtacgcatctcccaggtaagctttgttttcttccattcagtttgttgtattgtgttgatcaaactagccaagggcagaaccaaatttggggattcttcaactgaagccttggctggccggtatgaggtagatgggtatgtgtacagtgcagcggaagaacccaaaataatgattacagggaaatggaacaagtcactgagctgccaaccatgtgaccaagaaggcgacccccttccaggcacagagctgaaggagatctggagagtcgcccctgccccacagaacgatgggtaccagtacacacactttgcgcacaaaataaacagcttcaacacggcacctaagaagctgttggcatctgattcccggttgaggcccgatagatatgccatcgagacgggcgacatgtccaagtctggctcagaaaagagcatgctggaggaccagttcactccgcgatggttcaacgtgacggatgcggtcgcctccacgccgtggggtgacctgcaaatttgtgagtacagcggcaaatacacggagcaccgggctgccatagacagctccagcaccaccgacgacgagacagacgtcacttcggtccagttcgacccatggcaatatggtggtagctcatcatctccccaatga

SEQ ID NO: 43307 - DNA, 451 bp, Zea Mays
taaagactatcgagaggaagagtgtgttgcatctgtgtctaaagggaagaagcgaaagaaagccaaaaagaagacttcaaaatccacgagcaaagaaaaagaagaagtagactattatgcgctcaaaaagattcctactttggtgatgtggtacctccccgtcgtcgatcgattgaggtgtttgtttgctaaccctgaggatgccaaacttatgagctggcatgcttctgatgagcacaaaaacgatgggaagcttcgacatccagccgatgggaagcagtggcaagatttcaatgagaaccaccgagactttgccgatgaaccaagagatgttaggttcgcactgagtactgatggaatgaatccatttgctgaaaggagcagcaagcatagcacatggccagtgatcctcaccatatacaaccttcctccatggttgatgcagaaacgg

SEQ ID NO: 43308 - DNA, 2321 bp, Zea Mays
ctccctcccgctcactcgcgcaatccgtcgaactcgaacactgccatggccaccgccgctgccgacgacgatgtcaagctcgaatccttcctccaatggctccagtccaacggcgccgacctccgcagctgcacgatccgcgcatgcggcggcaagggcttgggggttttttccaccgccgcccccgagccgggctccaacgacggtaacgctcctctcctttcccccgagtcgacgaggctcatttggacgatgcgccggcgctgtgcaggggtggcgatggtggtaccgctcgatctcgccatcacgcccatgcgggtgctgcaggacccactcgtcggcccgcgatgccgcgcgctcttagaggacggagtcgtcgacgaccgcctcctcgtcatgctcttcctcatggccgagcgccgacgccctggctcactctggaagccatacttggatatgcttccgagcacctttgggagctccctttggtttactgaggaagagcttgccgaactggaagggacaactttgcaccgagctacgttgattcagaggaagtcattgcaatcctcatttgatgagaaggttaaagggctcgttgaggagcttttgcatgtcgatgaatcagcaagttgaagttttgtttgaggacttcctttgggcaaactcaatcttctggactcgagcactgaacataccattgcctcattcttatgtttttctgggctcatgtggcgatcaacaggccagggctgacaatgatgcccaccaggaaattgatattacagctaaggattgtagtgctgatgagaattctaaaccaagtaacacagagtcaatttgggttgagggccttgtcccaggaattgatttctgcaatcataatgtaaaggcactggcaacatgggaagttgattctgtgggaaatgctaccggaattcctgcttcaatgtacctcttgcttgctgataaaagtcctgctgagactggagcagagatctgcataaactacggcaacaaaggaaatgaggaactactgtacctttatggatttgtggttgacaacaatcctgatgattatctcatggttcattatcctttggaagctcttagacagatccagtctgctgatataaaaatgaagctactagagatgcagaagggagaattgaggtgcctcctacccagaagtttgcttgataatggattttttggtatccgttctagtgaagataaggatagcaagaaaaatactggtccgttttcaagttttagttggagtggtcaacgcaaagttccatcatatcttccaaaaattgttttccctcatgaatttatgagtactctacgtactattgccatgcaagaacatgagcttgaacaggttgcttctttacttggagagactttattctctaggcgtgaaactacactttttggagatgcagtgatcagtgtttcgttcgctacttctgaactgatctgttgataactgtgtactaaaaaggagtaggagactagtgactccgcactgaagacagagaaacatcttgtgcagcgatccaaagtgctatttgggaggtctgcggtgatcagggtgcactgggtttgcttgtggatcttctcggggtcaaaatggctgaacttgaagagggctctggaacagaagcatctgacgccgaactgctcgagcagttcgattccattcagccagaagactacgcgagtgaaagcggcgagaagcacgaaaggaagtcaaagacaaactaccgttcgtgtgtagtgtaccggagagggcaaaagcagctgacgaggctgttcctgagggaggtagagcatcttctggagctttctgcgaaagaacagagctaagagactctcatctggccctgcctgcatcaaggttagaactgcagggttgtgaaaggaggcacacccgttgcgaaagtagaataccgccttcgtttcgttcccttgcgaaagtactactactccgttccaggactacgatttcgtctcccgaggattccggattgcccgttggctgggcatttgtggaggagacgtcgtcttgcactttgctgccacggctaggctgtagctttacctgattcagcttgcagcggcggagctgcagcgaacagccatctagagacagctccagagctctggttttaccaaaatgcgtttcttttctagatgactttgccttcgtcagagatgcatctcctggtctcacgagtcacagttccgactccgagacggtcaaggagattatagtctgctaagattatgtaatctaaagtattttttaaaccggg

SEQ ID NO: 43309 - DNA, 350 bp, Zea Mays
gcctccatatagaaatatatggagtataaactgtgataaactgccatgtgtgacttgcatcattgggaattgggctgcaatagattttctacaggtacactaacctcgaaaacgtatgtgtagttgacgactagcaaaataccgtgagagtcgtaagtatgccaccgatatagaacgttactgccacattatgttggcaaaatcagtgaggacgaataagacgagcatgcatcctgattgttgcatcatgttgtcacctatacacccaaaatgcttctctcatccttaatccagtaaccattgattgtagataatgtggtgtaatgctgaattatgaacttcgatgaaat

SEQ ID NO: 43310 - DNA, 1903 bp, Zea Mays
agaagagagaagagggcgggcatcggccagtgggggctctgaggccgagggaggcgaggaaagcggcgggtgccgggccgcccgcgccggtgccgagccgcccgcgccggtgccgaggccctcaccagtcaccaccccctcccctcttccgtctgtcccccgcttgccgccaccgccgctgcccgctcgcgatccttcccctttttaacgctcccgcggccccgcgtcgtgctcccttttgtcgccgctgccttcgtgcccgtactcgcgggttctcctcgctcctcaatctccgcgcctgggcgcggcgttcgccgccggatctgggcgcgggacggtgccccggacggtcgatggcgcgggcggcgctccggttgggcgaccgcgcgctcgcgctcctcgtcctcgtgtcagtggctctgcttccacttgtcagttccgacgatggacacaaacactgcgagggtgttgtcaggggctgggcggattcctccacggggcgcgtgaaggacggggacaaactgagcctcaaggatttgctcttcttcctccacattcctaggactggaggccgcacctactttcactgcttcctaaaaaagctgtatacaaatgcgcaggaatgcccgcgttcttatgacaaactacggttcgacccaagccatcctgattgcaagctggttgttagtcatgatgactatagcttaacttccaagctgccaagggagagaacatctgttgtaacaatactaaggaacccagttgaccgtgtatttagcacatatgagttttcagttgaagttgcagctagattccttgttcacccaaacttaacttctgcaaagttaatgactacccgtgtgttaaaaaagtctcgtgctgtcagtactttggacatctggccttggaagtacttggttccttggatgagagaagatctgttttccaggagagatgccaggggtatcgacaaagttcatagtagtaagaaggttaatgcatatgatgtggaggatatggttatgccgttacatcagtacatcaatgatccagttgcccatgagatcattcataatggggctacctttcagattactgggttaacgaacaattcatactttgatggagcacatgaggttcgacattgtgccagaaagcatccagatcttggtcgtattgtgcttgaagttgctaagtaaaagaccactgtattgactacactgtcatgcaaaaaggaatttaaacagtagaataggctggaccagatgctgtatgtaggacttacagaggatcatgaagagtcagcgaggttgtttgctcatatggtaggagcacaggtgcttttacaatctgggacattgagtttggatctcaaggaagatctgcacagtgagactgactcacacccatccatggtggagcccggggatgaagaagcaagcgaacatctgaataacacacatggttggcaaaataatgaagccctgaactctaccagcgacgaacaaggaaaaggaaatatgactgtgggtaaactgatggaagcttatgaaacttgcatcgctaaactgcggaagtcccaatctagccgtcgtaaaatatcactaaagaaagtggaggaagcaaacttctcaaaagaggcacggaagctggtccccgaggcaattttgaaacaaattatctcgctgaacagccttgacatggaactttatgaccatgctaagaaaatctttacccaggaacatctgatgctgaaagctcagcaatccatggcggggcagcacagacagttggcggaacaagagggaggaggaaggaaacacgataggatatgagacgaaccgttctcgtactgcggtggaactgtggaaatgaagaactgtactcattgccagtagcaagc

SEQ ID NO: 43311 - DNA, 2340 bp, Zea Mays
atgggagcagccttgaattcgcatggaactggaattgttccgttggtccggatccgccgctcctgcgcatcgcatggtctgcgcatcgcatgctcttgcgcatggtcctgcctgggtgcgcaggccatggtcctgcgcatggtcgccgctcctgtggtcgtcgtgcctgggtggcatggtcctacgcatcgcccctgggtggctgtcatgcccctgggcggccaggatgccagtgcctgtaccaacttcttggatgctgatttcaggaccaaaattgatgtattgtggacttgttgcaagctgagggcactaggagacccttgtttgctactgatcaagatgggttcaaagaagatgtatcttgagtattgcaataactataatcattacctacgaaggagaagggtgcttgttttcactaccatccgcattgttttattgtggtataagttgcaactaaatagattgaataagaagcacaccaaatacggttctttgtcaaagagatttggaaagggaaaggcggctggaccgtttgtaccatgggaccgaagccaactgcattagtgagttgcgtatgcgcaaatttgtttttcacaggttatgtggtcatttaaggacccatgggcttttagtggactctatcaatgtctcaattgaagaacaggtagtcatgtttatgaaatttgttggccatagatggacaaatagatctgttggttttgaattcttgcgatctggagagacagttagtaggtactttaacgctgttttagatgctttatgtgtcctatcacgtgacctcattaccatgagaaccacggagacacatccaaagatatctaatagctcgggaaggtttcatccatactttgagaaatgtattggagcactagatggcacacatataccagcatgggttcctatttatatgcaagataggttcaggggtagaaaacactacccaacacagaatgtattagctgcggtggactttggtcttaggtttacgtatgtgttggctggatgggaaggatcagctcatgattcctttgtgctccaagacgcattgtcatgcccttcgggcttaaaaattcttgaaggtcattactttctagctgatgctggttatgcagcaagacctggtatactacccccgtaccgtggtgttcggtaccatcttaaggagtttcagggtactagacgaccagaaaatccaaaggaactgttcaacctacgtcactcatctcttagaacaacaattgaacgggcatttggcacacttaaaaatagatttaagatactaacaaggtaacacttttgacacaacaaggtctatggtaatcatatcagaatcagagaaggaaaaactaaaggatagagcaaggaggctcctttcaaagcccatcaaattcttcaatgaaatgcaggagctattccttgatagtagtgctgatggatctcttgccatggatgctactacttgcctaaatgaaagtcaacctgtcgatgataatgataatgatgatgacatatgcaatgatgtctccaactatggtcaacctgaggatgacctaggtgtgactctgacactttaccatctcctaaaattccatctcaagttatcgatcagagctcatctagctctggaatcaagcgtccaagaggagatgccataccagtcaaaagagatgtgagaccacggagccgcatggcaaagataggagatgaaatcaacactactttgatggatctccggaacgaacttaaacaaccaccacctccacctgttataccttctttgaactctgatgccgaattatggcaaaggcttgaaaaaatgacattgactactgatcaaaaactgatagttgggacaattctagcatcaaaggatcaaaagggcatgcgtggtttcttatccgcttcagctgaaacaatatttcagtcatgggtattcaagtttttgagtgattcaacactactgtgaagtgattaggctcaaccaagtactcttttgtggatggaagggtggtgttgttggctggctgttttgctgtgaattccttaggtggttgcctgctattttgctcagtggccaggtgatgtttatggcagcggtgatgcctgattcttttgcacgtcttctaagctgatcaataaggcttaaggagatggatggtgctgctcatagctgaatgtttagcaccattatatatacatatttgtgtgtgtattgtaatagcaactacctcagactgtttcgaatctattttagacctattaatcagttgtaatgaacatgttgtggagctattatgaaatgattattagcttatc

SEQ ID NO: 43312 - DNA, 244 bp, Zea Mays
cgcgatgcctcgctcccacgtggtggttatacggcagtgaagaacaggctggtgaggaatgtcaccccccccgcgccgatccaaaatttcccggccacaaagcttttggtgcggttaggaaggtttggcgatggactccggccaccaatcgaatgcaactagggcccggtcatcgaattcggcggcggcggcaaaccagtgtgctatgcacgacgccgagaggtctccggtttaaggctttcgg

SEQ ID NO: 43313 - DNA, 1755 bp, Zea Mays
aactggtagtgagtgtcctttgaagctgggctagacgctagagcacatcctgtgctgtgagaaacgtaacctaataaaccttgtgttcagcgatttgacggcctccgttatccgaagaaacaacttcaaccagacatgtggcgagcgaggtgattagctagtgacaagtgttgatctaagggagatcgttttgagcatgctatgatggagctctactccggatatcttgaagatcatttcaacctccacaagctaagctacaagatgttccacaggtagcactcgagccagagaggagtacggatcaggaaacgagcaggccgccagagagggtcatgagaaggctcgcgcagaacagggaggctgctcggaagagtcgcctgcggaaaaagctagagacaagccggatgaagctggcccagctagagctggagcttcaacgggctcgacggcagcagggcgcgtacgcaaatgggagcatgggagacccagctctcggatacacagggtcgatcgatccaggcgtcgccgcgttcgagatcgaatacaggcactgggtggacgagcagaagcggcacacggcggagctgatgtcggcgctccaggggcagcagacgtcggagctggagctccgcttgctggtggagacggggctcagcaactacgagcacctcttcaggatcaaggcgctggccgccaacgcggacgtgttccacgtcatgtcgggcgtgtggaagacccccgccgagaggttcttcctctggatcggcgggttcaggccgtcggaggtcctaaagattctgagcccgcagctggagccgctggcggaggcgcagcgcatgctcgtgggcggcctccagcacacgtcaacgcaggcggaggacgcgctgtcgcagggcatggagaagctacagcagaacctcgccgagatcctgaccgccgaggctgaccccttcggggcccccgacgcctacatgctgcagatggccactgcggtggagaagctgaaagagctcgtcaacttcgtcacccaggcggaccatctccggctgatgacgctgcaacagatgcacaagatcctgacgacgcggcaggcggccaggggcctgctggcgctcggcgactacttccagcgcctccgcacgctgagctcgctgtgggcggcgcgcccgcgggaggcggcgattagctagatgcccgcggtgtgggtgtggccagccaaaggcccaccaaagaacacgacgacgacgaatagtagcagttcgctgtatactttcccaagctgtaaagtccagtggaggacgaaaaaagcgacctcacagtcactggggttcggttccgacgaaaggatgcaaggcttttaagtcaatggcggtgtctccgcagcagcagcagcagcagcaagcggtgtgcgtttgtcaagcgaagcgactagagaataaaacggaaatggattgaggccttctctatttgacgggcggaagacgtgtacatatattgttttgccacccggccgtggccttctagagaggcgtatgattcatgatgcaggccatactaggatcatatttgtacgtggtggaaccgagagcaaaacaatattacaatagtttaaattagggtataccaagtgcaatcttgttggagcgaaggcaaagacgccacccttcgctcgaggccttcgctgcagccgctggtccgccggaggcaaagcgggcagggacacccttcgcaggactcggcgctttgacgaag

SEQ ID NO: 43314 - DNA, 2154 bp, Zea Mays
caggcgctgaggcgcagacgagccgagccaagccgcgagacgggacacacacgagcgcacgtcccgaggccaactcgagagcgtggagagtcgagagcccaccacccgcgacctaacccggtgacctctctcccctcccaggctctcccacccacctttctcctctccttcattcctccccgtcccgcgtcgcgtcccacgccgccgcacctccgcggcagcgctactcctcgccgtgacgtcggggaggcctcgctcgggggagggctgcctgcctgcctggctgggtgtcagtcggccgtagaggaggaggggggcggaggagcttgatctggggcacctgccccccctcccctgcgccgtcgggatgtacatgccgccgccgccgcccaccggcggcgccggcgagcagcctaggctttaccaggtctggcggggaagcaacgaattcttcttgcagggaagattcatatttgggcctgatgtgagatctgtgtttctcactatgatcctcatcatcgcaccagtggttgtcttctgtctgtttgttgcaaggcatctcataaatgatttccccgatagctggggaatctcagtgatggtagtagtggttgtcttcactatttatagatcctggtataataccccggaattctcatcctcctgaacctgaatccattgatgggatcaacgacacgggtgttcagactccacaacaatttcgtttgcctcgcacaaaggaagtacttgtaaatgggatcagtgtacgggtcaaatactgtgatacttgcatgctgtaccgaccacctcgatgctcacactgttccatttgcaataactgtgtggaacggtttgatcatcactgtccatgggtcggccagtgcataggactgcgtaattatcggttcttctatatgtttgtattctcgacgacattgctctgcctctatgtatttgccttctgttgggtgtatgtgatcaagattagagctgctgagcaatcgtcagtttggaaggccttgctgaagacaccagcatcagttgctctgattatctactgttttctctgtgtatggtttgtgggtggtttatctgtcttccatttatacctgatgagcactaaccagacaacatatgagaatttcagatatcgctatgatcggcgcgataacccatataacaaaggtgttctgaacaattttctagagatattctgcactgctatccccccttcgaagaacaatttccgggcaagggtgacagcggggcaagggctgcagcaaacgcgctcacagtccaggggtttcatgagccccagcatgggcaagcccattggagatcttgaaatggacaggaagccagtagcaccttgggacgagccaaggacggcggctgatatcagggacttggaagcagggcttggggtcatgttcgatgagaaagagggcagggtagctcatgcatccccagatctgagcagagaccttccagcagagttcgtggaaggccgatctggtatgcactcgaggcagtcaagctgggttcagagaggagacgcaatcgaagcgtcggcggtgcaaatggctaatgcgcgcaccacggaagctagcaacaatgttgcctggagcggtacacattaacccaaaaaatgataaaaagaaaaggaggaactatggtgtgttggcgatgtctccaagtgaacccccgtgtgtttgttgccacgtgtgctgctccgggtaaggccctggatcattctgtaatgtataaatcctaagcacaagcttgctgctattgtttcatccctggtagcgtaccaggtccctgcggctgctgctgctgtcttgtgtgtgtttgtttgggtgacaaattgatgaagtggccgacgagcttaagctcccgccaggttcggatgatgtatacaaaattgttgtcaggttccaacggatgctgtgcttggtttgccacaccagcgctgcgtgctttgggtactcgcaagtggcatctgggcaccccgctcccatgcaaacttgttcttggtgtaagcctggaaatctgctctgtatggttggcattgttgtatttgcagatgtggacatggtacttgctagtgtagaagaatgacattgctgagaaattggcttggaactttttgca

SEQ ID NO: 43315 - DNA, 2036 bp, Zea Mays
ggaaaaaccccgtgtcgtctttcctaggcgacattgcagctgccgcttagaccaagtcgcccatagctcctcgctacagtagcccgttggactccaggcctccatgaggaaggtggtggtggggcatctccttccttgccactttgtttcctccctccccaaattctagcgttccaccattggtccgcgcgatggcgttggcttgacacagatccaatataatcatgaatggatctggtgtctaggtgtcacacccgatttcacaaagcaaaccaaatacgaaccatgtacatgccaggattcgaatcacgtagacaacgattctagcgttccactgttggtccgcgcgatggcattggcttggcacaaatccaatacaatcatgaacggatctggtgcctaggtttcacaaagcaaaccaaatgcaaaccatgtacatgccaggattcgaatcacgtacacaatgattacacaaatgacatatcattgaataatgcccgaacataaagagtattaaaccgtattatagactattgtctttaacattacatagttcatcatactcatgcgaaagtgtaaactaagataacttgatcctttacaggcaactgactgggggagatcactagcctagccttcaaactcgtcgaagtcttggaactcctagagatctgctccggcagcttcatctgagcaagggttgcaccgagggcaaccttgtgtctatataaaaagcaaaggatggcgtaattgcagaagcaaagagaaaggccaagccagatcttgacaagaatgtgatgactgctgcaagtagacacaaaacaatgccagaagttgtaaaaaatgagttcgctataaaggtgagagataatcagaacgatgagcttaacaaaaaggtaacaaaggtgaaagcaaaggcagtctataaggatctcctgaattcaaagacgagaacaaaggcaaagccagatgttgccagtgatgagttaatagcaaaggtgatcgatcatcataggagaggtgagctgcgtttactgacagtcagtgatctgaagtgcttcctcggtgcgaagaaagcaaaggttggaggaacgaaggaagtgctaatacaaagagtgactgagctcttgcttgacaaatgcattgctattagcaactgagaagtctgaacataacaagcatgtgatgatgtgaacctacgcaaagtaccctttttttgtgtttctacttgttgcaatttgaagagccgcaatcaacaatagccgaaacactggtgctagaacaaaatgacgacagcaacttgaattgtgtgtgtgtgtgtgtgtgtgtgtgtgtgtgtgtgtgtgtgtgtgtgtgtgtgtgtgtgtgttttgcgggaacacaactataatttttcacttggattttgatacgtcaataccagaaaggcttaaagcctaactgtaggtagtcatctaaaaggccatatcatatattgatacctaagattttaggtaatgtagaggatagagtgaggagagagagaggaagaggttgcctcacaaggtcaatgtttaggactgagatgagcccagccaacattattatgttaatagttagttgcttgtacattgatatggtttctgtatattactagtaatttactcgcactccgctcgagtctttaaccatttgtttccaaagctaagagagcattgctgtagaaatattggcatggcacgcacctcagggcggtggtagatcccggggcggtggtagatcccggagcctctcagcgccactgcctgctgcattgcattggcatgaactgagaaatttggagaacacgcagcaggtgatggtcatcagaagcttcaagtgtcaaaaggtattaataatgttgcttgttttgatacagatatgatatatagctctaaagtcacatacatgatcacattatcgagtgaaggccgcataggaaagttgcagatctgagtatccatttgttatttcagtgggaccctaaaaaagaaataatgaactttcatttttgtaga

SEQ ID NO: 43316 - DNA, 2629 bp, Zea Mays
ctcaatgttactttatcctctcctcgtgcagccaagaccgggatgaccgccctcaccccctcggctccctgcccgtgcccgtcatcacctgggcaccatctcctcatctccatggccgcccttctcctatctcactgctcgcccctgcctttccttccttgagccgcgcctccctggtgtgtccacgccgtcgccgatgcctcctccctccatcttgccctctacagctcgtccctcacttagtcctccgccttgtctccggaccatgctactctttgtgcagcaccactggtcgtcgatctgtcaacctcgctggtcgtcgttcggtgagcccccaccattcttgccatggcttgcattccttgtgcgcaattaaatgtgtgaactggtgaatattgtagttcttgtggatgtcgagtcgaattaatagctatggttatatgtgtttttgtgtgtgaggttggaggagataaatccctggttgtcatgtggagaaggctttagtgcggagctcaccgtgtgtttgacgtaatgcttaactaggactcatcgtcgattttgcggattcgagtcaggtttgtactggtgagctgatttgctaattctgttcttggttcgatggtcggattaattaactatattaattacatcggttctcttatcggtagcatgtgtgtgttgtgattttacgatgttttttaatgctttattgtaagtggtaatttagttatgttcatgattgtgaagcaagatgcttcgtatgcgtgctaatttatgttagaggtacaagttatgtgaggagtgttttgatggaggcatacgtctagtattattaagttggttcgatgaatgcgatgtgattattttcatgattttggagtagtcgagttggacgctgaagttaggtttgagatgctagtcacgcgaagaacgtattagtaggtacgtatgcatagcatggttaagctagtagcgttgacaagctgatttcagctaaatctgagaaccccagtgatgaagtcgatgatttgctatgaaaatcgttatactctatgtttaatacttatagcgctttgccgataaggtctattagaggttgagcgaattcctactgtatggtgacatgaatgccttattgtattatgtggttttagttctacattaagatatggtgttagaatatttgaagtacctagcacatgagagttgtagaagttaattaggagttaacttaaaattcttgctgttgggactgcatgacccgttttagttatgcagctagttcgatgaagtaaaccatgttttatgtagaagtgttatatagaagcgttgtagctaacacctttacttgcttgtgtaaaaaattcatgaccataggtgtagtaatttaggagttatgatttttccaagtccagtttctgaatctgtccaaattctgtacaggtttcgaaaattggattatttggctaagctaaattgagaataagcccttagtaattatagaataattgtagtacttttcttaagctttccaaaagtcttgtatcaccctttttggtggtctagaaaccgagttacagctgttggaactatagagtctgaatctgtccaaatctagacagagaagtctgtttgtgttaactgactcagatatgtattgaattaagctgggatgtgtataaatgaattgtagacaaatctattagctttctaaaaagtctaggatcacttgatttggatgcctgagacaccagttatgaattttcgaagtgaatagtcgtattctgtccaaatctggacagaatttacgttcagtactgtttgacatttctaaatgttgaatctcattgtgatgataataccaaagttgtagagtactttataagatttctataaagtcctattttactatttttggatgcatattttgtgagttatgagctaatcaaatagctgttgttctgctgtccaaattcagcaagtatgagatgattgcttagagtttcttttgtgtgggtaactagatgtggttagttcttgtctagattaatgaagtcttatagttgcatatggttgtttcttttctttcttaatgcttgtcttacactttagcattttgagaaagaagtaaatactttggtgagtgtatttgagttagcgactatttagacctttaagttaaaatctgaattctacttagtggacgtgttcattagtgttttaagcctttagagtttaaagtgtggtcttgtaaagtctctgatcctaaataataatattctacctcctagaccatagaatgtcgtaatgatcatgtgactggtatgtgatgcaaattagtcaaaataagtagttgagaaaatagttgatgtgtttctatctaagctccaagtaggtatctgataatggcgagtcctaatattgttagtatttattattatgctttggttaggaagagcataggacgtgtgaataaacgtattatttcgtgatgtttgaattagcctgaataggttggagaagtgtaattagtatgcttagtgatatatcgatacctagtgtttacttgtgaatgtttcaatgtcatgacattaggagtttaatttattatcgtgcgtcattgtttagc

SEQ ID NO: 43317 - DNA, 641 bp, Zea Mays
atgcaatggtggctgggagcagagagcagtttgctgcctccctcctgcatcctagccttctctgcctcccactcactcgccgccgccgccaccgggacgaagaaccctgacctcgctgcagacaaagcgctcgccagggacttcctgtccaacttcgttggccctcacggcgaccccaagtacctgagcgtcctgcaagatgtcgctaacaggaagatacgcgcggtccagatcgaactagacgacccgtttcatcacaaggacgtcgatgtggtgttcctgctgcgtgttattgagaacgcgcggcgctacatcgacatcttcgcggaccgtggccatggcattggcgctgctattcatacttgggttttgctcattgtattgtcttcaagcaggagaacaatgagaacaagcctgtcacaaacagccgtgacactcaggagatatgccttgaacaaggccttcatatcctcaagatattcaaggattatcatgtcagcaaaacatccatcctgaacgaccttgcctcagcaatgggaaacactccaaacccatacgagcaagccatgtccacttgtgtgaatggccaagcgatgatgctatcgcatatggtgtggcatgagcctacaatttcactgtag

SEQ ID NO: 43318 - DNA, 1339 bp, Zea Mays
cgtgtcaccgtccatacgcacaagaaactacggatggttcccaggctcccagcacagaatccacctccgccgtcaccaccgagcaacgcgcgccggcgcccttctatttctccagcccccgctccgccgccgccgctctcctcctccgcacccccgccctgtttcgccatcggcccatcgcgcacctgcctgtgccacctgaggctgggaactccaaagaggaacagcgtccatggaggctggaggcgcaggaagtggtttgaatggggcggtgcaggcaaaggggactggggctgatgatggctctgccaagcggctgccgccttgctgcgtcaaggccagagccgccgcgccggagtccgaggccaggtgccacgccaccgtcgtttcaggatggttcactgaaccgcgatcgcgctgtggcaaagccagcaaagttcagtattacaataacccgatgtggccaggagaggccaattctttgaaagtggagaagatcttataccaggggaaatcgctataccaagaagtcttagtcttcgagtcgtcgacctatggtaaagtccttgtgcttgatggtattgttcagttgactgacaaggatgaatgtgcataccaggaaatgattactcacctgccactttgctcaattccatcccctaaaaaagttttggttattggtggtggtgatggaggtgtacttcgagaggtatccaggcatagttcagtggagtccattgacatatgtgagattgatcagctggttattgatgtgtgcaaagatttcttcccacacttgtctgttggatttcaagatcctcgtgttcaacttcatgtcggcgatgctgtggagttcttgagaaatgctcctgaagggacatatgatgctatcattgttgattcgtcagatccaatagggcctgctcaggaacttgtagagaagcctttttttgatacaattgctagagctttgaggcctggaggcgttctttgtaatcaagctgagagtatgtggttacatacacatttgattcaggatatgctttcaatttgccgtgaaactttcaagggttctgtacgctatgcatggacaagtgtcccaacatacccgagtggggtgattggatttttactatgtgccaaagaaggtccattggtgaactttctgactcctataaatccaattgaaaagctggaaggagctacaaaagctggaagggagatcagattttataactcagagatgcatagggcagcatttgttctcccgacctttgcaaggagagagctagaagcatattgcgtttccactgaaacaaatttgtgcgcaatgtcacag

SEQ ID NO: 43319 - DNA, 996 bp, Zea Mays
tcggcctttccactttccagcccccagttacgaacaaccccctcatgaagtcatggtcatggcgaagagcgaaggcccgtccgccgccgcggggctccgcccacggcagcggggcgccttccttctgggggagccaacctgggaggacaccggcagcgggcggtggcggtgcgcggagacggggcacgagctgccggagcgggagaaggaggcctacgcgcggtcccgcgcctgccgcctcgcgctcattgaccacgccgtcgcgcacaagaagccgccgctcaacgccttcaagccccaccccgagcacaaaaaaacaagaggaccagatgacttctggtgagatggctgatggacaatctgtgaagtcaaatgaagaagtggcaaagaagagcaagccaagcaagaagtacaagaagaaaactaatgtttccagtccattgccaggagaacctaaaccagagatggatggttcagatgatcgcaatttctgggtgcctcctgtcgagggtcgctgggatgatgatgacgggaaaaaaagatgggagttgtcaccgggaaagcacacattagcaaagaatgaagatgctgctgctggtggtggtgataacgacggtggtgatgaaaatgttacggctgagaaggatgacgctgaatcaagggaacttgcctcaatgacaaagcaaatttcttcctggctgcagctaaagcaacagattcgggcacccgtgagcgcagcctcctttcaaagttcaacgaaagggcctaaaagtcagcaggtagaatctttagaatgtcagcaacaagttattaccagggccggccctgagattttgggggcccagagcaagacttaaacctgaggccctctcttattacaacacatatatacatcttgtatcacttattagtttaggtgctaagcaattgttacaataccggtaagaaaaaaatttcatcctcgaagataaaaacaatatctcagaaatttcaaaa

SEQ ID NO: 43320 - DNA, 660 bp, Zea Mays
atcaggttgggacaaaagtggctgcagtttccctcaagacaaatactacgactcacgaaattttgggggtgctaacaaaagggaacacacagattggctcatgttagggcaccatggatttccttatagggacgtcacagttcgtgtggagagtgcctggagctcaattaacctatatgatttactaatagtcatgttcgatgtcaataggcatcttaatttgtaagtcttcatcacgctttgttaaatttatatttcatgttagaactcatggtaaatgcacttctaaacaatgcatagaactcatgttaaatttatatttcaagttaagttacagctgtttgaagtgtaggatctctgaatctgtccaaatttggacagtagagcctttcttatgttttctgaccttgatatgcattgaattaacctgggatgtttataaatgaattgtagacaattctattagctttctaaaaagtctaggatcacctgatttggatgcctgaaactccagttatgaatttttgaagtaagtagtcgaattctgtccaaatctggatataatatatgtttagttctgtttgacctttagagcaagacctaaagtaagttactctgagttatatacattttagtcccctccgatctgctccaccttca

SEQ ID NO: 43321 - DNA, 358 bp, Zea Mays
cacaggatggcgggttgattccccataacccaaggggctcttaagcaaaaagccaacggcgaagaggtaaggaacaaccagagccgttggattaaaaggatacggtccagattagatttttacaactctgaaccggcacgcagccctggccctcggatttggatctaacgatgtaaattttaagtaccaagatctaatcgtagccactggatccgagatctacggttctaattccgctgggtgaaggggtacactggatcagatcgggaccgtaagccagcgatcctacggctacagacgtcgcgcgaccaaatccaatctaggccgcccaagacccatcagacggtccgtacccttc

SEQ ID NO: 43322 - DNA, 855 bp, Zea Mays
aaggtgatttggtgtggctgggtgttttggcgcgatttttttcctcaccacacggggaggaaggcatccgcggcgccgtcatttgtgctggatgcggcggggatgcaggaacttctagatgcggcggcggcgcggaagcagactggcgatgcagcaccgtcggtggctaagaggaccggcatggggaaggcggcagcagcagggtcgacacgcttgcaacgtgctatggaggcggactttcaaggagcaggcacagcggagggccgccagcggccaggcacagctttgggattgaagcggaaggtggccgccatggcagctgctccatccgtggtggctccacctgttcatgatttcacgaccttctgtagcacagcttcatccatcgctgggagccaagccttcagcagcatcccaaacttcacgagtggacatgcaatttcttcaccgacaactcctccatgggtacgaagtgaagcaacggatccagcagcctgccaaatccagtctgaagttcatgcaaaccgcttacaagtattagaggtacaacagaaactatcatctgagaagcttgaaacatcaaggctcaaccatcttgcagctcttgagagcaaagacgctaagatgttggaggcatacaattctctcctcttaaaagacacaggagggtactctgctgaagagaaagatgaacatttggctgcacttatatgtttgaggaagcgtctttttccagaagattaagctgagcaagtagatgattgaggaagcgtctttttcttaaacatgcagcaaaatagctacaaagattcaatgtatacttgatcaatattgatcaataaaaggctttttatg

SEQ ID NO: 43323 - DNA, 459 bp, Zea Mays
gctctgggttccgataggatctctaaagtttacacctttacataccctggaatctctaaccattgttgcattccactttggtgagtactatgaatgagatatgaacattataaaactgttactttgatccctttgtggtggactagatgcaacaagcaattcatttaatttctcaactgtcacaaccaaaaacagagatgacataaggtaataagtaaatgaaatgacctatgatgacatgatgagggtggatagtatataaaaacaattgacaaaacttataattgtaactaagatccatatatttaaatatatgaattcaagagaattggggacatccatggtgaatatgtgcgctgacatgcagtcttggtcaaaattgcacccatcaccaaatggatgaatctttttggattgaaagaattgtagcattccctagccctttcttattgctttcat

SEQ ID NO: 43324 - DNA, 1004 bp, Zea Mays
gttcatccacactgttcaggaaatattgtatcatttaattcaaggaagtaatggtggtggttcatctagaactcattcgattccaagttctagctatggccatgatcggacatcaaatgcacaaaaattgtcaggagatgtaaactgtgagtgtgagttgcaactagcagttgatgaagctttagctagagagttgcatgaaatggagagcaaactagccaacacttcacttaatgacaataatggaagaaagacaacatcatcttcagcatttgatagaggcaataattctgcaagtagacctcctcaggtattggaggaggatgtgattgatccagataatatgacgtatgagctaggggaagccattggtacccaaagcaaagggctgcctgaaagtgtcatagcactcttgccaacttcaacttacaaaactgggatattctccagaaaggaaaaacatgatgaatgtgtgatctgttgtatggcatacaagaaccgagataggctgactaaattgccatgtggacatcactaccatcaagcttgtgttgctaaatggttacagatcaataaggtatgccctgtttgcaataaggaggttttcagctagcagtatcaaacagtgcagattcgtctgatggccaactccagcaaccgtctgtagtactgcatagatgtgcattatttgtataagcatgctgccctgttgctggcaggtaatgcgccgcattgctcaaggaccatatcacggccaaattagtgatatctccagcgaaagcaataagatctctgcttttgaactttttgacattcagagtttcagacttggtgccacactacagtcctttttatcatcgcctgtatactattcatttcagtatcttgtctccagtccattcagcatactttctggaatgttgcaacttggattgaaacagcgagaaatgttgaaatttaggcactggtatttttttaaagtagcagccattgtgtttagcaaa

SEQ ID NO: 43325 - DNA, 803 bp, Zea Mays
caaccatggccgccgtcgattctccttggatggtctcaagtgccctcgcctccggtggtttcagcttgccgtcgactgtccttgccgcgcgtgctttagtccgagctcgcccatgtcgagctccctcggtgtccctcccatgcccgtgcttgcccatggtcgcgcgctgtcgcccaactcgcccaagtcccccatggctgcgcacggtgttcttatcgatgctgtatcgttgctgatgatgtatagcttgccttgctcctcgcgttgccgtttgtcggtcttagatgcttaggtctctagccacgcgtccgtctctagtcttgaccgcattccagaagctctttctggttggtcgtgtcggccttgctggccatggagctcgccccgcgtatgctcgccaattttcttggccgcgtctgccgagcttcctagcgctccagctagccaatatcgtcaagtccgattgtcccagctcgtcctggtggccgttgatttagagctctacgcggactcgaccatgcccaacactatccatgtagccgtcgtacgtctccgcgtcatacgaaaggaaaccgccaatgcaacgtttgtcaggtgttggtgttgtgcgcggaccggatagcgccattgatttcgtggtttcaaatcagattttagtatggtaagttgattctctgcttctgttattttattttattttaataaatggattagtggaatagattgcgatatttaacgtgtgatcgatgaaaagtccaaagtagtatacattaatcgatgtagtaggtttgagcttaatctaa

SEQ ID NO: 43326 - DNA, 2502 bp, Zea Mays
ccagataggacgagacgatggtaacttaagcctactttgctcgctgcggcgatgccacgatggcgccacgctcttccaccttcctctcccgcgtcgccgacgccgcgcgcccgctctctgtctccgctcgtccccgtctctcaccgtcctgtccctctcacaccgccgccgcgcccgccttcagcccgcccgccttccacacgcacctcgcatccgtcgcgtcgcacctcccctccctcctagccgctctctcccgcgcccgcgccgcgcggctcccgctcctcccggtcacccgcgcgcttgccgcctcagcgctcctccgccacggtcgtctacccgatgccctcgcacacttcagtctcctcccggattctgaccccaccgctcctttacccgtaccgctatgcaattcccttctctcagcgctagcgtcgtccactgggtctctcggccacgcgcgcaaggtgttcgatagaatgctggcaggagctgtcgagctgaacaccgttgggttcggggtgtttgttaatgccgcaggtaggaaagatgacggactggctgaggtcctgcgcctggtggatgtggtgggctgtcaagggagacgggttaacaggtcggttgtggtggcaatgcttgtggacggtatgtgtagggagggacgaattgaggatgcttggcgtgctatggatgagatgaggctacgtgggtggaaaccagatttcttggcatataggattgtggccgaggggtttagggtacaggggagggtggaagaggaaggaaggatcttgaagcagaagaggaagcttggtgttgcgcctagaaaggatgagtacagggaatgtgtgcttgtgttggtgtccaacaggctgtttagagaagcgaaggagattgccgaggcggttgtgttgggagatttcccaattgatgatgatgtgctgaacattttggttggttcagtgtctgagattgatgtcgatggtgctgccatgttctgcaagttcatgatggggaaggggaggtttccaagtactgagatgcttgcacacctttgcgagagtctttgcaaaagtgggaagggcgacgaaatgtgggagattttgagggtgcttttggacaaggggtattgtaggaatgcaaggggttaccatttggtggtgtcattcttagggaaggctggaaaggttagggaggcatatgatgtgctcaaggaggtgaaaaaaaagaggctagagcctgacatttcatcatataactcccttatggaagcgctgtgtagaaatgaccttcttaggccagccaagaagttgtgggatgagatgtttaccagtgggtgtagcccaaatctgcagacatacaatatactcataacaaaatttacagaaatgggtgaaagccaagaggtccaacaactctttgaccatatgttccagaaaggtgtggccccagatggtgcaacatacacgtccttcatcaatatgttgtgccaggaaaataaatatgaacgggccctggaggtctttaataaatcttggatgcaggatgctggagtggctagttttgtgctgagtagttttatacttgcactctgcaaacaagcattgagtgttatgtgtaatgttccatctaatgttgagaacttgaactcacacatcatcttgctgaagcatctaaccgatgttggggaagtggagatggccattgagcacctagaatggattaggagcaactgcagctctagttttgagaacataatgaatgagttcatggcttctctatccacatcagccagtcttcaacatgtgacaaagttgatacagtatttacactcacggagacttattgatgatgcacattgtaggttgggggaagaatgattgagactattatgtggtccgatcaggcagccacaacattattagggaaacaagatctatattgcagtgtttatgcctatcacaaaatgaccagatcacaaaggtacaggaaagtgtgtaatgtaaccacactattcttacaagaaagagtgcgactagggtgcgactgtgcgaggtgtgtgtggattgcgggcgcggcggcggcttgagaggaacaggacggtgggagacagagagggggtgtgtggtggcggtggcggtgccagcgacgacgcaggagaggaaggtggaggggcgtggtgtcatcgtggcatcgccgcagcgagcaagtaggcgcgaagttagatcagaacgggttcggatcaaattatattgatatgtgcctctctaatggatacatccgatcatttttttaattgagtcagatctttttagctttgggttagatttgattttagatttttaaaaaagttggtctgtgtccgatcgaccaatcgatccgtggtcaaaaatatggtttgtgtctgttcgtagaatttgatcggttggattgaatttttttcaagcgagttaattgaattggacggatatggcgagttaattaaaattgttttaagcgagttaa

SEQ ID NO: 43327 - DNA, 3325 bp, Zea Mays
ttcgctctcccgcgccaccggcctagacgcctagtatgttctagagcataccgcgatggccgaccctgctggcctcccgccgcggcttcgcccgtccactgtgccgcctccagccgccgtcacgcgcgcgctgcacgcgatcaacacctgcacctccgccgcggcactcgcgcccctccgcgtccacatcctccgggaacccgcgctcctccgctccaccgccgtcatctccgccttcttcctcgcctgcggccgcctccgtagcctcgaccccgcactcgttctcttcgcctccctcccgcggccccacgttttcgtcttcaactccctcctccgctccctcccccaggcccccgcctgctcaccgctcccgctcttgcgccacttcctcggcctcggcgcccgccccaaccgctacaccttcccgttgatgctcacctcgctttcctctctccgcgagctcaacgtcgcgcactcccaggtggccaagtccggctttgcgcgcgacctccacgtccgaaacgccctccttgctcgctacgcggcctgtgatccggacctcgggcacgctgagcagttgtttgatgaaatgccacgcccggacgtcgtctcgtggaccacggtgatcaccgcgtacagaaaccacggccacagtttcttggctctggccaccttccggcggatgttcgctgcatctgttgctcccaaccgcgtcaccatggtttctgcacttggtgcttgtgcagcacatggtgctgtggacactggcatctggattcatcagtacgttcagaagctgggttgggaactggatgtcgtgttaggcactgcgcttgttgacatgtatgggaagtgtggacacgttgcggaaggagtccgtgtattctccaaaatgactgagaggaatgtttttacttggaactctatcattggagcatttgctttggtacaggatggagaaatggctctgcgttggttcttcaggatgaaggctgatggcatacgccctgatgctgtcacgctaatttgtgttctttatgcatgcgtacatgctggattagttgatattgggaggaaaatatttaacttgattgttcaaggcgagtatgggtttcaacctgggatcaagcactttggatgcatggttgatcttcttagtcgctctggacacctgaatgatgctttcagggttgttgaggcaatgccatcacagccaaacgctgtcatttggggcctgctattgcgaggttgcaaggaccatggtgattcagtcttgagtgagcatgtgacaatgcagctgctggagttggagcctgaaaatgcttcgcattatgtgacacttgcaaacttgtatgctgagacagggaggtggctggaggctcacgaggtcttgaagtggatgaaggaaaaaggattggcaaaggatgcaggctggagccttaggatgttagaggacaggtcaagcaaatgtataagtgatggaaatttcatggaagctcttgaggagatactgtaacgaaacatggctcctctgactcctagactggtagtgcccatagacgtgaagaagcagccatgggagcagaaggttcctctccacaaccgctggcatccagacatccctcccgttgctgatgtaaccgaaggggaactgttccgggtcgagatggtagactggactggagggagggttagagacgataactctgcagacgacatcaaatccctggacctcacaatcactcattatcttagtgggcccctaagaatcgttgattccgaaggggttccggcttcaccaggcgatcttctcgcggtggaaatctgcaaccttggcccgcttcctggcgacgagtggggctacactgcgatatttgagagagagaacggaggtgttcgtttcccaggattaacccatcctggtattgtgggaactgcaccgtcagccgaacttcttaatatatggaacgagagggagaaaagattggccgagacaagcccacagacccttaaactgtgtgaagtgctacaccagaggccccttgccaatttaccgacccctgagaactgcttacttggaaagattcaggaggggactgctggatggcacaaagtggcgaatgaagcagccaggactattccgggaagggagaatggcggtaattgtgacataaaaaacttaagcagaggttccaaagtttatctgccagtatttgtcgaaggagcgaatcttagcaccggtgatatgcacttctcccagggcgatggtgaagtttcgttttgtggagcaattgaaatgagtggattccttgagctcaagtgcgagatcataagaggcgggatgaaggaatacttgaccccagttggtccgacaccgctacacgtgaaccctatctttgagatcggtcctgtcgagccacgcttctcggagtggctagtgtttgagggcataagcgtggatgaatctgggaagcagcatttccttgatgcgtcagttgcttacaagcgcgcagtcctgaacgccattgagtacattgctagatttgggtactcaaaggagcaggtgtatctcttactatcatgctgtccctgtgagggtaggatctctggaatagttgactctcctaatgcagtggcaactattgccatccctacagcaatatttgatcaggatataaagccaaaacacctgagaggaagaccgggaccaaagttgataaggcttccagatctcctgagctgttcaaacaatgggcatattcctgtcacccaagaccaaagtggtacaagggcgtcctaggggcgtatatgatctggaagctgatgccgtatccttctacttatacacacaaataatcgtgttggtgtttccaacaatgtatgaggatagagacacctgagtggtgccatattttcagtgcctgtattgctacaaagttgttcattaatttcactctatagaaaatttcttatttggggtcgagtatgtaactagcagtgaagtgaggatgagataatatgaaagaaccaggcagctggtagtggctggagcgaagttgcagttgtgacagattcactctacctgcacacaagaaaccaacacacactgttgatccagttctagcatactatagacagatgctggttggattcatgaaatagcctccggagctgaaggaagtcctaaagagggtgaagaaatgagtttgacaaacgatgctggttgtagccttagggtgatgttagaggaccatatatgagcggtggatatttgatggaatgggcattgtggagttgtggttcagtcaatctgtaccattgtcaa

SEQ ID NO: 43328 - DNA, 560 bp, Zea Mays
ggcgaccctggtagcagtccgtgccccatgctcttctcacatactccgctccatccccaagatctcctccccacgccatgcgcttcttccagtgagccctcgcgccaaggatagggagcaacatgagaagtttggcggtccacgtcgacgagagcaacagtggtgagcctcaccgtgttgtgtcccgtcttcaatccgtgggcttgaagatttcctgttcgcctgctgttctctacagcacactcattcctcaacatgcctctaattgatgcaggtacaaaaactgttttggaaatcttgcaagttgtatttaccaccagcttttcaacatcatcaacagctggtttggaaaccttaaaagttctatctacgacagttctatctaccaccaactttatcaacatcatcaacaactgctttgaaaaccttgcaagttctatctacgacagcaggttcgttacttttcaaaaaaagggacgaaaagaagaccaaccaacattttccatcccctttcccctcttcttccctcattttagttgcatttcctttgggaaacaacc

SEQ ID NO: 43329 - DNA, 2692 bp, Zea Mays
caagactgctgcttgttgctatatatacgcatgggagcagaaggacatgtgcactatcactcgtgcataacactagcagagagagaacataaatccaaagatgggctggagaccacacgttgtctctgtgtcatcttctgcactactagtgctgcttcagctcctcgtgctactgatgctgcccgctgatgcgtcgtcatcaagccaactgttccttgaaagaactcagacgacgacgacgacgatctacgtcgtgtacatgggcgagaagaagcacgacgacccttccctcgtcgtggcgtcgcaccacgccacgctggcctccgttcttgggagcaaggatgaagcactcagctccatagtctacagctacaagcacggattctccggtttcgcggcgaagctcacccagccccaagcggaggagcttaaaaaataccctggagttgtgagcgtgaagccaaacacgtaccaccacgtccacacgactcggagctgggattttcttggcatgagctacggccaacagcagtcgtcgtcgtggtcgtcgtcgtcgcggctccttaggaaggccaagtacggcgaagatgtcatcgtcggcgtcatagactcaggcatctggccggaatcccggagcttcgacgacagcgggtacggctacggccccgtgccgaaacggtggaaaggcgtgtgccagacaggccaggcgttcaacgcgagcaactgcaaccggaaggtcatcggcgcgcggtggtacgccgccgacgtcagcgaggaggacctcaagaacgaatacaggtcgccacgggacgccaacggccacggcacgcacaccgcctccacgatcgccggctcgcccgtgcggaacgcgagccaccacggcggcggcctggccgccggcatagcgcgcggcggggcgccgcgcgcgcggctggcaatatacaaggcctgccacgctgtcggcggcagcgcgagctgcggcgacgcctcgatcctcgcggccctcgatgccgccattggggacggcgtcgacctagtgtccctgtcgctgggaggcttaggcgagatctaccagtcgttgcacgccgtggcggccgggatcaccgtggtgctcgctgcagggaacgatggccccgtggagcagtccctcaacaatgccctgccgtggggcatcacggtggccgccgccaccatggaccgcaccttcccgacagtggtcacgctgggcgacggagagaagctggtggggcaatcactgtattaccacaaccgctcagcggcggcatcgacgagcgacgacgacgacttcgcttggcgccatttgatattattccctagctgcgacgagaagaatctggggtcggaaaacatcaccgggaaaatcgtcatatgccgtgcgccggtgttctggtccgactatcctcctccgcggcagcttagcagggccagccgagccgccatcgccggcggggccaagggcatcatcttcgagcagtacagtaccaacagccttgacacccaggtcgtctgccaaggccacctgccatgcgtcgtggtggacagagaatccatattcacgatccaaagtagcgacagtaccttgccgactgtgtatcctctgccagcaatgtggccaagatttcgccggcggcgaccatggtcggatcccaggtcgcctcgccgagaatcgcgacgttctcgtcgaggggccccagtgctgagtttccctccgtactcaagcccgacatagcagcccctggagtgagcatcttggcagccatgcgtgactcgtacgtgctcctgtccgggacatccatggcatgccctcacgtctccgccgtcgtcgccttgctcaagtcggtccacccggactggtcgcctgccatgatcaagtctgccattgtcaccacagcatcggtgaccgaccgattcggcctgccgatccaagccaactcggtgcagaggaagccggccgacgccttcgacatgggcggcggcctcatagcgccggacagggccatggaccccggcctggtgtacgacatccagccggaggagtacacaagattggacgaccgcgccgaccgcctcaacctcccgtccatcgccgtgtccgacctcaagaactccgtcacggtctcgcgcaccgtcaccaacgtcgggccggcggaggtggcgacgtaccgggccgtggtcgaggcgccggccggcgtcacgatggacgtggagcctccggtgatcgccttcgagagaggcggcgccaggaacgccacgttcagggtgacgttcgtggcgaagcagcgggtgcagggcggctacgcgttcgggagcctgacgtggctggacgacgccaagcggcactcggtgaggatccccgtcgccgttcggaccgtcgtccgggacctcgtcgccgatgtagcttgatggtcgagttcggtttctgggcacgcacatacatgtgttccgcgttgtttacgtgctgtgtttgtctcgcggcgccgattcgatcgggttcttgtaataagaaagatggcgtggaaggaaaaaaatttggtgcagcactgctgcaaactagagtggtttgcagctcctcacaaaaaagaggatagaccccacccgcagcaacaataatacaactaaaacgttatctgctggacctacaggtggggtctatcctcctttttgtgagggg

SEQ ID NO: 43330 - DNA, 388 bp, Zea Mays
tcaggttatagttttgtgctgctgttgatggtgttaagtgccggtgggctcggccttcttatataagtataccccgtctttatcttcttattgaggatggtcacttgagctagcatatatttcaaacttatacttttgtaatcactccgataaaatactgtaaaatttttgtaacttgtaaaatttggtaataagatttccgctgcaaactgttagtgtgtgtgatttgtgttacttaatcttgccatcttggttgtaagtggtttatccggggtccttgggacactcggacagatcctgttaagttatctggtgcacatgcatagccgtctaaggtctttgagacaaggacaggtgcatgtgggcccaataacttgggaggttctgc

SEQ ID NO: 43331 - DNA, 649 bp, Zea Mays
aactcaaactggatgttggcccagccagcccatctcattccgcccacatgcagcctcaaaaggcccagagcccaatcttatcctctccatcgtcgtccaacgaacggcggcgcgagtgggcgtgcagaagccgagagaaggcactcggcagatggaggggctgacgtccagtgagatcgccggattcgtggtgggtgccctgctgctcggcgccaccatcgctgcccccaaggtcgacggcttcatcgcctcctcccagagaaggtcactagggatgtgtaagaggtgcggtgaccttcggattgtagcatgctcgcagtgcaaaggaacaggatcagctcggagcggagggatgctcagtttgggaatgctggatgacctctacgagtctcttggagccgaagccaagactgagaatctggttccctgcacaaagtgcaggtcgagaggccgtctcctgtgtccagaatgctccaaggtcgcatgaccctggaaccaaggccgtctcctgtgtccagaatactctcaatgcagttgttctcagtgcttttggttgggctggttgggtgttttgtatcttgttcttttttattctctcgtctaataaaaattatggtaaatatattgtcatccttccccaaaaagtaaa

SEQ ID NO: 43332 - DNA, 1733 bp, Zea Mays
tccatcaccgtccccacgttctcctccctccgcctctcgctctgcgcacatccccatgcccacgccgagcgcttgcgcctcaccacccccgtcgcagccgcggccgtggcggcgtcgacgacctcccccgactttcccgccgtgggcgccgtcctggggaagcccacagtgctcgtgggtagtggccgagaagatcggagccgcggggttcatgctgaaggaggtggtgcgatgtccagctcccaggtcgtcgtcctcacgctcctggagttttggtcagtgagatgttcgtcttcgtgctcagcctcgtcctcgagtcgtcgcgcaaacagcgagagcagcgtgggtctcatcatcaggatcacaccaacagggacggagatctgtcgtcgaagaccacctgactgtttctcatggcacaataagccacttcaggcttcagtcggttatgtgatcaccggaacattatgggctctagagtaggacttttgaggtattttgatgccaaaatttttagacatgccatcattgaagttgctccggtctttacaagatttacagagcttcaactaagtcaacttgttgagtcgcttgttacatatcttttgcatatgggaaaatagtagataagaaatgctaggcgatggtgcatgcatgatgaagctgctgtccattatattgacatgattgatcagaccacgcttggtcaccggatgatcaagaaacaattcaacaagactccaagagctggctggcaaatcgattgcttggaacagagcttggcttcgattctttgcattttgcaagaatcgattaccaagataagaaaaggcgtaaagctggcaaaggcttgaggttatatggcgtggctcaagaactttcggttcatcttcacagatatttacaaatgtatttcgtgtcgattatagccctccagatggctttggctttgaagttttagatgaaaatatcttgcctgtccaggatgacatgccgatgtttgactataatgttgaagaacaagttaatgattttgttgctgcagccatagaacagaatcttggttccggaatatggacaaacttatctatcgcgtgaacaaggatgcacgtaaaatagaatttttagtaggtaggaggagttccttagggctgttcacgaccagcttggaagacccaatggcaattgcccagcatcatgatgcggtctcaggtatagcaaaacaacacacgacagatgactactcgaaatgccttgctcttggagcatctaagaatgaaagcattaatggtatatagttggatatttcattcagagaggctcaagtgatagctgcaagtagttctaccttgtgcccagttttcttgttcttttaggtcaatgaaagttcccatttttgtggcgttgcttagatggttggtcctttcctcaaaaaaaaaagatggttggtcctgttgactaccaaaatgacttgaacttttggtgcatggacaaatggactagaagctttcctgtaacgtggcacatcataagatgttggttgattctcctgaaagcagattttattttactttaaccaaaggagaaccaagttggctgtcgtctcccactgtggcactattttttgggttaaaagtataacaccatcgtgagttgaaactcttgagacatagagataaaaaccaataaaactcacatccgacgtgattagcatgaccattactcatcaaaaa

SEQ ID NO: 43333 - DNA, 434 bp, Zea Mays
tctcattcctctcctccaaagtcgcattttctactcatcttcacatcatgtattccttgagcacaaactcaagtgaaggagctgaaggtgctatgcattgcaggtagccatggaggaggctatgctcaagctcaatgaagagtcttcaagttagcccaagtgtcatctatgctacatcaatcatgatcgtgagtctgcccatgatcagcttcatcaggactacttcatcgatgactgtgtgtgtaccctcctaattactttcggcataggtatcacattaggcaacaactgtttttagtattatgcatagatttggtgaatacactccgtatttcacccaaatagaatatgttctaggttggctcgttctctctcccctacaaaagtgcatcgcgtctatgcgcttgttagcctatggatccgctgcaaattcg

SEQ ID NO: 43334 - DNA, 3727 bp, Zea Mays
gattcgcgtgtggtgaaagctactggtagatcgcttgacggaattcggaagccactgaggcgagcggcgagcgcacaccgtcacaagcaccacgccgccgctactgactgacccgaccatcactcacccaatacttggaggtgcgagatggcagcgtcaggatcgggaggcaacgagcccggcgggcggccttggacggcgaccagcacgtgggtcctcggtcccgccggcgggaccgcggaggacgctgtctcgttcgagacctccgactacgacgccgaggcgtcaccggctggcgtcgtgctctgccgcccgccggccgacgcggagggcgacgtgcattcctgcccctgcgagctcactgttagtttcagggggaagtatgagattcacagggtatatgtgcgaagcacagctcggatatatgaactataccactctcctgatgcaaagggcaccggcaaggattatctatgcaccgtgcgttgtggacttgctgttaaagaaccgcagccctatggcgaagaaagtatgtcccagcggactggcagtgctttaaacagtgccaagcgtgaacatgaggcaaaaagtgtaagcagtggtagtgatgaagatagttgggttgatgtcaatattccagaatctcctgcgggaaataaaacactaacatctcaagaaaggaatgtgattcgtacctgccaagcacactatgaagctactgccgagatgactgatgttaacccatgtgcatcccttactatacgtcttctatcacttcagtcaaatacgtcagtgcacattgaggaaatctacatatttgctgatcctgttgaatccaccaatgatgtttcagtaagaggtcctggaaacatgggaggcagttctttgctggcaatgcttgctcctggccttatgcaaatgtctaagtcaagaaatttgaaaattgatggtagttatttttctgacaaatcaagggatcaagatagcgtcacatgtgaaagggttacacaggaagcagggctgtgtagcacaaatgattcaaaatatacgtctgcagggatagaaagtggaatgggccctacaattggtgttacagtatctgatgaaaaaagtagccaaagcgagttccagttcaaggagcccaattctcttccactgcctgtacaaacattagatagcacacaagcgccttcagtgaaggatcggcgagaattaaacacaggtcatcccctcatgaatgaaaactttactccttataatcatattgagagaaagctggatactctgctgtcaaaggtagagaaggtggaattatattgctctaggtttgaggacagcatgataaagccccttggtagcattgaggcaaggcttcagcgactggaggaacagtttagttcgttctctctggatattcagtctttgagaggttcttctgcatttatgtcagcaccagatggtatgcctaatacaaagagctcgcaggaggaagcacctaatgatgctaatgatagaagtacttctacaactgacaggaagccaggtttagttgttagggcgccagattttatgtcagatgattcctgtggttgtaatgtaataactaatggaaaccaggttagttgccatgggcctaatgtggtgccaaggctacttgtgaaggtccctgattttatttctcaagctgagttaactgatggaaacctccatgatggacatgctctatcttctgaaaaggagtgtaagccttccccgggtttaattgtcaaggttcctgaattcctagatgatgatgatgatgatgacgataatgacagcgacgacgaagtggaagggaagaaacaggcagaagtttgtggtgatggtgatgctcacgcatggtctgatgatactctgaagaaaaacacatccagcaacaccaagagcaaaaaaactgtatctatcaatggggcattggcgtccgcattggaggcattactcacttccaccataggaccaccatcttcaaaacctgctgtttgcgctaccagtaatttaagtgctgaaaatattaatgattccttcagttgctcccgttatcctggaaaaagtggcgagatgcccactaaatatggttcagttgaccaatttctgggtacatctggtgatccaaatttggtcggtgccttcatatcttttcaggatattgatacgactcataattctctgtcaaaggaaatgttggatagcgaggttgagataaatgaacataactgtgatctcaatacagaaaaggtggcatttgttgcaatcacagaaccattggatgtttcctcacagactgataaaattgacgaatctatttgtgatggaagttggatgaacagacaaaacaatggttctaattttgatacaatgccatatatcatgaacattgaacctttggatccttctaagcctcctacagtttttggacctgttgatagtggagttcaggtgaatgaagatagaccttccatatccttgctggagtttcttgcagcaaggaatgcaaactcttgcaagaatgatacttcggaggtatgccttggtaacgaagctgctgaaaaactgtcttttgagagaacatcggctggagctggtaaaaactcgaaaaataccagtcaacttctagtgaagaaagctcttgagattgacgcggacgagagattttttttgtctagtgtacccatcggggcaaaatttgaaagaacaagcagtcccgcccccagaactagtgggcacgatattaataatacaaaagaagctgtctcagataaggaatgtggcctggaggatagagagaatggaattaggctctcttcgaggatggactctatattttctcagtgtcatgctacagactccttgtcaagtttgagtagtatggagtcatttagtgcagcacctgccacagaccctgttgttccagggaatgacacatcgggaaatttcgtggaagatcttgcaggcattggagatcatcctgttgcaacactaatatctggggaagatctccaaaaggtttgtgatttgctttatgagttgaaggatgacatgttgggcatggcctccacagcaaagtgtacaaacaagagcagcccgtcccttgaagtcttgcttgctgaatcatctgattctgaagtgcaaatttctgatcttgaggagggtattgccagtggcgctggcattggctcagctggactgtttggtacattctcatcttcagatgacgatgcttctgctgcaggcgagcctttaggtgatgttgccgacctgactacaccatcagagccatatacttctgccttcaatgagcctctggttgacgtggctgacctgacaaacccttcagggacagatgctacttcagtgaatgagcagccttcggctgatgtggttgatccgctacatacttcaaacgagcctttggtcagtttggatgatctgccaaaccctccagagatgtcttttggtgggagcagtggagaacatcctgacagtcttatataggataaggctatgcgacactgatagttcagagatgagcgattgagcggaacatgttcctgctgctgcactagttggtgtgtgctgtacagtgatgactgttttcttcgtgcagaagtttctgtacataaataagtctttgtgtcctcaatagtttatgctaaatactacgaaagcaaagtaactttggtttcgggtt

SEQ ID NO: 43335 - DNA, 1501 bp, Zea Mays
gcacatttctcttctggaacataagtagcgtgcaaacttcgaccgggaccggcgatatccgccatggccaccaccactgccgccgctcgctggagcttccccgcccgtctccagctcctcaccagccgccgcttttgcttccccgcctcctctgccgcgccgcccagttctgtagcggggttcagttgggccgacgccctccgcgtcgctggggacggcgggcgcggcgacgagtccgacctctccgggtacttccggaaggtcaagagctgcaaccgcggaatggataaaaaagggcagttcgtgaagttctctgtggaggatcaggtcgtggggtacatccacaagggatttatcgaacacatcagagactttcatgatgtttttaccattgtcatggatgacaatggcagcaacactgtggagcatgtgtctctccagtcatcactaaggactccagaagaccgaacacatgctattggaagtgtcattaaaagccttggagaattgattccagtaacgtcatcttatggcatgcctgtgtacttctctctggaacgtgctgctgctccttactttggtataaaagcttatggagttcatatgaatgggtatgttgagaaggatggtcagaaatttctttggattggtaaacggagtgatgtgaagcaaacatatccaggaatgcttgatcatcttgttgcgggtggcctgccatacggaatgtcctgcaaagagaatatcatcaaggaatgtgaggaggaagctggaatcacaagatccatatcaacaaatgctacttctgttggagcggtttcttatatggatattgaaggctttagatacaaaagggatgttctcttctgctatgacctccaacttcctgctgattttgttcctaataatgaagatggtgaggttgatagcttcagactagtccctgttatacatgctgcaaacattataaggaggacagattttttcaagccgaactgcaaccttgtgatcatcgacttcctcttccgtcatgggtacataaacccagattctcgttgttacttagatctgctgcaaagcttgaggagtggtgattgttcctaactctcttttgctgtccacatttataatcattgttcaatttaatgaaacaaaaaaaaaatcatggagtagtctggtattatggttgatcataatcataattatgcctgggactccattgtcattttagtatgaacagagcattcacgtgcggttggggattatgcctgggactccattcatcgagttccgttggttggggaagcttctccttcccaaagcatgacgcaagtgctcatcatgtgcggttgctggaggtgccatttctgttcttggattcagccctttgcttgcattggttgttctggttgagagcaaacttgttgcttgcattgacgtatgatcgtgaagtacaaagataggcaatcaaaggacatgaatgattatagaaatttaaaaataa

SEQ ID NO: 43336 - DNA, 4096 bp, Zea Mays
tgccgaatagcaggggggaaaatggacagaaagccagccggtaaaaatagcttcaggcaacaggagaagcagaaaaaaaatgagaggttggactggaatgacctggtcctggctgggccttttgtccttcattcacattcccaaactgctccatcactttataccgccgtctcatctcgtgctcgtggtgtccgtgttcctcctcttggcggggccggccagaaaagcttgctggacggttggctccggaaaccggatgcgtctcaggtcaggcgcctgatttttacttgggttcccatggttcgtttccacagcgcaaaccacctcccagcttttagtcagtatagtctgctggagcccatggaggtgcagctggcgacggagcaaccgggggacccgttcctgccgctgcggtgggagagcacgggcgaccagtggtggtacgccacgcccatcgactgggcggcggccaacggccactacgacctcgtccgggagctcctgcgcctggaccccaacctcctcgtcaagctcacctcgctccgccgcatccgccgcctcgagtccgtctgggacgacgacgcgcgcctcgacgccgccgccaggaaccgcgccgccgtcgcccgccgcctgctgctcgactgcgagcccgataacgacaagcagcccccatcccgcggaggcggaggcgacgccgccaaccgcctcctccgcgccggctacggcggatggctcctctacacggcggccgcggccggggacgagaggttcgcgcgggagctgctcgcggcgcagccgctgctcgtcttcggcgagggggagtacggcgtcaccgacatcctgtacgccggcgcgaggagcggacgccccgaggtgttccgcctcctgttcgacgcggtgctgtccgcggcgccggcgtgcccggtcgggggtgacgacggcgagtttaggcgcgagatgatgaaccgcgccgtgcacgccgcggcgaggggaggcagccttgccgtgctcagggacctcctgcgcggctgctccgacgccgcggcatacagggacgcgcagggatcaacgatcttgcacgccgcggctgcaaagggccaagttgaggttgtgaaggatctgattgcatctttcgatatagcgaactgtgtagatgaccaagggaacacggcgctgcatatagcagccttccgaggccatgtccaagtggtcgaggctctcatcaccgcatctccgtctcttatatcagcaacaaacgaagccggcgacacgttccttcacatggcactgactggcttcgggactcccgagttccaaaggcttgatcgccagacggagctcattaggcaattagcgagtggagcaatcgtggatatcagcagcagcactattatcaacgcgcagaatgacgacgggaagacagctcttcacttggccgtggtttgcaacctgcattcggacgtcgttaagctcctgatgagcgtgccttgtattgacctcaacatctgcgacaaggacggcatgactcctctggatctactcaggaagcagccacggacgacggcgtcagagatactgatcaaacaactgatcctggccggtgggttcacaagctcaagggaccacgagactaggtcggctatcgcttctcagctgaagatgcactccattgtaggaagcccggggacatcgttcaagataccagacggcgagatcttctttctccacgctgctggagtcgacgtgtcgggcggcatcggcgaaggaggagcagcagtaccgttttcctccgttattgctagggctgacgtcctgcatggacccaaactgaagaggctcaactctttccaagacgcggcgaagcatatcaaggtcctattcagatggcctcgccgcggatggaacaagtcaggcagcggcggccgaaagggtctggacgacgacgatgcctcgtctgtggactctgccaagacctggagccacgaggagaccccgacaccgctgaggcagaggtattccaggatcggctcgctgttcaacaagcggacctacgcagcaggcagggcttcacctagcgaagcagtgaagaagggtggagtggtacagccagctggttctactctactttcgacatctctgtcgtcgtcgtcggcgtccttggttgacagtcatggctagagcttcatggaatatgaactatgagaaggttcttgttgacatcttgcacgagcacaatcatgtgaagtaccggggccagaatggttgggcaccagaaggttggcgttctatgacacaaatgttcaatgagaagtgcccgttggctaagtttacaaaggcacagatccaggaaaaagaaaaggaacttaaggcaaactataaggtgctgaaggaagcccgcaagcaaagtggtgttggatggaatgaggccatgggtatgatcattgctgaaccaccaatatgggcaaatataattgttagtaatccaaaggtcaagaaatttcagtcaaggccattccctttgtataatcagttgtcagcactctatgatggcagttgtgccaccggtgatctcaattttacatcaactcagcaacatacatcatcccgacaacaattacatattcaagctgaagttgaagctgaagctatgagctctttcaggattgatgatgacctcggggttaaccctgatttgaaccaaatctcttcaaatttgcatgggttgggatcttcaagtacccgtgttgagattggtggacatgaccgcaccccggcatcttcagaacagcgagcggagagtcatggaaggaagcgtaagcaaagtcagattgctggggttcttgaggaatatttggattacaaaaggcaacataatgataagttgcttgatgtggtaaatcagattgatcaacaagctgagggatgtaacaagaaggaagaatattgtattggaaagtgtgttcgtgtgttagagtcgatggaagatataactgaagaggagatggcagcggcaatgggtgtgtttaagtgcgaggagaacagagaaatatttctgaacagccagaggccacgtgtccgattgttgtggcttagaaacgagatccacaagcagatgtccaccaatctcaatattttcagatgtccaccaagcctttagtttcctgggaggcaatggatggagctctgcgacaataaatacaagatgttcaaaagaacgttattgttgtgttaacattttgggcataccaagtacttttttttgttatgagtctgtcaaacatatgttaaatttgtcactaatttcttatgagctatttctgtggtcaaagaaagttgtttatttaagtggcatgaatcaaaaaatcttaggagacttctgtttgattttgtttatttttaaaagaaagttgcttcagcgtacaaattttgaggggcatattgttgtttttgcgtacaaatttctgtttgattttgttgatttttattttttctattttacttgtgatttgatgatgatcacacttctagcagctgccgatgtgtggctccagagggcagcagggcagctgacccatggggcaccaaaggatgtcagggcagcgcagccccgctgggcaatgcccacccagggaattcgtatgacaggaatttgccccctccggtgctagctcccctgtgttttattggccccggtcaccaaaggatgtcttaggtgccgtggaagcccctgaacctgaactgtccgtcggcgtcgaggcggccccgcgcgtcggacatccactcgctcctgaggtcgatgagcctctggccggcgtcgttgacggtgccgtcggcgttgacgagcgcggcgtcctgcctccacatgtggccctgcatgaacccccagagcacgacgccctgcaccgccgggtgcgcgaacgcctcgcgcaggaccacctcgaggtcgtcggcgcggagcgcgtcgtcgggctcgcagacgtcgacctccgtgaaccagacgggcaggccggtggcggcgtagaccgtgtcgagcgcgtcgcagatgacctcgccgacggggtgggtgacgtggccctgcatcccgacgccgccgacc

SEQ ID NO: 43337 - DNA, 1321 bp, Zea Mays
gccgtgcgccaccgcctctcgccgcatctcgtggggcagccgccggtgccgcgcgcctcggatccgctagacctggcctccgtcgccgcgccgtccgggtatcgccgcctcttgccgtcgctccggccgccgcgcctcccttcgcccgacgcgggctgcaattagattctgtgccatttgccaggggatcgtgatattggatttggaggtcgatggattttgtagtccatgttttatgcgcagcagcgtcgttgtgtttgcatcggagtcgcgtcgagctgcgtccgcctctctctcttcgcttcccatctgcccgcgccgcctccgcctacgccgctcagcgacctagctctcccggtctctcgccgccgcgttcgcaccgcgctggccaccaacttcgtcgccgccacagcgactgtatccgaccatccgagggcgcggcagccttgcatcccacacccgccagtgcccagcccttcgcatcggcggtggccacgctggagaagaagccataccatacccacccgacatggtcgcaggtgagcctgcacttaatctgagactagaaaattgggctcaatcacgggttgtgtcgtcccgacggacggaggaggaccgtcgctagagctcgcgttgtcgcgccagctgctcccgtcgctcgtatatattactgcgaagtaaccctagctgccaccagcctcagcctcccctctcggctcccccacacggcactccagcccccagcctgccactcaaacagtacaccaccgccacaagcccgggccgaataagtctacagggcagcagggctaccgctgccgccgcacttcgccggcaaagaacgccctccagatcaacccctgcgatggagtccacggtgaacccgaaggcgtacccgctggctgatgtgcagctaacgatgggtatcctcgatatcatccagcactccactaactacaagcagctcaagaagggagcgaacgaagcgatgaataccttgaatagggggatatcagagtttgttgtgatggcggcggatacagagcctcttgagatcctactccacctccccttgttaggtgaggataagtaaggaaccgatggcagtgcggagagagctctcaaatcatgattttcattggcagtaaggaaccgatggcagtgcggagtaagctgatttagaagtgcggagagagctatctcctaaccaatgaaaaaagttagctccaccgatggcagtaaggatataattttttcattggttgagtttgtgcctgatagtggatctatttggcatatttgtgctgccatggtgctttca

SEQ ID NO: 43338 - DNA, 3656 bp, Zea Mays
cccctctctcctcaccctttctcgacgaacccgtcccacaagcacgcgcgacgcgagccaaggaagacgagagcgaggtggagagagagagagagaggaaaaccctgccccgtccaggcagccgtcgtcgacgcaaacggcggaggccacagagacgccacgcgagggagccccgccgcagcagcacccgcgccgtcccaattcggcgccccgatcgccggatctcctcgccggcgccggggccctcgatcgccctctccccatgcccgtgcccctccgggggtttcattgcgcgggcgccggccatgtcggacctcgcttccagctgcaaggataaacttgcgtattttagaataaaggagctcaaagatatcttaaatcagctggggttaccgaagcaaggaaagaagcaggaccttgttgacagggtattggctattttatcagatgagcaaggtcaacatcatcatggatggggaaggaaaaatgctcttacaagggaggcggtggcaaaagttgttgatgacacatacaggaaaatgcaagtatgtgctcctgaccttccctctagaagccacagtggatcagatttcagtcatttcaggcccaaagaggaagcgcctgacttctaccatgtggatactaaggtccgctgcctttgcaatagcacattgctaaatgacaatatgattaagtgcgaagatggcaaatgccaggtgtggcagcatattacctgcgtactcattccagataagcccacggagggtgctggccctgatattccacctcatttttattgtgaactgtgccgactgaaacgggcagacccgttttgggtgactaccggaaatccattactacctgtgaaatttatgtcatctggtgttggaaatgatggagcaagtgtacctcaaattgtggagaagactttccaactttcccgagcagatagagaaacagttcagagacaagaatatgatctccaggtttggtgcatccttataaatgacaaagtccagttcaggatgcaatggcctcaatatgcagaattgcaagtgaacggtattcctgtacgagtaatgaccaggcccggttctcagttactagggataaatgggcgggatgatgggccactggtaaccacatgcagtagagaagggatcaacaaaattagcttatctagagtggatgctcgaaccttttgctttggagttcgaattgttaggaggaggactgttcctcaggtattaaatttgatcccaaaggaaggtgaaggggagtcttttgaggatgctcttgctcgtgttcgtcgctgtcttggaggtggaggtgctacggacaatgctgatagtgatagcgacctggaagtggttactgaatctgttacagtcaaccttcgttgccctcggatccagaatgaggattgctggaaggttcaagccttgtgttcacatgggctgttttgatcttgaaacttttgtggaattgaatcaacgctcacgcaagtggcaatgcccaatatgtttaaagaattactctctcgagaacttgatgatcgatccttatttcaaccggattacatctttgttgcacaattgcagtgaagatgttaatgagcttgatgttaaacctgatgggtcatggcgtgtgaagggtgatgccgctaccagagatctatctcagtggcatatgcctgatggtactctttgtgactcaaaggaagatacaaaccctggtgtcgttagtgttaatgagttcaagagagagggtacttctgatggacatagaactttgaaacttggaattaaaaaaacccctaatggattatggcaggttagcagtaaaccagatgataagaaacccgtggttagaaatcacatccaaaacaacacggggtactcaataccaaacatagtacctatgatcagtagccccactgggagttgcagagatggtgaagatgtaagtgtgaaccaagaagggggtggtattcagtttgatatatcattgaaccaagagtttgacagttttgcgcataactttggtcaaacatacaatacagaggataggcaacaagagccacaacataatgctgcagatgtcattgttcttagtgattctgatgaagaaaatgacccgattgttcgcctgccagctgtctatgcaaatactcctacaaatggtgacagtttccctttcgtcactgatgctgctgtatctggatatcctgaagggtaccaggaggatgctggggttggtacaagtggccttggtttattgagcaacaatactggtgattttgaaataaataactggcaaatgcattcttatccacaaccagagcaagggttccagttttttgggactgatactgatgttggcaatccttttgttggtccgcataattcctttagtattacaccagaagactactcccttgactgtaatgttggcatagaggatccatctgcagctcacgatgtctcaatttgccgaaacagtaatgatgtgcatggaagcttggttgataacccattggctttagcaggtgacgatccatctttgcaaattttccttccaagtcaaccttctactgttccccttcaggaagaactgagtgagcgcgctaatactccaaatggagtccaccctgatgattggaggatatctcttacgcttgcggctggtggagggggtaatgaagaacctacaagtgttgatggcctaaaatcacagccaaaagttccatcaaaagaggcaggagttgaacctttacttgatgctgcttctgctctcccaagcatgaacaatgacagatgtaatggatctaatctaaacccgagaaggattgaaaatatattttctcatcctcgccaaccacgaatcttgatttttattgtggagggctatcaagttattctggttgatacaaagagaaacaccagtgtggatgctttattgcattaacctggtaagattcaagtgttctatatgatccaagtgggatctccatagagttcatctaatggttggtacaggatattttctaactgggagtggtttaacgtggctagtggagcaggctgtacattttccctgacatttactgggtataaggaatagggggccatcacttggcacaagacaaatacatgtgaatgttttgtgtgtaccatcattgtatttagggttcgggtgttaatttagatgtttatgaccctgatgtttgatggaaaataaattattccttgatgaagcggcggtcaatgaacagagcccttcggttttcagtcggagctactgacccttcatctgttcctgtggtgaagtggttgctgccgcttccgtggtgggaccaaccatgccgaagtcgtgtctagcagagggcaatcaatctccttggtgtctagcaggtttctttgtgcatcatgctgtattattctggtgtcctttgcaggtggtggtggattgtatcggtgttgtgaacccttctgattgaaaggtgctgggatggagtactggtatgaagaacttatcttctttcagaacatggcagcgcgttgtcggagcatggatgacgaaatcaccctgcgcacaaatgtgtcttgatgccagctgatcggtaggcttaggcctgtttgagcaaaaccgtcccg

SEQ ID NO: 43339 - DNA, 568 bp, Zea Mays
gtttcaaggtaagtatttgaaaattcttttgaagcactacgtaatgtctgaagagacgggcttcgctccgataccagctgtggcaaaacctcccaaggtattaggcccacctacagatgtccttgtcctaaggacctcggacaaccctgtagatgcgcataatcactcgacaagttcggtcatctgtatcatcatcatatcgcccaagagcgcttcacccaacacgtagacattacacacataactgaagtaagaataagcgaaatgattacaataacataatttacattcatatataaaatatatagagagtatttattacaacaccgggtgtctgagtgcataacatattattacatattagggaggtaaaacatcctcccaccatcaagtttactgatttgcctcctcctttggcaccaccttcgagcagaaacaacaaaactcggttgtttcatcactgaaagggaaatgtgcccttgggctatttctagtatattttggtgattaagtgcccaacacatattgagtgagtaattatatgccaaatgatggatgaagtgcaaat

SEQ ID NO: 43340 - DNA, 1406 bp, Zea Mays
atggcagcctccgacaccgacctccgtctctctccatccccacctcggccttgagcacaccgagcccaaaccccaaagcctcctgaccctggttagcttctgttttttactccatgcaaggacgacaatggcgaccgcctccgtcgccacctccctccccttcggcctccttctccctccgcggctattccgtgggaggctggtgaggtggccgcggcagattagggcttcggcgtcgagcaacgcgagtaacgtcgcaggcggggagaggaaattgggggctctcaagggcaggatccagaaaaacattggcccaaattttgttgctggtttctgtgttggcattgcatttttggctgctgttgcaagacagatcaccttaagaagtcgagagcatgataataaaggttctgttgctgatctagtaaggcgtggacagttaaaatcagggcaacgagggactgcaaagccccgcacattcgatgatcctttcaataatccattagtcaagattgatgagggtacatctactgtgcaaatgtttggcaaggagtaccgtctggctcctgttaggcttacaaaagaggaacaagaaatgcatcagaagaggagatcacgtgcatatcagtggaaaaggccaaccgtgtttctcagggaaggtgattccttacctccagatgttgatccagatacagttagatggattccagcaaaccatccttttgctgctgcgtcaagtgaagtagacgaggagaccgccaaacaaaatgtctatcaaaaggatggcgtcccatcccgtgttaaggctgagcatgaagctttgcaggcaaggctagaggcttcaaacgatgttaccagactccctccggatccaaggagtatgcagcgtaatgagagacaaatggaattgtcaggcaagccatctgaaaatcttcagggctccaagtttgagaaccaagatagacaactggttatcgagtctggtaaacatagctccgatggaagtttacaatcaaatgagccggaagggcaataaaatttgtgtactcaagcgctttgatgacatttgctttgttgcgtagtgttatcagctttgtggctgtagctgtagatagagaagtgttggaacagtgggcttaccggtttacatagtgagcagttaatatggaagtcgcttgacgtgttgtgaatggatatttatttttgacgagtacgtgggtactgggtaccttcaccgaacgactccggactagggtaggccaggccaattggccaaggacaaacctggctcggggtgtctcacccacttggcgcactcaggtagctgatgaaagtttgtacgggatacattatattgtgtattcagaaccaataatgcacaggaggaagtccacaatattatcgac

SEQ ID NO: 43341 - DNA, 797 bp, Zea Mays
cattgtccataaaaagcatacaatggatatctccttgtatgccccttgtgacctcatctatcaccagtgcaaaaagatctgtgatgttgtaaggtaccggattcaccgcatgaagaaaaaattgaaggatgaattggacagcagaaatacaattcaacactatatatgtcctagctgcaataaaagatactcagccttcgatgcactacaactggtaagctacacggatgagtacttccattgtgaaacttgcaatggtgaactggttgcagagagtgacaagcttgcttctgaggaaatgggagatggcgatgacaatgttagaaagcgcaggcgtgagaaattaaaggacatgcagcaaagaatagaagagcaattgaagccattggttgcacaacttgatagagtgaagaatattcctgcaccagagtttgggagtctacaaacatgggaaagagcaaatattggtgcttttgcaattggtgaccctgctgcagctgattcttctaggaattcacaagggcagtatggtacaccaatgccatacattggagagacaaaggttgaagttgatctgttgagtgatggtgtgaaagaaggtgctgaatcaggtaaaactgattctgaactgaaagttttacctccatggatgatcaaggatggcatgaatcttactaaggaacaaagaggagagataattgcgccacaaaaacttgagaaatctgatgccggagatgacaagaagcatgacttgaaagatgatgattgttttcgctcagctcaggaatgaacacata

SEQ ID NO: 43342 - DNA, 969 bp, Zea Mays
tgaactctcacgcatagcgcatagcactcgccttcgccttgtaccctgtgctcaagtcccagatactgagcctggacgcgagctcccttctcacgctggcttgggcgctgttgctgctcttccatgccttgagctgcttcctcacgcgctcgaccgaccatctgtcgctgctccatcgcacacgttccagctcgccggcctggtaccgtcttccaactccacgctttgccatccgccgacctcgttggtgagggctgacgtcgtcctgcagcttccacgccgtgccgacgctcgtcgtgcagccttgcttgttgtgcttgccgcagttccccatcatgctgtgagctgcaacatgctcatggttgttgtctcctcatcggccacgctcaacctcgcagctccttcgcgtcgttgatttccttgacccacagcctctcttccgacctcgtcgtgctcgcggtgtcatcgtaaagctgctagctgcctgtctcgctggccgtcatgctcggcatactttctccatgtggttctctcgcttcatcggctttccgcgtgttagagcagagtaccaagaagaagtgatttgtgaagaaggagcctgttctagttctgctgatccagtggtggattccatctaactgcttatcgtaatagaagatctcagatttcctactgtaataagggacaatctgcagcatcaaacaaccctcatggatagcctagcccatcgtggaaccaatccaaccgcccacctcattgatgttcttctaaacttagttgtaagacatgtttatggcatatattggatgtttgtggactcatttatgtgagtacttgttagtgctgtgaactattttgtgatacttgtgactttgtgatctttgtgaagaaacatgtgatctttgtgagctatgtcgtgtgtttgatgtatgtgatgattctgtgagctctgtgatgtatatgtgatga

SEQ ID NO: 43343 - DNA, 498 bp, Zea Mays
atacaataaatgctgaaatccagaaaaaaataggatctcaagaaagaaatgctggcatgttcaggagtccttgtaacaataaactaataaagcatggtggcagaactaaaccagaacacctttcgcaccttggaactccaaccatgggaaaacaccagaacgtacaacactacaacatcagactccaacaaatagttccatcaccaaacacatatgtagaccaacataacaatggaagttactgtggtttcaaactccactccagtacacctaccagaccataataaaaccccatgatgagggactcacacaaattctactgctaaagtactcctcacaatatcacatatcgagtatcccaagaaatacatgggcccgcaatacatgctcgcaagatctggagatcttgcaaccaaaccacatgcacgacagcaggatctacctcatcccttgcatctacacaacagggcgtagagatcacatcagggcgtcccgttc

SEQ ID NO: 43344 - DNA, 1936 bp, Zea Mays
cacaaagtcccatggcgcacccatatcctctgctccatctccctccagccatccttggattcttcttctcttccgcgcgcgcctcatctactgtttttccagccgcacccagctcctattcgccatgacgcacgaacgagctactctcctcccatctccttcctcgccctctcctggccatggctctagttctcactcgcagcggccagtaaccactgaaacccaccgcccgcgtgagcaaagacgacatcagggcgatgggacggatcctgtgcggcgaccatcctcgcattcgcgcctccccggggccacccctcttcccatcgcgccacgacggattgcgggcgacggtgctatggcggcgtgggctggggttgggggaccatgggggcggggtccgcggtgggttctggtcgcggcatggttgggcctcgctggatctgagctgccattgatgggttttctttcgagcatttgatttccaatgttctgtttttggtatgctctcactgcttcatgctcgtccctgtgcttgagctccgtcctccccagccatggtgctctacgcgcacgagctctacaatggcttgcactcccacctccaggcctctggcatcgacggcgtcaaggtcgacgtcattcacgtctggtgccgttcatctccatccgcttctcgcgtggggcttctgtcttgccaccggccagcctcgccggtgaagtccgccaccgtcctcaggtctccgagctctggagccggcctccttcattagtatcaaactccatccatgacgccggccatgcctccctggtggccacggccttctactccgcctccctggcactaacgcaagttcccgttcgtcggcgacccggccatggcgcacacgctggtttcctctgctcggcttctctggtgccgcgcacgcccttgctcgctgtccttcggctcggtctcatctacacccgagcccagcaccccctcgacaacatggcgtctcgcctctcttccctgcgtcgcatagaccgcgcccctgtgagcttcctacgtcggccatgttcagacgccaccaacatcaagcgctcgtcctcggttccatggccgtagcgcataggagtcccaatcccgattcaaactcggtgagctcccctacaagctcgcttctccctgcttgctgcactcacgtcgtcgtctacctgctcgttccacgacgtcgctcccagtcagcagctcgccggttttcctgcacgcaatcgcggatgtcgtcgcccggtccttgtctcttgccgagctcatcaccaccgtgagactctgtgttgctgtaatcggccgcgtctccccagtcatcttatgcgcactcatctccaaatttgaccgtggggccgactgtcgaccacgtcgttgcctcgcagcatttggacaccttgtcgtcactggaccacgtgttcgctcattaccacaccatttttagcatcacggttctgtaagactccacgcactcgtcaatacccggctgtcgatctccaccacacggtgccacttcggacctctggcctcgtcctactctgctccagcttgcatctaagcctagggtcaagttcgtacgccaccctgcttgcgctcgatatggaaagagggaattagatgaagaagaaagcgaagccgcacaacactcatctgatgttctacgacaagcccgagccaggacttatcagcattcttacgagtattgagtcacatttgatgctgagaaccataactaagttgacctcaagatggtgcaaggagtggtcttcttcgtacaacgatgtcgtcagtcggaccaacctgaagggcagatagaacaagtgtcagaacaaaggctgatcgccaagtggtcgccacctaacaaacactaacctagtgttatccaggcaagccccggtgcatgcaacccct

SEQ ID NO: 43345 - DNA, 2671 bp, Zea Mays
cagcatcgccatgcccccgtcgccccacccccgcgcgcgtcttcctccggcatgcgccagcccccccgagctcgcccgcgcaccaatctcgccgtcgggtatcccgcccgcgagcccgcgcaccaagctccttccccgcgacaagctccctcccccgcgacgcgtcttcctcctcgccctagatcgccgccccagctctctcctcaccccgcaatccccgccgcccatgctccgctctctactcgccccagatcgtcgcccctgttcgcgtggattgggtaccggtcccaactatctccatggattgcgcgtccgcgacaacccaatctcctcccggtctccatggaaggcgcgtcctccccccgtgattctcgattccccgcgtccgcgccccagatccactctcctctctcccacaatccccacggactctgccccgtatcaccaccccggctccttagaacgtgatccactctcctctctcctgcaatccccgctacctcaacccagatcgccgccctcgctctcgatcctcgcccacgctctccatggaaggcgaggccgcgatgctcgcgtggatctatgtagaggctgcgacgctctcccaggaagactactgccagtgctccgtgctccatgcgccgcgctggaacgccaccgtgcggtccatgtcctcgtagtatcgcccagactcgcccatgtagtcccacctgcatccaccgaccaccaagcacactctcactgcagaccagagaggattgccacgaataggtgtgtgcagttctactctacccctgcatcgagccggtgtgcgtccaccagaggccggagttgaaggagagcacgtcggcgtcgcgccatgactcggcgttctcgtagatgtcgtccagcatcagcacctgcttcccctggaccacgtcgatgtccaccaggaacttgtacgtgtacaaagggtccacggagacgagctgcgtcggcgactgcagcgcggcggcgtgcagcaggcagacgagcgactcccactggttgcgccccagcgagtcgcccacgaacatcaccgtcttccccttcatccgtgtcaggaagaccgtggcacaacgcctgatgtcacgttgtcccagcggcgccgcggccggcgtcacgccacgcggatggtcacccacgccacgtccctagaccggtgtggtacgccggcgcccacagcgtcgatgaggaggaggtcggagcagcagtagctgtcatgggcagtgccgcagatgtggagcagtcgaatgagaggctagacgggctggagcaccacagcaggctggtgtcgctgttggccggtagccgctcctcccccaccggcaccgagagggacttgtgacccaaggatctgttcccgggggatgtggtgtttgcgctcgtcgatgatctcaggctcaaccactccaaggacccataggccatggggttatgcaatccaaaggtctccatcgccaatttcattttgtagacaaataagttagctcttctgatggcataccatttatagattgccaacgatctgaaggcatatatgaaggcttgttatctcttctgtgtttaattgatcagtgactttgatttggacctggttatcagcttgttatttctatctgaattttctcgctttatttgtactacactcgtgctaattatgtgagaatgatttgtgtcactatggtgttcatctgttattttatactattatatgtattcatctgtcatgttgttgaactcctgttatcaattgcagaaggaaattcctgcttgagccaattacagaaggccctgatatttgtcaaattgatggttgtagtgttaaattggaatacaagaggagcaaacgtgacatgccattacaatttcgtttatgcaaaaaagtaccaaacggcgcagcagcagttgatgtgcaacccgagtgtactgccgctcgaggaggccagtaagtgccaacaacatgaatagccaaagcagggaaatagggctggcgggggcacatgggtaacttggtcctggagcattggagaaggagcataccacaaggaaaccaacacgagttccttgcttcctgaaggcctcatagctcagattactgggttaacgaacaactcatactttgatggagcacatgaggttcgacattatgtcaggaagcattcgaatcttggtcgtattgtgcttgaagttgctaaggactcgcaaatcccccgccaagcaaactgctagaaatcttttcagaggtggagatgatgaagatgatagtgctgatgccgacacaaatgatcctgttgtaccttggtcattaggtagagtaggagttgggcatatggtgtacatctccggtttgacttgtgccttgagttcaacaaatatgaaagtgctgagagaggtggcatctagaggacgtcatgtcgaacgtgtgaagaatttttttagaaatatgtatatttgtgcgaaactttttagaaacttgactccattttattttctatgttactctcggctttgtttcctatcctttccaatgacttgctatgcatttgcactgtatttggcatgtttaaaactgctacacaaaacttgctatatattttgtccaaaaatactatatccttgttatgattgattgatctttattttgtctgct

SEQ ID NO: 43346 - DNA, 574 bp, Zea Mays
cccgccccggtcgtgcgttccccgcgacccttgcctctgcccccgcctgcccctgccaccccttcgattctctcccgagttgcttctctcccgagtctcgtccttccccgttcaacacctcctcccaaaaccctaaccgctcgacctcccaagatggcatcacccccacccccgcagtcgtagttgccactgcattcgaatcacagccgccacggatccagtggcccgacgtggaaggatctcgcctcgccgaggccatgtaccgtgccgccggggaccacatccgctccctcaaggtgaatagacaaaaatacgggagagggcagccaacggccaccgggagttgggtcctaggagccaccgacttcagccgcctgctcaatgacggcgagggcggtgcctacctgacaagcccgcacgtcggcatggtagttgccatcaagaaactcaatcccaatgacataaggttcgaatgctccattccttagacaatgccaacgtcctgaaattttactcctgggacagaaccagatggaggagcatcatccttcttgacttcagatccagatgggcg

SEQ ID NO: 43347 - DNA, 3701 bp, Zea Mays
gaagaaaaacaaagcggaggagtctaaacaaagcgccagacagcctcctctcctccggccggaaaaaagcaacctcgcagatccgcggccccccctcctccgctcacaggttcaccgcatcgacgccactaccgtttccactgccgcctcgaccccgctccaccaattcttggtcaagccgctccagctaagagacggagagccctgcggaaaggggagacgaggggagggtgcaaaccctagccgtagaccgcgggctcctcctcctcgccggcggcggcggggatggagatggtggtggcggcgccggcgctccccgccgaagtggagagggctctcatccgggacataaccgtcgcggctgatgcccacgccaaggagggagacactttcttcctcatcaccaccaggtggtggcaaagttggattgattacctcattcaagatttgactggtgcaacaagtaatggttctcatcatcatgagtttggttcaaaaactcctagaaggccaggagctattgacaataccgatttaattgatgatgtgccacttgaagtctccaacatggagattgagatacatgataacttggttgagggtcgggattacatactgcttcctcagcaagtttgggaaaagttgcatggttggtatggtggaggaccaacattaccaagaaaggcaatcaatactggcttttctcaaactgatttggcgatagaagtttatcctctacgactgcagttaattctaatgtcaagaggagagcgaacctttataaggataagcaagaagggtacagttggccaactccataaaatggcctgtaaggtttttgacttggcaccagatgaggtatgcatttgggactattatggtcgaacaaagcattcattgatggatagcttggacaaaacccttgatgatgccaacattcagatggatcaaaacattctagttgaggtaaccactgatgcaagtggtagtctggatggtttggttaagcgaaacaatttttttgagagtgatgctccgaaatcaggattgccagatgagaattttgcagccaacaactatgcttccagaagctatagctctagtctgacaccaagcatctacctgcgatcacccaatggtgatctggataatgtgcatggttctagtggcatgatcacgaggggatcgcccttaggtcttacagggctacttaatcttggaaatacatgctatatgaacagtgccatacagtgtcttgtgcacacaccacagtttactaaatacttctgtgaagattatcatcgcgaaataaatcggcaaaatccactgggtaatgtgggtgaacttgcattagcttttggtgagctattgagaaaactctgggctcctggaggacgtgcccctgtttcacctagaccattcaaaatgaagctttctcggtttgcatctcagttcagtggatacaaccagcatgattcacaggagctgttggcgttcctattggatggactccatgaagatttgaatcgtgtgaagcatagaccttacataaattcaggggatgctgatggaagatcagatgaagaagttgcagatgaatattgggcaaatcatattgccagaaataattcaatcattgttgatgtatgccaggggcagtacaagtccactttggtttgcccagtctgtgggaaggtttcagtgacttttgacccgttcatgtatctttccttgcccttacaatttgcctcaacccggagcgtgactgccgtggtgttttcttgtgatggtagtgttccaccaacaccattcactgtgaatgtaccaaaacaaggtttgacgattgtgtgtccttaaacattttggttgaatttatctacagatacggaatcataagatctaccgttttattgatgatccagtgcttcagctgtctacaataagtgatgatgatcatctggcagtttataagctcccaaagttggaaaagagggtgaattacattcagtttgtgcatcgtcatgaagatctggaccatggaaacaataacagcttgacatcttggaaaccgtacggtgttcctcttcttgcacaaatttctcgcaatgaaattgtcacgggttttgatatccatgagttggtccataaaatgcttgtgcccgtgctaaggaatccggactctctgcatttggctgttcaaagttctgtttccacaagaactcatagttatcataccgacagcagcaaatgtcagcttctgttggttgatgatagcaacacagtcattgaaaaatcaaatgatgctatcaggatcccacaatcttcacttgcaactgtattttttatcaactggcccaaggcagatctgaaaaagatagacactcatcatttagagtaccttccagaggtgtttatgtatgctccgcctgcgaagagaacccgtggtgaagctctgtcactctatgcatgcttggatgctttcttgagagaagaacctcttgtacctgaagacatgtggtactgtccaaggtgcaaggagcaaagacaagctagcaaaaagttggatttgtggagacttcctgaagtactagtcatacatctaaagagattttcatttagtaggtcaacaaaacaaaaactagaaacttttgttaattttccaatacatgacttggatttgacaaattacattgccaataagaagacttcagagcgccagatctatgagctgtatgctgtgagcaatcattatggcaacatggcaagtggacattatactgcacacattaagcttgtggatgagaatcggtggtacaacttcgatgatagccatgttgcttccattgatgaagatgaggtgaagactgctgcagcttatgtgctattctatagaagggtcagagaacaagacatagcaaggggaactagtaatggatctcagttatatgcaaaaagaagtcacggatatagccataggtaggctgatgattactgtggttcggtgcaagggggattctggaaatgacacccgcacgcctttagtcattgccaggagtatatggcttgctggaaaaaatgctcatcacgtgcagtcaatgcaccgttgtccagttgtcacagaagatatttcgtgcagtgctggtacaagatgggaattttgtatgaggtgagttgaaggagtaattgactctttatgataactgggtagcttcaacaggaacgccggggcttggtggcattttgttcgtctgttttcttctagaagagaaacaaggggaggcaagaaaacatttaggaaacaccttttcgttaatttgattttttatttccatttttagatttagctagtctgtacactgttgttggaaatgggtccgctgttgttggtcgatgcttgtggtggccaataatactacacccaactataccaggctctgcaatggcgaatcatggtgcacattatggtgctctgttgcgggaagaattgtagctgatgttgtacttatatactggcaaaaaggccccagaaatgtaaaaatgtatcgatatgctgacatcttaaaccctattttggattcgtgctctttcctatggatgaaggtgtgcgccatttaggggttgtttgtttgaagaatcaatccattctaggtaggtgattatcacgagaccatttcataaatttggtgaaatgaattcatttt

SEQ ID NO: 43348 - DNA, 316 bp, Zea Mays
cattcccaacaaggagaaagggaaggcccctatggctagtagtactcaaaggaatcatgctttcatgtataatgatagaaaattttctaggaatgctcataggagttattatcatgatgccattaattcacatgctatgattgcctctagctctacttttgtgcatggtaggcctaggaaaagtaatgttgtgcatcatgtgactaggagagtatgtaatgaaccttataccatttactatgcttgcaatacttcatttgcgctcttatgtaaaaatgaaaaagtagtggctagaaagttgggatccaaatgcaag

SEQ ID NO: 43349 - DNA, 1925 bp, Zea Mays
atggtgcagatcgcggctcctccccgacggcgcgatggccgcgccccctctccctcccccggcgtgatgcacgcaaccccaccccctcggtgccatggtgccctcgccttcgcccccgtcaaccacgggcgtcaatgtcgaaggcgtccacaaccgcgcccccacctgcccccgcccacgctctcccacgatctctgccgccacgtctccgcgtttggcggcccgtcctcatcctcatccgcgcttggcggcccgtcgtcatcctcaggtcagatctgcgtttggcggcccgtcctcatcctcatccgcgcgcccccgcccgcgatctccgctgccgcgtcttcaccaccctcgcccgtgatctccgtcgccgtccgcacttgggtcagggaacggagtcgcccaccggcagctcctcaccaccgacgggaagcaactcgtggagatgctcaagcggtcaccctatttcttctccacccgcgtccacctctaggtccgcgtgggcgagcaatccaacgaggcaccgttctccccatcaaggtaacctagattttctcctattcccacaaaaaattgcatcggttacctacatcgcacatggaaataggagcaacttctttgggtttggtcggctgagagctactggtgtgctcaccttgtgtatgtcgaaatgctctatagtgaaaatattgcttggtgatgtgtaaatgccttatatattgcttggtgatgtgaaaattctccccatcaagatgatcactgaagtgcaagattactgggaattaggacacgtgtggtggagaagaagggctgctggccttggctttgtgggcaacacactggctgaagatgggcagtgcaaacaagattaatgagaggtacttgaaactacagaagagcaagaagagcaccaaaactaagcttcaagtggatcaagccatagtatggttgttcctgcatatagagtgcaaaaactattgtatttacatttttcaagttgacttccattacactcagattagggattgcattgttaagtttaacagagctcgtattttcaatgcctctgtggcactgggagttcctgtacatagacttgtaaaagctgccgactcagtttcggtagtaacatatgcgggcggtgattctacttatttctctgaaacattatatgcgcaggctagaattcttaggaagaccctaggcggtgggatgagacaggttggatttctttgtgctgctgcttatgttgctgttcgtgacaccgtgggaaagcttgcggatgatcacaggaaggctaaagccttggcagagggcctgacgaaaattaaacagttcacggtggattcatcttcggtcgagaccaatatggtcagtgtcaaagatgaagcgcgctatattttccttattttccacaatgtaaaccggaaaggtccagcatatgacatacctttactttttataagtgtcaggttcgtcatccattaccagattttagacagtgatgttcaatatgcattgacatgtgtcgagtcgctatttcgcaagatcgtcgtggccctattgggaacggagatgctcttaatgaagtaggaggaccgaccaatccaactagcaacagcaggcagggagtggatgcgcctgctagaagagtgctagctccgcgcatacgctcgctcgacaaacgtgtgttgttaactattgtatatagtgttataattactgtcctttattcttgatgtttgttttgtagttgaaactcacattgttttttcatttccatctcgattttgtatgccgtgaccacgaaagactaaatgttttcttgcggtttctaaaaatatagctctctattgttgtgattgtgtgccgtcgcatcgcacgggcaatgacctagttctaaatgaattatgtttgtatgctgc

SEQ ID NO: 43350 - DNA, 1717 bp, Zea Mays
agagggaaattagaaatccatcccgatcctatcgtccccaatttcttctgctccacctaaatagatccgtagccgtagcctaggcgcgcacattgcagaaagatcgagcggaaggtcggcagcaggcgcatagatgcaggggtgagggcacgggcggcagcgcttgacgggcgacgagtaaaccctaacgctttgattgcgggcggcgtcgtctgagccagtcccgagtcgatacgctgtcatgcctgtcaatcctcctccgccacctcctgggtcgtcgtctttggctccggcgggggccagctacttcccgctccctttccacctgcagcagcaccagccgccgccgccgcaggtgccgccgcctatggcggcgagcagctatcagcagtatcagcaacagctgcatcaggcccatcagctcttccagcgggacgcgcagaccataacccccgaagcgctgcagagcgtcaaggctgccctcgccaccagcgacgtcctcgaccccgtcgccgccgccaacgccaggctctccgatccctctaccagcaagaagcccatcccccgtcgcgctgccggacaatcctgggaggatcctaccctcactgaatggcccgaaaacgactaccggctgttctgtggagatctaggcaacgaagttaatgatgatgttctctccaaagcattttcacggtttccatccttcaacatggcaaggagataagaggactggcaaaactaaaggctatggatttgtgagcttttcaaaccctactgatctggctgcagcaataaaagagatgaatggaaagtatgttgggaaccgccctattaaattgcgtaagagtaactggaaggagaggacagatgttgaggctctggaaagacaaaagaatcatgtcaagaggaagcctaaaattcccaagaagactattcttcacaagtagagatacaaaggccctaccgagggtgaatgccagctcatgtgctgccttgggatgatgctaccttctggaatctctttactctctgcaatgctcggggtggaatcacgcaatgctcggggtggaatcacacgcaagggctgttgtttaatgtgtagtttggaaacttaaattcttttgggatacctgtcttttatcaggatgagtaacccagggatataatttaaataagacatttagttatttaggagatggtttctctctctggtttgacttccccttccaaactaggtctaaggccatcttcagcagatcgtgtaaatggacgtgtaaagtactgttttgcattgtatattgtaatatgaagtgagatagagtctactggagataatcgacttgttcgctttaaggtggattgaggaggattggaagggattaaattctcttctattcaaatttgtataggagaggatttaattctctctaatccctctcaatctacctctaaccgaataagccgggcaacgtgctgcctgttggtccccatggtttaggctggggttgtgggcttgtgaacatagagttagtgttaagtgccacccgacgcaatttgtgctctgttttaccctgtagttgtacgttcacgtggtattcatttgagatgttggagcagtgtcatggctactgacttacgaggccttgcattatcagatagtttgcttggttgtgggctctcaacaagaaccaaatggaattttcaatttaggtttctg

SEQ ID NO: 43351 - DNA, 403 bp, Zea Mays
tgatgagaattttctgcaggtacactaacctcgaaaacgtatgtgtagttgacgactagcaaaataccgtgagagtcgtaagtatgccaccgagatagaacgctattgccacatatgttggcaaaatttgtgaggacgtgtaggacgcgcatgcatcctgattgttgcattatgtttgttacctatacacccaagatgcttctctcatctttattccagtaaccattgattgtagataatgtggtgaaatgctgaattatgaacttcgatgaaataggtgtcctccattctttaggtgacctctcagggtgctttatgtgcttgcccttgtgcttaatgtgtcgatagaaggttagtgacttgtttgcctaaatctagaattaggccatgttcttagttggtg

SEQ ID NO: 43352 - DNA, 289 bp, Zea Mays
cactattttactttgcgcatagactgaatgtctctgttattcaaaaaaatttacccaaatgtttaactcacttagtgaaggagatcaaaggcatgaaacagcaggtcttaactacagactcttgaacttcattgcttcctcactccagcaatttatttcttaaatgttaacctgtctttcttgatttgtatttagatgctttaaaccttttattcaaacattaccaagatgcagttgccagcgttcttagtatgcttgcttctacattgctccttttttccttatatat

SEQ ID NO: 43353 - DNA, 479 bp, Zea Mays
acataataggagttctatacaaaataaataattacattataaggagacaacggtccagcaacccaaagttgactgggagacgacggcctagaccactcaagaactcatcacagcatcctccatgcgcctcatcctgtggtacctgttcttgacctatgggagggtgtgagacagcaagagtgagctcacatacgttcatcgctcaacaagttgtggggaataatgtgtatgaactcgccaaaggtgggagctcacgtgtggtgtaaggcttaccaaagaggatggttagagctgagcattgcttttaaagttggtcaaaattttattagcaattactaagtataagtaaataccaacccaattaaatagtagaacagaagtaacaacatcacctgcgatgcaatgcatatgacaaattgaatttagttccataagttaatcatcagagagtcctgagctgctcatgaccatgagctcgg

SEQ ID NO: 43354 - DNA, 711 bp, Zea Mays
tgaaagcccccccccgggaaatctggaatcaacccggtcaaagcgtacctcgggtacccgagctccttgctcagggctataagacccagcctccgctcctcgttaccccgacttcgcaatcgtcgtcgtcgccgtgccatagtaacgccaccacgacgttgtctgggtaccggaattgagccagggaggtgtgcgcaactccgtaggactatcccgtgccatcaatcgtgcgcgggagctggtccgccaggcacgggcatcgagctcacagcgtcggagaacttcatctgccgcgggcgattttcgcttgggactcatctgctatggccgtaagcctctgctcaatttgtgccccagccaggatcggctgtcgctcacgtcgtcggcgcggcactccttaagcacgacggcgttcgggcgttcttgtttatcgtctccgcggatccgggtgctacgtcactgcgtctggattactgcgcgaggacacgtgtcatctgaaaaacaagatggtacctggaatctcaagtgccaggcaagttgtgcccttgaccactttgtacccaataatgttctttaatatcacttatccatgcataggttaattttgatgggacccaataggtcaccctagattgtttatctcattaccttgtttacccctggatcacttgggtagtttgctattgctttatatggttttgggataatcat

SEQ ID NO: 43355 - DNA, 2621 bp, Zea Mays
aaacaagtcatcagatttgtccaaaccaagaaactccaaacaagtactactacacatagttaaaagttattaaagatttgacctcgggtaaacacagccctcgatggctcgatgtttggatgcaaagacgtgcatataccatgtagtgattcacgtacaaaacgcgtactcatagatgcatcatgcatgaacggatgccgcagtttttgggcgctccgctgtgggctggaatgggccgcccaaactggtctgtcacgtgactttggttgggctaccgttggatccgcaacgacgagccgtggtgactgcgcagcgacgtccgagggagggagcgaccgctggtgtgcggaacacactgtcggcatggccgccgccctccgcctgcaacgccagagtctcgccgccagcccctttctcttctccgcccatggcctccgcaccgcaagctcgaggtcatcctcactacgctcgatccgggtgacttctctacatgtccgcggcaattgggttatggcttctgctgttgggtacaacgtcaccatgagcgcaggcgtggacacctacaccaagtcttgggaggcccctactgccacgggtgtcagtttttatccagattataataatctgtacactgttggatgtggtgtctacgtctacgtgttcggtgataatatgacagatatcattggttcttgcacgagtatttgcacagataacagagagatcatggagagcgcaaacactggttctggtgcctgtgaagggttaggctgctgcagcattccaatacgtggcggccaaggcttcactctcaaactaggtcgcctcaatagtaccattccacagttcggtgaagcgctctccaatgtcaagattatcttttcgcaaaactatgacttcgttacagatgatgtttacgcaagttgggtggtgaatacaagcaatgttcacggcatgctacttaacattgcaatcacggaccaaccaagctgcgcgagtgcccagtcccaagagaacaaggatacctacgcatgcagtagtgaaagcatctgcgacgacgatctatcaccatcagggtttaacttaccgtatcgtgtgaccaatttgtcacttgatgatgggcttctgatggttacaaacatgctgaatgacacaagctccaacaatatggagagggtagtcctcgttaactatgacggttacaaccagaacggcttctattcaaccgacttctattcaaccgatgaggacgttgtggatgtatatgcaaagatgtcatgcgagggaatatacgtgacgggtaccgctgcaagtgttccaatggcttccaaggaaacccataccttcaaaataactgtacagatattgatgagtgccttattccaaataaatgcaatggaatatgccacaatgttgatggcggtttcaattgtacaagttgccctcatgggaaagagtatgatccaaaaaagaaaaaatgtgtcatgtcagctaagcagcgtattctaatttttgggattgtaattgggcttgtttgtggtcttggatccataagttttgcacttggtgcaattatactcaccggtaagtggaaaaaaggcatccaaaggagaattcgaagagagtacttcaagaaaaatcaaggtctactcttggagcaactaatatcgaatgaaaatgctacaaccaaaacaaagatattcactttggatgaactagaggaagcaaccaacaagtttgatgctactcgtgttctaggtcatggtgggcatggcactgtttacaaagggattttgtctgatcagcgtgtcgtggctataaaaaaatctaaaatagtggagcaaatagagatagatcagttcatcaatgaggttgctattttatctcaaatcattcaccgcaatgtggtgaagctttttggttgttgcctagaagatgaggtacccttgctagtctatgagttcatatcgaatggcactctgtatgacattcttcatgaaaatattgcaacaaaatgcttgttgtcatgggatgatcgaattaggattgcaacggaagcatcaggagcacttgcttatctacactcagctgctgcaataccaattttccatagagatgtgaagtcttctaatatactcttggacgacaacttcactgtaaaggtttcagattttggtgcttcaagatctttatcccttgatgaaacacatgtggtgacaattgtccaaggaacattcggttatttagatccagagtattattatactggttctctaactgagaagagtgacgtgtatagttttggagtgatacttgtggaacttttgacaagaaagaaaccaatttttatcaatgaattgggtgccaaacaaaacttatctcattacttcattgaaggatacaggaagggactctcgtggaaataatagattctcaagttgtggaagaggcagaccaagaagagattaatgatatctcctcacttatagaagcgtgcttaagatccaaaggagggcatagaccaagcatgaaagaagtagatatgagattgcaatgtctaagaacaaagaggctacagaataaaacacatcttttgattgaaaagggtggagaaatggaac

SEQ ID NO: 43356 - DNA, 381 bp, Zea Mays
cacaactccaaagcgttaaaataatataacgagtaaaaagatctagaaagaagggttcaattggacttctctaaaatttcttgcaacatacaaatcatattggataacccgcttcatcctttatgtttaagaatgttatccattctatacaaaagatttgcatcctatgttccaaccctattctaacatgacagatctattaaagtaaagaccaaaattaaattacttaaatataaataatcaaagtaaaacaagggttagaaataacgtgatgttttgctgaggtatcgaatagttgaaactcccactagtccttgttggagcatccgcacaagggtgtcgctctctgttattccacataaagaacaagtactctctatg

SEQ ID NO: 43357 - DNA, 342 bp, Zea Mays
cagcaagtacgcacacacaagacccagtcttaagctcaaaagactagcacactagaacaaagctcaaatcactagaatgtcgaacaagtgcgcaagaatggagtgtgagtgatcaagagtgctcaagaaatgctttgtgttctcctccatgcgcctagggggtcccttttatagccccaaggcagctaggagcctttgagtgtattccaggaaggcatttcttgccttctgtcgactggcgcaccggacagtccggtgtggatctctttccttatttggcgaagccgaccgttggcgccttggagtcgttggcgcatcggacactgtccggtgcacaccgga

SEQ ID NO: 43358 - DNA, 500 bp, Zea Mays
ggatctcccctcgccaccttcaaactacttatctggtctcaaggttcttcatggccttgactctcaaagatcagagtattcttgtcaatggggatatcaatgaaggaaagaatatgcatacacatttgaaagcacaagcttatcttatcagtgttctgaggttaccaggatcttgcaagaatgaatactttttcaagtacagggacccccgaaatgcagcagaaactttcagagccaatggagatataaatggacttatatcacactgtaatagtcagattgagagagttatggaaatatggaacaaaaacgaggacttccgcaagcagtatgttgaatcgaacaaggttagcacactaaagagattagggacccatgacggacgaaaacttggccctggtgaggatcctccggtcattccaagccgaagaccaagcaacatttatccattgtctgcctcaagcccggaagtgatcaccttagcttcaacaccagcacct

SEQ ID NO: 43359 - DNA, 3155 bp, Zea Mays
ctgcgagacgcccacctagcagcgacgccactggggccgcccgctccatcgcgtcgacgtcgaggacgccgcgccgccaatcaccgccccgctccctcctctccaccgcttacaatccccagaaggcggtcgccggtctccccctcgcgccctacccgcctccatcgcctgctagcgcgccaggccggactcttaaaccctagcgaggctcggccaatccccgcgtcaggatgccgtcagcgtcgggtccggtggccgtggcgtcggcgccggcgccggtgaagtccgcaccgtccctggccgtcgggatctcgccggacttgtacccaacggaggacgacctgccgtacgaggaggagatcctgcgggagcccttcaagctcaaggggtggtggcgctacctcgtggcccgcgcgaccgcgccgtttgccaagcgcgccgtcatctacgagcgcgcgctcaaggcgctcccgggaagctacaagctctggcacgcctacctccgcgaccgcctcgaccacgcgcgcccgcaccccatcgaccacccggcctactcctccctcaacaacacattcgagcgggcgctggccaccatgcacaagatgccgcgcgtctgggtcctctacctcacctcgctgctcgaccagcgcctgctcacgcgcgcgcgccgcgccttcgaccgcgcgctccgggcgctccccgtcacgcagcatgaccgcatctggccgctgtaccttcgcctcgcttcgcttccggcctgccccgtcgagacgtcgctccgagtcttccgccgatacctccaatttgacccctcccacgctgaggacttcatcaatttcctcatatcagccaaccactggcaggaggccgccaaccgtctagcttctgtgctcaacgacgacgggttccgctcagttaaggggaaaacgaggcaccagctctggcttgagctctgtgagatcctcaccaagcacgctgatgaggttgctggcctcaaggtggacgccatcttgcgtggtgggatacgcaagttcactgatgaggtcggcaagctgtggacctcactggctgattactatgtcaggagaggcctttttgaaaaagctagggatgtgtttgaggagggtgtttcttcagtggttaccgtcaaggagttcagtgtggtgtttgaggcatatacacagtttgagcagagtatgcttgcggcaaagcttgaggctgctgaggaagaaggggctgaggatgagaacgagggagggggcaggaagagtgggatggataagttatcgaagaaattcctcaatgaattctggttgaacgatgaggatgatactgatttgaggatggcaaggtttgagcggctgttggatcgcagaccagagcttcttagcagtgtgctgctgcgacagaatccacacaatgtggaggaatggcacaggagggtgaaactctttgaaaaggatcctgcaaggcaagtagcgacatatgttgaggccgtgaaaactgtagacccaatgaaggcagttgggaaaccacatactctgtgggtggcatttgcaaagatgtatgagaaacacagtcgtctagatagtgctgaagatatcttcaaacgggctactcaagttaattataaggcagttgaccatttagctagtatctggtgtgagtgggcagagatggagttgcgccacaacaattttgacaaggctattgaactgatgagctgctgctgagggggatgagcctgtccaaatgaaagtgcacaaatctttgaaactgtggagcttttatgttgatctggaggagagcctcggaaccttagactctacccgtgcggtttatgagagaatattggatttacgaattgccactccacagataattctcaattatgcatatctcctcgaggagcacaagtatttcgaagatgcatttaaagtgtatgaaaggggcgtgaaaatattcaagtatccccacgttaaggccatctgggtgacctaccttacaaagtttgtacatagatacaagcgaagcaagttagagcgagcaagagagcttttccatgaagctgtccaacaggctcctgcagaggaaaagaagcccctatatttacaatgggcaaaactggaggaagactatggtcttgcaaaacgtgctatgaatgtatatgatgaggctgtaagagctgttcctaactctgaaaaaatggccatgtacgaaatctatatagcacgcgctgccgaactctttggtgttccaaggacaagacaaatatatgagcaagcaattgaatctggcctcccagacagagatgtgctgacaatgtgcatgaaattcgctgagctagagagaagtcttggggaaatcgatcgttcgcgtgccatctatgtgcatgcatccaactatgctgatccaaacaatcctgacttttggaagaagtggaatgattttgagattcagcacggtaacgaagatacattcagggagatgcttcgtatcaaacgcacagtggctgctagccgcagtcagacacatttcatactgccagagtacttgatgcagagggatcagaagttaaacctggacgaagcagttgacactctgaagcgtgctggcgtccctgaggacgagatggcagctttggaaaggcaactggctaccggaccatctactgccccaccagcagcaccaagcactgccccagcctctgctaacaggatgatgaactttgtcagtgctggagtagaggcccaggtcgagagcagcaggcaacaggctgctaacaatgaggacattgagctgcccgatgagagtgacgatgaggaacccgatgtccaaattgcggagaagagcgttcctgctgcggtatttggtgagctcggcaagagagctgccgagaacaatgaggaaagctcaggtgcccaagggaatgagcagctgggcgccctcgagaggataaagagacgacgccaatagtctgcctctgctaagatgagagcccatgtgtgcaccatgacatccgtacgatctttagcgatgttgtacttgtaaacattttttcgagtggaattttactcctgtgcaaagcatttacgtaagttgttcgggggtatacccgctgctaatatgatgccgaaacgttattatctttggtc

SEQ ID NO: 43360 - DNA, 786 bp, Zea Mays
caaaggttcaacacaaaccaataaaagatcaaagttagggtataaaagaaaggagcaatagaaaccgaagagtaccctggtctggcgcaccggatagtgtccggtgcaccagggttgtacgactccgaactcttcaccttcgggtttttgaggccgcgctccgctataattcaccggactgtctggtgtgccactagactgtccggtgcaccagcggagcaatggctagccagcgcaacggtcggctgcaatggtcgcctgcaacgctacagtgcgcggacagttcgcacagaagtcagagcagccgccagaggcgcaccggacagctcacagtacctgtccggtgcggcaccgtactgtccagtgcctcaagaagacaaacctccaacggtcaaaccctaatggttgggtgacgtggctggcgcaccggacccatcgacagcagcgtgccccaacggttgaattggtggttgagggctataaataccccacaaccacctccactccaacaatccaagcatacacaacagtgcattcaatacaagagcaatacacttcactccaaagacacaattcaagtgatcagtccgctcaaagtctcaaattcaactctagcgcattaggacttgtgagaggattctttatgtccattgttgctcttgtttgcttggcttggctttcttttctttctcgcttcttactctcaagtgctttgtaagcaaggcaagagacaccaattgtgtggtgatccttgcagggtctaagtgacccgtgagattaaggaag

SEQ ID NO: 43361 - DNA, 680 bp, Zea Mays
tcggattttagcaggatgagacttgaagattctactcttaggaaaattcattgtctgtgcttcaggtaccatcttcaaacttgggctaacctatgtttgtggaaactacatctatttgagcttgaagaggagctgaagactaatcctctgaccaagtatgtgttgtatcagatgagaggagcaagaattggcgagtccaagctgtcgcagttggtcctgacaggttcgagagccggaaggctctgtcagaaaagtggaggggcatgagagacgatggactttcagcagaaaccaacattcctggctgtgtgtttgtccatatgagtggcttcattgggagcaacaagatcaacgagggagcattggaaatcacaagagctactctgaaatgttgattcaaccaccatctatcagttacccatgttgccatagtctcagtagaagcacatgatgcaattgcgactttggtccatgttatcattcacccatcgcagctgaaattgattcttacatttgatttatgtcatccttatcttgcagaattggtcatttgatacttttttcttggatctggtaatgcatagaatgtgacaatttattattagaaaggacaaatgatggaacttattaggctatcagccctgtatatttcttcaacacgtatcacccttttcccctga

SEQ ID NO: 43362 - DNA, 1577 bp, Zea Mays
  misc_feature (1577)..(1577): n is a, c, g, or t
gtgattcggcccattgtagccccgagacagcgtccgcctacggcctatccgcgtcagcccgccggcgagtcgcgcacgagacctgcgaggcgcgatggcaggccgcggcggcgccggccggcggcctcgcgccgtcttcatggccttcggcactcagggcgacgtcttccccatagcagagtatgctgtggtgttcatcactcattcagcgcaccggagtttgtcagcacatctagcagccagcagtgttagatacatgcctgtgtcaagcccgcctgtcctcgctgccgaacagttagagaatatctcaagtgattctattcaatcaaaccatgagcgtgagtccttttcaatgcggaaaaaagccattcaagcggagcacaggaaagaatgcttgtcttttgtggaagaagtttttggaaacgacccaagcatcagtggggattttattgtgatcaatttcttcgctttggaaggttggcaccttgcagaactattccaagtaaagtgcgtcattgctgctccctattttgttccatatagtgctcctacatcattcaaacgccaatttaaacaaacttttcctctactttacaagtactttcaagaagctcctgcaaatacggtctgctggactgacattatccattggatgtgggcactcttcatggaaagttggggatcatggagaaatgattgtctgaatcttagccccattcctttcacagatccagtaaccaatcttcctttgtggcatgtgcgagaggagtcacctttattactgtatggtttcagcaaagaaattgtggagtgcccaggatattggccgttcaatgctcatgcttgtggcttttggtttctacctatggattggcaattttcttgtgacaaatgcatggagttgtctggaaatatcaattcttcatttggtggtatgttgtgtgcaaaccattcttccctggaacacttcctcacaaggaatgcttattcatcaagacctatatttgtaggattaagttccattggtaggatcaataccgtacagttggctttttcctaggtgtgcagccgctattcaccatgctggcagtggatcaacagctgcagcactacttgctggtatccctcaggtaacatgccctttcatgatggaccaattttactggtcagagaggctacagtggttgggagtggcgcctgaacccctacaaagacaaaatctagtcccagataatgatgacgccttgagcatccacaatgctgcagatgtgctagttggagctatcaggtcagctttatcgccggaaaccaaagctcaggcggccagaattgctgataggctttcttctgaggatggaattggagaagccctcaggatattgaaggcgagagtgttgactcagaacaaaatcatcagctcattcatcgcaagtaaataattagtactgatatgatatgaggcattgatttaaaccactaaatttaagaaatggacttctaatgcaccgccccatgtaagatagagtaatttctcaaaccaatcaactttacggggcgtttggatccctttattttan

SEQ ID NO: 43363 - DNA, 639 bp, Zea Mays
tcgagccggggatgacgtgtttgacgactcgacggcaaacgacgagatcgacgacgcgattgggaattaaagccgagcgagccgagaggacacgctggcgagcaaaaaaccgcgcgagcaccggataggaaaaacgacgatgttgtcgcacacagtgcgaaggcgaacgacgcaacgacgaggacctaggatgtgcgacacacgacacgcaatcagcctgtcgcgtcgcgacaacagccgagtgcggtaaggggctggaaaacgacgacgggccaaacagaggagctcgcgtaggacaaactcggcacgacggccatggacgaggtgagcgagcttagcacgacagaggactcggcgcgcggcaggaaaagggctcgagcacgaacacggcaggcgagcagaggggctgggcagagggatcttctttgaccagagccgtgcgacgcagtccaagctgaggcaggggcgagctccatggcgagctcgagggagatgaagaaagggggcgattgggcagggagatgcgcacgcggtgatgggagcagggagcgcgctgagccgggtccaagcaccagggagctgctcgcggccggagctgagcagagggacacgcgccggagctaggagctgagcgtcggc

SEQ ID NO: 43364 - DNA, 320 bp, Zea Mays
tgctgctttgttgattgcttatacctctttactgttatctcaggacagttatagttttccaatttgtacacttacatagagattactatttgaagtccaattgttgttaacaaaaaatattccttagacatacagtgcgttaagaaaataccgatgaagttgtgtaaaaagtctttactacgattgagttacacccttagttaaatagggactttattttggagcaatgaatattgatcagcacattcccttagtatgttgctacctgcaatttttttcttacaacctgagaagcggcatgtttactacaagcttgcagt

SEQ ID NO: 43365 - DNA, 2243 bp, Zea Mays
cctggatggcattcaacagctcaagaaaatcccagcgctcctccccagccacaaatcgcttgcacgtggggcccaataacgcggtgtccactgcaaccgccaacgctgcacacagtgggggcgagcaaggcgaccacggtggcgatagagacgcgcgatttttactcttcgcggtaaccgattcttgtaaacgcaagagctccatgcggccaccggccacggttcggcaatggtagtttcgtcacacttcctctgacctctgctccaccgctcgcccatggtgctagcatggtaggaggtctagttctgtcccaggcgcagacgcaccaggccgccacgccaagaaccgccgcaccggcgccggcgccggctcaggcgttggagaagaggccgagggaccaggcgcagccatgcggcacagtggcggcggctgcggccgtctcggtctcggcgccgagtttggacgaggtcaggaaggtgcacgcgcggcacatcaagctgggcctcgaccggtgcccgcggtatgcgcggccgctgctcgcggcgtgcgcggtctcgggctggccgggcggcatggagctcgcggcgtccatcttcgagtcgctcgtcgagccggaggccttcgattacaacaccctgatgcgcggccacgtcagcggcggcggtggcgaccgcgatccggcggccgcgctgcgcctgtacattgacgggctggaggcgggcgtcagccctgacagctacacgttcccgttcgtgctcaaggcgtgcgcgcagttggcggcattgcaagaagggaggcagttgcaggcgcacatcgtgaagctcgggttccagcacgacgagcacgtgcagaacagcctgatcagcttctacggcaagtgcggcgcgccggcgatggctcgtctggcgtttgaccgggtggaggccgaggagcgaacgacggtttcctggagcgcactcctcgcggcgtacacgaaggcagggctgtggggcgaatgtctcgcgtcgttcggctcgatgatgctcgatgggtggaggcccgacgagagctccatggtcagcgcgctctcggcgtgcgcgcacctaggatccttcgacgccgggcggagcgtccactgcgcgctgctgaggaacaccgcgaggctgaacaccatcatgctgacgtccctgctggacatgtacgccaagtgcggcagcatcgagaaggccgcggcggcgttcgacgcgatggatgacaagagcgcgtgggcgtacagcgccatgctatccggcctggcgctgcacggggacgggcggaaggcgctgcaggtgttcgacgcgatggtccgggagggccacgcgcccgacgcggccgcgtacgtcggcgtgctgaacgcctgcagccgcgccgggctgctcgaggacggcctgaggtgcttcgaccgcatgcggctggagcacaaggtcgcgcccaacgcgctgcactacggctgcatggtggacctgatggcccgcgccgggaggctggacgacgcgcgcgcgctcatcgggaccatgcccacggggccgacggacacggcctggcgaagcctgctgaacgcgtgccggatccacggcgacctggatctcgcctggcacgcccttcaggagctcaggcgcctcggcgccgccaacgccggcgactacgttatcgtcgcggacatgcacgccagggccaagaattggaccgctgccgccgcgctccggacagaggcggtggactcgggcctcgcgcagtccctcgggttcagcgccgtggaggtgcgcggggagctgcaccggttcgtgtcgcaggacatggcgcacccgcggacgcgcgacatctacgagatgctccaccagatggagtggcagctgcggttcgatggctacaaacctgacacgtcggaggtggcgctggacgcgggcgaagaggagaaggggcgcgtggtcgcggcgcacagccagaagctggccatggcgttcggcctgctcagcacgccggagggggcgccggtgagggtcgtgaccaacctccggatgagcaaggaatgccacgcgtacagcgccctgatctcggagatcttcgggcgggacatcgtcatcagggacaggaaccggctccaccggttcagtaggcctcaggtcgaaccaccaccaagcagcccaacccggacgaaaccaaggcgaaaccaaggcgacgccatcgacgagctcagcgacgccggcgccgtagcgaaagcacc

SEQ ID NO: 43366 - DNA, 745 bp, Zea Mays
taatcaagcgctttttacactcttccctagaccgacggttgttcggtcatgctctcacatctcaccttaccttgagcgtcgatccattcagaactgaatggcctcaaaaataacaatacacatgtatgcaatacccacccggttgtgggttagtggttttcaactaagccacctgataatccttagtatagggcttaacagaggatgtcgctagcattatagtttttcaaaactgtttttcaaagccaaacaatgtgtttagttgaaaataggttttctaaaaccaaaacttttgttttgaaaatacgtatgtgaccgtatatacttaatcctgctccgataccagctgtggcagaacctcccaagttattgggcccacatgcacctgtccttgtcccaaagacctcagacagctatgcatgtgcaccagataacttaacaggatctgtccgattgcccaaggacatcggataaaccacttaaaaccagaaccgcgggattaagtaacacaaatcacacacacaacatttttgcagcggaaatcttattaccaaattttacaggttacaaaaattttacattattttattggagtgattacaaaagtataagtttgaaatatatgctagctcaagggatcatcctcaataagaagtatagaagggttacttagacttataagaaggccgagcccaccggcacttaacaccatcaacaacagcacaaagttagaacctgaaaaaca

SEQ ID NO: 43367 - DNA, 2688 bp, Zea Mays
ccagctacaaattgcgcccatgctgccggtaccagtccctaccaccagtgtcccgtccccggtttgactgccgagctgattcgtgtgggcgtcaatggtgaacaccgggcgcttcgtcgtcctcgtcctcgcctaccgcctcctgtcgtatgtcgtatacatggggagcccgtcgggcggcggcgacccggaggcggtgcaggcggctcacctgcagatgctgtcgtccatcgtcccgagcgacgagcaggggagggtggcgctgacgcatagctaccaccacgcgttcgagggcttcgccgccgcgctcaccgacaaggaggccgccgcgctctccgggcacgagagggtggtgtccgtgttcaaggaccgagccctgcagctgcacacgacgcggtcgtgggacttcctggaggtgcagtccgggctccagtccggccgcctcggccgacgggcgtcgggggacgtcatcatgggcatcgtcgacacgggcgtctggccggagtcgccgagcttcaacgacgccgggatgcgggacgtgccggcgcggtggcgcggcgtgtgcatggaaggacccgacttcaagaagagcaactgcaacaagaagctcataggcgcccggttctacggcgtccagcccgagtcgtcggcatcgaacgcctccagcagcgccgtggcgacgccggccgcaaccggatcgccgcgggacaccgtgggccacggcacgcacaccgcgtccacggcggccggcgcggtcgtgtcggacgccgactactacgggctcgcccggggcgcggccaagggcggggcgccgtcgagccgggtggccgtgtaccgcgcgtgctcgctgggcgggtgctccgcgtcggccgtgctcaaggccatcgacgacgcggtgggcgacggcgtggacgtcatctccatctccatcggtatgagctccgtgttccagtcagacttcctcaccgaccccatcgcgctgggcgcgctccacgcgcaccagcgcggcgtgctggtggtctgctccggcggcaacgacgggcccaacccctacaccgtcgtcaactccgcgccgtggatcctcaccgtcgccgcctcatccatcgaccgctccttccagtccaccatcgctctcggcaacggcgacgtcgtgaagggagtggcaataaacttctccaaccacagcctcagcggcgagcagtaccctctggtgttcggggcccaggtggccgcccactacgcgccggtcgccgaggcgagcaactgctaccctggatcattggacgcgcagaaggtggccgggaagatcgtggtgtgcgtaagcacggacccgatggtgtcgcggcgggtgaagaagctggtcgccgaggggtcgggcgccaggggactggtgctcatcgacgacgccgagaaggacgtgcccttcgtcaccggcggcttcgcgctttcccaagtcggcaccgacgccggcgcgcagatccttgagtacatcaactccacaaagaatccgaccgccgtaatcctccagaccgaagacgtcggcgacttcaagccggcgccggtggtggcgtccttctcggcgcgtggccccggcctcaccgagtccatcctcaagcctgatttgatggcgcccggcgtcagcatcctggccgccacgatcccgtccaccgatagcgaggacgtgccgccggggaagaagcagtcggcctacgccatcaagtccggtacatcgatggcctgcccgcacgtcgccggcgccgccgccttcgtgaagtcggcgcacccgggctggacgccgtccatgatcagatcagctctcatgaccacagccacgacgacgaacaacctcgggaaaccactggcgagcagcacgggcgcggcggcgacggggcacgacatgggcgccggggagatgagccccctgcgcgcgctgagcccgggcctggtgttcgacaccagcacgcaggactacctcgacctcctctgctactacggctacaaggagcagcaggtccggaagatctccggcgccgcgcgcttctcctgccccgcgggcgcgccctcgccggacctcatcgcgtcggccgtcaactacccgtccatctccgtgccgcggctgaagagggggagacccgccaccgtggcgcgcaccgccatgaacgtggggccctcgaacgcgacatacgcggccaccgtcgatgcgccccccggcctggcggtgcgggtctcgcccgaccggctcgtgttctcgaggagatggacgacggcgaggtacgaggtgagcttcgacgtggccgccgccgctgccgtgagcaagggctacgtgcacggcgcggtcacctggtccgacggcgcgcactcggtgcggacgccgttcgcggtcaatgtcctctgatctggtggagtcatcggcgtttttgcttctttcataatcatgttcttggttgcatgagtgtttgatttttgtgtcccccctcaatttggtagaaggggaataatttcaaattcagttttgttgtagcacccctgcttcgtgtaggttcatctcacagttaagattgtgatggccaaggctagaaaactagccatcatatttgtttgaaacctcttcttcttgatacaaacatgtgtaatgttcatgcgccttcgaaaaacaaaacatctaaaaaatatatctactgtgagtct

SEQ ID NO: 43368 - DNA, 7724 bp, Zea Mays
caaacagcagcagttcagtgtactccaaaaatatctgaagatctttttatccctgctggctgcactagcgtgtagaaatgaagataaggttgtagtgaatagttgaaggtcctataggtctcactccccactaaaatatctaatttggactgcatggggggcagtgggcagtagaaatcttatctattttgtctactacctacagatttggacaaagtgatatttatgtgtgggagctgagccaacgaggtgtagtgcttgtatgccacgtttttgaacctttggtgtgctagcactctaggaatcctccttcatcaagcgtggatgagctccactgcacctgcccctatatttagtaccttgggctgccgtattgagtgaagatttcttccttgccctcaaattctagccaaagttcactgcttgagtgtgcagtccttatgtactgctggtataaccccctccctagcccaggtttgcccccttctccccatggactggatgcgctcagtgacccctccccctgcctatttattcagtgtgttccacgactgagttcagaaaagcttttctcccttgttctcgagctgtagtcccagtccactacaaaggtgttggagtcctggtattcttgctggtgtgcatcctctctttcagccaccaagtttgttttactctagagctgaatgccaacctcttgcctgtggtgaccaaacccaaccgtttctcacctccccgtggataaggtttcccacaagtattcttggccgtgtactacttgttccatgctcggcaaaggtcagtgaagctcaccatttactacttgtactctaccactgtctgttgctgggaactaggtgtaaagttcgctcaaaaaataggctgttggatttttggatcggagacttagtgcagaaggctgaaactaggttctagtatgttgagctccactttggtgcttcctaaaaaaattgttctgaatgttttcaacctaggggtgctataccaaagtagtagagctatatctaaggaataactttggtaatgtgagcttggtcttttgttgtgtaaaagttggagaaaaggttggctaaagttggactgttaggctggacacaactgaatttttttattcagttctgtgaactgaattacagcagtatgcctagtttagaattcatttgtgactgattcatggggttttagattaaaggttccatagaaaagttgtagaccatagtaaagtgaacaagtttgctaaagtgagatggacctggttccacataaatttgggagtaaaagtggccaaaagatggactgtcaggtgttgggattcagacttagaataatatttaagtctgaatatgtgtgtttttacccaactttgggggccttgtggtaataaatccaaagggatttgggttaagagtctgtagcaaaatgagagaccagatatagatgaacaagttttgtgcaaagagtgggcttggtactgtatggaatttagagaaatagcctgctgcaaaaccctctatctgactcagtattgtgctgtttcagaaattagaaactgaattttcagtgttttgctttactttggattgccataactcttgctctaaatattttcaacctgtgatttctataccaagttggtagagctatgtctagagaataactttgagtaaatgagttgggtttgtagttgagggaatttgtgagttacaaagcactgaacagagggagaggaatggagcactagaagatgaattcagagaaacgaaaacaggttcagtgaattgtagctgattcttggacactataacttgtagtacatgcagtgtggatccttgcttaatgcataaatgaagtacttggttggttatggaggcaagcttttctagtttggttggtaaattgagctgtgatattagagtatttagctctcttaaggttttgttagcttttgtgtacacctttagagaggtgtaagtcttgcgatgcttcttagtattttcttttcaagttgcataagcataaacatccatgatcatgttatttcatatagaactcctactagaaggagtgaatattcaagctgaagtggtgactgaagaggaatctactccagtggctgctgatcaagtggaggagccatctaactgaggtttaatagagggatagagtacctcttcactgcaataagaactcctaccagaaggagtgaatattcaagctgaagtggtgactgaagaggaatctactccagtggctgctgatcaagtggaggagccatctaactgaggtttaatagagggatagagtacctcttcactgcaataaggcaagccccggtgcatttacccctttccttgtatttttaaaagacttttatacactttaagtctagtgaaatgtgcattaagttataggagttgcttgaaaactatttgatgcattgactaccttgatatccattcctgttatagatacttctttggaagtgttggacaccaaaatgagcggacggtccggcccttaggcccggacggtccgcgtgtcccgagattagattacctcggatgtttatccttatctcgtgcgtggttatccatctaatcacgtgggagtttgttggctatctcttaggaaaaggtccagacctcctcccctataaatataaaggggtacggccgattgagaacccctgaacacattccaatcgaaccaattaccttatttacttttcctgccctaggagtagatgtagcatagttctagttgtagccttccgcatatccacctccacccctagtcgactctacgtcgtctagatccgtcttgggtggcctgccgatcccaagacgaccctaggatctcacccctcccgaggggcaagatctagttgtccatccaagacctcttcctcgatttgaactcttaattcctaggcgactccacgtcgtctggggacgccccgggtgacctatcgacccggagcaccttaagatcttttccccccaggggacgagatctagattccagcaaggaggaggaagacgaccctgtcgcccggtcgcgaaccgtccggcccagagctgcggaccgtccggtgtgacgcagggaagacaccgctcctgcgccctggtcgcggaccgtccggcccaaggccgtggaccgttcgcgccgtcgcagagggcactactaggcgatcctgcgacctatcgcaggccgctactactgttcatcttgcggagccgaacccaaggtgccaagtaccgtcaagcggttcattattgtgtttggtgaccaaaaaggcaccaacatacttttggcgactccgccggggacgaggttgaagatctacaaaatcaggcttatatggccgattctaaagatctcaacagggcttctccaaacagcagcacaaggctcactaatttatcggccgctgagcataaaagattaaaagatgacatgaagaaaatagacgaggaggtccaacgacaaaaagatcaggtgctcaaggtggcgaataaatggttcctctcgcacttcagggtggattgccaccagaagaccatccaagaaagggaaatagacgccaattacatgtcatccgtgctgcaacagctccccacaataggtgatgccaggtcagtcgatgatattccatctattagaatttcttttgataatcggattaaaagtatcacagaggatatagaaaggatggcgcatgcattaggaaaaactcacatgcctagttttttatcacataaattaggcgccaaaacaattgcgccaaacacatcggcaacaaatgggtttccccagccatactctggtatgccgatggactcatatccaggacgaatgtcaccaccatcttcgctaaatggtgagtcaactctgagcacggccggaccgtccgcacacaatagcggaccgtccggcccttccgtcggaccgtccggcaccctacgccggacagtccggagttacacagagcccaccacaagggtcacaggtgttgcctgacgtgaccggacagtccgaggatagtaccggaccgtccgatccacccgcagaccgtccgaatgtgcaggtcggaccgtccggagcaccagaagtcacatgtgatccgcctagtgcggaaggccgacataaatataatcggccacccaagccccaagaactaaaaaagtcacatgtccctgagcttgtttggcccactaaggccaaaccttctgttcgctctcacccgcactcgacacaaaaggaaaaagttaagttcacatttaatattactaaatgtgataaaatatttgatgagttgcttaaacatggtaatattaaattgtcacatataattcctccggttgaacaattaaaagggcatgtttattgcaaatggcatggctcctttcttcataacaccaatgattgtgtcgtcttccgtcggcaaatacaatcggctataaacgaaggccggttgaggtttcaaaaagaggtgaaaattgacaggccacctgttcctgtcaccacattagagccaacgagcaaaaaggccataattcggccttgtgtggccgataaaagtaaaaataaaaatatcgtcattggtgatcctcgcacaccaaatatgtcacacagaatggttactctgaaggctccagacaaaagaaagaccggaggcaccggggggcaagcacgatcggacactcgatcacggtcacctgtcctgcgtacgccggacgatccgagtactaaggccgaacagtccgagacaggcgcggacagtctggctatgatggccggacggtccgcagatggtcagaagcagcaacatcagaccatcggaccacaacgttccaacacaagtgttaggaaacaaaacactactaaaacgtctggacgactcagtagagtcggccctacttttggtcagttgcttgccaaatatatgaagaaggccgttccacacaaccggccaataaaacaaacgaagtcaaaagggcgacctgtgcgaaagcaaaagccgactaaacggacccaaagggtagcacaaccaagatcgccttgtcatcctcctccggggatagcatggtgcgtcccgttctatccatcgccgatgtgttgtcctgctcatgtgtggggtggtacggcgatgaattcgtattactagccgaatccgtttgcttatttaggctgggggcaccacaagtttttgcctattgacaggttgatcaggtagacatggccgaagaggatgcgatccaaaacggcctctgtgcattaaagttccatcaagtatttatattatctgatcgcaagagccgatgacttgcatcgagctgagtccttacttcgggaacaaaagctcatgaggtcaattgtttccgaagttttcactgatgcttttggttcgccaagctccaccaaaaggcaggggggcatatgttggacaccaaaatgagtggacggtccggcccttaggcccggacggtccgcgtgtcccgagattagattacctcggatgtttatccttatctcgtgcgtggttatccatctaatcacgtgggagtttgttggctatctcttaggaaaagttccagacctcctcccctataaatataaaggggtacggccgattgagaacccccgaacacattccaatcgaaccaattaccttatttacttttcctgccctaggagtagatgtagcatagttctagttgtagccttccgcatatccacctccacccctagtcgactctacgtcgtctagatccgtcttgggtggcctgccgatcccaagacgaccctaggatctcacccctcccggggggcaagatctagttgtccatccaagacctcttcctcgatttgatctcttaattcctaggcgactccacatcgtctggggacgccccgggtgacctgtcgacccggagcaccttaagatcttttccccccaggggacgagatctagattccagcaaggaggaggaagacaaccctgtcgccaggtcacggaccgtccggcccagagctgcggaccgtccggtgtgacgcagggaagacactgcttctgcgcccaggtcgcggaccgtccggcccaaggccgcggaccgttcgcgccgtcgtagagggcactatcaggcgatccggcgacctatcgcaggccgctactactgttcatcttgcggagccgaacccaaggtgccaagtaccgtcaagcagttcattattgtgtttggtgaccaaaaaggccccaacaggaagtatcaaatattgtttacaaaaatgcttagccctgcttagatcttgtggatagaagttgtcttttgcaataatgcctagctcaggggttgtcctgaggaaggatggcttctacctgcaagaatattttcattgggagcatggtgggatcttactgcaaagttccctgtaatgctcttctcatcctaaggaacacaaaacaatcctaaggatggaagtacttaaatcgagacttgggctaggaacaggtgatgctccacccaggtcaattaaggattggatgcgtatgtaggcctgtatgatcaaggactatcttaactggccacatgccctggatatgggacagggtaagcttgaacccggctattccatacgtgtaaagacaaccgcgcactgggcgtgggagatggtgggagtagcgtgtaccctcctggctggaggctggatggaggagtactgtgctcccgggtagcgcggaccggttcacgttgtggaggatctgtgggaatggttgacatatgcaagggttaagtgctacatatgtcgtgtggttagagatcctcagctgagcaaatcgattcgggtcgccgttatatccccggagagtggagacttgatcgctgccctgcaacctaagtcaagatgtgaacattatgaataaaaatgatgttgtattgatgagatggtgaaattagactagatgcaaccagagtctattaatatttaatctggcgttaaaatgttgaaagtaaggactcactttagtaagctatttctgcaaaagtatctaagttgattcttgctaaagccttttccttgattcctatttaaccagcatatccttgagagtcatttttccttagtcgggtaagacttgcgaaagtacactccgtactcagggttttcgaacccatgttgttgtaggtgatgaggagtactctaggtgttcctgaggctggagggtgtttccagttctggaggaagattagttaggcttatgtataagctttggagggtttctaccttcctgcttttgtaataaggtatgcactttgagtatatcaggacttgtaatacatattactctttcgaaacatgtaaaacttgagttttgaaaaggtaaagaatgtttataaagtcttccgctcttatctccgaagtgtgtatgtatcgaatgtgattactgtaatatgcatgtatggtgggagatccttgggatgatgaatttaagttgttgaactcgtgatagccttgttaagttacctggtacacgtgcatagccatctgaggccatcaaggcaaggattggtgcatgtgggcccgataacttggaagggctgccacactgtctgtctgcggatgatatgctgaactgaaattcagatgtgtacccaaggcttcatgcaattgctgccagaaatgagaggtgaactgtgttc

SEQ ID NO: 43369 - DNA, 2520 bp, Zea Mays
ggtttccttttctgctatcatgccgaagctctcctgcacatagcttcggctctgcgccaaccttcgtgttctttgcgcttcacactgtggttctgatatgagtccgaagataactgttcatgtatcatactctagaaacattgttaaatcatgtttttgaggaccttcgaaagccgaaggcccccaacaaagccataggaggtgctatggatgcaaggagaagggtcatgaaattggttcatgcctccacataaagaaccaagaccttgcacgatcaagaaagatgaccatcaagaaagatgaaagcaaaaggcaaatgcattgaaaggacaagcaccacatttgctacaattgccgtgaaaaaggtaatctattcatggtttgtccaaaggggaataaggattaacctttgtgggaatcaagcaaaaggcctacaactaagggatatccaaaggatggtaacaattaaatcttaagtgcacattgcttttaattagtatattcctttatgtcttttgtagccacataaggaaaaatgaagcacttgagaataaacttaaaatattttaccttgtcttggaaaagttccaatcatatggtagattgcatgtttgttattgttaatgtggaaatctacatactttaattgatgataattaattcgtggcatatttcaaatgaattatcgtattattgccatgacttagacgtaaagagtattatcccgaattcttaaattgatagagtgctaagaaattcaaattcttaaagcacttatcaaaaggggaattctctatatgactagagttgtgagactaatgtttctatctaagtgtttatgtagtctcacaacatgagaatgtgtttctcacatggaatgtgccattcagcattcaaagaagattaatccaatattatgtgatgtattccttcttgtttaaattggttttgagtcttctacattaatcactcaccatgctatgaattaaacttgtcatgtacacttaattaaataatcatgctattttcacattgtttaaatcagtgttatgcatgatgcttgtaagggtaatttaattcgtatcatgaggtttccttattttagtaagcttcttgtcattcatatactagaggttgataaataggaaactattgcttgtctttctaatgcaatctcttttaagctatttcatggaaattcttaagtagagattgtgctatttcaattgataaaatcacaagcattaaaggttaatcttcacctaaaagaaagattaggaatgatgtaggaaaaggtatggaactagttgtttcattaggaaagattagcattctttcaattagtaataatctattctatggaaagaaatgtcaatgtgaaggttaaattcattttggcttaaatttgtaaattggtgcatattgttaattcactcctccatgtgcgttaacttaaaaggaatttaatttatgcatttatgcctcagaaatgatgatttgtttgcattcatataaatatcatcattcattaaatatttccttgtactattatacctcttttcaaagtgcgttttcgactagttttaaaaggaaaagagataacaagctaaagaaggaagtctccacaaatgatgaaaagaaaaatactacaatgacaccacaacatatagtaagatctttcaactggtacgttctatatggtggtaaatattcttaggcataagttaattcattacaaatttgtcatgctttgaccaatatatgtaatgtactcctcatgaaactcttaactgaattgaaagtgcattttgcaagtcattcaaatacttgatgcacatatctagtgggagcacattatatatattgtgtcgtaaagaataagtttcccttgagtaagctgtactaagacaatgcataatggtaaatctgtatctcattcatatggattttaatctttgttttctaaatagatactcttgaggtagcttaaaattcccttattgttaaatataaaagtgcatatgaatcctttctttcagttgatatccatcacatgcatatgcactaacatggatatgatttttaaactttaaaaggtgcaattagtgatccatgctctctaaattttggaaacctacaaattgatatcttagaaatctacttcaatcggtatccatatgcttcacactggattggatcactatgttgtaaagtccatacataacttgtcttcattggttaagatatgatatgaatgcttgtgcgactaaccttgataagctagatgcactcaaggtcaaaatattatcattatcaagaagatattcaccaacgattatgtatcaataaaagttaacgccaagtataagcccctaagaaacaaacatggaagaagggcacttgacggcaacccatccaagctcataataggatcaagatgagttgtttgaagagcaagataagagaaatgataactctttcaatggatcaaccactaaggaagaggaagcacttgagggt

SEQ ID NO: 43370 - DNA, 746 bp, Zea Mays
gacagattctttccccttccttcgtcaacgtccgacgcggaaatccggatcacaacgagctgcgcggaatccgcgggaagctagccatgaaccccacgatcgactcagccataagacctacgttcctcgacttctttgccctttcgccctcggttgtgattgcttaggtagccacgggattgccagggcggggaatttggagccgtcgccatcgaccgtcgtggggagctctgatttcggccggggttgcactggcgtcgccgcattggactgcagggcatgtgcgcactgcatctccgaggctcggacacctggcgtgcgcccaattatcgcgccggtgagttttgccgcggctctgctccgttcgtgttcggcgcctcagctcgtcaccatagatgggagatctccggtgggttttccggcgagggagcggaacggcgccgccgtgtctgggtggagataggaagaagaacggcctcgggccgtcaaaccgttgatggacggctcggatcagacccacacacccccttttgactgagattcatcccgtccgttgatcggtaatctagcgcctgagatgagatcttgcgtaattttaatccaagccgtttatatcaaatcctgtggccctagttgcgtaccggttcatttatgagtccggtctaatctgcgccgtatcctttaaatccaacggttctagttaactcataccccttcggctctggcagtctttcaaaagagtcctc

SEQ ID NO: 43371 - DNA, 2403 bp, Zea Mays
ctctttcgctccgctttctcaatcactgggcctgggggagatcgagacctagagcggaggacgggtgggcggcgctgagggccttaggcgaatggcggtagaggaggccgcggagagctgcggcagccacgccgcggccgctgcgtccggcggcggcgcggcggagctcgctacgtcctcgtcatcggccgccgcggcggtgcaggcgcggaagcagcagcagcagcagcgccataagctcgaggtgtacacagaggttctccggcgcctccacgacgccggcctgcccgacgcgcgggcgcccgggttcgacgacgagctctggaaccacttcaaccgcctccccgcccgatacgccatggatgtgaacgtggagagggcggaggacgtgctcacgcacaagcggcttctggagcaggccaaggatccggctcagcgcccggctttcgcggtgcgggccgtgcaggtatctccaattcttgatgggaatcagactgatgctgattcgaatactgcaggggaggaagtcgcttcaagactgttgaacaggcagcagagcatacatcctcctcctgcctttggttcttctacaaatcttgaggcccttgctcttgaagctagcaagtctcatcaagatcacgatagcacctctgataattgtcgatccctgtacaggcccatgcatgaaatcaccttttcaaccattgacaagccaaaacttctcagtgagctgacatctctgcttggtgagcttggtctcaacattcaagaagcacatgcattttcaacaaatgatggctactcacttgatgtatttgttgttgttggttggcatgatgaggaaacagaggatttagtagaagcagtgcagaaggaaattggcaggattgaagagttgaaaacatgcagattgctgagatttcagcagctggccgtgttgagataccaacagatggtgctagtgaatgggaaattgatgtaaaactgctcaagtttgggaataaagtagcatcaggatcatatggtgatctttaccggggtacatattgcagtcaagatgttgctattaaagtgctgaaacctgagagaataaatgcagacatgcagcgtgaatttgcccaggaagtatatatcatgaggaaggtacgtcacaagaatgttgtgcaatttattggtgcttccactaaacccccaaatctatatatagtgacagaatttatgtccggtggaagtgtgtatgattacctccataaacataaaggtgttttcaaacttcctactttagttggagttgctatggatgtgtcaaaaggcatgagctacttacaccagaataatattattcatcgtgatttgaaaactgcgaaccttctgatggatgaaaatgggactgttaaagttgctgattttggtgtcgcacgtgttaaagctcaatctggagtcatgactgcagaaactggtacttaccgttggatggccccagaggtcatagagcataaaccctatgatcagaaggctgatgtttttagttttggaattttgatgtgggagctactcacagggaagattccttatgagtatctgactccactacaagcagctgttggcgtggtgcagaagggattacggcctacaattccgaaacatacttatgcaatgctttctgagcttcttcagaaatgttggcagcaagaccccgctcaaagaccagacttttccgaaatattagaaactcttcagagaatagcagaggaagtcggagacgagcacgaggggaagcacaaggacagaacactgggtggtttcttttcagctctgagggggcggagccattgagacacggttgaagacttgaaatgtacatggcctcggtccatcctggaaggatctgaactacaaccagctcctgttccccgcacatagcgacagtacacagaaatactgtacagacatgctgcagccggagttgactaagtggcaattttttagcggcagccatcgcttttcgcctatctgcttgttactcctgagttccatcacaatgagaggaagcttgggaactgtgcatcataaccagtctgatttctctaacagagtctaatcttgctgtagatgaaaataataagccagatccaggccgtggcatgattcttttaaggttccatcttttagcatattttcttctacgtgccgtcattcttttctggacatgctccacccctctgttgtggaacaacgcggcaagcttgagttagctgagcaaggcacctgcatctgcatgggatctgctcggaacaaagttgggttatcttgtgctaagcttttgttccccagtttccgtgactacaaatgatatcaatttattttaaagaaatggaaaaaacatgtgtatagtctgcatct

SEQ ID NO: 43372 - DNA, 576 bp, Zea Mays
cccccataggaggaggcgaggatgtcgcactacaagttcaagcactcgaggcacggttctctcggcttcctccctaggaagcgatcctcccaccaccgcgacaaggagcaagtttgtattgtctcggtctccatctcgctacagggtctcggcctctcgggcgagctcgccacctcctccctctgccgcgtgcggggcctggtcgcgctgagcctcgcgtccaacggcttcgagggccaggtgcccgccggcctcgccgcgctcagcggcatcctccaggtgctcgacctcgaggagaacgtgctctccggtgtgctccacccggcgctgttcgacaacctcaccagccttttgaactggaggaaaagcagggtagccatagtctctgttggcgtcgcctgtttcattgtgttcttgatgatcctttcagtaataggcctttttaggcttacacagacctgttttgacaagagacgagcagcgatgcttccatttcggaccacgacctagctaaaggctaatggttccaagtgttatgtcaaaaaaatcgtgtatgattgcaacaatattggcaaa

SEQ ID NO: 43373 - DNA, 979 bp, Zea Mays
cacgcattatccattccgtttggacccatgagatttttcgctgggatgaccgtgcacgagacgaatcccgttcggtaaccgataccccaagtcaaggcggatcatccgtcagtccgtcaccgcagtccagggagcgagcgacgacgacgccagggtcgtggtgctagttgcggggtcccggcccgtcgagtccgcctccggttctcccccttctcccgttgcggcgactccggcggcggagacagaggagcctaagcaggaggaggcggcggcggcagcagcagcaggtgtgcaggccatggctgtcacggtagtgcgggacgtcgagacgggcctggacgcgagcaccagcgaccgggacggtgacgccggggacaacccttcctggttcacacctaagagactacttgtcatgttctgcattatcaacatgctgaactatattgatcgaggagcaatagcaagtaatggcgtcaatggtacccgcaaaagttgttcgggtggtacatgcacctcaggctcaggaattcaaggggacttcgatcttaataatcttgaagatggtacattgtcctcagcatttatggttggactgttggtgtcttcgctgatatttgcatgccttgtaaaaagatataatcctttcaggcttattggtgttggcttgttagtgtggactatcgcaacagctggttgtggggtatcatttgatttctggtcaattactatatgccgcatgtttgtgggcgttggcgaagcttcatttataagtcttgcagctccatttattgatgacaatgcaccagtagctcaggttcttctccttggagctgttgagtttgggccggctgaacggatttggaagacctgggcgccagggaaatgcaaattttttatgtggctggttgtgcatgatagatgttggacagctgacaggttggctaaaaggggaatggatcatcccgtctgctgtccgctt

SEQ ID NO: 43374 - DNA, 311 bp, Zea Mays
gcggattagcccgcgcttgaggtcgacttggctcttcttccgcatcgcgcgattaataagcgtacctaaatgatttgcataatgcacatgaatgcatatgaacgggaatactataaacctaaatagtgctacgcgatagcgaatttaaacacctagcggcgaggcgttgtacaagtttatacgataatactggttatcgacttacgattaagcgcaataattacacttctcgaacctatcacaaacatcacaaacaacaaactatacacattaaatataattagcctacacaactcaccagctaattaatt

SEQ ID NO: 43375 - DNA, 3731 bp, Zea Mays
gcgagtagaggcggctgacgaggtgacgcgtgcgtgcgtggcgtccagcgtccccctcccccgtctctctccctttctctctgcagtctgcacgccaaaaaaaaaaaagtcttcagccatctcgacggctcgtcggctcgaccacttcgcctccccaccccgccggaaccctaaccccagccgcgagagctccacccgccgcgccgtgccgatgggacggtcgttgtgaattgaagtagcttggaagagcagtgttatgcacagcgatgggagacaatgtcctaaaactcagggtgggcttctcagggtaaactgcattatggattctggcaacagttcatgctctagaacacgaagtgggcttctaagattaaagggcttactggattccagtggtgtttcgagttctagaactcgaagtggccttttaaggataaagagctttgtggattccagtgatggttcatgttcgaggtcacaaagtgaccatgtaagatgtagccctcctattgtcgaggctataataaatgacgaagcagtcttgaaggagtctcctgatggattgatgaaaaaagagatacctgttaggactcaaaatgagtttgttagacagaactctgctgacaaggcatgcggacgcttcccaatgggagtttgagtgaagatatgccttctagaacacggagtgggctggtcaggagaagccctactgttaagactttaagcaaggatcaatcagtcattaatgggctggctgatgggtcactgaaagaagacatgcctcttggaacacggagtggccttgtcagaggaacccttgctgccaagactcctgatggatggatgaagaatgacaaggctgctggaacacggagtggtcttggtggtggaagattggtagccaagactgtaagcaaggacaaaagggctgttgagggtttgcctgatggatggcgaaaagaatacaggccaaggaagaatggttcatttctggatgtgtactacattgatccagtcagtggatatgaatttcgctcttttaaggatgtgcaccgttatcttgaaactggagatattagacagtgcgccgtgagaccaaagaagagtaccatctgcgaagttcatataatagaaagtcaaactcatgcaagtgcatcaccacaacacacgaggcctggtactgcggataagggtattcagtgtgaaatattaacttcggatggtatcatggtaccattgggggaactgattgctccatataatggaaatgatactgaacatactgtgttaccagagcctgagaacttgaaagcaattcaagggtctgacaacaagcttgagacttcggaacacgtgagtgttcaaccggtttctgcacgtaatggttcaaggcaaaccaaatctgttaaaaggaaagaacgaaatgcagaggtcaaatccaagaagcgcaaaaccagttctgctgtgactgctgttcgagcgtcgccccgcttagctgcattgaaggttcagcttgaagtgagcatcaaacatgaagatgccatggttagcataaatcatgtggaccaggtacagactatagaagagagcgccattgatcaggcacacaaaagccaatcgggctctgttgatgagatacatggtaatctggaaagcactttcagtcagttacagttgagccaagcagacactgctaatggaatgcaggctatgcaggaaaacactaccattcattcacaaccaagccaattggatactctgaatcctacacacagaagccaggagaatagtggcaatcagttacaatcggtgctcacagattcttcgattccaaaacgaaccacacaggaatgcactatagacgagccaagccagccaggcataaatcatatacacacagatcaggagttcactgggaatcaatttcggtcgaacctaccagatgacactgttatttcattaagggatattgaagaatgcacagcccactcaaagccaagcaataccgacagtactggacaaattcaggccaatgaggaaaacactgccaatcaagtacagtcgagcctaacagacacagttattccagtaccggttattcaggaatatgctactggttattcacagctgagcaaagctaacacctcaaataaaaaacaggccaatcaggaatacatagctgatcaagtacaatcgagcctaacagacactgtcattccagtacaagttattaaggaatacacaactggttatccacatattaataaagctgacatttcaaatcaaatgcaggccaatcaagaaaacactgatgatcacttatatttaagtcaagtaggctgtgtcactcaaatgcagataattgaggaaaatttgcccaagcaacctcagctgagccaatcaggcactgggggtagaatacaaattgatctggaaagcactaccaatcacttgctaccaaactatgatgaaaattctatgttgcaatgtggtttatcttgggctcctgaacagaacagcggagcccttagtacagatttctggaaaaatgttgaaactcaggcttcatcggtttccatgccaataaatggagcacctgttgcaagctttccagcaaatgttagattccacaatgcagcagcagcagcagaacctgctttaccgccacaggttgctccagctgaagcaggttctgatcagtcggggttggcctttcaatctgttttcggaaacatctggtcggatccttgcatcgagtttgcttttaagacccttacaggtgacattcctgttctggacgacacaacggctgtcacagactactttccggagcaacaagacttgaataaaggcccagcaccaaaccgtgcaggttctgttgataattccagaaaccacacacaagtcgatgtgaaccttccaccacctgctctggatgatttctacaatggcaattggttccctccccaatgaattcagtatgggaggaaacaaatgcaataacattttgtacctgtgaaaaacaaatcagagaaggctaatggccagattacaaagcaatggtcgtgcgctaatgatttctacaatgacagttggttccctcccccaatgaattccgtgtagggaggggaaaaatgcaatgacatttttttagctgcggaaaggcaaatcagagaaggctagcggccaaatcccaaagaatcaatcgtgcactctgaactgaatgtgtcatcccggaggacacattttgtaaaaaaaaaaaaacagtagctttatagccttattagactgttaaaacacactcgactgatctggttccatcaacaaggcttcacggagactgtcgagtacctgatctgggtcatgttttccatagtttgcttctgtgcagttgcctaataagcccattcgttgtaaactagctagttctaacttaagaaagctccctcagggcctatgcatgggtctctgattattgtgcagatgaactgttgttctggacattttgaacatgcaaatgtggaagcgtcactgtcagttgaattatgtttcagccgaattgagaagcgctaatccgctgtttgtgtagagtttgctgaatgttgatgcttgtgcttggttacttggatcagtgttttttagggggctcggcttgcagtaacgatgcaccttgttatatatccagaaaaccttggttgtcactgttttactttcatcacttacaacttgac

SEQ ID NO: 43376 - DNA, 4360 bp, Zea Mays
ttttcgtccctcctcgctcctccccgcggccatccgaccccatggcctcggcctcattccagcccgtcgcggcgtcggcggcctccgcgccgccgcgcccggccccgcgccaccccttcgcagccgctgccgccgcgcgccgctcctctctctcgttacgccccgccgcgcaccgtcccgttatcccgctccgctcctccgccgtcgcggctaacaccctccgcgccacgcaccgccgtgccgtctcggcgaggtcgaggagacgcgcgcaagggctcggcgcggcgcccgcgttggctgcgtcgacctggggcggcggtgacaagggaggttgcctctcttgcttccccaagagtaggcggggcaggtcggggctcgcgccttgcgcgctcccgcacgcgtcgggactatcgtttcgcagccggttgagcgggtcgaaggtcaggcctagccatatattgcacgccgctggtcctgatgaaccacatgttgcaagtccaacatggtccgatacttcccttgatacaactgacatggatcatgctattagtaaggaggagcttgaagatgtcctcaacactccgcttcccgagcatccgaagctaattcgtggtcaattgaagaatggcctccggtatcttatcttaccaaataaagttccagcaaacagattcgaggctcacatggaagttcatgttggatcaattgatgaggaggaggacgagcagggaattgcacatatgattgaacatgttgcgtttcttggcagtaaaaaacgtgaaaaaattttggggaccggtgcgaggtctaatgcatataccgacttccatcatacggtgttccatatccactctccaactaaaacaaaggaatatggtgaagacttacttccttttgtgctggatgcattgagtgagatagcttttcatccaaagttttcttcatctcgtgttgagaaggagagaagagcaattctttctgagctccagatgatgaacacaatagagtatcgggttgattgccagttgttgcaacatctgcactcagaaaacaaactgagcaacagatttcctattggacttgaagagcaaatacataaatgggatcctgataagatccgcagatttcacgagcgttggtactaccctgcaaatgccactttatatctggtgggggaaattgatgatattcctagagctgtgcgggaaatagaggcggtatttgaacacactctttcagaaaatgaaggaaatcctgtaccgagcgctaatccatttggtgctatggcaagcctttttgcaccaaagctcccaggtggttttacttcaaacctaactggtgaaaaatcacctgccacagataaaataaagcctgcaaaaagggaaagacaagcagttaggccacctgtagagcataagtggtcccttcctggagttgctcaggatgccaaacccccagcaatttttcaacacgagttgattcagagtttctctatcaacatgttctgcaagatacctgttagcaaagttcagagctacaaggacctgcgcagtgtactcatgaaaaggatatttttgtctgccctacattttcgaatcaatacaagatacaagagctcaaaccctccttttacttcagttgagctggaccacagtgactctggaagggaagggtgcacggtcactactctcacagtaaccgctgaaccccaaaattggagaagtgcaatcaaagtcgctgttcatgaggtgcgaagactgaaagaatttggtgttacaatgggagaaatgacccgttacatggatgcactgataaaagatagtgagcagctggctatgatgattgacagtgttccctcagttgacaacttggacttcatcatggagagtgatgcacttggccacactgtcatggatcagttgcagggacatgaaagtttgcttgcagttgctgaaactgtcacccttgaagaggtcaacactgttggcgcggaagtattggagttcatttcagattttggaaaactcaatgctccccttcctgctgctattgtggcatgtgtcccccaaaaggtgcatgttgatggcgcaggtgaaactgaattcgagatatatccagaagaaatcactgaggctatcaaggcaggtcttgaggaacctatttaccgagagcccgagcttgaggtgccaaaggaattgattactcaatcagagctcgatgacctgaaatctcaatgcaatccttcatttgttcctttaaccaaagaggagaatgcggtgaaagtgtttgacagtgaaactggtatagcacaacgccgtctttctaatggaatttccatcaactacaagataacacaaaatgaagctagggttggtgtcatgcggctcatagtagggggagggagagcaacggaagattctgaatcaaagggatctgtcattgttggtgttcgtaccctgagtgaaggtggctgcgttggtaacttttctagggaacaggttgaacttttctgcgtcaataaccttatcaactgttcactggaatcgaatgaggaattcatatttatggaatttagatttgctttaagagacaatggcatgcgagctgctttccaacttcttcatatggtccttgagcataatgtatggctagaagatgcatttaatagagcaactcagttgtatttgtcttactatcgctctatccccaaaagtttggagcgttctacagctcataagcttatgttagccatgctaaaccatgatgaaaggttcgtagagccgtcaccacattcactgcagaagttgactcttcagtcagttaaaaatgctgtcatgaaccagtttgtgggtggcaacatggaggtcagtattgttggtgatttcactgaagaagaagtagaatcttgtgttcttgattatcttgggaccgtgagggcttcgagttctctaaacacagaggagcgtattgagaagatttccttccgaccatttccatcagatgttcatttccagcaagtatacataaaggacacagatgagagagcctgtgcgtatattgcaggccctgctcctaaccgttgggggttcactactgaaggaaatgacctatttaatgtcattcggatatctgatgctgatgcagaagtatctgaaccagtgagcttggatctaacagggaagagacacgttgatgttcgcagccacccccttttctttggcatcactttgagtctgcttgctgaaattattaattctaggctatttacaacagttcgagattccatgggattaacatatgatgtttcttttgaattaaacctttttgacaaattgggtcttggttgctgttgatgcctgcaaaggtgttctgagaggattacatagtagtcgaattgtggaaagggagcttgaccgggcaaagaggacgctgttgatgaaacatgaggctgagacaaagacaaacgcgtactggcttggtttgctagcccatctacaatcttcatctgtaccaagaaaggatgtatcatgcatcagggaattgacgacattatatgaaagtgccacaattgaggatctgtatcttgcatatgagcatctgaaagttgatgattcttctttgtttgcttgcattggaattgctggcgctgaatctggtgaagatacaaatgatgatgagcttgatgtggatcttcatggcatggctcccatgggaggccggggtctttcaacaatgaccagaccaaccacatgatcaccattgggatggccagcccttccaaggtgacatattaaatgctgtgttactgcatcatggacaagttgtgctgaaacctactcggaattggttgtggatctttatatggattttaaccttgctcctgaagacaggagccacatggccctaggagactattctcgtttcccagcaaaacggtttaaagataattgaaacattggatctgtatctggggagactattgtttgtttcctatgagccacaaccaaaaagcttggccgttgcatttccccccgagaagaagcgttggagttaatgactcgcaaggtcgtggaaaggagataatatttttcgaggtcattatgtagcttggcatgtacaggaaagcaggctgattcttgcatacagcagttgtaactaggtcgttgagggcattgaagataggatgacagtagaatcacatataagttgctggtctgcgaattcggaaataatgatgaaggcgtaggctagtaacattttggtgttattctttttttttttaatcaaaaaattgtagcctttgttaccggtaataaatagatccatagctttgatgaaaaaagaaaattcaaaaaatatt

SEQ ID NO: 43377 - DNA, 514 bp, Zea Mays
tctccaagcgctactgcagcctcaccaaccgatcactgagtatgctgtcagcacatttgttaatgagaactttcaaatgccaagaatttcaacatactaagcacacattatgtacgtctagcatactaagcaaaaaatttggagatcatgaagggtaagcatggtatatttggggatagaaacgccaaatcagatataaaatgcaggatatcttgcatctaccaaatagcagaacactcaatttaggcctaaatctcgtggaaattgttgcatgatggtctctcatgctaaattgttgttggtctccccaggtccaacttgtaccccatgcctccatcatgaatccatgatagttgataactagagccatcaacttcaacacacaaatctgacatagcaaatcacaatgaagcatcccaagagacaatcaatcatcataggcatatgaatatttcttttcacatgacattagcaagcatgaaaactaatgtaattctttacaacacaaacaaaa

SEQ ID NO: 43378 - DNA, 2239 bp, Zea Mays
cgcgattcccctcttccatcccgattcctccgcccgtgactccccgcgcccgcagcccccgccgccgtcctcgcgacctgcctaggacagctgtcacgcccgcaaatcacgtgaccatgcccttccatgtcctcgcgtcctccactccgcccgcgattcccctccccgcacccgcagcccccgccgtcgtcctcgcggccagccgaggacagccaccgcgcccgcaaatcacacgaccatgcccttccatgcccgcaaatcacgtcaccccttccatccatggcagtcgcgctccctctgcgcccttccatccatggtcgcggatccctacgcgccgcgattcttcccatacgctccctctgcgcccttccatccatggccgcggatccccgatgttgagatctgggagctgaagctggagatctcgcggatgcgggtgcggctgacggcggacgacggacggcgcaagaattgcggcggccggagctcccagtgctccgacggcaaggcccgcaggcggtagaaggcatccttcgcctatgactgatgcttcgctgctggcgtcgacagtggaggcgcgacaggcggtgatcgtggatggatgcggtctcagcgtctggaggatcggtcggagctaagcagggacggtggctgctgacagctgagtgatacgtgtatttctaggaagatcaagcccagagctgtcgcagagccagaagtgcatctacttccacggcaccgtcagcaaggacctcctcacacacaagttggtcatccagctctctaggaagatcaaggacgacatatgaagactggagtactttgaagtttgatgaacaacaaggacatcctcacgcacaagtttgatgaacagtcaacaaaattcttgagccagttcactccaacccaatgggacaaggatcagtggcatcctttcatggggccactgcggtccatccaagtgttgttcatttgtgttgtcttcatgatcgtggagatcaacacattcttccttaagcttgtgtcctgttgccgagttcctcaaaaggacaaagtcgttactgtggttcagtctctacttgaatgatattagtgacaagattcatttgcagcaaaagttgcacgatggaccacgataactattattgtcggtttctctgattcaattaagtgggaacccttggtagtgattcaattaagtgagaagtgagaaccctcattgtgctatttttttgtttcaggtgatcattcctttcacaaaatattctttagtgataaaaccattagcttagagtatggaagggttgtgtccagcaaggtttatgacggatagtcttcgctgttatgctgcgtactcgatgtgttgcctttctcctaccattctttggtacataactaacacattatgcttaaacatggagtcattatcttataaattctttttctatcactaatcattgttttggttcctatttggcataaattgtctaaatacttataaatgtgttgtcctatattttttgttctggacattgtttggttcccctgcttccagaatttatatgacttgtgaattttaaatgaaagaaaagaaaggaaaattatgaatcatggattattgattcatgccataacattgacttttgtgcagggttgttatctatctttgtagccgaagaaacaatcctgagaaagaatggaaagctccttggctaggaataatgtttctaagtggaatcacctgggttatgcgagaagcacatcaatggattccactggtcctctgttagctggtaggagaagtagcagacatggctcaagtgagatgggggactgcatattcagctcaatgagacattttcttcagttggcgaatcaattactaggagaatttgttagatattaagattaatagtaacatgtattaattcaattttatataatcgttgtgcaccaacattttatttgaaagggagaaataaatcctagcaaaattgactatgggagaagggatataggaacaaaaatggaatatgggagagggaacaaactcatcggcctatgcgccttgattagaatgtctcctaaaagttttaggtattgaaaatatgataggacatttattgtaatatgtttattttctgaaatactaattttgatgtatagaatattgacaaaatcttcatgtcagtttcccttcccaagtaagaatagagcaatgcacttgttctgcccgtaa

SEQ ID NO: 43379 - DNA, 5618 bp, Zea Mays
gaccgccctccgcatctcgtcgacgacgaaaggaaaacctcacaaatcctctggatgcggggtctagccgcctccgccctgtagcaccagtcggatcgaagaagcacaagcgcttcgggtcggcgcgcacctctccctcatggtggcggcgcgaggggcccgatctgggggctcggttgcggcggcggcgctggtctcggttcttctcgtgggttgcctcgtcgcgggcggccagggggcggagatccgtcgccagaaaaacgtgcaggctgcgctccgggccaagtgggctggcacgccgctgctgctcgaagccagtgaattgctttcgacagaatggaaggatctattttgggattttattgacctctggaaggatctagagaaaggctctgaatgtttaacagcaaaatgctgtgcccagaagattgttgaggatgcccacatactactcaatgaaccgctctcttcaatttttgagttttctcttacccttcgatcagcatcaccaaaattagtgctttaccggcaacttgcaaaggagtcattatcttcgtttcctattgatgattcaccagagaacatttctggtcatggcactggaaaaacttttgatggggctgtggatcctggctcttctggaggaacttgctgctgggtagacactgggaatgttctattgttcaattcagccgatctgcatgaatggcttgggggattgggcaagctagctatggattctactgaacagcctgaactctttgaatttgaccatatatatcgtcgcacaaatattactgctccagttgctatattttatggggctgttgggacaaaatgcttcaaagagctgcatgttcaactagtagaagcatcaaagcagggaaaaatcaggtatgctctgcgtcctgtcctaccatctggatgtgagactacgtccaccttttgtggttcagttggtgctgtagatgcagtcaccttgagtggttatggggtggagcttgccctaaaaaacatggaatacaaagctatggatgacactgctataaagaagggtgttcctctagaagatcctaaaacagaggacctcagtcaagaagtcagagggtttatattttccaagattttggaacgcaagccagagctaaatgctgagataatggccttcagagattatctgttgtcatcggcagtgtctgatacacttgaagtctgggaactcaaagatctgggtcatcagacagcacagcgaatcgttcaagcatcagaccctttacagtcaatgcaggaaatcaatcaaaatttcccaagtatagtttcttcactatcacgaatgaagcttgacgattccatcaaagacgaaattattgcaaatcagcggatggttccacctggcaagtcattgatggctttgaatggtgctttgatcaatatcgaggatcttgatctttacctgttaatggatatggtccatggagaattatccctggctgatcagttcgtccggttaaagttgcctcaaagtgctgtcctcaagatcctgtcagctcctccaccagcagaatctaattctttccgtgtggacttccggtcttctcatgtgcattaccttaataacttggaggaagatgccatgtatagaagatggagaagcaacatccaggagctcttgatgccggtcttccctggtcagatgcggtacatccgtaaaaaatctgtttccactctgtttatgtgcttgatcctgcttcagcctgtggtgcagagaccattgacatgatggtatctctatatcaagatagtgtccctataaggtttggtatcataatgtattcttcaagattcatcaatgttgttgaaggaagtgatggcactcttacaaataatgatggagaagacacttccattttgataacaaggctttttcttgtacatcaaagaaacatactcaacacagttggcattccaatttctcggcaatatacataaatcaaggaatggtgaagatgactacaatgaagagcttgttgaggctcatcatgttgaaggggcatttgttgattcactattatcaactgctaaatctcatccacaagatgtgctgctaaagttgcaaaaagagaacatgtacaagcaggaagctgaagaaagctctcattttgttcacaagcttgggttgtatagactccagtgttgtctgttgatgaacggacttgtccatgaagcaagtgagcgaccatgaatgctatgaatgatgaacttcctaggattcaagaacaagtttattatgggcatatccagtcccatacagatattttagagaagtttttgtcagaaaatagctacaagcggtacaacccatcaattactggcaagaatgcagagaagaaatttgtttcgctctttgcatcgtaccatcaggacagctttatatttaatgacatgaagtacttacagtctcctggaactacagatgatgcaaaacctgttactcatctacttgccattgatctttcatcaaaagttggaacaaaattgctttatgaggccatactttacctgatggacggatctgatagagctcgtgttggtctgctactttatgtccacactggtggttcatcacctattttacttctgaaagatattttcgatagaactatttcttctttcagctataaagaaaaggtattagtcttcctgcatgggctcttgaaattttatgatgcccaacctttgcccgcctcatctgttgctgatgattggactagaactatgatggaaaaggtctataccttagctgctgaaactgctttgcctgttgatgactataaagcgtggtttaaaagtttctctgctgatacagttctcaaagggatggataagttatctgacttcttatttgggcaattggggcttgtgtttggtagtaatgctgtgatcaccaatggacgggtttttattatgaatgaagggaaatcatttctagccaatgatttaggtctccttgagtctatggagtatgatttgagaacgaaatacatatttgaaataattgaagaggttgagtttgccagtgttgaccctgatgacctaacaaaccaattctacagcgacattgccatgttgatctcatcgtcgatgtctgttcgtgaaaggacatctgaaagagcccattttgagattttacatgcggaacatagtgctatcaaattgaataatgcaaattcaagtattcacattgatgctgtcattgatccgctaagtcccactgggcaaaaacttgccccacttctacgcatactctggaaacaaattcagccgagcatgaggattgtacttaatcctattagttccctcgcagatcttcctttaaaaaacttctacagatttgttcttccatccatggatgattttagcagtacagatcattctgtacacggacctaaagctttctttgcaaatatgccactgtcaaaaacacttacaatgaacatagatgttccagaaccatggcttgttgaatcagttattgccatccatgatttagacaacattcttttagagaatcttggcgatgtcagaactttgcaggcagtatttgaacttgaagctctcctcttgacaggtcattgcatggaaaaggaccgggaccctccccgtggtctgcagtttatccttggtactaaacaaagaccacacttagtagacacacttgtcatggccaacttgggttactggcagatgaaagtctcccctggtgtatggtacctacaattggctcctggtcgtagtgccgatctgtatgagctacctccgaaactcattgccattgatagcttgagaggcaaactaatgcatattgaagtgcaaaagaagaaaggcaaggagcatgaggacttgctaaatgctgccgatgactaccacttccaggaaaagacggataacaaaggctggaataagaaccttttgaaatgggcttctagtcttatcactggtgatgcttcatcaaaaagtaaagctgataaaaccactgaccgtaaggatgcaagacaaggggaaaccataaatatattctctgttgcttctgggcatctgtatgagcgtttcctcaaaataatgattttgagtgttctaaaaaagacacagaggccagtgaagttttggttcattaagaattatctatctccacagttcaaggatgtcataccgcacatggctcgggaatatgaattcgagtatgagctcgtcacatataaatggccaacatggttacacaagcagaaagagaagcaaaggattatatgggcatataagatcttatttctggatgtcatttttccactttcactgaggaaggtgatttttgttgatgctgatcaaattgtgagagcagacatgggagaattgtatgacatgaacctgaagggtcgcccgcttgcatatactccattctgtgataacaacaaggatatggatggttttcgattttggaagcaaggtttttggaaagatcatctgcgaggaagaccgtaccatatcagtgcgctttatgttgttgatttggccaaatttcggcaaactgcttctggggatactcttcgtgtcttctatgaacaactcagcaaggaccccaatagtctctccaatcttgatcaggatctcccgaattatgcccaacatacggtgcctatattctctcttcctcaagaatggctgtggtgtgaatcttggtgtggaaatgccacaaaagcaagagcaaagaccattgatctatgcaacaatccaatgacaaaggagccaaagcttcagggtgctagaagaatagttccggagtggactggtcttgacagtgaagcacggcagttcactgcacgaatcttgggtgatgatgtcgagcctgcagatgccacacctccgccatcggaggcaccgaagcctgaagatgatcaggatgtgaaagatgagctatgatcgcaagatgtttccaggcttggtcttactgaatgaaagtttggtgactcgacagtcatcagttcagaacacaggcacacagctagtggagcgcagagggatagtttaacgcaggtgcaaatttgtcaaaacactacacctggaatcctagactacgttgattcaggtatttcgtttacagtaaggccttgttcgtttgtgtcggattggtgggtcggaatgatttctagccgggttgcttttctaatttatataaactttaattagctggaataattccgggtgcaatccgatgtaaacgaacaaggtctaatagtttcaagacctttaaccaaatcatatggcggggaagctgcgtccagtaataggttaacaaggcagccagctggggtgtagaactctgtctgctctcagctgcatacacatagactgtaatggtcaacaatttaagatctccttgagacattgtaaaatttatcggctgccagtcgaaaggcaacagcgaagctggcagctgaaatgcccgagaattttgtagcactcagcaaacggattttttaaacactcagtaagtcaataatgcctgtcgcatgtaacagcaggctattgtgggcatggcagctaaccgttatactaaaaaaaaa

SEQ ID NO: 43380 - DNA, 1775 bp, Zea Mays
taacaattcaatagatcaacacgcgcgagaggcgcgaacgagaggcgcttcccaccgggcactcctccaccaggcgtgagaggcgctaacgagagccacaaactctgctccgcgtgcacgccgcgctccatggccgccgccccagcagcagccggaggccttatgcagctccagcctccgctatgcgtgtcgcctcgcgccagcgcttcttgcgcaccaagcatctggggggccctgccccagcttcgccgccgccgggccctggcgcgcgcggcgtcgtcggtagcggccggggaggctgaggcgtacacggaacccgagctggtgttgctggaggccctcctcggcatccagggccgcggccgcgccgtcgctccgcgccagctccaggaagtggagagcgctgtgcaggctctcgagacccagggaggcattcctgatccgacaagttcaagtttaatcgaaggtagctggcggctcatcttcactacgagaccagggacagcatcgcccattcaggaagtttatcttcgaacagatgatccaagggtggtcaatgttgtcaagttttcagaatcagttggtgatctgaaagtagaggcagaagcaactattaaggatggaaagcgcatacttttccgttttgaccgagcagcatttgccttcaagtttctgccatttaaagttccatacccagtgccatttagacttcttggagatgaagctaatggttggcttgacacaacgtacttgtcccacactgggaacatacgaatttcaaggggaaacaagtgcagggaaccacttttgtcctacagaagagtgcagacccaagacaaatcttattgtcagctatatctgcaagaacaggagtagaagaggtcatcaatgattttatttcaagccaaaatggaacaaaggctgatctaagcattctggtgggtgaatggcaactattgtggtgctcacagactgaaggtgaaagttggtcatctgttgcatctgccggtctcaaggacttccagattataagagaagatgggaaattaaagaattcagctagccccttcccaggtctcactcttaatgcaacaggcaacatatgcaaaaatgggagtggaaacacctttaccatgtccatgaaagaaggagctgttaaagttggtggtttacagtttcccttggatgctcaaggagaatttgtgatggaaatcttgtatggcattcacgtcttcctgaaattgaaatatgaagcttatacttaggaaaatgttggttgctggtatatcgacaacaagataaggatatccaggattaaccagcacatgcttgtccatttacgcattgcgaatacaacatgacaccttaatgaagactatgtgaacatatatcctaatttcattgctgagcacacctcatcagatgtgactaggtcatgcgacataattttaaatttactggtgtatagctaacattttagcacaaaattttctacatagttttcttgtactcaaaccgttttctcacaaacatatggaaccacagttgagcagtttgtatggcaacattctgtaaatgcctgtttgaaaccagatccgatttctcaggggatttcttatgtaacttcagagttcctagaagacatgggcagaaagtagatctcaaaatgcccttgtgcaattaacttttattttctttatgggcccggacggactcaggctcgtgttcgtgctacccgatttatgtttcaggactgaatgactactctctcgtca

SEQ ID NO: 43381 - DNA, 1554 bp, Zea Mays
ttctatctcttctctctcactcccatctcttccaccaggacgaagccgccgccgcctctgccagcgcacccgcctcgcccccgctcgctgcggccgcctctgccagcgcacccgccccgcccccacccgccgcggccgccctcgcccgttgctctcgccgacgcggccacctccggccccgcccgccgtggccgccctgctgtacggctacaagaacaacaacctcaagtggctggagcgcttcgcctacatcaacaccaccatctaccccttcgccttgctcccactgctcgcctactgtaccctgccagccgtctgcctcctcaccggcaagttcattatgccgtcggtcacaggatcttcaggggctgtagcctgcaggaaaagagggcttttgataatactgagagatgagataatgaatttggtggccgagcctcacatggtgatggtgatccttgtaccttgtccttctctggttcatccataggcgcatgagaggctgctgcatttatcatcgggggctatccgggtctggaccggagctaggaatttatgaggttttgtcactctctagcagaccagctggcaagtggcaactgaacttctgttatttatcaattaaaagaaagaaacttaacttgtgatcgagaaaaaaaagaaaacaacttattagcaaagtatgtattcacatgatcacatccatgttatggctactgggtctattcttttagacaaggattaccccccatgattaatctgactttggtctcccttatcattagaatctagtgagcacgattcttttttttaaaaaatatattagaaatagtaagtacaaacctcttcttgttaattaccctacgaatttgatatgtttcatattaggttcctttataatttatgttcacacacgctaatcaagctaatttctttactttaataaataactataattggtttttgcagcaagaatcttgaagtgagaattgggagaaggaaatggttcttgaagatatgaaaagggaggaagatttgctgaaacaagttaaggaattatacaggaagcagaagcaagagctcatggattatgtcactcaaccagcagcgacacagacgtcacgtgattcgccagcaactcattcacccgcaactcctgagagtaatctgtttggagccaagctctccaacaagtggcggtaacattttggtggcgtacgtccctattttgttggggcttattgcctgttctggcatcagcacgacgtaactagcttttgccacaagcttggtgttagtttgtgagggtgataggccagtgaaattgttctgctgcttagcatagttggccctatggataccaattgatctataggcagccggaaacttggctaatttattatgactatggatgagacttttgtgatgtaattgatgagactattgatttaaatattgttatatgattgtgtgtgagatgttttatatgaaaatatgttgtgatgttgatatatttgttatgttgtgggatgtggtgtaaaataaaaataaaca

SEQ ID NO: 43382 - DNA, 1131 bp, Zea Mays
ctgagtaattccgtactcagggttttattccctgttgtttttcaggtcctaactttgtgatgttgtgatggtgttaagtgccggtgggctcgaaccttcttataagtctaagtaacccttctatacttcttattgaggatggtcatttgagctagcatatatttcgaacttatacttttgtaatcactccgataaaataatataaaacttttgtaacttgtaaaatttggtaatagtatttccgctgcaaaaatatttgtgtgtgtgatttgtgttacttaatcccgcggttctggttgtaagtggtttatccgatatccttggggcaatcggacagatcctgttaagttatctggtgcacatgcatagctgtctgaggtctttgggacaaagacaggtgcatgtgggcccaataacttgggaggttctgccacaactatcatcaccagtaacttcctgatatatatcctgcttacctggtttatctgtccatgtttatcttgaaggttgtttcattcaatggcgagaatcatgctataaaaatataacatgttcataagaaaggcgtaccggtcttctctgcaagaagtcgagcgaggttacaatggtagcatggtcatttctgttatcatgtctgtcatgatcggagtaatgtcgttaggccaggcaacacgatcagtgacagctttcgcagaaggccaaggagcagcacatagaatgttcaagataattgaacgcaagccagatattgacatagatgataacacaggtatcatattggaggatgtcaaaggtgatgttcaactgaaggacgtgtacttcagctatcccacgaggtctgaattctcgttgcaagtaccaagtggaacaacaatggccctggttggtgacaacggcagtgggaaatcgaccgtgatcagtttggtggaaaggttctatgacccacatgctggagaagtcttgattgacggggtcaacattagaagaatgaagcttggatggatgagaggaaaatttggtcttgtcaaccaagaaccagtgctattctcaactacaatcagggaaaacattgcatatgaaatagaaaagccaacacttgaagatatcagtgtgagcgatatagctcgctaa

SEQ ID NO: 43383 - DNA, 706 bp, Zea Mays
gacaaaaggagcccagggaggcgcgagagctctagcaaccagagccatggcgcacgcgagtcctggcaacatgccggtgagctgaagatagcaaccacgaccaacacggccggaggtcagaggcagagaacgacggcggtcggcactatagggaaacagggacgcacaccaaaatcccgggcgcgacgcggccgccatggcgcacaagaagctgggcgagtagggagccggggacgcgtgtgggagcaggggcctcggcagagcgtggcgagctgagggagctcgggctgggctcgcggcacgagtgagcagagcgctcggacgcggcgagggcgcacagcctggcacagagaacggacagggaggcaatggcttggggactcacgcgacatgggaggagacggtgcagtcagatacgcacgccgacgagccggaggaagccgacgatgcagcagcatggacggcgaggccgcgaacgagctgctggatgacggcgcccggcgaactccatgacacacgccatgcataggagtaggggtggcgaggtccggcctggccaaacgcagggacgagcaggggaccaaagaactacggtggagcttcaccacgacggggtcagggatggctaggcaaaaaaaaaatcaagtcgatggggcttgctgcaggtagagacgaacctaggatatttattaaagaggaattcatg

SEQ ID NO: 43384 - DNA, 1108 bp, Zea Mays
aatctctccagtctcatcttcttctttcacgcgcgcccagcctgctcgccatggacgcgcgcagctccgtcgagctctatctccatagtcgcgctccctccttcctgtctcccatggtcgagcgcccagcccccagcgccagccccggctcggtccctcccatggtgctcggcttcgcctccaccggaccgtgccccgctccatctcctttccccagctcaggcatccgtcgcaccctgcttcaatttttttccagctatggtgctcgcgtcggcgtcctcgactcctcagtctggcgcgctgctcctttttccttgtccctgtgcgtgagctgttccagcttgccggtcatctactgctccttggcgctccttgctcggcctccgacgactgtcgtccctcgccacgccgtggccgcttcgctggccccctcggttctagccatcgcttgccgcggcatcctcttagttctcggtcatggaatttgcgcgccctcaagcatcagccgcgccgacctccgtgcttgctgttctctagctcgctctggtcgcgggcgccgtcgagtcgtcgaaccccgtcctcccctgctcgactcctaagcaggctccctgatccgcgtcctgctcgccgtcgatttcccacgcctgtggccgcggcactcactcctcggatccttgtcgtcaatcttcagtcctcgccagtcgctaacatggagattgcctcggtctcgtgctcgccgtcgtttggtcgtgagatgttcgtcgctgcgcgctcactatgccatcgcacaccaagtcgattctgcctcatcggtgctcgccaaatattcgatggaacgtctaatctgataatcgttgccgattgtggggattttcgagtttatttgattgcggcacgttaactgatcacgtgatgcggagggccaaagttgagtcgaccccaatatgacgtaacgggtggactactccgcatggtggtgctgatggacgaacctgaagatggacagacggggcaagtatcggaacaaaagctggtcgtcaagtgatcatcgtctaacaaacactaacctagtgtttactccaggcaagccccggtgcaagcaacccct

SEQ ID NO: 43385 - DNA, 444 bp, Zea Mays
caattcttaagcaaacaaaacaaagtataatcctcaccttttttacctcctctcaacagccaagtggattgtagaactacatgactctagatcgatggatctcttctccgctctgagaagtgtccaagatgctcggtcctgcagcatctacactgcccattgtaactctaaactgtacttttttaccagcacaaatctaaacgtacttgagttcatcagatcaaataaaagagctcaaggcattgtatgataaggtgtttattggcttatctgtacattggtgaagttgagaaactttgaactccgcacccttgcaggtttctgaaagaggaggtttggcatacccccctagtactccttggatgacaactttgtaacccgcctcggtgaagtgcagactatcccatgagatgtatttgatgggttagggcaaactgtagatcc

SEQ ID NO: 43386 - DNA, 1303 bp, Zea Mays
cactacaacacttatggccttctatgacgaatagttgatgacaatagagtaattcgtcattagattaccttgtttatgacgatttttagaagatgactcattgtagtgacgaaaatttaacctccgtcattaaaaccatcataatatactctagcattgtgtttgtgacgattttttatgacaatataagaatcgtcataagaataaatcgtcacaacctttttaacataataattataacgatatcatatgacaatgagcatatgtcatcgacatatgatgtattttttttaaaaactattgtccatgttagctcgcgtgatccaccattaacgacaggtcctattgccatataagctcttatatttaacaagttatcacacatggcaatatggttactagatcatgatttttttcattttaaatctactatacaaagcaccatttttcatcttatctgtactgtatacatgcactttgttatactcctataaaacaccagtttccatgtttttatggtttccaccgtcatcgagtttcgtaaaaaaactcctcaatgttccttcaattaaaccatggtcttacacctccctctagacctcctcactatgcctcctgaacttggaaaaagccccttgcctacgtactccatcgctttctctgcccgcgcctcaaccattacatcttgttgggcgtctgcctgtcccctagctctgccgccacgcccctagcgagagcactgtgcctgcctacttcgcgcccatggccgaccgccttgacgtgttgctatatctcggccccttcgtcgattcgcttaacatcagcccgcacgatagtgtccagacgcttgtcaagtttctcggttgtgtttctacgaagatccaaaattccttggaccaaaagcttcagcttccaatagtcgttaagggccttgtactgcgaactctggacaaagtttcatgctgctacaaagtgctctgcatacctggtgagtgtttaatcaatctcggtgctgatttgttagttttctttaagagggagttgccgagctttctcaacaatagcgatcgtggaaggcgtcaaccagattgtggatgttgaaactattctatctacttttggatctaagttataggatatttgaacattttaatgtttgatacctggatgctttatgcttatatgtggatgctagaaaaagttgtgtacacatgtttttgacaaaattgtacgcacgatttggattgcattcaattgaatgatcattttattaactgatggtgaattaaatatgttataaaca

SEQ ID NO: 43387 - DNA, 2330 bp, Zea Mays
ttttgtactcaaatgccaaaagcacatatttaggtcaaagtatagacaacttatatcatactattcatagggtgcagtgtgtcataaaataaacgtgatgctcatgacatggaatgcacttatcaactttcttcatcttatgtttttcttatgacttcccttttttgttaattatttctcccctttttaaaagtcttctaacacttagttacataagactaaaggtaagctttaatgcacaatttctccccctttgtcataaatctccaaaaaggatacaaagaatataaaggatagaaattatgattaagcgagatgtgaacacactatcatgaaagggatccttagatggcacaaaggtaatggataagtgtcacaagtgatgtacctttgcgttttaccttttcaaggggtttccagacttgtgttgtatttagagttcattttgcaatctcttgtcggcataattgtgacataggtccaagatatcaaatgaatattgtcatactaattgaaagataaatcttgatacctggagtctagatgtcacctagcattttcttatcataacaagaggcagcatgaaaattgcacaagtatggattatacaactagtgatcatgtatgaaaaatatcaattaaaaaaaacaccaattgatacaatttgatagataagcagatcactaatagcatattacactaagttctcctcaagtttttagggcacacatatatatgaattcaattgatatctgttgagagtacttatttgtaacttaaagtaacattggcataaaaggagtatcaattgaacataatcatgcaacataagaaacatgtgcactatttaatcaattaagttctagataggagaatttataagctatgctactttagacatttgcaatccaaaaggatgtgatacatgtttaccaattttagatgatgttggagtagcatataaaagagaaacccattcccttatgaaatgtataaaagatacatttattggagcaaagaatctttgatacccatcaaaatttgtagtggaagtgattgtctttgcccgaacattcctttctaatttgagactacacacataatagacttgaaaatgaagttagtctcaaagattcaaattatagaccattctccccctaaatgtgtgcatacaagtgatgaatacttgttttgcctatacacttggagttatgaggccaggggattaagttctacaatttgaaccttggtacaaataaagtatgaaaatatgaaattgcaccaattgaaggaattactcataatcaaaaggtatactaatagacatgatatgcagtattttaaggcaagattcttgagaagttagcatgtttgactcatacctcactaagacgacttaagacaaacttatgacatcaccacaagaggtattaatcaaatatctagagattctttaatcgtcaccacaagtgcaaccttatggcgtgacttaagatattgcatatacatgcacactagttgcctagatacacaattgtaatacaatagttcatggagtgacacacctttgttctatgccacatggtctccattataatcatgaatttccatcttagcttttgataggcttgacatttcaaagagaaacttatcctcttcaaacgatcaagagaaactcattttcttgataggttcaagagaaactcattttcatttctaaggaaccactcatcctcatttgatgttctccaagatgtggactacacaacatgaacttgaaagaaatcattaatctcacaagatataggctaaactctccctcaatttgtgcatgcaagagtacacaaagtacacttatgcacatcaacaatacgaggttaaaggagatgtttgcactatatcctggttgaacataacatgatttacatagatgatgaaaattaaaccaattgaaagtttaagaattgaaagtatatcaattgaaatcctaaaggtaaagcatgctaatatgaacatcaaacctcataatgaagtatattatatgattatgtcactacttcttcattatttggttttcatgatagttcaacttccttcttgattcactgtgatttcttttctctttatgatttcatccaaccaagcgatcttgaacttcattcatctttgcttggttcgatcatgcttgatatgagacccattgaaactcaatgattgaaagaaccaagactcttatatttgtagattttgaatccatcttgaaagctcttggaaggacctcgttgtaacacttagaaaagagagcattaaaaacacaagagagggtttca

SEQ ID NO: 43388 - DNA, 468 bp, Zea Mays
tgagtaattcgtcaaatattttatcacacttaccaacattaaacgtaaacttaacctcctcttgacgtttcttttgaaccggctgtaaggaggaacaagccgaagatttggcctgttttggccaaaccatttcagcagcgtacacttctgctgattcatcatctgagctactttggtcgcattctactatatgtacgttgtgacggcttgttttagcagtttctttgctccggctttcgcaagccaaagctctctggtgtaactgtgctagtgtaaaaaattggatgtcttctaatctttattttaaataatatcgtaaaccattaaagcctaatcctactagctgtttttctgctaaatgaatttgaaagcatcggtttcttgtatctcggaatctccggatgtaatcattaacccattcatctttcgtctgtcgcaatgatactaaatctaccaaatccaactcat

SEQ ID NO: 43389 - DNA, 4208 bp, Zea Mays
cccgtccccatcgcgacccgtgcgccgggtccacgctgaaccctttcaccggggcggcgaaagatatcagccgcgacgccgacgggctcgagcgccggtgagcgctcgcgcacccgggccaataaactggcaccggctcctcctctcgcgtcgcagagcctagcctcgggatgacgtggcgtaccacaacaccaccacacctcactcagccctgcgggtctccgaccaaccatttctagaagcctccaaaccctagcgcaggaggaagaggagttaggaggagctccagggatggcgaaggcgaggaagcagaagggtgacggtgccagtacgggaggaggcgccaccgtgctccaccagaagctctgcctctccatcgacatggagaaccagctgatctacgggtacactgagataaaagttctagctgaaaacaacagatttgctctacatgctgacaatatgacgattcagagcatttgatggatggtgcaactgttgagtttgactattcccctcattggaaaaatgaaagtgatcaaccgaattggtcttcagtatcatgtttgaagactgctgctgatgctgcatgttcaatgtatactttgtctctaaatcgagaagctacaccaaatcttattgtgtcatctgagagatcagtcaagtcaatgactgaacagcagttagatgaaaacagtgaaaagcatgaagaaaatagtggaaggcttgaagaacatggtggaaatcctgttcaaacttcctatgatcaaattgttaatggctgcagtggaagagggaatagaaaattctgcagtggaagaaggaaaggaaaaggaaaatgataaggaaaaagaagaggaaaatggaaatgagaagagcaaggaaactggaaatgagactgaatatgaaaaggtgaagaacataaaactggttcacatagattatattttggagaaggctgaaactggcgttcagttcgttggcaatgtcatgcgtagcagtagtcagacaaggcgggcacactgttggtttccttgtgttgatagtgccacagaacgctgtccatttgacctagaatttacagttagcatggatttcattgctgtcagcaatggtgacttgctttaccaggtctctagtaaggaagatccttcaaaaaaacttatgtgtataaattgaacactccagttagtccacagtggatatccttggttgttggcccacttgaagttcttcctgacagaatcacagaaatgacataaatgtctcacacatatgtttattccctgctttggcaaagcttcagaacactattgcatttttccacaatgcatacagctgttatgaagactatctttctgcaccatttcccttaggccccgtttgtttcctttcatttcgaggaattggaatcttactaacagaataggctaattttttagaatatgacattccaccactttccaaagttatcatataagcctatctcaaattcatgaggtgagagatggaaattgattctatagatttacatgctaattttccgatgtacaacttatagcacactcttctacctgcacctctataacataaatatactatataactaactctctcatatgatttaggataatatacaaatatattatatgtataaatatataaacttaattagttttgtctaaattataattattaaaatggaattcaattccaacgaaacaaacgggcccttaggtttatacaatcacatttttcttccatctgaaatgacaatattaccagcaagcttaggagcctccacatgcatcctcagttctgatatcttgcatgatgagaaagttatatagatcagataattggcacaagaacgaaactggcttatgcccttgcaaagcaatggtttggaatatacacaagtgcagaggagtccagtgacggctaactgctcagtatgtgaatctgatgttagtggtgcaactgctttgagctctactgctgcttcaagtgatttatatggaactcaagcaatcggttcatatgggaaagttcgttcattgaaagctgtagctgttttcaaatgttggagaagcagatgggaccagactcatttcggaagattttgcaggtgatagtggctccaagtcgtgcataaaatctaggcatgagcttcctagcctctcttctcaagcaaattgatcggttcttgcaatttgacaactttatgcctggttataatggggtcttgactgtcagctgcattcgtacccttgtacgaatagcaaagaaggtgccatcttttgtatgccttgatcacatttttgaattggttgcccctttccgcaacatggacaaaccatggaaagttcgaattgaagctagcaggattcttattgatcttgagttacaccataaaggactcgatgcagctcttttgttgttcttgaaatatgtggacgaagaaaagtctttgcgaggagcgacaaagttggctgttcatgtcttgcgtatatgtcaaacaagtattgttcctcacgccaatgatcaaataaattttggcaactctagttaggggtggtaacgggccatttaatttagcctagcaaatttacggatcgaatcaagttagggccggatcataaaacaatacaattttgaactaacaaaattaagggctttgttggtttgtgaagcaagtattagggtcatgatccattaccacccctaactctagttggtcttcttcatctgcttgctggcacaaaggcatacaataacatatttcttcgtcatcaagtgttctgcatattgcaagttgctgctggaaggtccccaacgttatttggtgttccaaaggtcctcacaccccctctggtggtcaactacatcttcagtgatcaacacactaaagatgattcctcaattcctcaaccatcatagtctcaggaaccttccactagcactcctagtgtccgggaggtcttaccgacctctggacccactcaagatgctgataattatcttactgcagtgaaagaaggaatgtggtcaaaattagggtgaagcttactgcatcttccagtaaagcatctgatgctgaccatagaggccattctgatggcgcaagaaatgaaaatgaaccgggtcaatgcagctcaatgtcaatggatgcccccatggctggagcagcaaatgaaccattaaatgtaagcaatcataacattgaggaacaaaactcatgtcacgaccttggatcaaggatgtcggcaagtgttagcaatgctaaactaatggacagacatgatatttccaaggagctacagtgcactgctgattccaggctggatactgttcccaaggatcagttctctcctgccattaatccgccggaagttttagacaaacctggcagtcagcttgaaggtgtctccaactatgatgtaaaccaagctccagagactgaacggagtggaaacagaagagagagaaaaaaacaagaaagataaaaagctgaaacgtgacgaaaaactagataaaaaaatatgacccagagtatctagagaaaagctccttaataagaaggaaaagaaagagttggccagaaagcagctagaaggtgaagagctacccctgaacagcggagagcagtgaacccttcaggttcacaggaagttttgccttcaaggccaccagctccagttctaagtgttgaaacacctgttcgaatctctgaaccccaggtatcaagcaaggaaacagctgtagatactgcacgtgcagcagccaaaccaaggataaagatcagagtcaagcccttggtaagaaaatctgaagggaattaaaaaagattgtagaattgtggccagtctgccatcatttgtaaggattactgtacagcaggaaaaatgcgggtttagttattttgtgaatggctgatgtatcctgtaaaaaaacattgctctgctctagtaatttctggggtaatcgaaatctgagttctagggtagtccatattttctgctgcagttgctttagtatctcagcgcttattatctcacaggttttaagtgtttgttcgatttgctgggcctaaaactaaaactgaaggatcgctgtgctcaatttgtagctgttgatgcattcatttcagatttgaggaggcttgacggaattaactgctgagcttgctcaaacatttttatgacgct

SEQ ID NO: 43390 - DNA, 1792 bp, Zea Mays
cagggttttattccctgttgtttttcaggtcatagttttgtgctgctgatgatggtgttaagtgccggtgggctcggccttcttataagtctaaagcatgggtgagcagtgagctgctgccgtaactccaaagctgacaagttttctgtgctgtccaccaagattgtagcatgtagatgagatgtagaggagctagtagcggctaccattacggcaataaagagcccgtaggaaaagcggagggggcagcgagcgggtgctgcataacctgcattcagtctcagggtaccattgcatcccactcggctccacctcgcggcccatatttgatatttcggctatggcaggtcattgcgccgtcgtcgtcgtcgttcgcaagcagcaaccaggcagctccgggctccggccatggcatcaccaccaaggaatgtcggtaccaggactaccagcaacccggagatcccagagttcctggtgggcccggctggccggccggtgccggccgtggggctcggcacggcatcgttcccgttcgtggaggaaaacgtcaggaccgccgtcctcgcggcactggagctcggataccgccacctcgataccgcttcgctctaccgctccgaacgtgccgtcggcgacgccgtggccgaggcagcgcggcgcgggatcgtggcgtccagggaggaggtgttcgtgacgaccaagatgtggtgctcgcagtgccacccggatctcgtgctaccttccctcaaggagagcttgcagttcttatctcttcatctgtaggaaccttcaaatggattatgttgatttgtacctggttcattggccgatagctgcaaagcccggcaagccacagttcccgtttaaaagggaggacatcatgcccatggacctaataggtgtatggcgggcaatggaggaatgccaccggcttggccttgctaggatgattggtgtcagcaatttcacaacaaagaagctccaagagctactggccattgctaaaatccccccgtcagtaaatcaggttgaaatgaatccaatttggcagcagaaaaggttagctgagttctgcaaagacaaaggtattcatttgactgcctattctccgctagcaggccaaagcacgtctaaggtcaatccagtaatgcagtctgaggttctgcaagaggttgcaaaggctagaggaaagtcagtggctcagatttcgctgaggtggatctacgagcaaggcgctagcgtggttgtcaagagtttcggaagggataggctcaaggagaacgtggaaatcttcgattgggaactgaccaatgaagacaggcgtaagattagtcagatacctcagcacaagagggtcacagtgttggggatcctcagcccagacggcgtctccagcgtggatcttgctgagcttgatattgttgaaatgtagcagaaatctccatctatcaggttgcaaggacaaaaaatggtgattggagtagctttcatacggctacgttgaatcagttgcttagatacggccatattgaatcaagaattagaagtagaggacgatctctctacttgtcgtccggacctcattttcttaaaatgtattttcaggtgtctgaccttgtcctgaaatgccatccaggccattactttttagaatgccatttttagatctgtttgatctagcttaaataagttactaggcaaacaaacaatacacattattagatagattatataatatagatacctatattataataatccataatcaacttattaaatgcttatataattt

SEQ ID NO: 43391 - DNA, 1292 bp, Zea Mays
cccgtcgcgaccgcaacagcttctccggactccctgggcatcagctggtcctcgcagtcgtcgctccgtgcgtacaaatagtgtcgaggaagcctcggtcgcgtgcaccaatgccttgccatccgcattctgccgctccctctcctctttgatccgcgcccagccgccgccgcgggaagcaggggggtcaccacggatggtcttcgccctggccatcggactcgccacgcgggatgatctatggatgaatgcggggctcgtgcgtggtgcactgggtaacccaggggcttggcgatgtctgggtcatcacgaattgctcaccggagcaatttgtactgccgcataccacacctcgccatggccgcctgtcgggagagaagaaaggaggggattccgccgccgccgagccccagttcaagctcttcttcactcgcatctccggaccgcctccctgggagctccatggacgatggcttctgctgcgccaccacgggtcgaacagagagaaaacgaaggagagagagagcggagggctctgcgtggtcacagcggctcctcatcgtcgatccggatccggggaagccgaccgagacctcgcggcggaacctacgtcgtcgcagcgcggggaatttctcggcggacgacgggggaagcaccgcgcctctggtcgtcgcggactgcctcacctacatcaatattctgggtgagaacctcgccactaatttcgccttgaactccgcattgcgtaggtgaagttaattgcgatatgaaccactggtttgccgaaatcgttgttcgccggaacctgtgcgccgccgtgggtttctggggtggcctcgccgtcggcgttgaggtgggagaaggcgtctctgccgtttgatctgagcgaacggtggagattagatcccgcgtaccctttcgtccaaacgaacttcgaccgtagatgcgagatccagtggtgcagagtagatctgtgattcattaaatccgtgccgttaatctttaatccaaccgtcacgggcacgtaccggttcacggtgggacggatctaatccgggccaaccgtttctgatcggacggtcctggaagcctgataccccttcggcttgcacattttgtaaaagagtccccgagaaaactactaaccaacccgcggtccagatcccagggttctgtgtctcggtatttttagcgccgagccccctgcacttttctataatggagacgcagtccagagggttagaaaaatcaggaaaatgttatggaagttgaattttagtgtaaaaaaaata

SEQ ID NO: 43392 - DNA, 972 bp, Zea Mays
gcgatggacgacctcaatcccacgccgccagtggatttggagcgctggccctcaccgtcgcggagcggtggcacaaggcggtggatatgcaaccgctcccccaatccccgccggcatttagcgcccctccctcgctcatccacgcgcacgtagccgctgcgtcgtcgaccccgaccgccgtcgcaagtccggtcgcgtcggtgctcatggacttgccatggtaggcgagatctgcggccatggtaggcgagatccatggtaggcgagatctgcggccccttccatggtaggcgagatctgcggccatggtcaaagggccgttggggctggatttcgccgtcgcaacaccgaactactgggtgcacaagggcattgccttcatctgcgagatcagcaaatggaaccagcgaaacagataaaggtcatgaaaggattctagaaacgatcaacacagttggacatgacggacctccttgtgcggctcgccgacacatacgacacaagccattgtccgcctccagcccgacataggtagcagcggcgatgacacatccttccatctgcaacaacccatggaggccgacggcggtgcatctaggctagcgctcgctgcgggtgcccgtggacaagcaatcgctcgggatggcggtggaggtggatgcgagtgctcgcatcttatgtgccttgcctggatgcttttggcgagatgtgtgcttggaaaacttcaggtgcatcgtctggtgaagcatgtgtgtccaaaagtgaatattcaaaaagataatggggtgcagatgaagattattggtactcatgtcgatgctacagaaattgtctacgatgaggactcctacaataaggtatacatagactggactacagatttcagtctaccttttctccagtgaactttcaactgatttcccaatattccatgacttattccttgcaagattcatgcttccccgcaagtcc

SEQ ID NO: 43393 - DNA, 2647 bp, Zea Mays
ggcatgtggtctcctcaagcaagctttgaggaggtggatgtggcatggcggcactatgagcaggccggtactggattagctgctatattcataaacctggctgttgagaacttctctggatggaaatatactgcgacatttgctataataaagcactcgtattttgtgggattctttgtgtacacagttttcaatttagccctggtcttctcttctgtatatatagtcacaaactttgctccagcagctgctggatctggtattccagagatcaaaggttacttaaatggagtggatacacatggaatcctccttttcaggacattagttgggaagatctttgggagcattggatcagttggaggtggattggctctagggaaagaagggcctcttgttcatactggggcctgcattgcttcgcttcttggacaaggtggatctgcaaagtaccacttgagttctaggtgggtacggatttttgaaagcgatcgtgataggcgagaccttgtgacatgtggatgtgcagctggagttgctgctgccttcagagctcctgttggtggggtactatttgccttggaggaagttacttcctggtggagaagtcatcttatgtggagagtattcttcacatctgccgtggtggccgttgtggtgcgttcagccatgaattggtgcaacagtggaaaatgcggtcattttggagctggaggttttataatatgggacatatctggaggtcaagaagattactcataccaggaattgtttcctatggcaattattggtgttatcggtggacttcttggggcattatttaatcaactcaccctctatataactaaatggcggcgaacgtgtcttcataagaaagggaaacgagtccaaatctttgaagcctgtcttatatctttggtaacatccacgatttcctttgtgttgccactactgaggaaatgcagcccatgccctaagttagaaactaattctggcatagaatgccctcatccacctggcacagatgggaattttgttaacttctattgttcacaagatagagagtacaatgatttagcaaccattttcttcaatactcaggatgatgcaatacgtaatcttttcagtgcaaaaacatttcatgaatacagtgcacaaagcctgatcactttcctggtcatgttttatttcttggctgttgtgacatttggaactgcagttccggctggccagttcgttcccggaataatgattggatctacatatggaaggcttgttggaatgtttgttgtcaagttctataagaaactaaacattgaggagggcacgtatgcactccttggtgctgcatcgtttcttggaggttcaatgagaatgactgtatctttatgtgttatcatggttgagattacaaacaacttgaaactcttgccattgatcatgcttgttcttctggtttctaaggcggttggtgacttttttaatgaagggttatatgaagagcaagcccgattaaggggcatccctttactggattccaggcctaagcaagtcatgagaaatatgaatgcaagggatgcgtgcaagaatcaaaaggttgtctgcctaccacgtgtttcaagggttgttgatatcatttctgttttgcgaactaacaagcataatggtttccctgttgttgaccgtgggcagaatggcgagtcacttgtcataggtctcatacttcgtagccacttattggtacttctacaagctaaagtagatttccagaacagtgctttcccctgtgggccaggcgtactgaacaggcacaattttagtgactttgttaaaccagcatcaagtaaaggaaagtcaattgatgatattcatttgacagaggatgaactggggttgtatttggatcttgccccatttttaaatccttcaccatacatagtgccagaggacatgtcgttggcgaaggtgtacaatctcttccgtcaacttggattgagacatatatttgttgttcctaggccttctcgtgttgtaggattgataaccagaaaagatttattacttgaggaggataacaacaatgtgatgccggagctccaatcgacgagtgtaaggggcttgctgaacggcaaaatgctcgggggtaatatacatctggaacgtcctcttcttgacaacctagttattgaatagacacgtagcagcatgtatgtcaaaataattttgatagctagcagttaaccttgcactgcatgttgggacatggcccatgggtattatacttcacatgaatgatgaagcagcagtgagcggataatgcagcatggttttggattctgccgactgttgcgcatggatgttggcgttgcgcatcattttttgctccgtcagcagtggctagggaggcgattccccggtgccgtgtgtttagattaggtgattgtaacttacaaaggcgtccatacatacacaccatccatgtatcccacggtaaatttcgaagactgtatgtataagtacatatttgttatacgatggtaaagacaaaagctatgtaggatttgcgtgctctcatgaaactatgatacgtggctataattacttccggttcccgctgaaatcgctagaattttccattgactacatt

SEQ ID NO: 43394 - DNA, 2233 bp, Zea Mays
acttctgcgtatgcacgagtatttcgtgtgcaccgaatattgggatttgggaggacaggcgcccgcactccgcctccgcttccctccgcctcgactctcgaccgcatctgagcactccgccggaggtccgcctccgcaggcaccgccacgccatgtcgaagccagcggatcagcagccgtcggacatgcaggtcgactcctccgtcgccgaggagaagccggccatcagattctccatcaacgtgcttgagctcatgagggaggcgcagatgcagcatggtctccgccagagcgactacacgcggtaccggagatactgctctgcacgactcagaaggctgtacaagtctctcaagtttttgcatggccgaggtaaatacaacagaaggaatataaccgagtcaacagtcacggatgtgagtgttttatatggccgagcgagcatggagtcatgccatggagaagaaaactgctggtacaaacgcaaaacaacgcatctacatgttgggtcgatttcggaaagcagttaaatgggcatcacttttttcacaattatgttctgtaaaaggagattccaggacatctctagaagctgaggcatatgcttcatatatgaagggtgctttgttttttgagcaagacaagaatatagatgccgcaatgataaatttcaagaatacgagggctatatatgaggagcttgggaagtatggcagtatagaaaatcaacttttatgccgtcagcgcatcgacgaagtggagcctatgattgatttctgttcacataaactaggtggatcatatttgcaagcacatgaactcctggatactgctaatgatcttctcaaggcgaagatggaggctgtattgtctgagacaagatcacagcaggcagcttccatgactgagtttaaatggcttggtcgcacttttcctattacaaatgcaaagacccgtgtctctattttgaaagcttgagagagacttgagtgctgcagccacagaatcagttgctgctgacaaaaagcttgctatatttgataaaatattttctgcataccatgatgctcggagctgcatccgcaatgacctggcttctgctggcaatgctgaggatataaaagatgacctgaatggtcttgacaaggctgttagtgctgttctaggattgagaactatagaacgtaaccagttacttgttagcattggtaaaagtaaattcacaaagcatcgagatgaaaaaaatgagcgaaccacaaagccagaagaacttgttcggctatatgatctgcttattcagaatgtaacggacttgacagatttagttagctctggaagaaacaaaaatgaagaagaaaactcttttattcatgagtatgagctgaaaggcttggctttccgagctgagagatgtttctttttggctaagtcatatagttcagcaggcaaaagagctgaagcatatgcattattctgccatgcccatactctcactggttctgcactgcaacagcattcaaacagtcatgacaaggctttaatacaagatctggagtttctatctaacaactgtagatcaaatagctgcatagaacatgcaacaggcattatggaggaggagattgttcctttaaaactttctaaaggagtctcaactatgtcacttgctgataataaaacaaaggagaacaagtatctccttgatatgctagagagctatgaatcagcgattggtgagccgaacaccaaagctccatgtcgcattgctcaattcccacctcctttccaagcagttccatgcaatcctattgtgcttgacatggcttacaactcagttgagttcccaaaccttgagaaccgtatgaaaaaagaaaagaagggtcttctgagcaggttctggggttgaaagatggcatatgcctaggattttggtacattgtcccatcatttgatatgctttgtgcatgaacggtgtaaaactagaatgtcctgataatacctctctgatgggtgaaagatcttcagtattccgcccaaggatttttgagattctttatcagaaggttaatttagccgttgcaaagtacatctagctcggtgactgatcagcataaccttttgctgttactaaattttgagcaatgactgatttcttggattatcgatatttaagttgattcattttcatatcccaaagtaggcagggaacaataatgaaaatgttttcaatatt

SEQ ID NO: 43395 - DNA, 2441 bp, Zea Mays
cgcctccgcccgcccgcacgccagaaacctcgccgcaggaaaccgccgaccctaccacccgcccaccctaccgccctaccgcccgcccgcaaatccttccgccgcgaaccgcccaaccactcgctcccacgccgcaatcccaccgcgaaagccgcgaacccgacgccttccaccatcccgccggccgggcggcttctggggccaccccgaggacggccaccgctcgggcgacgcgaccttcaagggagggccccacgacgcgcgcctcaaggccttcttcgtctgcaacacccacatgtagccggctcgacgttctccgctaattcgcttggacgcctcgccggccggagggaaaggaagagtcggagtagcctgcccggctgggaaccgacagcttctccgtttcagaagcacgcgggcggggaggtggggtcgggagatcgcggggtgctcctttgtctccagggcagaggagaaacgcgcacggctggggaagaaccgaagaaggaagaggaaggtgccggtggaccaaacacggatctttcagtggagttcgggaagagtactggcacgcacgccaaggttgcatctccgccgtccaccacgaagcgcacgcgaacccgacgccttccaccatcccgccggtcgggcggcttctgggaccaccccgaggacggccaccgcccgggcgacgcgaccttcaagggagctcggcatgttcgacggggaccccgcggccgagccgttcgggcgcctgggccccgcggacgtgtgctccagggagcaccaggacctggcgctcgacgcgccgcgccagggcgtcgtgctcctcaagaaccggagcggtgggtggctacacccatactttgcagctacacccatactttgcagttacttaattcggagcggtgggcggccgctccctgccccgctccatctcgccagagaaggcaaagatctagctgccaagttctggcagctctctctgtgtgaatcaaacgatacgtacaggtagatgtattggtgggcctgcttcttcaacatcatcatctcctcctccgatgctgcttacctctcagtcctcaccactcccctcatggtgaatgacccttctggcagttttcccaaatcaagtctgaatcgagcacttcagttgagagtagtcactctggagtagagcaatggagaattcatttgcacctctacatattcaagaaatcccttgggaaagtgagtacatctgacgtgtttgatgtcaaagactctgatttggtcccaggaaaatatgaaggtgtcaagtgggttgaagctttgggaaggttcattagacttggtgaaggccctgaattctgatatcaaagaatataaattgcgtgtagaaggcaaacacgtattagagcttggatgtggacatggactccgtggcatttttgcaggtctcaaggaatctggtgtgaaagggattttagtccctcgccactcgcttgatgtggactgatacagacatgatcgatggagtatagtgaactacatcataagctgtagcattcatcgatccagatccaaacgtccttcggactcttccttctgcatttgtgtggagtggggattcatccggccttcttctcttgcagatgaaaagcgtcatgagaaaggcaaagctgagtttaagaaggttgtagaatcactgggacatgtaatactcgggtggcgtctggttccgactgacaactcagacttgggtgaatctgcactcgagactgagccagtcattgagcaggttttcgttaccaagagctcaagatcagaggctgagtttgagcaacagggcggcggtgggcatgctgctcggcggcgaggacatgcacaggttcccggtgcgctccccgcggatggaccgcggcgacctcatctgcagtcccgccgcgcggcagatcgtgtccaactacttcagcatgttcgggccggtgcaggacgtgcgcatcccgtaccagcagaagcacatgttcggcttcgtcaccttcgtgtacgccgagacggtgaaggtcatcccaagcaagggcaacccgcacttcgtgtgctacgcgcgcgtgctcgtcaagccctacaaggagaagggcaagatccccggcaggttcaggaagctgcagcacgcgcaccatggcggagccgagttcggcgattgcgcgtcgcccaccagattgctggatttcagggacccctacgccctcctgcttctttcaggtgcccaggttttctcctgggcatgaagccattgggctatgatgtgtgaggtgcatagagcaaaaaaaggggaaggggggccctccattcctctaatctgggagggactactaatatggctacatgatggccggccctatcaaccgagcgtagagaagctttgacaaagaaaaaagaaatacctttggagaggtgta

SEQ ID NO: 43396 - DNA, 2001 bp, Zea Mays
ccagttgcttgcctggtctctccaactcaccctttttcaccttcggcagtctggctccatccgtctcctgcactgaccttttcctccacgtttccggcaactgcaagcaaccactgatccagcccgttctgtgtcccggcgaatggtgacgaaccaggacgcggatgcggcagcgccaggggcaggggcaacggtagatccgatgcggctagcatcgcggtggcgatcccggccagagtggaactgcgcgtcggcggagctggaggctgagccgtccgagctcaacaccgtcaacagctcgggactcttctccgtcgtctctaccgacaagttatcggtaaaatacctcggcagccatcaccacggccacgacgtcggtgtcgtgcaggccgaccgtcccgcgccgacgcgccgagccgtgtactacttcgagatgggcgtcaggaatgctggatacaaggggcagacatccattgggttcacgagcgagagcttcaagatgaggcgacaaccgggctgggagacaaacagttgtggataccatggtgacgacggccatctttatcggggtcaagggaaaggtgaatcatttgggccaaaattcacatctggtgacataattggtgctggcatcaactacttgtcacaagaatttttcttcacgaaaaatggtactctggttggagccattccaaaagaaattaaaggcccactatatcctaccattgcagttcatagttacggtgaagagttgactgtaaactttggaaaagaaccattctgttttgacgttgagggttatattcttgaggacaaaatgaggcagcaatcagtgtctgataaattgaacttggagccagacatcagccattggattgtccgttcatatctcctacattatggataccaagatacattaaatgcttttgatatggcaaatgcaaccgatcgccccaccagtcgccaaaatggtaatgcagaacctcccgaaatgtatggtcttagccatagaaaacttttgcgtcagcttatcatgagtggagatattgactctacattcaaaagacttcgggagtggtatccgcaagtgataaaggatgagcaatcggttatttgcttcctacttcgttctcaaagattcatagaatatatcagggctgaacaactggaggttgccgtgaaatatggtcgtgctaacctggcaagcttcttcacccacaaagcttttgaggggctgctgaaatgtggccctacttgcgtatgagaagcctacagaatcatgcttgggatacctgatggactcttcccagcgtgaatttgtggcggacgcggtgaacgcggctgtcctgtcgacgaaccccactgtgaaggaccctgagagctgcctttactcgtgtctcgagaggctactaaagcagctcacagtatgtagctttgagcgacgtgcattcaacaactaccaaggagatgcattcttactccacaaagaagtgcagaattatgaaaggtctaggcgctcataggcatcgggtttgatgcgcatctcagaagtaaactcagatgctagactcccaagtctcaactgctctttgaagggacgaaggttcagaaccaagtggtcgaccatgctaagcacaaatccttccccttgatgcagcacccctactttcggaagggtggatacaagatttcacagacagaggtcaggctttcggaaggtgtcttatcctccctgtaatcagaaaactacgtttcagtctccctagttttttttgttggttggctaatatgctgtttgacattgacattgtggatgctaaaaagtaaagatgctttaatgtatgcccacctttgagaacatctgcatcatagttgaaaaacatctaagtcctaggctcctagttgaaaagcatctaggtctaggtctctagttgagttttagtggttaatgacaatataaaattatgatgatagttgagtttacgtggtattcgtgtcctg

SEQ ID NO: 43397 - DNA, 2402 bp, Zea Mays
tggtgagagcacacaaataccttatacaaagcagcaagagaagaaggaagacaagtcagacaaaacagaagacgagaagaggttcctaccataacacttaagcaaggaatcctgtacacttctctcctggggttgtgacttgtatattgtcaaggatcacttggatgtggtaaatgctatactggacactgatgatagctgcataaggattgtgcgaaaaaacgggaagacatccctacatactgctgcaaggattggataccatcgtattgtcaaggcactcatagagagggatccaggaattgttccgatcaaggataggaagggacaaactgcacttcacatggctgtgaaaggcaagaacacagatgtagtggaagagttactgatggctgatgtttccattctcaatgtgcgggacaagaagggaaatactgctttgcacatagctacatggaaatgggagaattttgggattatgaaacaccgcagacgtggcttcgacgaaacggaggcgtaggcgagggattcgacattatgaaaaaccagagaagatactacactctaaaatggacatgaatcctctattaccagggaaggatgatgtttattacactgaaacagacgctgtctcacatccgttacccgcactagacgcacccagtctttctacagagagaatcgcgccgttcttgaatctgccattcgctgaatctgccattcgctgctgttgtttctggacagtgaagcagtattccggacagtgaacaaaaatctgggaacacatttcattttcactgtcattggctaccagagtccgggaacaaaatctgggaacaaaatctgggaacacaaaaatctgggaacaaaatctgcctttggctaccagagtttattgctcccatatcattcgctgtccatttcactgtccattcgctgaacacaaaaagctgggaacaaactcattttcccagtgaacaggtagcacaatttagttcacaaaatctgggagcacaatttagttcacaaaatctgggagcaataaacaggttgaacaggtagaacaaaatctgggagcaataaactgccatcccagaacaaaattcgcagctcacatttcagttcacaagctagttcacaatttagttcccaggtaccacaatttagttcacaagctagttcacaagctcacatttcaatggagcaatacacaggtagcagtttgacaagctattacacaagctcacatttctgggagcaatacacaggtagcagtttcacaagctatcacacaagctcacatttctgggagcaaaaaacaggtagcagtttcacaagctcacatttcagatctatggtttttcagtttctttctaggggtaattttcttaactacccatttgacacttctaggtggcgtagtagcagtcgtgtgttcatcttcatttgcagcaacgacaagttcacggcttggtgcttcatcttcatttccagctacaagtattggtgcttcatcttcatttgcagcttcgactattggtgcttctacttcatttgcagcttcgactattggtgcttctacttcatttgcagcaacgacaagccacctgctttggcgcggactagggttgtggtcgcagcgccgccgccacctgctttggcgcggggccgcgagcagcaagggagaagacgcggagtttggagagaaggaggtgcagcgccgccgccacctgctttggcgcgggaccacgggcagcagatctccgggcagcaggggaggagactagcaggggagggaaatggagattgaagaaaatgagatggaaggaagaggcttgacgggagagagaagaaccttgaagagagaagaacggctctggacggcagaagaaaacggcgcgtgggctgatagcgacggaagatcattattcgttctcctgaacgactaataacgatgggatctggaataacaggagcctgatggttgcatcagtagagttgaccacttctcagtattgcgagatgcatcttacatggtcaagaagataattcctattctgaactacttgctcgtgttcgtgtacaagtctccttatcatgtcctcctttcaagccagtctattctttgcttgattcatcacgggtgcacattattgtaattagaatcttcagagtactcgaaggatagttaaagctgtttggctagtccttcagattactaaaaatatagttgatcagttttgcctagtcccagtaccatacaaagatgttcaggtgaacctgaaaattcttctcaatttgacttgcaagctttctgatgcgagcactaaatagtgatttttttgcaattttgtatgagccttgtttgagtgaatctttcctttgggcagcatggatataaa

SEQ ID NO: 43398 - DNA, 1582 bp, Zea Mays
acggaaaatccaatcagggaaaaaatccatttccctttcttctgaagtcgtcctcttcttcccgtcgcttcgccgtgccgcacctgcgaggagaggagacttcgccgcgaagctcaccatgatctcgccggagaggagctcgtcacagagccagcggtcggcggcggcgggggcgccgttcctgtcgatctccgtcacggatcccgtaaagatgggtaccggcgtgcagtcctacatctcctaccgcgtcatcaccaagaccaacctccctgaatttgagggaccagagaaaattgttattcggcgctatagtgattttgaatggttgcatgatcggcttgctgagaggtacaaaggcatttttataccccctcttccggagaagaatgctgttgagaaattccggtttagcaaggagttcattgaattgcggcgtcaagctctggatttattcgttaacaggatagcttcacaccctgaactcaagcaaagtgatgtcttgaggacatttttgcaagcagatgaagagataatggatagggcaagatcttatgagactggtatttttaagaaaccggcagatttcatacagatgtttaagtcaaaagtcagtgatgttgttctgggaaaagaaaagcctgtggaggaatctactcctgaatatgagaagcttaaaaattacatatttgagctagaaaatcatttagcagaggcccaaaaacaagcataccgtcttgtgaaaagacacagagaacttggtcaatctttggcggactttggaaaggcgattaagcatttaggtgcttgtgaaggagatttgatggaaaaggtgttttctgaagttggttcgaagtcagagatgttgtcaataaagctgcaaagagagacaaccttctctttaactttgaagaacccttgaaagattatgtgcgtgctgtacaatctataaaagccactatgcttgatcgagccaatgctttcaggcagcacttcgatttggatcaggagaggaagtataaagagcttaatcttgaaaaattgaagttcatgaaccctgaaaagtatgccgaagcagaatctgagtttcgagagttgaaagcagacagtgaggaggctactaagaagtttgaacacatagttagactaatgaatgaagagcttgctcgtttccaggagcaaaagacagctgatattggactcgcattccatgaatttgccaagggtcaggctaagctagctaaagacattgcggatgcatggcgcagcgtcctcccaaagctcgaagcttgttccacatcataaatgtgatttgtgtttcctcatgatgtttgggaatgggatagggggttggcagctggtgagtttaggctgttttttcccagcctgttttgacactgattactgtatacttgaactgcggtttggaaatgctccagctgttaggttcagttgacgtcatttcttgctgtttgagcttttaaccgtcttcttttcttagatcaactgaaatagctactggaatctcgtgatattgataatcaatgatgtaccatgatgctacttcctggaacttctttagctt

SEQ ID NO: 43399 - DNA, 1036 bp, Zea Mays
tcttcctctcactatcctttctcgatcttgttccttgcaaccaccgtcggtcgcgccccacgcccgccccaccacccgcccgccgcgcccgcccccacccaccgtgggctttccccgcaccgccgacgcccccatccgccagtcggccgccgcgcccccgcccgccgtgcccctcaccgccccgccccaccgcgcccctcgtcggttggtgctcgtggccatggcggtggcgaaggtcaaatcggtcgccgtctccgttagtcacaagtgtcggaatatcttggccaccggttgggaagcgcacctcaacactgtcaaggctgacaacaagggaagcaagaatgagatttacacgtcgagggtgcactacatgatccataagggcacaccctacttgattgtccccgagaacgacatgcacaacatttattcagtctgattcgtgaccgagttgcgagcttattgaagccatcgaagacacctcctcgtgttggtatgactggtgatgttctgcgcctgaaagactcaaagtgcttatatggaggtgctccaaaaggccctcagctaagagagttggagcgtggtgttgacattcttgtcgcaactcctaggagattaaatgacattttggaaatcaatagagtgagcctgcaccaagtatcatatcttgtccttgatgaagctgatcgtatgctcaacaaatatcatttgtacaagtatattagacccctccagctaccttgccgacgcatgaacgagaaaacgggttagactttgtcgaagccctcttcgctagtggaggtaccgaccatcactcgtcactgtaacccgatggtgatcggcgatcgtgagcttccatgttattgtgttctgatacttgagacttttattatgactatgtataagatattgtctcttattagtactggatgagatgtgtcttattatgactatggatgagacttttgtgatgtaattgatgagactatggatttaaatattgttatgtgattgtgtgtgagatgttttatgtgaa

SEQ ID NO: 43400 - DNA, 2191 bp, Zea Mays
gaacgacagaacagaatggcaactctggtccagcctcctgccggcgccgtcgttggcagcgtagcaaacacgttgacgaccccgggctctgcctctggccctcctccctcttcctcgtcgccgaccagcgcctccacaccgccgccaactgacgtgccgtcttcttccactcctactccgccaccaccttccccggcttctcccactccgccgctgccttccccctcgacaccaccggctgcttctgcaccacctcctccttcaccagatgacagtgcccctccgccgcctgaggcatcgtctccacccccaccggccgcattgcctcccccaccggcaccagccgcattaccgcccccgccaccggcgccggtgcccacggccacaccgccgcctccgcccccaccggacattgccacgcagccgccttcctcttcacaggcgtcgccgcctccctccgctcccccaccgcggcagtcccacgccacgccgcccccgtctcctccgccaaccgcgtctcccgtgtctgccacgccgccgccgcctccagttcactcccccgtgtattacgcccctcctccaccggcgcggacgagctcatcaactcccgcgaagcactcgcctacggtaggtgatagtagtaccagtaccactaccaccaccacgccgccgccgtctagcagtagcagtagcagtagcgggctaagctctggcgcgacggccggcgtggcgatcgtggtggtgatcatcgtcctgggcttcgctggcgtgttggtctgcctgtcgaagcggcggaggcggaaggagagggaccgttactacggtggcttcgccgtgccatcctacacgccgcagcacctgtccggcgaggcgccgttcctgcgcgcgccgtctgcgccggggtcgatgaacttcagcatgctgggcggcggaggcgggcctggcatgtcgacgccgccgacgatgagccaggcatacggtcagcagccgtggggcggcgcgtcggccaactacagcgcgacgtcggcggcgtcggcgtccggcgacctgagcgtgggcaacaccaaggcgttcgcgttcgacgagctgtacggcatcaccggcgggttcgcgcgcgagaacgtgctcggcgagggcgggttcgggtgcgtgttcaaaggcacgctcggcgacgggaaggtggtggccgtgaagcagctcaagggcggcggcgggcagggcgagcgcgagttccaggcagaggtggagatcatcagccgcgtccaccaccgccacctcgtgtcgctcgtcggctactgcatcgccgaggaccaccgcctcctcgtctacgactacgtatccaacaacacgctgcaccaccacctccatgggaggggaaggccggtgatggactggccgacgagggtcaagatcgcggcgggctcggcgcgaggactggcctacctccatgaggattgtcatccaaggatcattcacagggatatcaagtcgtcaaacatcttgcttgatgaccagtttgaggctcaggtagctgatttcgggctcgccaggttagcggagaacgatgtcacacatatttcaactcgtgtgatgggcacattcgggtacctggctccagagtatgcgtccacggggaagctgaccgagaaatcagacgtcttctccttcggcgtcgtgctcctggagctcatcaccgggcggaagcctgtggattcgtcgcgcccgctaggcgatgagagccttgtggagtggtcaagaccactactgaaccgggcaatcgagactcaggagttcgacgaactagtcgacgtccggctcgaagggaacttcgacgacgtcgagatgttccgggtgatcgaggcgactgcggcgtgcatacggcactcggctgccaggaggcccaagatgggacagatcgtcagggtcctcgacgacagcctgacggacgttgatctcagcaacggcgtgcagccagggaagagccagatgttcaacgtagccaacacagcggacatccgccagttccaaaggatggcgtttggcagccaggacttcagctcggattacagccagtccagaccaagcataggcagcagcaggagggatttctagccttcaaatctgtaaagcttctcctcgactcgatctccaccccagcagtttccgggggtttttgtttttttggtcactg

SEQ ID NO: 43401 - DNA, 324 bp, Zea Mays
aaatgagcgactcgagatcgagtggttacccccttatgaatgtcactgagaattgagttcacggggtgatctctttgaatcgcttggtggactctagggtgtggcggtctttgaccctgtgcttcttgatcatcttccttatctttataaacttcatctcccccttgatcattgtcctccttttgaggttgctcatcctcttgatcttcatcttcattgtcatgagcatgatcctcatcttgagttggtggagatgcttgattggaagatgtcggttgatcttgtgcttgtgtgggctcttcggattccttaggacacacatcc

SEQ ID NO: 43402 - DNA, 482 bp, Zea Mays
cggattcaaacggtgataactttcaatttataactccaaattgagcgcataaatactcgttggaaaggtaaggtaaagttctacatgatccccaaactgatttcccttaattcctcacgaaaaaaacacagaaactgctagactactgctgttcacccaccacctaaaattctggacagcccccctctaccccaatcgcaaacgcaacctctaatcaattaaattgcagcgcaaatgaacaagggatgaacacaaaaatcaccttggattctccccctttccttcctcccttcttccctccaccaaaacgattgaagactcgcaccacgacgacgatgatccgagcggcaaggattggcaccttgggaggagggaattgagagggggggcggctagggtttggtggctacaagaattgagagaggaggagatgggcaggggggacggcagccaagggggaagagaagtggggggcggctgca

SEQ ID NO: 43403 - DNA, 402 bp, Zea Mays
cctttgcaatagccaacatatcgagtagtcgaagtcacatcgattccaagctcaaactcatgctttatggcatactgtctcatagcaattctaaattccttcatgttcgaaaacaaactgcctggctgcattgagggattaattttatcatacttagctctcttctcgtccggtaggtagtcctcacatggttggtctgtattttggtctcctgaatcaacatggtccgattcatcaaaattagttgtaccacctcgtaaggcttcatcccttctattttcctctgcctcgtcctcttcaattagtccaagttgcgaatacatttgcgtctcactaggaacatcacgtctcccttcctcctcccacaaaccaccgagaaccatagaagcccaatcaaacaca

SEQ ID NO: 43404 - DNA, 5955 bp, Zea Mays
cgcctccgcaaggtgctacgagtagaccaccatgttccataacaaggtgctcatccgcgccgccgctgcctcctcctccacctcttcccccacctcctcgctgcccccatttatcctccgccagctctcggtctcagccgcggcccctgtacccgcagtagacctcgaaatcctctgctgcagggtctcccgccgccaccgcctcgcgtgcctaccccagccccccgccgacgccctcctcgtcttccagagatgccagtccctagtggcggtcgaggcggtctccgagatcgcggccgccttccttggcgcctcggtgggtgaagaggaggctctggtatgctcaggttcactggtcgcagaagcagttcggtgtgagttgcgctccatgatgcttgaccatgggtggaggtgtctgggagagaatatttacgtggactcgaagtttgatcagaatgatgggaggactgatctgtgcgctgtgaacgtggaagttcgattagggagaaatgatgattttgaatttattgtctcacctgatgcatttcggtacactatgcataagaattctgatgttgctagttccagtatggtggaaacatttcatcacagcaatgaagtagttttggatacctctaacattctaacatcatgtacaactctgcctgcacttcaggagggccgtgtgattggatatagcaagatgctcccctcagaacagtgcttgggcaggtttatggagctttgtttattaaagcatgggttagatacaaactgcaattatcatgtagcagtcaaactcacttatggagcttcatgggaaacaaaatggtggccttcttcattagttctccaaggtccagggcttcaaccagccttaaaatctataagagtatctaaggcaatgtctgccttgcaatcctttgtagaattattgaaagcttggagtttctttggccataatagtctaaccattaaggaacaggttctactgaactgctcatcaactttacctgcttgggataaggctgcaagtgacctgccaccacacagttcaagaactgttaatactgagaatcttgatttaggtcatactgatgttatgtccaaacataaatcatttattctagactttcgcaccccaaaacctgctgtcatttgttcgttgagtgcaaaaccgtggaataccaacgttcacaagatagctcattctttggatgacaatgaaaatctcagtgaattaagtcctataagcttcagatttcaagcacaacagcttgctacaaacagttcatataaataacaaccttatactgataattcaaaaaaatcaagccatcctgatgctgtagcaaattgtgccaatcatgttagttcatcaagtgcaattcttcacatgcccgtcattcaggtttctgaaaatcatggaagaaagcttgcagagttgctgaagatcagcggtaaaggaggtggaaggattgcagaagtccaacagggttatttagaaacaaagaatttggacacaggaaggaagataagtcatttttatctttttctctatgtcatcagccaagctgttaattgcaatgaataatatagtttgcaaaacactttacaagttaaatttcttctcttaaaaccaattgagataagagtagtatcttagacttcatagaaaattaacagtttacggtgggcgctaatgttgctcacctgcttcgattcctcgaggggatcaaaacagagcaacacaattagagatgtcgaaccttcatccctgtaatttatctcttaatgtgaaataaattacatgaagatcattataattatgatttcaagggaacaagataaataaacacaatcatagaaatttatagctgctatactccctttattactcttttccagttacaaatgataacaattgtaccttcggatgttgaaacaagagttcagaggtgaaagtgatgtacaacagctttggatgttgggcgatttcacaaatgatctaaaggctcaatgtgccctaatgcatggcactgtacctcaatttatagcggtgactcggtacacaacttcgtacaaaatcacaaacatgtccttagtactcatacaagattacatgattctctatgggtgttatcgtcatgtctccttgggacaacgatgcatgcgctggcgagctccttcatatttttttcgagtcgtctccttcacctagagaccacaaagccgaagctcctctatcttcactcgcattgtcgagaagaaggtctggaacggaggagattccccttattccttcgggatacctaaaatatacttagagacaagtaacaacttaacgttttgaggaccttcggcagaggaaggcccccaacaataggtatcttgcaatttagacaaaccatgcaactcaaatgtactccataaggggaagtggtgcaagccaattgactttgttgctttggttttattctttcattacggttcttttttataactcgtgaccgtccagttggaatatttaacaaatttaaaatttaggctttcttaaacttttggaactagctcaaaatagggaaagtaaccaggcccctaaaatatggcggtcttggagtttctaatttacaattcaaaagttgggctttacaggtgtaatggttatggctgcaaaaaacggatccgtctagaccatggcatggaatgaagcttcctattcagcagcaagtaagacggtttttcaatgtttcggtcttacatgtggtcggagatgggaccagcactctcttttggttcgataaatggttgaatgagaaggctatctttgatatttcaccagaggttgtctgtttggtggacaactggcattggattaggaatattgggagtcatctttctatggttgggctgcagcagtatttaaaattatgggatgtgattggacatgtgactctttcacaggaggcggacaggcttgtttggagacacacggcttctgggcagttctcctcaaagtcttgttacaatgccttcttcttggggtccatttcctttgagccttggaaacgattgtggaagacttgggctccccctaaatgcaagtttttcctttggttggctataaggaataaatgttggactgcagacagactccaaaggagagggttgcaatacctggtgtgttgccccctatgtgatcaggagcaggaaacagtccagcatatcctctgcacctgcagtttttctagggatttttggcatctcattttgtcgtccatcgggcttggtaacctcactcctattgttgttgaacagtcatttgttgtgtggtgggggaaggtttctaaaaaagtgcataggtgcaagaggaagggcttcaatagtgtcattattcttggagcttggtgcttatggctcactcgtaatagggttgtttttgatggagtgagcccttccattagttcgactaagaggttgtttctagatgaattgatcagttggaataaggcgggagcgaagcatttagacagtttggagattattgtcactttaaatagggtctagtagggcccgtcaggtcccccctttttttggtttcaccttgttggggtgcttgagaggatgcttgggggtttggtcttggtctgtttttttgttttttcttttctgccctctaggtgttgtatttcggtccactttggaccttttcctctcttaatataatgttgtgcagctctcctgcgcgttcgagaaaaaaaatagggaaaggaagatatagggtagtctggtaggacccactttgttcttggaaaaaccccgtgtcgtctttcctaggcgacattgcagctgccgcttagaccaagtcgcccatagctcctcgctacagtagcccgttggactccaggcctccatgaggaaggtggtggtggggcatctccttccttgccactttgtttcctccctccccaaattctagcgttccaccattggtccgcgcgatggcgttggcttgacacagatccaatataatcatgaatggatctggtgtctaggtgtcacacccgatttcacaaagcaaaccaaatacgaaccatgtacatgccaggattcgaatcacgtagacaacgattctagcgttccactgttggtccgcgcgatggcattggcttggcacaaatccaatacaatcatgaacggatctggtgcctaggtttcacaaagcaaaccaaatgcaaaccatgtacatgccaggattcgaatcacgtacacaatgattacacaaatgacatatcattgaataatgcccgaacataaagagtattaaaccgtattatagactattgtctttaacattacatagttcatcatactcatgcgaaagtgtaaactaagataacttgatcctttacaggcaactgactgggggagatcactagcctagccttcaaactcgtcgaagtcttggaactcctagagatctgctccggcagcttcatctgagcaagggttgcaccgagggcaaccttgtgtctatataaaaagcaaagtgaatattacgcaccgggtatccaagtgacaaaaccaacacaatgcattgaaaaaggtgtgcttgcctcgaaggtaataaacccaacgcttttgtctgttgttcccaaggatggcgtaattgcagaagcaaagagaaaggccaagccagatcttgacaagaatgtgatgactgctgcaagtagacacaaaacaatgccagaagttgtaaaaaatgagttcgctataaaggtgagagataatcagaacgatgagcttaacaaaaaggtaacaaaggtgaaagcaaaggcagtctataaggatctcctgaattcaaagacgagaacaaaggcaaagccagatgttgccagtgatgagttaatagcaaaggtgatcgatcatcataggagaggtgagctgcgtttactgacagtcagtgatctgaagtgcttcctcggtgcgaagaaagcaaaggttggaggaacgaaggaagtgctaatacaaagagtgactgagctcttgcttgacaaatgcattgctattagcaactgagaagtctgaacataacaagcatgtgatgatgtgaacctacgcaaagtaccctttttttgtgtttctacttgttgcaatttgaagagccgcaatcaacaatagccgaaacactggtgctagaacaaaatgacgacagcaacttgaattgtgtgtgtgtgtgtgtgtgtgtgtgtgtgtgtgtgtgtgtgtgtgtgtgtgtgtgtgtgtgttttgcgggaacacaactataatttttcacttggattttgatacgtcaataccagaaaggcttaaagcctaactgtaggtagtcatctaaaaggccatatcatatattgatacctaagattttaggtaatgtagaggatagagtgaggagagagagaggaagaggttgcctcacaaggtcaatgtttaggactgagatgagcccagccaacattattatgttaatagttagttgcttgtacattgatatggtttctgtatattactagtaatttactcgcactccgctcgagtctttaaccatttgtttccaaagctaagagagcattgctgtagaaatattggcatggcacgcacctcagggcggtggtagatcccggggcggtggtagatcccggagcctctcagcgccactgcctgctgcattgcattggcatgaactgagaaatttggagaacacgcagcaggtgatggtcatcagaagcttcaagtgtcaaaaggtattaataatgttgcttgttttgatacagatatgatatatagctctaaagtcacatacatgatcacattatcgagtgaaggccgcataggaaagttgcagatctgagtatccatttgttatttcagtgggaccctaaaaaagaaataatgaactttcatttttgtaga

SEQ ID NO: 43405 - DNA, 933 bp, Zea Mays
ttatgataagaaaatttatcgagggatgtgcatgttattaaacatagctgctcgggtatcttgtaattctgcctttttgtaccatcgtcagagcaacaacgacgggggagggatcttcaaggcgttatgcaggggattcgactcgcggctacggcaccaggcagcgaggaggtcaatgtcgcaacgcgtagaagttcaaccatgacgtcatattgtggcgtgggcgcagagcttcgatgagagcgacggccggggatcagacgctgtcgcgacgtgaacaacaggacgcctgggatcagaaggcgtcgcggtggtggccgtcggggaagcaagaatggcttcgacaagctttgatgggtgcagaatgcagtcgtcgacgtgtttggcgagagcactgcaacagggacgcacgcgcggcaacgacagcaatcagcggcatagtaggcgtgtggcacgagagagcaagtagtggacaaatggaggaacgcgagcgcggattttataggggatatagaggagctcctcagtcgtcaatgaatgttgccatgaatagctttaacgtccactaatggagcagcaatggctgtgggtgaaacgtcgcgtgaggaatagcagcgggctggacgtgggcgcgcggcacggctagacacgggtacacgactgtgcggcaatggatgtgggcgttgagcggaaacgcgggcgccggcgacgtgcagcttgaaatgcggcggctggtgctcctgcgtgcaggcatgaacgaacgggagagaagaccaacagttcctaaggcccacctgccatacgcataaagagaaaaaataaataaatggagtgggtcggttgacgtgctgcttgggcaaagggccgagcggccgtgaccttttttatttaactttatttttgtttttcttttttttcaatttagatgtgtgc

SEQ ID NO: 43406 - DNA, 2430 bp, Zea Mays
atggatcacgtagtcgggggcaagttcaagctcgggaagaagatcaggagtggatcattcgggaaactttacctcgccgtgaacgtgcagaatggcgaggaggtggctgtcaaactgggtggaagctgccggcgtgaagcactggccaccgggtgctgcacgtcaacggccaacagggggcaccgtgcaggtgggcagaagcagccagcgacaacagtagggcacagggatgtatatggaccttccaaatacactagacttttgcaagcaaccaaagatactctcagataagaaggtttgccttgccctgaatacttcttgacttatgtcatattgagcatttgagctattgagaaacatactaatacagacattgttgatcttgcacttgcatgcctctatgtaataggctaaactaagcagcattgtacatgatactggtacttttgcacttgcactgtctcttcttgctaggtagagtcctaccccatagtctggaactagaagaattctgattttccttttaggaatcaatgtatatttgagctttgtttggtcagaaatgcattgtagaaaaatttagatggtgagatttgtatctttgttctcatttttgttcattgtagtatttttttttcagaggttgttctcatttatctataactttttattttttttacgaaaagtcggtgcatgctgattatgcaccaagaaacatcctttcacagccccattaatcatctccatagcagccatcgacaaaaaaaagtccttgaaaatttagaaccttccttcggttaagaaatatgtccgttactgaaatggagaagggttgtacacatagttcaatgaatcaaaaggaaaactggtgtctgatgagatcatcataaatctgctgtcaagacgcctggaagagggagaagaaaagggtgaattggggttcatccttgatggctttcctcgaaccatgagacaagcggtagaaaatggccgatgccgaggatatccagcccctcgtctgcgacaacggaactggcatggtcaaggctgggttcgctggcgacgacgccccgagggccgtcttccccagcatcgtggggcgcccgcgccacactggtgtcatggtcgggatggggcagaaggacgcctacgtcggtgacgaggcgcagtccaagaggggtatcctgaccctcaagtaccccatcgagcacgggatcgtcagcaactgggacgacatggagaagatctggcatcacaccttctacaacgagctccgcgtggctcccgaggagcaccccgtcctcctcaccgaggcgcccctgaaccccaaggctaacagggagaagatgacccagatcatgttcgagaccttcaacacccccgctatgtacgtcgccatccagaccgtgctctctctgtatgccagtggccgtaccacagattttagagattacctgtatcgcaattttagatattccgtggaaaagacggaaggcctgggtgtgttcagaacacatgtgctcacagggcttgcccgctgcatcttggttcagtgaacgagggtaggatccagtgcccttaccatggttgggagtactctactgatgggaaatgtgaaaaaatgccatcaacaaatatgctcaacgtgcacatccagtcattgccatgctttgagcaggaaggaatgggggtgcatggcctagggggaggatggcgactaggttcatcgatggcggcaagcagctcgtgttcgaccacgcgacacagttcttcactgcgagcatccgcaccgctgcaggtgctgcatatcatcggcagagaggatcgagttcagatcgatgatgcaaggcggctgcatcgtcgagctgtaacacctgcagcgatgatgcctccttatgggacaccaccaccatatgcagcaatgtatgcacaaggtacaccataacagcaggcaccaatgccaccgggttcacacccatacagttcttatcctatgcagtcaccaaacggacagttcaaactccaataagaatctcttggctgctcacctgtcgcatcttccccgattcaaaatcgtcctggtcgcatcttccccgattcaaaatcgcccaattttggagatatgtgacaaacgccatgccctgtgcattagagaagatacagaatcgccatgccctgtacaagacagtgagccaaattcttgttcattttgcactatgatacatattgattcattaggccctaggttggaggttgtgactgatgagttgggaagggattacttgattggtggtgtacaattcttggactggatacatgttccagtttttggtccattagttcaggaattgtttcatttacatgtatattcagtacactcgtataatggaaacaggcaaatctctatctcattctttggttattgtgtta

SEQ ID NO: 43407 - DNA, 1160 bp, Zea Mays
caggaggccctcggtttcgtcgcgacaccgtcggttttagtcacaacaccattaccagacgtaaccaataagaaatctcgcgtgacaccaatgaattaggcaagggtgacaatatacaaagagatactccacctgtaagaatggttacaagtagagagccaaatagattatggcccgatgaaataaacaaggcatggccataacctaaatttgatgaaaggagtacgacaggagactgttacttcagccccaagcatatttctatgcccatcgtagagatcacaaggtcaaggatcagtatctaactagatacagggaaaaacaatcttaagattaagttggaatgccttcgatagatatgggggaaaccaaagacatcaaattccagaaaaatggttggacatgtctttcctaggataggttgataaagtgacatggcgatccttaaaaacaggcaaactggataaggtacatcagcttgtaccaattgtcaagggtagggtctaagatggaaatatgagtcgagattattattttaagcttaagtaccctttttgtccaacgaagaaattatctaagcattcatttgtataaatttgggtcaaggaggggtaacggaaaaatcaaccttgatcatggttcaccaactaagaacatggcctagatttgggtttaggcaaacaagtcactaactttctattagtacatcaagcacaagagcaaacaccatttacactaatggtcaaatcaaaatagcctgaaagctatctaaacatgtagctttaagacaccatattatttacaatcaatggttactggaataaagatgagagaagcattttgggtgtataggcgacaaacatgatgcaacaatcaggatgcatgctcgtcctattcgtcctcactgattttgccaaccaaatgtggcaatagcgttctatctcggtggcatagttacgactctcacggtattttgctagtcgtcaactacacatacgttttcgaggttagtgtacctgcagaaaatccattacagcccaattcccaatgatgcaagtcacacatgacagtttatcacagtttatactccatatattgttgtatggaggccagctcatcattaagcgccgagccacgcataggcgccgttgccacacttt

SEQ ID NO: 43408 - DNA, 2178 bp, Zea Mays
cactgagtcctcccgagtcccgacaaaacgtccagagcagcaagcagccgagcacccaacgtcccaaccgccgccggaggcccggagcgcggagcaaaaccatctccaaaaccctagttattccctagcgccgccggagcccggagcttcgacccacctcatcgcgcctcctctctttctctctctccgccggcttccttgactgcgccgcacccgactctcatttttctccctcgacggtgctcgacccccaccggctcagcggagtcagcgctctatctgtccctctgccgcgccgagagtaatttctccttgggaccgcagaccgaggacggagcgaggagaagccaaaatttgagtttcgtctcttgccgacgccttcatttctttctgtgaaagctgctgtattttgagggaagctagagggtcttcgtcgacccagccaagctctgccttgtttggacggctcggctggtgctcgctgcgtcatccgcggacgcgggcgtggctgcctgggacctccgcaccggcgcggaggacatccgcctccgcccctgcgcctcccgccctcggtcgctcgcctcggttgccgaccgcttcctcgcctccgctcaggctcttcccgcgggcggcaactccgggaccatccacttctactactgggacaagccgcaagtggccgtcaagagctttcctgctgagccgatccgcgcactcatcgccgatcaggagggaagctacctcattggcggtggcagcaatggcaacattttcctttgggaggtgtctagtggagagcttctccatacatggcatgcacactatcgtgctgttaggtgcctcgggctgtatgactatttgcttgtctcagggtcagaggatgggactatcaaagtttgggatctcatcacggtgcttgatgagcaatcaaggctggaggtccagacaccatatttgtatagtttcagtcagcatgcactgcctgtaactgatattgcttgttttcttggagcaatcgctatatcttcttctgaggatcgaacctgcaaaatttggagtttatctgagggtaggatgctgagaagcatttcatttcctactagcattgattctatagcactagacccaagaagtcatattttctatgctggtggtagagatggaaaaatatatgttactgctatgggtgttgatctcagttttcatggtagggatgagtcatctattctgggtgcattggatgaccacagcaaggcagtaacaagcttagcatcaagcagagatggacttctacttgtctctggatctgaggatggtaatgttcgggtgtgggataccagatgtcagcaagttacccgaaaattcaaacactcccaaggtccagtaaccaatgttcttattgtaacgccacaacgagtaaatctgccaccgctacaaccattacgcaaagttcggtctgcaaatggggaggctgaacggcaggcagtacttcttcatcggcctgaaaatgatgtcccaattcctggaaataagaccttcatttttatggagcgctacttggatgagcttcagaagcatggtggttcatccaggttatttgattttgggccgaatgctcagaatggcactccaaaccaacagggaacagaatggagagatagatacttggagttgcaggatctctttgtacatgaggtcctccatcagatgccatcctcgaggaacccatgatgcacatgctttggatatcgtaggatcatttgtggtgtcgaaacagtgatggttgccattcgggctacaaacgatgtagatgagttctttggagtaattcaactgatggtgctttcggctgcgaggaacttatcagattctgaactaaaaccactagaatcggtgccagcagtcacttggaactggttctcgtttgtgtactagtctagagaaacgctaaaaatcaggtttctcttgattctagttctaattttaaggatacagtgagcttgctacataaagttattttgatttcatagagaaaatgttttgttctcaggggaatctgaattttgaaagttttctactagaatctaagatttgatacgttcagggttaaccataccaattaaggactaaaaagtgctagttagcggtatcggattttcgctggaaaaccgctgtttt

SEQ ID NO: 43409 - DNA, 2099 bp, Zea Mays
aaagaaggagaagagagtggcccttaaccctaccgttctcttctccctaatcctggtaatcagtagtagccactagcgctgctgccgttctcttcccctacccgacacaagctccaccacctctatctaccacacgccaccactgtaggagctcctccacgatcatcccgccctagagccataataattcgttgaagaggagggggttcttagaaccagagggcggctacctgtgaaggatacccgtgctgctggctgctgctgctgctcctcaagctagagccgtgtgtgggctgtgcagattgcagagcgcagcttccagtctcagcattgctttcaatggggaggcactcctgctgttacaagcagaagctgaggaaggggctctggtctcctgaggaagatgagaagctcatgaaccacataaccaagcacgggcatggctgctggagcactgtccccaagcttgcagggcttcagaggtgtggcaagagctgcaggctgaggtggataaattacctgaggcctgaccttaaaagaggcgcattctctgaggaggaggaagacctcatcgtcgaacttcatgctgtactggggaacagattgcaacaaggttgcctggaagaactgacaacgagattaagaatctctggaactcgagcatcaagaagaagctccggcagaaaggcattgaccccaacacccacaagccgctccttgtcgaggttgaacgcagcaaagcagctccaacgaccagtaccgagaggacctctgagtccagtgatgttgacccttcaagtggcggcgcacttggcaactcgagccatcttcttctcagcgagacagcacaatcaccacagctgccagcgctcggtaagcatcgcagagaaactactagcctcgcacatctaagggtgccgcccaaggagttgttccttgaccagctggtttctggtcatgagaacctcactggctgccgcacagcaggcccagttccaaatttccctttccaacagctcatgtgctacagcaatgaatttggcaacaagaatggtgctagtaacaattcactctggtttaaccacaatgagacaagtggcagcaccatttccactgtgatgccaccagtttcgccatcaactctctcaacatcaacagggctcaataggtcaccagacaacccacactcgggaggcactggtattcagagcacccagttctactgggacactgctaatcctagcagctgcagcagtagaggaagcagcggaagcaacggcttgggatttgagctgcaaagcacaagctcgcttctggagagtagtgttttcccatggacagaattaacaccagacaaaaatagccaagttcaccttggggaagaactcaagtggcccgacttgctccacggaacattcacggacacacctgcaaccatgcagaatcttagccagtcactgtacgaagatgttatcaaagccgagagccaattcaacatagagggcctctgtgcagcctggtctcaaaatctgcagccacagcaacatctgcaggtatcagatttgtatgacaaggatttgcaaaggatgtccttgtcttttgagaatatctagacagcatgtttcagcatgcagggaacagagaaatagcagaaagctgagtcaatgaagccttaaaaaatacaatatttcttcacagattcatttgaaggctatgtggaggtgtgttttacgtaggtacattcttatgatgaaacagagatcaatactgataactgttcaccagtgtacatgaaaaaagggaaaaaatgaatctatattacagcataatgtatagactagagaaagtacatcctaggagtttacctcctttcatttaaaagttgctgtctttatctgtacatgcatgtagctcggctttttttgtataagtgagtcatggttgatctttgtctacaaaataaatgaggcaagaatgtgaaatactgcacctgtcagtagctcttcggaaccatacaagaaatttcagatttttttagctgttattttgttactgtatatgcttgagatgcaaattaattgttgatgatgcacttttat

SEQ ID NO: 43410 - DNA, 1533 bp, Zea Mays
cgaagtctacatgataggtgccgactgctgagacagagtacggtcgcgagagtgaaggcaaggaaaaacacccaaacggcccaaccccaggaagccccgtcggaccctacagaccctaaccctagcgctcccgacgcgccgcggagcgatggcgatggacgcggagcggcggcaggcggagctgatcgcgcagttctccgctcaggcggcggcgctttcgtccgcgccccagctcgccgcgctggtgcttgaggccacctcccacccggccctcttcgccttctccgagctcctcaccctcccggccctctccaaggttcgcgcactgcccttggcgtgcgccctgctacgttactccgggacccgctgccggactagctcactggcacgcagtacgcgtcgtcactggacttgctccggctcttcgcctacggtaccctgaatgactacaagagtaattctggattccttccagcactgttgcctgaccaggtccgaaagctaaagcagctcagcgtgctaactctggcagagtcaactaagatactaccatatgatcagctcatgcaagagttagacgtttcaaatggtatcgttagaggcaaactggatcagctgagaaggtgctttgaggtacaatttgcagctggaagagatcttacacctgatcagctaaagaacatgatagagactttgtctgattggttggggacatcagatagactgttgcatcaaattcaggagaaaatcaagtgggctgacacaatgagtgaggtgaacaagaagcaccagaaagaatttgaagacagagtggaagaggccaaaaaatcaatcaaggcagacattgacttacgggggcatgacgagtttctctctgaatctggaggaataatggattttgaagaggaccgcgtccgaccaaaaaggaggaggcaaccaccggcgtagtttcaattagcccttaccaatctctcccagaatgggacctgctgataccttgattgagacattttgacgccggagttgagtaaactttgtacatctgtcgtgtgatgcctccactgtagcgagtctgtttattttgccttctggtcttggtggggacgtacaaggccaaacctaggcgttatgttgcatttatttggtagtaaatggcccatggaagaaataacgttgttatgattatggcactgggttattctcaagtgtactgaacgataacagaagcacctctgttaaatgatgattgactcgaggcttgctgacttgctgctctagaggagttagcatagctgctcaggtatacaaactgccatcatttactctgcatgcaaaagagaaccaacttttgctgaatgacaattgtgcaagacatagatcacgaaaaagaaaacgatgaacgcataagcatgttgaaatggatttcagattatttgcgttttctttcccacagttttatcttcgtcacgagaagagaaggcaaatctgaattctgcgcgaaacgttggtaatgtacttgttggaaaaaagaaa

SEQ ID NO: 43411 - DNA, 5842 bp, Zea Mays
aagaacaaaacttttaactcctgtggtcccaggagaccgagtggctacggatagccagccacaggtccagcttgcccagacaacatccactagctagctgcagctggtgtggtgtatcttttttcttctctgtgctctagaagattagtattgtagggcttctgtgcagcacccaagcaggaattcagaaagaatgcctggaagcatccacatctcagccactcaaccaccagtcatcacccctctgtttctgcaagtcactgtgggcaacagagaatacagtggaaacatagaacaagatgctttatctttccccgttacatcacttcgggagagtatggtaataatgctgtacagtgcagacggggcattgatatcaaaatcagagctgaagacaaaagagattgtggagtcaggaactatggacacagtatttgctcttgatagcgggggagaaatagttcttcagattcagttcttgctcaacgatgatgaccgcaagcgaatccaagaaatgagaaattctgcgatgaagatgaagcagcaagggctgcttggggatggcaatgaactcaatttttcagacagcgcattgtctaaacggctgacggagaagatttccaacatccgaagcaaagcagctgaacgatctgagcttcagaagagcatgtcactggatgatttgcaagagcgggccgtgttccctggaatcgatgcggatccacgggtgaaggcctcaagggactcgttgctgcaagggggtgtaaggttggaagatcccggtggctccaagcagcggctgagccaggccgaagtcgaagccttggcatcgccggtggaaggggagaggcggcgcctaggcctggacgtagcatccggcggcgggcgaggggtcgtgggagaggcggagcaggaagtcagcgacggggcaggggcagtggatgcgatcagcacgtggccgccggacaggccgggccctggctccaagaaaggggacagcataccagagagcagcaaatcaagtagtgcagtgaagacgatgataagtagctttgaaggcaccaccaccccacagggtatcgtttcagaaaccgactcaggcagccgcagcacgcaggcaggcaaaacagccatcatccctgttgatgatcaccacaaagcttcaaatcacaggtctcagcatatactagtagaaacgatcgcacctgcacaactacaaactattaggacgccaaaagcagccgaaagcagaagccgacgcagagcaagcaagcagcacaacgagctgcatccaagaactaggaggaggtcacaggcaaagcagatgcagatgcagatgcagccaagggactacgtggagcgtcccttgaactatctggttgcgacgtcgagcacctggatacacccgcacatctgcgtcacgggcgcgaccaagcaactgaaagacctccttgagcttgagcacctcaacttccaacgcaccgctactaagggacagcaaggtacccgagagagaaaaagcgacgaatccattgccgccgccgctgctcgggctcgcagcggtggtttcctgatgataaacgggtggctgatagttcagggggtgcgtgctgcagttgtgctcacggtttgctgcggggccatgttcttcagcagcagcagcagatgaagaaatctagcagtgcctacccctaatttttgcatacacaagccacagccacaataatacgacgacctctcctgctcctccgaatcctgaaaccaaccagatcacacgaaccaaaccaccgcctcctcccccgaccggagaggagcctcaccgccggcgcccatggcgacacgctacttgatcgtgtcgctgcccgtgcagtcgcccggcgccaccgccagctccctgtggtcgcgcctccaggactccatctcccgccactccttcgacaccccgctctaccgcttcaacgtcccggatctccgcgtcggcaccctcgactcgctcctcgcgctcagtgacgacctcgtcaagtccaatgtcttcgtggagggcgtgtcacacaagatccggaggcagatcgaggacctcgagcgcgccggaggggtcgagaccgggaccctcaccgtcgacggcgtccccgtcgacacctacctcactaggttcgtgtgggatgagggcaagtaccccacaatgtcccctctcaaggagatcgtcggcagcatacagtcacaggttgccaagatcgaggatgacatgaaggttcgagcatcggaatataataatgtaaggagccagcttagtgcgatcaacaggaagcaaagtgggagcttagcggttcgtgatctttccaatctggtaaaaccggaggatatgatcacctcggaacatctcgtgacacttcttgcaattgttcccaagtactcccaaaaagactggttgtcaagctatgagaaaattgacacattcgtggtacctaggtcatctaaaaagctctatgaagacaatgaatatgctctctacactgtaacactgtttgctaaggttgttgacaattttaaggtccgtgctcgcgagaagggttttcaggtccgtgattttgagtacagtcctgaagcacaggaaagtcggaagcaggagatggagaagctactgcaagaccaagaagccatgaggaccactcttcttcaatggtgctatgccagctacagcgaggtattcagttcctggatgcacttctgtgctgtgcgtgtctttgtagagagcatccttagatatggtctccctccatcattcctgtctgctgttcttgcaccatctacaaagagcgagaagaaagtaaggagcatcttagaggagctctgcggcaatgcccatagtatttattggaaatccgaagacgacgtaggcgtcgccggtctgggaggtgaaacagaggcgcacccttacgtctccttcaccataaattttgtctgagaccggcatgttcctggccgtctgcggcccaggcaatatttcgagcagaactgccataaattctttgttgatttgtcggttcatgtgctcctgtaattcacatcacagagagaccagccgatcaataatgtagtttctgaggacatgtttccctgcagtattgtaccttgggagcgcattgtaaatggcctggaacagttgtctactggatttgtttatttatttacaataaaagccatgtgaaaataagtaactaaaatttggattgtcagttgatgaaaaatggaatgtggagctagctaggctctgggtttgtggcgcagacgatttttttccagtggaatgtgtacgttctggttctggagagcttcctatcctaccggccaggccatctctaccttgagccccttgcaattgaacatcacgaaactgggtgaaccagaatagattggcgtgtttggaacgcatggctgacaaattaaacccaagtcttatggaattttctcagttcccgaattctcgagccaagaggagcgagcagtactggatgccgagaactgccagccgtcgtccccgcgccgccgcggcgtccgggcgtttacaccacccatgcacgcacggacgaggtacccttcatcgtcgtcgtcgccgccgccgccgcccgctccaaaaccagaaagcggatgccactccaaggaagggcagctcctttccacactagtctcgctcgggccgacagcgatgtctccgtgcgcctgctcctcctcctgctgctgctcttcctcctcgcgcgcgctcacacccacctaacctataacccgctccgcctagctccttcctacccgttacctgctgcggagcggagacgacgaccacttccacctcctcccccccttccgcacccaatcccatccccctttccaaattccaatttccagcaggccgcccgcgatgcccaagccggcgacggcgaaccggcgccggaagcgcggcggcggcggcggcgaggggggcgccgccgatgaacaggccagcagcaagaggaggcccgccaccagcgtgctcacctccctggacgtcaacgacgccccgcgcccggagctccccctcttccagctgagccgacctcgccagcaggcggaacaggacgacgaagaggaggaggtgaccggtgggggcggaggaggaggagcggggtcgtcgttgtcatccgtggtcaacggccacgggcagagcccgcaccagcagcggcggctgtgggtcaaggaccggtcgcgcgcgtggtgggagcagtgcagcagcgccgactacccggaggcggacttccggtccgccttccggatggggcgcgccaccttcgcgatgctgtgcgacgcgctgggcgcggccgtggccaaggaggacaccgcgctccgcgccgccatccccgtccggcagcgcgtggcggtgtgcgtgtggcggctcgccacgggggagccgctccgcctcgtgtccaagcgcttcggcctcggcatctccacctgccacaagctggtcctggaggtctgcgccgccatccggggcctcctgatgccgcgcttcctccgctggcccgatgacgccgccgccgaggcgttcaagtcccggttccaggcggagtccgggatccccagcgtggtgggcgccatctacaccacccacatccccatcatcgcgcccaaggtgtcggtgaccgcctacttcaaccgccggcacacggagcgcaaccacaagacgtcctactccatcacgctgcagggggtggtggaccccgacggcgccttcaccgacgtctgcatcggctggcccgggtccatgcccgacgaccaggtgctggagcggtcggcgctgcagcagcgcgcggcggccgggatgatggcggggtcctgggtggtgggcggcgtcagcttcccgctcacggagtgggtgctggccccctacgcgcaggccaacctgacgtgggcgcagcacgccttcaacgagaaggtggcggaggtccggcgcgtcgccgtggacgccttcgcgcgcctcaagggccggtgggcgtgcctgcagaagcgcacggaggtgaagctgcaggacctcccggtggtgctgggcgcctgctgcgtgctgcacaacatctgcgagtcgcgcggggagggcatggaccccgcgctccgatgcgacatcgacgacgacgagacggtgccggagaaccccgtgcggtcggacggcgccaccaaggctagggacgacatcgcgcacaacctgctccacagcggacgagccggcaccaaattcttctgaattctctcagtcggttcgttcgttccatcagattcttctactatgctgctgctgctactctgtctcccgactccctctcctttcattggattggaaccgtccatggaattgatcattcgttgggttgtttgaactgtactgggaagtgggaagatcacccgcaatccgtcatcctcatcctcgtagaacgctgaacacacggagagaaaggtagatcaaagacaaagagtgggttgggtttgcttttgatcataggatttttagtctagtagcacgtggtacagttgttgaacaaacctacgtatccaagagccaagtcaaagaaacagcaacaagaagcagtagcacatctcaatccgtgcgttttccttgtgttttacctatggcattggcatgatcatgtaaaacaatattttgggatgaccgtatggccaaaatgctgaacgtgttgccgatcgggccgatccgatcgatatccactggtcgttaacaataacatgtttggatgagctggtcgaaccggacgttaatgactgactttcgatttttatttatgaattatttattttt

SEQ ID NO: 43412 - DNA, 2278 bp, Zea Mays
cagccagtacgcaccgaggcggggcaactgctccacactccacagaccacagtcgccgccggctcatctcctccgtgcccggcacacgaactccggcgccgccgacccacaatggaatcccccgacggcagtcatggcacgaatactcggcccactctgcagcggcccaacaaagtgaggaaacaccaagacccatacaacgcgacgtcgcgatcccattgcccatccccagatctcaacccgaacctcccagccgcgccgccctgatggcctacaccacctcgccgtcgacatcgacgtcgacggcagcggcggtggcctgggccttcgctgccgccacctgcgtgaaactcctcctcgtccccacctaccgttccaccgacttcgacgttcaccggtactggctcgccctcacgcacgcgctccccgtgcggcagtggtacaccgacacctcctctcagtggacgctcgattacccgcccttcttcgcttacttctcccgcctcctctccctccctgcgccgctcgtcgacgccaccctcgtttcaatccccgtgcgtgacgcgacgcccttcgcgcatctcatctacctccgcctcactgttgctttctccgacctcctcctcctcggatccgtcctcttactggcgagggacgcgcagcggaaacagcggccgttcctcgctctcgctcttgtcgtatggtcgccggcgctgttagctgtcgaccacgtccactttcagtacaatggattcctcattgggttgctgctgctttcgctgcacttcctcgagcaggggtgggatcttattgggggagtcgtgttcgcatgcttgctgtgctcgaagcacctgttcctcgtggcagcgccggtgtactttatgtatttgttccggcattattgctgtggccggggtgtcgtgaaggggctgggaaggctcgtgctcatgggttctggagtggctgctgtttttgccgcagcatttgtgcccttcgtgtactatgaagactaggctttaatattgccatacctgaagcttcgtttactgggggacttgttggtgattcgtctccttttgctgttcttccaaaggtcaccccaattgctacattcttattggtcattcttgccatggctccttgccttatcaaagcattctctaatcctcaaccaaagcatattattagatgggtctcgtatgcatgcacatgtgggtttatgtttggatggcatgtacatgagaaggcatcacttcatttcactatcccacttgccctaatcgccatggatagcttgaacgatgccaggcattactttttgttgtccatagtttcatgctactctctattcccgttgctgtttgagaaccaagagtacctgataaaggtgctgctgctgctgacctacgctgccctcatgtgggtaggctttacggtccattttgctgcaaagtctgacctggaaggaaagaaaataagtcggtcaggcagcacagtgaagaagaatggcatcattggatggattggtttaagctatcttttgggaattgcaggcatagaattatggtctcaagtatttcaccatcatgtattcggcgataggctccccttcctacctcttataatggtgtcattctattgtggccttggaatgatgtactcctgggtgtggcagcttgtacatatagtccgacacacatgatttgattaccggtcatcagtggaagcattctcttgcctttcttgggttgaggctaatcgcgatgacaatgctgcctggaccgatgcagcggccaacacagtcatgtctgggcacagcattttctttttagctgtcgaagtcattgtctgtgtgcaagaaatttttagagatgtgtgaccgtgttatgatgtaattaatgtcagtttatataagtaacagaaaatctgcttgtatcaacccgcgcttcatgcgtgccgctcttttccccatctcaataacatctggcttctgcatcgagtaactgagtgtgtgtatgatatatgaacgattctattttctaggaaggaaagacatcaaatgtgatgtataatctgcttgttatctttctgcgtacatgcctattacgtctggcagatgatgcgaatatatcaacgattctattttcgactcgcctgctgatgatgctgatggcgcacgacaaatggggctcgtagttgcggccagccagcaagtttagaattgactgaattgaaatggaaaggaaaaccagggacgccgggacagaaaggaattggg

SEQ ID NO: 43413 - DNA, 4652 bp, Zea Mays
caactccggccgacaatccaacaagcaaaggagattagattagttttggttgctttgttctagctataggaagaagaagaagaagtacgcagctagttagctactaccggccggccggcccgccggccagacccaccaagaactgaacatggaccgggagatccaccgggtgacgagcctccggcgcgacagctcgctatggcgtcgcggggacgacgtgttctcgcggcagtcgtcgcggttccaggacgacgaggaggacgacgacgaggcgctgcggtgggcggcgctggagcgcctccccacgtacgaccgggtgcggcgcggcatcctggcgctgcacgagggcggcggcggcgagaaagtggaggtggacgtggggcgcctgggcgcccgcgagtcccgcgccctcgtcgagcgcctcgtgcgcgccgccgacgacgaccacgagcgcttcctgctcaagctcagggagcgcatggaccgcgtcggcatcgactaccccaccatcgaggtgcgctacgagagcctccacgtcgaggcgcaggtgcacgtcggcgaccggggcctccccacgctcgtcaactccgtcaccaacaccgtcgagatacaatccatcgggaacgcgctccacatcttgcccagcaggaagcggccgatgaccgtcctgcatgacgtaagcgggatcgtcaagccccggaggatgactctgctgctcggacctcccggctcggggaagaccaccttgctcctggcgctggcggggaagctcgacaaggacctcagggtctcggggaaggttacctacaacgggcacgggatgaacgagttcgtcccggagaggacagcggcctacatcagccagcacgacctccacatcggggagatgactgtgagggagaccttggccttctcggcgcggtgccaaggtgttggcaccagatacgaaatgctcactgagttggcgagaagggagaaggcagccaacatcaagccagatcatgacattgatgtctatatgaaggcctcagctatgggtgggcaagaatccagtattgttacggactacacactgaagatattaggcttggaggtctgtgctgatacgctggtaggaaatgagatgatgaggggtatttctggtggtcaacgaaagcgtgtcacaacagggcccccgtgaacatgtgctcgagttctttgagttcatgggcttcagatgccctgccagaaagggtgttgctgacttcttgcaggaagtgacatcaaggaaagaccaggggcagtattggtatcggcaggacaggccataccgctttgtgcctgtgaagaaatttgcagatgcattcagtatattccacgtgggccggtccacacaaaatgaactttcagagccatttgataggacccggagccaccctgctgccctagcaacttcaaagttcggtgccagcaggatggagttgctcaaagccactattgatagggagcttctactcatgaagaggaacgcatttatgtacattttcaaagctgttaaccttactgttatgtcgtttatcgtgatgaccacatttttccgtaccaatatgaaacgagacgcatcttatggaaacatctacatgggggcactcttctttgctctcgacacaatcatgttcaatggttttgctgagcttgccatgactgtcatgaagctgccggttttcttcaagcagagggatcttttcttcttccctgcatgggcctacaccataccttcatggattgttcagatccctatcacatttttggaagtcggggtttatgttttcaccacatactatgtcattggatttgatcccaatgtgttcaggttcttgaagcaatatctgctgctccttgcactcaatcagatgtcatctgcccttttccgcttcattgctggaattggaagagacatggttgtgtctcatacctttggccccttagcactgttggcttttcaagcactgggtggctttatacttgcaagacctgatgtgaagaaatggtggatttggggttactggatctctcctctatcgtatgcacagaatgccatttcaacaaatgaatttttggggcacagttggagcaaaattcaaaatggaacaaccgtgggaattggggttcttcaaagtcgtggtgtctttactgaagctaagtggtattggattgggctcggtgtcttggttggatatgctctcctcttcaacctgctctacactgtagctcttgcagttttgagtccattcactgattcccacggatcaatgtctgaagaggaattgaaagaaaagcatgccaatttaactggtgaagtcatagaggtccgcaaggaaaagacatctaggaggcaggaattggagctgtcccacagtgttggccaaaactctgtgcatagcagtgaggattctagtcagaacaggaagggaatggcactcccatttccaccactatcacttacttttaacgacataagatactcggtggacatgccagaggcgatgaaagcgcaaggagtgacagaagatcgtttgcttcttttgaagggcgttagtggttcttttaggccaggagttctaactgcattgatgggtgttagtggtgctggaaagaccacccttatggatgtcttagctggcagaaaaactgggggatatatcgagggagatattaccatctcaggatatccaaagaagcaagagacgtttgcacgcatatcaggatactgtgagcaaaatgatattcattctccacatgtaacagtgtatgagtcactcctattttctgcatggctacgccttccttcaggcatcaacttagaaacaagaaagatgttcattgaggaggtcatggatcttgtagagctcacatcactgaggggtgcacttgttgggcttcctggagtgagtggcctgtcaactgagcaacgcaagaggctaactattgctgttgagcttgttgccaatccttcgatcattttcatggatgagcctacctccggtcttgatgctcgtgcagctgcaattgtgatgaggactgttaggaacactgtcaatactggaaggactgttgtttgcaccattcaccagccaagcattgacatatttgaagcatttgatgagcttttcttaatgaagagaggtggagaagagatatatgttggtccagtgggccagaattcatcaaaattgattgagtactttgagggaattgaaggtattagccagataaaggatgggtataacccagccacgtggatgttggaagtgagctctagttctcaggaagagatccttggggttgatttcagtgaaatctacaggcaatcagaattataccaaaggaacaaggcactcatagaggagctgagcaccccacctcctggctctagtgacctcaatttccctacacagtactccagatcgttctttactcagtgcctagcctgcttctggaagcagaaaaagtcgtattggaggaacccaacctacacagcagtgaggctactgttcactgtagtcattgcgctcatgtttgggaccatgttctgggaccttggacgaaaaactaataaacagcaggatctgttcaatgccatgggatcaatgtatgccgcagttgtatacatcggaatgcagaactctggctctgttcaaccagtggtggtggtggagcgaacagtcttctaccgagaacgagcagcgggcatgtattcagctttcccgtatgcatttggacaggtcgcaattgaaattccttatatctttgtacagactttgctatatggagtgctagtctattcaatgattgggtttgagtggactgttgccaagttcctctggtacctgttcttcatgtacttcacactgctttacttcacgttctacggaatgatggcggttggcttgactcccaacgaaaccatagccgtcattacctcatcggcgttctacaacgtgtggaacctcttctcaggatatctgatcccccgacctaaactgcctgtctggtggaggtggtacagctggatctgcccagtcgcatggacactctacggattggttgcctcccagttcggcgacatcgcgcatccgctggaggactcaccgacaggccagacggtggcgcagttcatcacggattacttcggcttccatcacgacttcctgtgggttgtcgcaggggtgcacgtcgggctgaccgtgctcttcgcgttcctgttcagttttgccatcatgaagttcaacttccagaatagatgaggacaggaggcccaggccattggcaatttttgcattcgtttgttggctgtgggtgggtgggtggacaagcatacctgctgtgcgtgtagcatctacggcccatcgattaggctgagcaagctaccatagtaccatgtaacggtgtatagagtttattttgtatttcaagcttatagaattagaaacactagaagttgtaggcgaacaaaagccttgacaagagttgagcctcctgctgccatggccagctgtagctttatacctgtcagaggcacggagcgcttctcagagaatgtaaaccgtatactggcattctaatgaatcagtgggagcagaattttgaccaagtacctctgcagatgtctt

SEQ ID NO: 43414 - DNA, 1043 bp, Zea Mays
cctgatagtccttaacttagggcttaatagaggatgtcgctagcattatagttttttcaaaactattttttttcaaaaccaaacaatgtgtttagttgaaaataggttttctaaaaccaaaacttttgttttgaaaatacgtatgtgaccgtatatacttaatcctgctccgataccagctgtggcagaatctcccaagttattgggcccacatgcacctgtccttgtctcaaagacctcagacggctatgcatgtgcaccaaataacttaacaggatccgtccgattgccccaaggacaccggataaaccacttacaaccagaaccgcgggattaagtaacacaaatcacacaccaatatttttgcagcggaaatattgttaccaaattttacaagttacaaaaattttatattattttatcggagtgattgcaaaagtataagtttgaaatacatgctagctcaagggaccatcctcattaagaagtatagaagggttacttagacttataagaaggccgagcccaccggcacttatcaccatcatcagcaacacaaaactatgacctgaaaaacaacagggaataaaaccctgagtatggaattactcagcaagtcttacccgactaaagaaaagactctcaagggtatgctggatttgggaatcaaggagaggctttagcaagaatcaacttagatacttttgcagaaaaaagcttactaaagtgagtccttactttcaatattttaatgctagattaaatattaatagactctgtttgcatctggtctaatttcaccatcttatcaatgcaacatcatttttattcatgaggttcacatcctgacttaggttgcaggtcagtgatcaagtctccactctccggggatataacggcgatccgaatcgatttactcagctgaggatctctaaccacacgacatatgtagcacttaacccttgcatatgtcaaccgttcccacagatcctccacaacgtgaaccggtccgcgctacccgggagcacagtactcctccatcc

SEQ ID NO: 43415 - DNA, 1622 bp, Zea Mays
tccatcaccgtccccacgttctcctccctccgcctctcgctctgcgcacatccccatgcccacgccgagcgcttgcgcctcaccacccccgtcgcagccgcggccgtggcggcgtcgacgacctcccccgactttcccgccgtgggcgccgtcctggggaagcccacagtgctcgtgggtagtggccgagaagatcggagccgcggggttcatgctgaaggaggtggtgcgatgtccagctcccaggtcgtcgtcctcacgctcctggagttttggtcagtgagatgttcgtcttcgtgctcagcctcgtcctcgagtcgtcgcgcaaacagcgagagcagcgtgggtctcatcatcaggatcacaccaacagggacggagatctgtcgtcgaagaccacctgactgtttctcatggcaggcttgcttgcactagcttggcacaataagccacttcaggcttcagtcggttatgtgatcaccggaacattatgggctctagagtaggacttttgaggtattttgatgccaaaatttttagacatgccatcattgaagttgctccggtctttacaagatttacagagcttcaactaagtcaacttgttgagtcgcttgttacatatcttttgcatatgggaaaatagtagataagaaatgctaggcgatggtgcatgcatgatgaagctgctgtccattatattgacatgattgatcagaccacgcttggtcaccggatgatcaagaaacaattcaacaagactccaagagctggctggcaaatcgattgcttggaacagagcttggcttcgattctttgcattttgcaagaatcgattaccaagataagaaaaggcgtaaagctggcaaaggcttgaggttatatggcgtggctcaagaactttcggttcatcttcacagatatttacaaatgtatttcgtgtcgattatagccctccagatggctttggctttgaagttttagatgaaaatatcttgcctgtccagaatcttggttccggaatatggacaaacttatctatcgcgtgaacaaggatgcacgtaaaatagaatttttagtaggtaggaggagttccttagggctgttcacgaccagcttggaagacccaatggcaattgcccagcatcatgatgcggtctcagaatgaaagcattaatggtatatagttggatatttcattcagagaggctcaagtgatagctgcaagtagttctaccttgtgcccagttttcttgttcttttaggtcaatgaaagttcccatttttgtggcgttgcttagatggttggtcctttcctcaaaaaaaaaagatggttggtcctgttgactaccaaaatgacttgaacttttggtgcatggacaaatggactagaagctttcctgtaacgtggcacatcataagatgttggttgattctcctgaaagcagattttattttactttaaccaaaggagaaccaagttggctgtcgtctcccactgtggcactattttttgggttaaaagtataacaccatcgtgagttgaaactcttgagacatagagataaaaaccaataaaactcacatccgacgtgattagcatgaccattactcatcaaaaa

SEQ ID NO: 43416 - DNA, 2814 bp, Zea Mays
cgcgagccactgcacccatccactcgtacgccgcggtgcgccgcagcccgcagcccgcagcccgcagcccgcagcccgcgactccaggcatccacaaaaaaccatctcccccgcggccccggcaccgcacgctcccgacccggcgagtcccactcccacctaagctgagcggccatggcgcggcacctcgcgccttcgtctggaagcctccaccgtctcctcgcgtcctgccactacccgcccacctcccaggcgccgcctccccgtccgctcctcctcccgaagacccgatcggcggctatgcagctcccgcgacgcgggcggcgcgacgtcgtcgccgctgcagctgcctccgcaccgtccccctcttctccgggtaccgaggtggcagtctggggtaaggtctccgccgtgctcttcgatatggatggcgttctctgcaacagcgaggagccctcgcgacaggccggcgtcgacgtcttcgctgagatgggagtcgaggtcgccgtggatgactttgtccccttcatgggcactggtgaggccaatttccttggaggtgtcgcaagagctaaaggagtgaaagatttcaatcctgaaagtgccaagaagagattttttgagatatatcttgacaagtacgcaaagccaaattctggcatcggattccctggggctctggagctcatcttggagtgcaaaaattctggtcttaaggttgccgttgcatccagtgccgacaggattaaggtggatgccaatctggctgctgctggtttgtccgtgtttctatttgatgctattgtttctgctgatgcgtttgaaaaattgaagcccgctccggatatattcctggcagcatcaaagagcttaggtgtcgacacaaatgagtgcattgtgatagaagacgcgcttgctggtgttcaagctgctaatgctgcagaaatgagatgtatcgctgtgacaactactctagaggaaatagcgttacgacaaggcagtccctcgttcatacgaaagaatattggagacatttcaattaacgacattttgtatggtggttctaatgctcgccacaatgaaggggcaggaagtactgagaatagtagttcggtagggaatgctttgtctgagagtctaaacggagcaactgctgctggacattctgacacaaaaggttttccaatctcaaaaaataaagggctgttgggttctcgacgcgaaatattgagatatggaagtctgggaatagccttgtcctgcctttttgttgcagtcagaaattggaaggcaatgcagttcgcatctcccaaaggcctactgaattttctcatgggtggaaatagttcagtttttgccagaaatgaaggggttctgccacatatgttcctgagtttccaagaaagcttgactggttgaatacagccccacttcagtttggaagagtaatttagaactcatcttaggttattatcgtagctgcaactttgctacagtattaattgcatgccctttgttctggatttaaactagaagatcttgcatgcatctctatcaccctattctatggggcagccagattgtaattaacatgatccaaaagtttcagtcttctagcatctgcaaagaaatttcagttactgttggtgcttttgtggtccggaagctccattcttgatgttaaacttctgatgcatatacatttttcatgaatatatacatgatttgaaaggaagagtggtgctgctggatttttggacatattgctgcattaactgcatgcatgttttgccagacctggattttgtagagaagaagtataaagaaaaacctttcactgttgttggtgtgcactctgccaaattcgataatgaaaaggaccttgaagctatacgtaatgctgttctgcgctacaacattactcacccggttgtaaatgatggtgacatgtacttgtggagagaactgggggtgaactcttggcctacatttgttcttattggacccaacggaaaggttctagcacagatatcaggtgaaggtcatagaaaggatctggatgaagtaattggtgcagcactggaattttatgaagagaagaaactattacaaaatgacccccttcccttggcattggaaaaagacaaggatagtcgtttactaacttcgcctctcaaatttcctgggaaacttgctgttgatgtgcaaaacaatcgattattcatatcagacagtaatcataatcgaattgtggtgaccaacttggaagggcagttcatataccaagttgggagttctgaggaaggattgcttgatggcccatttgatgctgccctatttaaccgccctcaaggtattgcttacaattcaaaaaggaatatcttatacgttgcagacactgagaaccacgctctgcgagaaattaattttgtggacgagactgtgagaacactagctggaaatgggacgaaaggatctgattacagaggaggaggacaaggaacaaaccaggtcctaaattcaccatgggatgtatgctacgatcccgcagaggaggccgtgtatattgcaatggctgggcaacaccagatctggaagcacaatttacatgatggaataaccaaagttattagcggtgatggctatgagaggaatctgaatggctcaagcgccaccagcacatcgtttgcacagccttctgggatttcattagcttttgaaatgcatgagttacttgttgctgatagtgaaagtagttccattcgagttgttaatctgaagacaggaggctcaagattgctggctggaggagat

SEQ ID NO: 43417 - DNA, 655 bp, Zea Mays
attcctcctagattaattagcacaaagcccccaagttgggtaaaaccacacagattcagacttagttattacactaagtctgaatccccaacacctgacattccaactttgagtacacttaactccactttttatgcagaaccatacaaatatcaaaataaggaacttacttaccaacataagctctccaagtttactatagaaactatagtctaaaaccactcagatcaatcacaaaatggctccaaacaaggcatccttcactgaacttcagatttcagcagctgaataaaaatgcagtcagtgcaaacctgtcagctgattttggaaccaactttactccactttttatacaggaccaagccaaacttacttaagaagacttgttcaacatcatatgggcttcacttactctataaacactgtagcccaaagcttcatggattggccacaaacaagctccaaaaacaacccaaatactgaaatttcagacttaacctactgttctcaatctgaaaatgcagaaacctggcagcccgactttggatccctttttctcataaattcatatagttttaaggctagaatacttaataaaagttgttctgctatagttactctacaagtttgttatagcaactgtttccaaaatact

SEQ ID NO: 43418 - DNA, 1698 bp, Zea Mays
tgtttcatattttagagtctttggtagcaaatgttttattcttgttaaaagaggtagaaaatctaaatttgctcctaagactgtataaggctttttactaggatatgatttaaacacaagggcatatagagtctttaacaagtcctcaggacaagttgaagtttcttgtgacattgcgtttgatgagactaacggctcccaagcagagcaagttgatcttaatgagctaggtgatgaagaggctccgtgcgtcgagctaaggaacatgtccattggggatgtgtgtcctaaggaatccgaagagccttcacaagcacaagatcaaccatccttctccacacaagcatctccacccactctaaatggggatgaggctcaagatgatgaaggagaagatcaaggagatgagccacctcaagatgacggcaatgatcaagggagagatgcaaatgatcaagacaaggaggatgaagaaccaaaaagactgccacacccaagagtccaccaagcaatccaaggagatcaccctgtcgacaccatcctcggcgacattcataagggggtaaccactagatctcgtgttgcacatttttgtgaacattactcttttgtttcctatattgagccacatagggtagaggaagcactgcaagattcggattgggtgatggcgatgcaagaggagctcaacaatttcactaggaacgaggtatggcatttagttccacgtcctaatcaaaatgttgtaggaaccaagtgggtcttccgcaacaagcaagatgagcatggtgtggtgacaaggaacaaagcccgacttgtagccaaggggtattcacaagtcgaacgtttggatttcggtgaaacctatgcacccgtagctaggcttgagtcaattcgcatattacttgcctatgctacttatcatggctttaagctttaccaaatggatgtgaaaagtgccttcctcaatggaccaatcaaggaagaggtctatgttgagcaacctcccggctttgaagatagtgagtaccctaaccatgtatattaactctctaaggcgctctatgggctcaagcaagccctaagagcatggtatgaatgcctaagagatttccttatcactaatggcttcaaagttggaaaggccgatcctactttatttactaaaactcttgacaatgatttgtttgtatgccaaatttatgttgatgatattatatttgggtctactaacgaatctacatgtgaggaatttagtaggatcatgataaagaaattcgagatgtctatgatgggggagttgaagtacttcttgggatttcaagtgaagcaactccaggaaggcacctttattagccaaacaaagtacattcaagacattctaaacaagtttggaatgaaggatgccaagcccatcaagacacccatgggaaccaatgggcatctcgacctcgacacgggaggtaaatccgtagatcaaaaggtataacggtcgatgataggttctttactctatttatgtgcatctcgaccggacattatgctttccgcatgcatgtgtgcaagattccaagccgaccctaaggaagctcaccttacggccgtaaaacgaatcttgagatatttagttcatactcctaagtttgggctttggtacactcggggatccatatttgatttaattggttattcggatgc

SEQ ID NO: 43419 - DNA, 1468 bp, Zea Mays
ggcctcggcgcaacggcccttcccgcgcgactgcacttgcacacgcggcggagaaatgaaagcgccagcggctagtggataagctaagctctccctctcgctgagccggctgttgctctccccacaaccccgcgcgcgggggagcgataaaccctagtcttcgccgtcgtcgcaggaggacccgcgatgtcgcacttcgggaggtcaggcccgccggacatccgcgacaccttctcgctcctcgtcctcaacatcagcttccgcaccacggccgacgacctcttcccgctcttcgagcgctacggcaaggtcgtcgacgtcttcatcccgagggaccggaggaccggggactcgaggggtttcgcgttcgtgcggtacaagtacgccgacgaggcgcagaaggctatagatcggctcgatggccgtgatgtggatgggagaaacatcatggtgcagtttgcaaagtacggccccaatgctgagccaatccgcaaaggaagggttaaagagggggttgagaaatcacaagacagatcaagaagccgcagtccaaggccaaggcacagagatagagatcatagaagccaaagtcgcagcaggagcagagaaaggcatgtccgtgatagagacaggggctatcgtcgtcggagcagaagtagaagccgaagtcttagttcaagccctgacaacagaagtcatcatagagcaagagatgatgataagcgcaagagcatgagtaagagcaggagcaggagcaggagcacaagtagaagccgctcatactatagtgcttcacctgcccggcacagtgctagccctcgcaagagcccaccgccacagaggagccccactcctgcaaagcatgccaatggaaaagtagcacctctgtcacgctgtgtttctccattaccgaagcgtgcaacctcccgcagcccaggcagtgatggcaagaaaacagccttctcacggagtcacgggattgcagaaccttgagaaggttgattgagcacaatggaagtagcagtctgcaatcaaccgcgatccaagaacggtattgcacgggaccaactatggtggatgatgtcttgctgtcattggtgttgatatggcaatggtgcagctgatgtgacgatgcagatgccgatgctgctgacagtgaccatcttgtttgcacaatgatcccttacaagttatgttggttcttatccccccttctcgcagatgcttttgcatcagtgctagttggaacatggtgttgaggggttaattatgacgggcatgggtcctgtttatcatgtggtggtgttgagtgactccttttgctatctgtggccctagctttattcattatttgaagcaaccattaataaaatccatgaactcaattattaatttgttagccgaaacgctatatacaggtgacgttgtagtcgtaagcatgtagcaatgtattgactttttggtgatt

SEQ ID NO: 43420 - DNA, 370 bp, Zea Mays
gctttcctgaataacactaggttagtgtttgttagacgatgtccacttgacgatcatcctttgtcttggtactcgttcaattatccatcttcagattcgtccatcagcatcattatgcggagtagcccgcgcttggggtcgacttggctcgtcttccatatcacgtgattatttatcgtacctcatgagatgcacgatgcacatgtatgagcacgagtataacgaggataatatagataatctacactaaaagaatgaaacacttaaaaccaagcattaagcatcatggatatcacagcagggcatcgactacatccattaaccaaattgacataataacactagaaattctattttcattcctagcttt

SEQ ID NO: 43421 - DNA, 1123 bp, Zea Mays
agagggaccgtctcctctcctgcacccagactcctctctctctctctctctctctcccctctgtgtgcggtgtgccctggcctcctccgccgccattgcagcgagcaagatcaatccctctgctgccattcatgagtcaagctggggcattccctcctgggaagaagatcacggtggtgtttgtcataggcggcccaggcagtggcaagggcacccagtgctccaagattgtcagacactttggattcacccacctgagcgctggcgacctcctgcgccaacaagttcagtcagatactgaacacggtgccatgatcaagaacctgatgcacgaagggaagctcgtgccgtccgacatcatcgtcaggctcctgctcacggccatgctccagagcggaaacgacaggttcctcgtcgacggattccctcgaaacgaggagaaccgccgagcgtacgagagcgttattggcattgagcctgagttggtgctgttcatcgactgcccaagggaggagctggagcggcgcatcctgcaccgcgatcagggaagagacgacgacaacgtcgacactataaggaagcggtttcaggttttccacgactccactctacctgttgttctgtactacgacagaatggggaaggtagatggcgccaaatccgctgatgcagtctttgacgatgtgaaggctatatttactcagctactgaccactcaggcaagccaaggtggcaatgcgagcagcaggcggagcaatccgccgctttgttcagtgctctaggatgaagcaacatacctccagctccaaataaaaaaaagaggatttcagaaaacacacacttgctgtgcgtatgtggtgtgttcgtgctgtgctgtgctgtgctgtgcagatttaatggcttgttaaaaagaaacagagaataatggccctccccagctgcagctggtatggttgttcgctcagtggcagcactagaggctgcgagcctgctgcaaacacacagcttgtatttctaattgtaaaatgtagcgaaatggatgaatgtgatgtgtgcaactcattcagtttgctttgctgcatctcatctgatgatgcttgtgatggctttcttccgcaaagct

SEQ ID NO: 43422 - DNA, 2733 bp, Zea Mays
aagattctcgctacagagacgaccatgtgaaagaatttaaatctagagtacaacgtgaaggaatggcgttgccgtcggccaccgtgctgtggacggccagcatcaccttccggcttgcacagaacatggtggtgttgttcttcctggcggcgctactggcggccccggcgcgttcgtcgtcgccgtcgtccaacaacggcgccggtcttcagcagcccaccctgaccctctgctccggtcactccactgtcgccaagagcggcgagttcgccagcttcctcgcagccgtgtgcgccggagcctacggcggcggcgtcgcccacatgtcccacagcatgtcctcgtacgtcgccgccgagaaccggaccatgtacggggtcgcgcagtgccgccccgacgtgtcggcctccgactgtactgcctgcctcgctgcagcctcgtccaagctcatcaccgggaccgcgtgcgcgacgtcggcggtctggcacgacgcctgcttcctccggtactcggaccgcgacaccggccggttccgcgaggacgaacacacggagaccgtgttcaacgcgagccgcgcgctgtcgtcgttgccgccccacgttggcgccaacaaagcggtggtggtgaggcgcctacttgccgccgtcgcggacagcacgaggagcggccacatgtgcagcgacatcggtgtcggcactggtgcggcaggcggcggccggatctacggactcacgcggtgcgccgccgagatctcgtgcgcagactgccgccgctgcctcggcggcgctctcgcggtggtagagcgcgagtacaacggcagcgcggggatgcaggtcctgcggctcagctgcatggccaggtacgagagctaccccttctacaacaccaagttcttgacccggcgattgctggcgtcggcgacgagcgggagcccccggccgactcatggaggaatcgtctttaactcttctatatcttttgggccttttgggctcgtgcactctggcggtcctaacccaccgccttcaccgccagtatcacctccaccaccagcattcacgaccatctccgtgcctgctagtgtgggcactgcacaacccaccccaccgccttcacggcctgcacaagcacagccatcaccacctccaccagcagcatccatgatcgtctccgggcctgcgactgcgactccgagggctgcacaagcacaacccaccccagcgcccccaggcggtcataacccaccgcctgcatcacctccaccagcatccatcatgaacatctccgggcctgcgactgcgactccgactccgagggctgcacaacccaccccagcgcctcctggcggtcctaccccacagcctgtagctgccgcaacgaatgaaaacaaagggaagggaacattgaatacaccaaaatggcagatcgtctctattgcaactgggttggtggctgctttcatcatcctcgcactcaccgtatggtgccgtcggaaacagcaactgtctcagagagaacatgtcatagaaccccatgttttgaatcatcaagcagatggagtgccaggtgagactatgcatcacctagaaaagaaacatttgggctccgaagaagacgacgacggaggaagaacaagctgccaactctacagctacctggttcttgaggctgctacatgtcgcttctcaagtagaaacaagctagggagcggtggatttggaacggtatacaagggcacgcttgagaatgggaaggacgtagcagtgaaaaggctcagggactccaagagggcgatacaagaactagagagggagatctccatcgtggctagcttgcgccataagaacatcgtgaggtttttagggtactgcttccaagaggaagggaggttcttcatctacgagtatgtgcttaacaacagccttgataaattttggtacaaagcatcttctcaatgccagaagctagagtgggctacatggttcaacatcatcttaggggttgctcgcggccttctgtttctccatgacatggggatcattcatcgggacctcaagccacacaatatacttcttgaccgtaacttcaacccaaagatcgctgatttcgatctcatgaggatgtatgatcaacagaaaactcacgagagcactgagaaggtcgctggaacatttgggtacatggctccagagtgcacgtccggacgaaaattcctactttcgatcaagtctgacgtgtacagctacggggtgttagtgctggagatcatcaccggccacaagatctacactttcgaaggccaaaactctgaaggcctcgtcgaatacgcccttggcatcccttccctgaatcgaattgaattcagagctggtgtggcagcactggtccactggatagagaagagagcgagcgacgtcatggatgctgacttaggtgtggaagggcatgagcacgcgccacggcaagcgctgcggtgcgtgcacgtcgcgcttctctgcgtgcagtctgaccggtcgaggcggccaaccatggggcaggtcatcgccatgcttagcagtggcgacgacgggacagatgacctgccggagccatctctgcccgggtacgtcctccgtccaatggcggcgtcaggtgtccagctatgctttgggtgcaggtagcgccgcttgatgacgtacgacggtccatggccagtacaaacatagaaaacacgatttttactgagagctatag

SEQ ID NO: 43423 - DNA, 1312 bp, Zea Mays
cgattttgaatcgacgttgcctgtgtgctgctgcaacagttgacgagcgataaaaaatagagaacatgacagctgcctctagagagttccagggatatctctctccatccgtcgggtgtcccttcctctcccagttctttctcgctttttctcctctctgcttttctttgttaccgtcggtgtcgggaattccgcttccgcacaaatatttcttttgctgtcagcttgctcaacggttctgtttgtttggcgcatacctactacaacaggttgcaaaacaatgacctccaactaatacaacccacaacagctgaagaagaaattcagctttctcaaccaccaaatttggaagacaagaccgttgaaaagctgctcaacatagatccggatatgtttcccgcagaaggctatagatgtattgttactatatcacgcatcgtgcaaaatagcagatggtggtacccatcttgctccaggtgccacaaatcttcatctcaaatctcaactggatatcactgcacatcatgtggctgcacaaatattaagtttagatacaagctcagcttcattgctactgatggaacatgcgaagcagagttcttttttttgatagcatagccagaaaaatagtaggagaaccttagggcaaccttgttacagcagttacaacttctgagagtcccagcagccctagccgctattgtgtgtctgaaatttactcttgcagttgccatcaatatgtcagcctactatgtcatgaacagagtattctctattctatctattttaacaaatcatggaagacagaccttcataccatctaacatgcctagccatcctcaacaagagttgtatacacaagatgaagtacctagccttccggtcggccacacaagactctccagcaacatcaatggcaaaactatctacctgtagcaacgaaagaaacgaggcacgatgacgtgttctaatatattcagatatgccacatgacacagagggtgatgacagcgcataagtgaactcaacaagcaagagatatcgtcaccaccaaaatggtgtttgctttttgcgcacctatcaggagcaccatcacttttggatcatgaatgctttcctatagatatgaacctactgttatactatttgtggatatgtacatattgacttaacacctgcaagcacattgttgctaagtgttgatgtatggtagttgaatgctacttagtatgtattgtagtctaaatccactctacagctggtatcaactattatataaaaacaacgtcatatgcttatatttggtttcctc

SEQ ID NO: 43424 - DNA, 471 bp, Zea Mays
ctcaaaccagggtgttcagctgcttacattattggagcacttgtttcatgatgtaccagggcgagaagatctgcctcaacatgcacttctagctgttgtgggtcaagaactgtccgaggtgcagcctcacgcacacgttgtgccttggcctcacgcagtggctggcgtaggaggcccgattctggtggacttgggcatggagaaacacaactgcacaatgatgatgaggtggctccgaccaaggcttctgcctctactgctcctgatttgtatggtaaaccaagaacctgcgatttttacaaccacaatcctcgattatactacatggaaagctagatgagtgaccaaatattgaaaaggttgaggctgctacgaccaaatattgaaaaagacgaggttgtacaagagatgaggtgccaaacaaaactgctaaactatgtgaccaagctgtgcagaggatggccccaagat

SEQ ID NO: 43425 - DNA, 2642 bp, Zea Mays
ttcgtccccaattctctgcctccgccgccaggacgacggcaaatccgcccacgcaaaatatcagcccaagtgcccatcgcccaagcttcctagctcacccgccgccacccactagccaaattccccatccctctcctgccgccacccatcagccacatctctccctcctactccctctccggcagccatcatcagacaagatccctcccccaccatcgagccatgtcgagtcgagtgcatcttctgcaagcacggccatcttacgaaaccctagctggctcgaaggaccactactgtccggcgccctgaacaacttggcatgatgccgacgaagggtggagcaaacaaatcacaatgacatcgggtagtagatccaccattgcatccctatgaagaggagcgccttagacaatgtatgaggaacaattcgaggttgcaacaacttggaattcctgctttagtcagcatgtgtgggaacataaattccatctctaggaacaaaaagccaaataacagggataatgaagattctgaatctgagtatgatccttcacatgacgattctattgaaggggatttgtttgaccatgatgatcataataagaagggctcaaaggacactaacagaagaactattcacatggctcctggtggaatcaagcctcgaactaagagagtttatgcagagcaacatactactagaaatacaaggtcaaagaaaagcattgctcagcctgacacaagtctaacacgaagtgacatctatgtgccaccaccctcgctatctcatttgacccaagttggagaagttgctcgtagcattgaaaaccatagaaagactagtgttgaagctaatggccctacccaggttgacaacacccacatggccaatcgagatggctttgaccaatttgatgacaacatgaccaaccaaggggaaggcattacccagcctggtggaaaaggtgatggtatatttctatatttaccatattgcatattacatcactagttgcttgctaaacctatcatgtgtcattagtttctactttactggatgttcttttgaccttttcaattagattcatgtgccatgtgtcattagcttgtcaatagtccattggatgatcatctttgatccatgtttgatgcacctcacttattgcaatttctatgtgaatctaaaactaggagtaaatcagcatagagaaaggggacttaatatgggacttggtctccaaaggatgaaccgagctcggcgtggcaaactgccaattgtcattactgaaggaaggataaggcctgtggcaccaattgttgctgcaaagtttgcaactgagtgcaacattgcagttcggaatcatgtgcttgtgcttaagtcatggaaggaatacgagaagcatcctgggctctttaaattgtttacagcaaaacttagtgcaaagtttgatatcaatacagaagatgcgctagttaaaaatgcttgtttccaaatgatgaggaatgcactgcgccaacaacgatataagctgaagaaacaatattttgacccttttccgctacatctagtgaggaaaacatctcctatcaaatcgacaagtgatgaacaatggaatgaccttgtggaacattggaaaggtccaaaaaatatggcgacatgtgaacataacaaaggcaaccgaggcaaagttaagttccatcaaacaactggatctcgtagctatatggttcatgtagaaaatttgggggacaagtacatggatcaagaacctgatgcattggatctgttcaaggagtgccactacagtaagaaaaagcaaggctacacttccactgtacaactggctattactcaaatggaagacaagcgatctacaccaggagaaggtgaacaaccaatgtctacgactcaggttgtagctgatgtgcttgctgagaacacaaagaagaatcggtttcttcaaaatgtgggaatccaaaatgcacgacctagatctagtgtacaaaatattgaagcacaacttgaagtagagaggaaggcaaatgcagagcttcaatcacttgtcagcatccaacgtgagcgcatggatgtattattaaagcaagtgcatgaagcagaactggtaaggattagagagcaagaagagatgaagaagaagcaagatgccatggatgctcaacttgagcttatgctaagtcagattcaaccaagttaaagctaactagtatggggtgttaggctttgttggtacttctcttttgctgatgctattgcattctattgatggataaatacgtttcaatccattttttgtctattgtgctgctagagtagctttagcggcatgtgtggtgtgttggagtggcttacgtgtcagtggttggatacttgctgtaatgacatgctattggatacttgcatgtaatgacatgctggagtgtggtcagtattttttgtgatgagatgctggattaaaatctgagttgtgatgtaatagaattcaacattttgtcattatgttctggattataattaatatatatttaaattattgtgtttgcaaaagctgcgaagctgtccatgggctagaatgttaattgtaatgggctgaaacaaaatgggcaaaaattgcaataaaaag

SEQ ID NO: 43426 - DNA, 345 bp, Zea Mays
tcctccaatacttgattagtccttttagtctgtccatcagtctgagggtgataggttgaactaaaattcaactttgtatccatattctcatgaaaacttttccaaaatctggaggtaaactatgatcctctatccaaaatgatcttctttggtgccccgtgtagagacacaatccgagccatatctaactctgccaattaagataccttttaagtagtcttgaccggaatgaaatgagccaatttagtcaatctaacaacccatatatagtcatatcctttctgggtgcaaggcaatccagtaatgaaatccgtatcaatctcttcccacttccaatcgagtatc

SEQ ID NO: 43427 - DNA, 1281 bp, Zea Mays
cttcaattggcagcagcagtatagttttatactaaccttttcgatccacacaaatatttcggcataaatcaaatttaaaataaaaaagatcttaaacatttcgtgtccctttgtttcctccccagctgagcctgcgcctgtactctgatgggccagcccactaaccgttcagcggcagagcccgttatttcgccacttcagcgccccacacttgcgccgcagcagtagaaggtagaacaccttcttgacccgaattcaatccgtgcgcacgcaccctccgccggcgacggctcacgcatcgctcggcgcccgccccgcgtccccgaggcgacgaccggcagagcgcgctctcgcggcgctacccgacacctgcgacgaaacgccccgagtccactagtcgaggagtgcgtcgacgcaggggctcgggaacgcggtgtcgccatcgcggagccctagcgagatcgtcgggaaggtccgaaggcgagcacgtgtttgtgtaacctttctccccttcttccctttgccggccggcccttcagcggcgacaagtgcccaccaggcggtggtttacgttgagctgaggagtgaggaagatgtctggaaatccagtcggcgtcgacaacacttctaggaggaaatttgacaaggaagagtacttggagagagctcgacagagggagcagagggagaaggatgaagctcggaaaggcaaggaaaggggtcctcctgtgcaaagacagcctttgaaacacagggactatgaagttgatcttgattctcgtcttggcaagactcaggtggtgaccccgattgcaccattgaatcagcaggtttgtgcataaattccatagggcatgtttgtagcgtttaaattgatttagatttattttcatcatatcttaattcttgacaagaaattgctagagtgtagttgctttgctccgtccatattaaacacagatcttagtcgaagatgtttctgtgtattacctcttattcttttctcatgttgtaggcttaatttcatctttttgcagttcattattattaatttcagtctacttgttcctacatgcatttcataccagtgctatttacaacttaagtgtttctacaaaaatgaacctcttactttgatgatcaattcaacacaaaagtttcctcccaactttatgtactttctgacaggctggatactactgttctgtatgtgaatgtgttgtcaaagattcagccaactatttggatcatataaatggcaagaagcttttaacatttgtc

SEQ ID NO: 43428 - DNA, 723 bp, Zea Mays
gtcagaatgacgaagaactcgatggctgtccacatggaaaacattctgtcgccaggcaaccagaatcccacctctcgtatctagagcaggaagtgcacgctttaaataagcttccatattctaagctagactctaaaacctttgggatcacagatggagttgtttttgtaacttatagcagcttgatagcatcctctgagaaccgttcccgtttgcaacagttggtacagtggtgcgggtctgagtttgatggtcttctggtgttcgacgagtgccacaaggccaaaaatctgattcctgaggcagggagccagcccacccgcactggtaaagctgttcttgagattcaggatatgttacctcaagcacgggttgtttattgttcagcgactggtgcatctgagcctcgaaatttaggttatatggttcggcttggtctctggggagatggaacatcgtttgagaatttcaaccaatttttaggtgctcttgagaaaggaggtgtgggtgctcttgaacttgttgctatggacatgaaagccaggggaatgtatgtttgccgtactctaagttacaagggtgctaactttgatatcctagaatcacttctggaggaaagaatgatggatatttttgttagtatgattgctcattgacatgaagtagtattcttttaaatttaattaacttggcgagaacaaagtggtagaaactgaaaggaga

SEQ ID NO: 43429 - DNA, 459 bp, Zea Mays
ctgacgccccttatgtcgggggcctcaacatgcatcgggccaaagtgtcttgatgccctcaagacactatggctgacttttctgtgaatggagtggactcccttcagaaaatcaggtttactaatcctaccatcttccccagacaccctggagtccttgacccatggttttggaatctttttcaagttgacttttacaattctatcatcattacaaagaagcacccagtagtccaccacagggtgattgactgggaaggctgtgagaggatgcatgataatgacatgactcaggctctcaggatatttgagcgtaaggggctaaagaacatcatgactttagaatactcctggaacaacgaggtagtggctcagttttatgccacactctggataaagaaggttgatgaagaagctgatgggtatgactacccggtcatgtacttctacatctagggtg

SEQ ID NO: 43430 - DNA, 1701 bp, Zea Mays
acccaattgagatgcactatgcacatgaatgcatataaacaagaatagcacaaatctaaatagtgctatacgatagcgtattaaacacctagtggcgaggcgttgtacaattttgtacggaaacactagttattaatatatgactacactcaataattacgcttctctagataaaccgaacctaacgcgaacatcacaaaacaacaaattatacacctttaatacaattagcctaaccacaacttatcagttaattaattgaattctaaacttatccctcgttttatgaattattctacatcgctcacaaaaaaactattttaattttattttactactcacatgtttttcatgtcaacaattactcaaacatttctttatcacacatgcctactaatattctacttggtacattaattcagctaattaaccaaaatagcgaaataactcgctataactgaacctggctcgataatcgcaagaactgcgaagtcgacgagagtttcgtgacttacgcaatttatcgagcaccctaatgagcctcgcactaacatattaatttattcaactatcgaactatactgaataatttatcagcttaccgtttccacagccaacatgaatccacgatatcggtagcgattttccgattgagacaatttgtcgagcgcttgaggaatattgcgccgctagcttcgtcttcacccgattcttgggatttcttggggatgcacgaacgacgacgaccttcgattgaagtctggggtaagctggtgaggtggagatcgagccggggatgacgtgtttgacgactcgacggcaaacgacgagatcgacgacacgattgggaattaaagccgagcgagccgagaggacacgctggcgagcagaaaaccgcgcgagcaccggatagggaaaacgacgatgctgtcgcacacagtgcgaaggcgaacgacgcaacgacgaggacctaagatgtgcgacacacgacacgcagtcagcctgtcgcgcgaccgagcgacgacgacaacagccgagtgcggtaaggggctggaaaacgacgacgggccaaacagaggacggaccaaacagaggagctcgcgtaggacaaactcggcacgacggccatggacgaggtgagcgagcttagcacgacagaggactcggcgcgcggcaggaaaagggctcgagcacgaacacggcaggcgagcagaggggctgggcagagggatcttctttgaccagagccgagcgacgcagtccaagctgaggcaggggcgagctccatggcgagctcgagggagatgaagaaagggggcgattgggcagggagatgcgcacgcggtgatgggaacagggagcgcgctgagccgggtccaagcaccagggagctgctcgcggccggagctgagcagagggacacgcgccagagctaggagctgagcgtcggccacagagaaatacagggggcgcgcgacgaacttgagaaaggctggagaacgagctgggaaggtgggcgcgctggaagagtagaagccagggagaatcgacggcggccgcagagaccaaaggcgcacgcgatttttatcccgcgatggctgaaaaaatcaacagggcggcgggattctcttccacgagcttgagcggtgcaggggataagccccacgacagcggataggatcacggggaagagagaacgcc

SEQ ID NO: 43431 - DNA, 3537 bp, Zea Mays
cgcgccagcaagcccacagtccccgccgcacacgccgcgatgatcctggaaagcggcatgtacgagcaggccggggagctccagatcctgttggagtacatggaccaggggtcgctcgagagccaccgcatcgcgtggcgcgccaggtgctgtcgggcatcgcctacctccaccgccgccgcatcgtctacctccaccgcgacatcaagccctccaacctgctcatcgactccgggcgtcgcgtcaagatcgccgacttcagcgtcagccacatcctgaactagaccatggacccctgcaactcctccgtgggcaccatcgcgtacatgagccccgagcgcatcaacaccgacctcaacgacgggtacgccggcgacatctggagcttcggcctcagcatcctcgagttctacctgggccgcttcctgctgtgcgagaacctggggaagcagggcgactggccgcgctcatgttcgccatctgctactccgactcgtcgcaggcgccgtgcaacgcctcgtaataagccatctgctcaagtgagaatagatgttgtggttggaaaggatcgtctattagacgtttccatgcataagataagtgttgcagctatacaaactggttttggttttgagagatttcaggctatgtcttattcagcagttatgaaagctaacaagcaattcactattatgttattattggttaaactggacccttcaggtgatttctgtgtagccctaacattaaagctcccagtttatgcaggctgcagctttgaatttgtaatacctttgcagttactattaagttagcatggacaatagaaggtggaaatcatttccttagctcctgttagtgtccatgaacataagttacccatggtctgagatgttacatcctcctgagctattttctcttgttgtgtacttctgttagtgtccctggcactatatcattcatttggagattttcaatcagctgtatagctatgtaaaattggttgcattttaggtgatttgtgggaattaaattgcaatgtaccagaaatcgatcttaatttatgcaatagattatatgggaaaaatcataccatggattggatgtaggctgaaaccagttacttcatctaggctaaaattgttggttctgtacaaaaggtagtctaattaggctttgatatccgaattaaatgtttatcacctacttttagaaaaaagttagtcatcttcacgatccagttgatacatattcacaaatttgtacatgagtaacaggcaacaacttttctcaatttatccagaaaatgacttatttttaggggcctggtgtatatctctatcctattattttattctcagcacattcacattcacaactagctcaacacattcacattctcagataccgatctactggacatcatcaactcagagatcaagtacgcccgaggactcaggactgcgatgaccacgacacggtaatggagcagatcccctatctattgtgtgtgtatctattttcacaatattagagtaacaaaccaatccttgtttcttgtgtagattcagtcacgctagagagtgtatttggtctgttagttattctgttgcattgctgtgaattagatcctccagaatgttgttgtcatgtttctattttccttgggaagtaatgttgtgtttttatttatggttaattctatacgatcattctacgattgatagggtaatcctgtactcctgtctccactctactcaatgcttgtagttcttttgccctgaggaagagtttgggacatgcatgacattacgatttccatcttcaaattgtgatacttttgacacacataatctggtgttcttaagtgtccttttaattttgatgccttcctttatccagtgactatagtctataacatatacccatcctatatcatatacccatcctataagagtttgggacatgcatgacattcacgagtctcgactacaagctcgagcagattgtcagtgttaaaagacagatttcaatagcgtcgcagattctccgtttgctttctcatgtcttttagttggaaaaaacaaaaattgttagtagtctccgatcttacagtacagggggcttcattcgctcatcattgggcaatccccggtttgcctattagtgctccatgctccatttgttgattagcatgtgccaaaatgaaatgctacaggagagcccccctacaatatcttaactaggcgctgtcctcatcttccaaattactgcatgctgcatgtatgagcgaaaatatccacaaatgattttacaactgtcaaaaaatttcagcagtgaaccgaacaaatctgctggcattcaaatgttttgattcaacatatggcaatatatttgagcctctgattctgctggcaattgattcacgaatgcattttgtttttatttgattcatggccagcaattgggactggatatcgaacattctgctggactcaaatgatatagcttgcactaggttcctcatgttcatttcatttcccccgaacagaatttgtgatgtcacagagtagggatgatgatgatctatatcaaaaaagactaggttcctcatgttcctcatagtcctctccataaagcactagaaagtatactaccattctggcggacttcggctgaacccgaacctgtacgagagcgggaaagtgtgcctgagccttctgaacacctggtggggcaaggggtgcgagaagtggggcaagtcgagctccaccatgctgcaggttctggtctccatccagggcctcgtgctgaatgacaggccatacttcaatgagccaggatacaagaactcggctgaaacgacaggtggtgagaggtgttccttggcttacaatcagacgaccttcgtcagatcatgcaagacgacgctgtattcactccggaagcctccaatgcattttgagacccttgtgttgtggcacttccacgagcatgagcgtgccatcctcgacgcttgcagggcttacatgtctgggacagtcgttgggtcgtctgctgggactgggagcaaccgcagatacgtccatgacaagtgctttgcagaattccacaagtcgctgacgctctacactgaacatctcagggctgagtttgctacaaacagaagacgagtgatggagctagaaacagaagacgagatcgtgcctagcatagcagctagcatgaaatcgtgttgaaggcaaatgccccacagtgttgctctcatcatcagatatttgctgccttagctatttctagcttcattcatgtcaagtgaataatctaattcatgacaattgtacctgtctctatatctaatgaatctgtcctctcttttgaaagtactaagtgtatgcccgtgcgttgctacagaataaacatgttatgatgagatgcagaaacattagttatcgttctatgcttttgttagcatcttctaaaggttaagaatatttacataccttaaaaaatgtatactccgccataaaagcaaac

SEQ ID NO: 43432 - DNA, 1236 bp, Zea Mays
gtggacccgagtcgtccaggccgccatgccagagcgcgcagccagccggcaaagccgtcctccctcactcccgtgtttctcttccccgtccctgtccccttcccctcgaagatgcgtggcggaaccaagcaagctgacgctcctcgccgccaagccactacaccgcagatgaagaggcgcggccgctcaaggtggtcttcggctacccggctaagtatttcattgacacatcgccgatcggggacggccgcctaggtgccatgatctggggctgcgtcgaatctgagaggctccagtgtaaccgagggtgaatctgcttgtgcaataacaggtgtagttaagaaaggtacttatatgtctgatatttgtgtcaattgtcataaagtccacttgttattgaatgttgatcatatggaaaatacagttccacacatgtttgcatttatttccttgcatatgtcattaaagcttctttatttcttgccttcgttaaaggacttcagttgatggatttagtattgtctctgctgctatagcatcactcatttcttttttgttgccaggattaccttctactaggggtgaagacatgcaaattaagtgtttgcttgaaatgtatgggctaaagaagaaagtgcgatctgatatcagtgcagaatattggctacataaggaatgtgcatatcgagagaggcaactttttgatttttgggggctgatgtggatacgacatcctttgtccatgtatggaataggatacatcctttcaatggatgctgatgatgttcaccgcaaaaagagatttacagagaggatgtcaagactcgaagaggaagaaaaaaatcaggcaaatatcaggaagaggaagttctttgcagaaattctaaatgcttctagggagcaacaggtgcaattaggcactacattcaagcaaataaagcagagaaatgatgaagtttagatgagcttctcgaagaaactggaaaagctgagcatgctagttagcatgaagggagtgaagtgccaaaagtagagttggatgaaatactcgcagctcgataactcattcgactcggcttgttttaattttatagctagccaagctagtattctagctcggttctctaatgagccaactcgggttacctcataagctagctcacaagccaaacaagccaagccacagcacaaatttgtctaatcgttggtgttgtctcatctctcatagtcttgtct

SEQ ID NO: 43433 - DNA, 814 bp, Zea Mays
ctgaagcagataagccgtacgccgtccccttgcacagcaaacatccatggcgactgcccgcttgccctctcgctccttcctgtccccggctcagcaatcctatccacggcttcccgcctccgtccgcctctgcctctctcatcacgagcaacctcccaccggccccaagcggcaccgacgcgccgccacttcgcatcctgccttttctgcagccgcgcggggtcgtgccaagaagattcccatcgcggacaccgatgagcccgccgccggagtccgcgtcaccgatcgcggcatctcttaccgcctcgatggcgcgccatttgagtttcagtatagctacactgaggccccacgcgcacgccccgtagcgctccgtgaggccccgttcatgccgttcgggcccgaggccacgccacgcccctggacgggaaggaagccgctgccaaagagccgcaaggagcttccggagtttgactcgttcgtgctgccagcaccggggaagaagggggtgaagcccgtgcagtcaccgggtccgttcctcgccggtatggagccgagataccaatcggtgtccagggaggacatactcggggagcccctaaccaaggaagaggtctccgaactcgtgaaagggagcctcaaatccaaacggcaactcaatatgggcagggatggtttgacacacaatatgttggagaacattcattcacattggaagaggaaaagagtttgcaagataaagtgcaaaggtgtctgtacaatagatatggataatatctgccatcagctagagctggatctccaccttttattg

SEQ ID NO: 43434 - DNA, 4314 bp, Zea Mays
accacggcatccaccattccagctccaggccaggagaaaacgttccgggactgggactgcgttcaccttgctttttcttcccacgctcaccccgcaccgcgtgccctctctggctctctccctctcgtggggacgactgggcgaccgccgccgccgccgccttacgccaggtgcccaggtcttagtcggccccttcgccggcgacgaggacctaccagctgtgaataaggttgtctggaacggccgtgggctctgcggatggcaggttctgtggtaacggatgattcagctgctagcacaactggaatgagggatgatgaaaacagtctctctggcgagtccttctctgagtggaggtcctgtgatagggcagacagcgataccccttcaacatccccacccttctgggatagcgatggtgatgatgatgatcctggcccaaagccttcagaattgtttggacatcacacttggaggattgaaaacttctcaaaggagaagaaaagagaaatgaaaagtgagccatttgaagctggtggttacaaatggtatattcttgtataccctcaaggatgtgatgtctctaatcatctttcattattcctttgcgttgctaatcatgacaaacttctcccaggatggagtcattttgcacagttcactatagctgtagccaatatagatcctaaaaagatgaagtactcaggtgagctgaacttggtttgttttcttcttggaaggttttggaagaaggaacatgattggggatggaaaaagtttatggagctgtcaaagattcaggatggttttcttgttgacgatgttcttgaaatcatagctcaagttcaggtcatcagggagaaagtggatagaccttttcgttgccttgatcgtccttatcggagagaattaatccgcatctatatgacaaatgtggaacaaatctaccgacgtttcgttgaggagcgaagaagtaaattaagcaagctcattgaggacaaaatgaaatggtccagtttccgtgctttctggtcagcaattgacccaaacaccaggcatcacatgtccagggaaaagactgagactatattgaaaattttagtgaagcaattctttgtagagaaagaagttacttccacattagtgatggactctttgtatacaagtctgaaggcacttgaataccggatgaagagcaagaaatgcaaaacaaaattagcagatttggaagaactacctgcgcctatggtccatgttgacatggacatgtttgttttggctgatgatgttatagctttgcttgagagggcagccttagaacccttgccttgtcaacctgtagcccccaaggatgacaaaacttcccaaagccgcatgaaggatggaagttctggcgaggtttacaaagtttctatggagcgtgaggaaagacgcctaactgagcttgctcagaagatactagagacatttgtgctatctcatatatttagcggaattgaagttgcataccaagaagctgttgctttgaaaaggcaagaagagcttattcgtgaagaggaggaggaggctggacttcttgaacatcagatgaaggggaagcgtggtggtggtgcaaatgaaaaggacaagcgtgccaagaaaaagcagaccaagcaaaagaagaacaaccgtaaggctaaagacaaggaaagagatgtgaaatgtgaggttaaaattctggaaaggcttcatgatgaaactgttattgataacagtgatggcttaccagctaaggtggaagtgatagccaaggttgatgccttggaagaaggttcttcagatgggtcagacatgccaaatagaggaaaaaatcagtgtaacaagggcttaagcattagtcttgccaaagaaggtgatggtcttccctccacctctagtgttacaggtggttcaggccgcaatagttctggctgctgcacagctccaaaactggatcaggatactgttctgcttaccttgagagataaacttcgtaagctagggcagcgtctgcaagagaaaaacattgaggggcagaaacttctcaaagctcattttgaagctagggacacaaaagtgaaggtagaagaatcttctgactcatctaattctttggataggccacctgatgttccagagagctcgatgcattcttcagaagatacagttgatcttaaagttaatggaacaccaaataaggatgcctctgtggtcaaccctgtcctggaggaatctgtttcaggcataccagtcactgcaaagaatgaatccttgccttctgccagaacaaaagaaggcccagtttcaaacaaagataacgcatcaagtttgaaaatgaaaaccatggcatcttgcttgaaattgcatccagctgatgtggataaagatgccccttttccttctaaatcaccacgaatcaatagggctgctccagttccctcgaagttaccttcggctgataaagctactccagttcttccaaaatcatctctgtcagtaaacaaagcagctctggtccgtcccaaatctccagcagttgacaaagcaactccagtttgtcctgaatctccagcagttgacaaagtaactccagttcgtcccagatctccagcagttgacaaagcaactccagttcgttctcaatctccagcagttgacaaagctactcatgtttgccctcaatctccatcagttgacaaggcaactccatccattgacaaagcaactccagttcgcccaaaatctccagccatagataaagtaactccaattcctcccaaatctccaccagttgacaaagcctctccagcaccaccaaaatcactatcaggtgctaaagatgtgcctgttccttcaaggtcgctgcaaattgataggttcattccagcccccccaagattatcgcaagttgataaagctgctctgccttcttcagaacagccacatatatctccagctactaattctgaagcccaaggggcaactacttctaggaaggtcacagccagctcagttttggaggttgctgcagcatcgaggccttcaagtgctcctgtgttacccacaccaagatcaactgcaccagttgcttcacatattcaaacttccacgttgctttcccgctcgatgagtgaggcagctgggagaaggtcagtaaatgatccttccttttctgccccatcttatactccccagacctaccgaaatgcaataattggtaagactggtctggctactacctctgcaaaccttgcatatcagtcctattctctgggtcaagatactgctccttcacagcctctatcagcatatgcatcaagcacagcagtcatgatgcctcctgctggaagatctgatcaatcatcagctaggcatggattcaagtctgggtctggtaagctagaagcacatgacagctggcagcagtggaaaggtgataataatgttgatatgcatctctggagggatcacactacctatcaacaaatgaccaggggtcaagcgtatgaccaatctcggagggacgatacttatcagcaaacatgcagcagaggaacagaaaagttcagcaggcacgcaggactgcaagctaggcagttccaaaccgagacacccgccagccatgtctggcaccaacaacaggggcaagtggcagaagagtttccacaccttgacatcataaacgatttgcttgaggaggaccagatcaacggcagtataccagagtcatttcatcaagattacaatgtgtttggcctgccattttcaccaagaggaaacgtgtcagatatgggaatggcttctgttagaagtcctgctcggttcaattcaaccaagtatgagtatgacggtggattctcgggggcttatgacataaatgcggtcaatgggttgagggaacggcagtttccctcgttggatagttactctaatggcctgtctgacgtgagtgcatcaaagccttggctgaatggctctcccagtccatcggtgatgagccttggggttaacacaaatggataccacccccaggttgcggactaccccagtctgggaaatggggtgaacggagtctccttgtggcgccgccatgctaacgggcgctggtaatgcgaggtgcctgtatacaatcatacagatggaataatgtttgttgtaacaaatggtttcgggcctgagctgatgtgccatgtaattaaaagttttaagttttaaaagggaaagaaagcgatacatgctgcaaaatctgccccgtgatttggttaatttgattgcttttctggttaaactctgttc

SEQ ID NO: 43435 - DNA, 1591 bp, Zea Mays
agagggcgtcgcgatcgcaaccgcccgagcccggccggtcccatcatcgacgccagtgtgcattattacgccccgccatcagccggccggcaactcgacagggaaaaggaagacgcaccgctagagctgagatgtccttcttcttccgcatggcgtcgcggctgcggccgtcgacgccggaggaggtggtgcgctccatcaaggactccttcctcgcgctccacacgcgcacccacgccaaggctctggaagaggtcgagaaaaatatgtcatccttgagattgttgatctttggtgatggagaagtcgaaccaaatgaagagcaggtcctgcaaataacccttgagatttgcaaggaggacgtcatttccctgatcgtccaggatctgccttccttgggctggggagtaagaaaagatctggctatctgctggtgcatcttgcttaggcagaaggtcgatgaaacttattgctgtgtgcagtatcttgaaaatcatctggagcttttagatttccttgttggttgatacatattggaatctggtagctttgagctgttctttgagtatgttgagcttccaaactttgatattgcttcagatgctctgaacaccttcaaggatctgcttaccaagcacgaagttgtagtcgcagagttcttgagttcccactacgagcagttttttgaactctactcaaggctcttgtcatcaactaattatgtaacaagaaggcaggcaatcaagttcctttcagagttcctgctagagactcataactctcaaataatgaagagatacattgtggaagttcgttttttaaatattatgatcaatctactaaaggattcaagcaaaaatatcagaatatgtgccttccatgtttttaaggtatttgttgccaatccgaacaagcctcgatgtatcgttgtagctttgctagacaatcgtagagaagttctgaagctactccacaatcttccttcaagtaaaggcgacgatgaactcgatgaggagaaagacctaatcattcaggaaatccagaagttggcataacacaaaagcatcaagttatcgtttagcaatgcaagactctccttatagaggacatattgccaaggccagaaccatgtatatcacattgcacatgtagccttcaagagttgtatttttggaggttttttcttttcttttggtctcagaaaaccatagcaaagtattctctttttgaaggaattatatacatgattttggtgaccaaggaccgttggattaattgagctagacccataactaatctagcaatgaattaaagaattctaaggaccatgttgaaaatagcaaagcatacttgagaagcttctagatgattggagaagaggatgcatgagtcatggatgccatgatttgtagtgaagtatgtaatctactacttattaagttagcaatagtagcctgcctttttgtgtcctgccattctgcgatctcaggcgtccaattctatcattctacaatctcagctgtccaatcccgcacaccagtttttcgcgcgcagaaaaaaaatcaaactgaaataaagaaaatatgaaaaa

SEQ ID NO: 43436 - DNA, 2400 bp, Zea Mays
cctggtcgaaccagattaccagaagcccgacgcatttcgaagcctgagtgcccaacttcccccctccgcctgcccccgcgccgccccgtgaaatcaatcaatccaccgcagctcctcgccgccacgccggagcggagctacctgtgtggccgcgccgaactgcccgcttcccgctctctcctcattcgtcacctccgtctcgcgtccccgcgcttatcagagaggcaacagccgccgctgcgtgccccgttcgcggagctatactatacggggagaccggggtccccggcggccgccgcccgttcccaagctacccagggcggattggtttctgtgaatctctgaggcggagaaggccaccccagggccgaacacagtccgggaaccgattggggcgccgctcggccgacgatgtcgtcgagcaggttctcgccggcgctgcaggcgtccgacctcaacgacttcatcgccccatcgcaggactgcatcatctccctcaacaagaacacctcctcctcctcccgccgcccccagaacaaacagaaagaaactacagtgagctcaaaacctccagaagaagcagtcaagatttcactaaaagactgtctggcatgcagtggttgtataacatcggcagagacggttatgctggagaagcaaagcttgggtgacttcattgatcgtataaactctgataaagctgttattgtatctgtatctccccagtcaagagcatcactagctgcattctttggtctttctcagtcacaggttctcagaaaactgacttctttgttcaagtcgattggtgtaaaggctgtttttgacacaagctcgagtcgagatctatctcttattgaagcatgcaatgaatttgtttcacggtatcagagaagtcaaccatctagtggccaagaagctggagccaatcttccactgatttcatctgcatgtccgggttggatatgctatgctgaaaagactcttggttcatacatactaccttacatatcatctgtaaagagcccacaacaggcaattggtgcagccattaagcaccatgtggctgagagacttggtctaaagccgtatcatgtatatcatgtcactgtgatgccctgctacgacaagaagctagaggccgtccgggatgatttcactttctcagtagatggtaaagaagttacagaggtggattcagtactaacaactggtgaagtgttagacttgatacagtccaaatcgatcgatttcaagacagtagaggaatcttcattggacagattgttaacaaatgttgatgaggaaggccatctatatggggtttctggaggttctgggggctatgcagaaacaatctttcgctatgtagcacatgtaatttacaagagagaaatagagggtcctcttgacttcagaatcctccgaaattcagattttcgtgaaattacactggaggtggagggcaaacctgttttgaagtttgcactttgttatggattcaggaacctgcagaatgttgttaggaagattaagatgggaaaatgtgaataccacttcattgaagttatggcgtgcccttcaggttgtttgaacgggggaggtcaattaaagcctgttgaaggccaatctgccaaggaacttatccagcaattggagagtgtgtacacacaagatagaatgcaaagaagtatttgcacacagaatatcacccagtggtgaagagtgtggcctcacagttacagaactggtgagaggtttcttgttgcactgggagttcctatgttcttcaagagccaggagggacttgcacacagaacaaacatggcgacctgtccatgctaagcaaatattggtcatacaggaattgaaacttgtcccttttttgcattatagcgaagaagtttttgttagccctataggttttcagctgctttctagttaatgttgtacgctgccaacgggaaacaacctttaaactgcaatgtgtaaaatgaacggagtaggtcttgacgaccttttcattgtttgatactcgtcctttggcgtttttttttttgtctggaagatatgcgagctttgttggttatccatatctgtttttaaatgctcaaagaataaaggaactaaatttctaccctaaaaataatattatgttcttaccagcaaattttttatactataatcctctgcagtcatatttacctcatatcttaaccttatatcaactactttatacttactctgcttttttatttatcgtaatttagtatatttactctgtttttttatttatcgtgatttagtttaaaaagtaactagccgactataaatattcaataattattatattatttttaattctcattcatgcacatgtgcccgctagcttccatataa

SEQ ID NO: 43437 - DNA, 904 bp, Zea Mays
accatcttcttctccaagcttctctcctacctgtgcttccctgctcttccctctgcctccgtagccactgctaacactcggcctcctatgcatcttcctagcttgccatggatgctgtcagccatggtgctcggcctggatgtcgatctcctcgtcacagtccgggtctgcatcttccgtaggcgttggccgcctctatgtggcccctgtgagctccggtcgttccttgcctcttatctgtttttaaccatggagcatcagccgctgctccctgctcttggctccctgcccctcccatggcgcccagcaccgtctcaaacctgccatgtccgtcgccggtcattgaccttgccctgctgcttatcccatcaccgagctgtgtgccgttatactgtgacctcgacgatgcgcaatgtcgctcgcccctgtatcacctcgtcgtcgtgcttacatcgacgtctcctagctcctcatcacgtgcctccacgccggtgctcgactagctcgacgatggtccgaccgtcgccctgctcctctctaggcttcgggcgcacgtgccttctgcccgtgctcggtcgtgcctccccttaccaaagctcgatcagatccccacctccatgatctcgctgggtctcatgccactgctgcgtctttagctcgacacgctccccaagttcatgtttatggcatggctgcgagttcccttcgctgcgcgccctcgcctgctgctgtgtcatcgactcattggcatagcctagctcgctttgcgcgtggagcttgcgcgcgcatcgtcgacggtgccttggccttctccatgcttgctgcgagcctgctagcaccgcccctcaccacactgtgctgctcggtttcctacagcacctattcagcccatcaatgtaccaac

SEQ ID NO: 43438 - DNA, 294 bp, Zea Mays
aaatatactaatattcattttgagactataaggatagaattccattttgcatatgagattataagcacacatgcatgatgacagcccaacatatttccgacataaatgacctaccatcaatgtatccaaaagcatgcgagcggcttactgaaacgttagaaaaggacagtgtagaagattggacaatttactagcgacataataacatgggctgggctgtctctagggcgtgctagaaaaagcctgtagggatatgcatatgcagggaatcaaccaagtgactgaagaatgttg

SEQ ID NO: 43439 - DNA, 2043 bp, Zea Mays
aggacatcaaactagaaaatctttggttggagcctttggtcaacttaaaattgctaactttggctggtccggcatcttcaacaggactatggtgtttggccggtcagtagaggaggttgatctgagtggatttctttctgtgaattccgagtggttggcataccttggctccttcaggtaccttagggttctgaagttggcggactgcaagaacatcaacaatgacgctgtctggtcgctctctggtggaattctcatgacagacaaaaccctacagtctttacaggtattgacaaaacttgagcatcttgatatatggggtagtgaaactacaaatgagggagcttctgctctgaaatcctttgcaaggctgctatccttgaatcttgcgttgacacgtgtcaaccatttatcaattcctccaaccacaagctatctaaatatgagcaactgcgaaattcattctatttgtgatgtggattctgaagttcctgttccactagaaaactttattgtctctgcagctacatttggcaatattgataaagtattttctagcatccaagcaagctcactgatacatttggacttgtctagctgcaagttaagcaacttgtctttcttggaaaagatgaagaatctagagcatctggaccttagctacaacataataactgatggtgcaattgaacatattgcgaagattggaacaaacttgcaatatttgagcctcaagaatactggaataacttcccaggcactatgtattctggcagggacagttccaaacctcacctcactgtctttagctaatacaaaaattgatgactctgctctagcatatattggcatgatacctttgctgagaacgatagatttaagccagacaagtatcaaaggttttattcacactgaagtaaattccgagaagttgttgtctatgtctgcatttgagcatctcaaatatctggaaagtctaaatctggaggatacaccgctatcagctgaagttatacctcccttggcatcctttgcaacactgaaatatttgtacctgaaaagtgatttcttgtctgatcctgccttgcacgcactctctgctgcctccaatttgatacaccttgggttccgcgggaatatattgtcaagctttgggcttttacagtttgtaccccctgtcacactctgtgtgttggatttaagcggctgttggatcttaacaggcgatgctatttcaacattccgtaagcgtcatcctacgattgaattgagacatgagctcctgcacgaagttgaggaaaattttgttggtggttcccaatttcgtaaacctagacgcagacgatctcctcatgtgaaagcagaagttggaaacagttttgctggctcaagtaggctacacgatatccgttttgtagatgaaaggataaaatacagcaaggaggaatttgtggagctgcaaggccttgctaaaccaaattcgttaatgcttggcgtgtggcttccaccagaactgcgaaggcccaaatgatagttttggatcttgattccttacgcatttactgccagcatatcataatcttccttgagttattcttgatatgacagacttttgagaattaagcatcaagcatgtcactcagttccaaattatagttcactttggttttgtcctaggtcaaacttttctagctttgacctatgcattcgaataaatgctataccaaaatgtatttcgtgaagaatctaaagaaactgatttgatgttctagatggtggtacactttcctttaaacttggtcaaacataaagaagtttgacttatgaaaccaaagttaactataatttggaacaaagggagtacactggagttatctaaaacaaattttcgataaattagttttaacatttgcattgggctctcatcagttgatcctgaatccagttctccgatctgtgatataaaatatcattttctggagtttccttttggtcacgtgaaacttttacacactttggcctttgggcgctttctaactaagg

SEQ ID NO: 43440 - DNA, 2452 bp, Zea Mays
ttatgagcctgtgtggtatgcgtgcatggaagccacgtaaaataggtcatacagtgctggcattcccatggttctcctacatcaggtttgagttgaggtccatgccctgcatacacgttcagtggtacttgtccatatccagtgctcttcggttgggttcaataaagcttccccttgccctcagaaacttgcacgccatcttcctgtctgaggtgaccacgcccacccgttcttcacctcaccatggtcagggatcctcgacgggtttttggccgcgttgtgctggttccataatctccagagtgatggacaaggatcgccaaggggcggcgcaaaaacgccaggcgactgtgagggttcatgaagctcggccgaagaggcagcggggaccggcgaaggctgcggcctccggtggaggcaaaccgtcgctgccggcgaaggcgggcgcctctgcacctagcaaggcgccggaggcaacggtgggcgccggaggccccagactgacgaaggtggtgccgccggccagcggagtggcggaggctgcgaaggcggctcggacgttgccactgccgggcaaacgcgttgccgacttcggcaccgagattaatgtggatgattatcttgggggtaagtctatatatatatatatatatatatatatttaatctgttgatgcgttgcagggtcggacgagggccagcttgctcttgctgcgcctggcgcggcgatcgtgacagctgcgctagcgccgaaggcaaggggtgagacccttggcgtcggaggcgaggtgtcggccctcgcgctggtcagggacgaggcgggcgtggcgacccgccggctgaaaggagtgacggaggcgctgagtcaggcgacggaggcgctgagtcaggtccgctgagctattatttttttttttaagcaacggccttacgtgtgctctgcaggtggctgacttcaccagccgcactgcgtcgggggcccttacggcagctttgtctgccgaagtcgagagacttcggacgcaacatgctgacgctgtccgtgagaagttggcctccgacagcaagtgccgcaaactggcggacaaggtggccgccctggagaaggagaaggctgacctccggcgccagctggcgggggagaggagggaggccaacgaagccatcgccaaagagcaggctgcgcaggcggaggccaggctggcgcgggcggaaggcaatatcgccaaggagctcgccggagagctgcaggggcggcttactgccctggagggccgcgtggagggggccgaggccgcgatgcgggcggaggccgaacggacgcgcacgcagctcatgactgcctatcgcgagctgggtgtgcggaccgacgacttcaaggtgccagagcgagaggccgggcttcgctgtctggaatgggtgcaggaggaactgcaggagctccccactgtcttggcggggttaatgtcgttcacctccctgggtcacctgcgaggcggcgatgaacgcactctctcgcgaagggtgccgggcactttgaggccctcgaccaggcagatgaggattttgggcgagatatctttgaggtcgaagaccccgtggtgaaggaatccgccggggccctctatgaccggatgtggggttcgtacggtcgtgaggtggtcagggcgcgggccgaggctgcgagggctcaggtaacgttgtcgtttgttcggcacttgctggatgcggtctgtgcgtgtgtttgctgaatttttgtgcgttttgtcttaggcggagcgcggcgagcgggtggaggacttcggggcgctgaacagcgcgttgcctgacccggagacgacccctgcggaggccgcgactggagtcgccccgggaccgaccccggagactgcggaaaacgcaccaggcgcccttacatctgctgcggccggcgaagacctgcccccaaaggtggccgaaggcgcgcccgatgcccccgcagctgctgtgccgagcactgaagatcccgtggcggtgggggcggagggagcggcggaggccgcggcggaggctgcggcggaggctcccgtggcggcagggccttcgcaggtggcgtagtgggtgattagggttggggaatttttggatgttgtactgaattttggttgctgcgcaggttcaagattttgggcctgcgcacgcaaccgctactactgagtttttggcggcttcgaccgcggaagatggaaatgaatatggtgggtctgtatctgagttttttgattttactgactctgggagctcggttgagtggactgaggagtcgtcggaggaggacttggattattttgcggccttggacgtggctgcggcggaggctgcggcggaggctgtgccaaacgccgcggacgcgccagacgtgccaggccctagcaccgggctccgacgacgaagggcggttgcaaagcgtaggg

SEQ ID NO: 43441 - DNA, 3095 bp, Zea Mays
agctgcttgctccgccgccgccgccctcttcctcctctactggttgcagcctattccaccaccgacgctgaaggccatacgcccccaatcgaatcgatcacatctatgccgtcgatcaccagaggtgggcgtggggggctcttctccacgcaccggggcgcgctcttgtggctccgccgttgccaaagcccactcttgtcgacactagccggcggcggaggccggagcgacgcgccacatctgcccgtactcatcgtcggagctggccctgttgggctcgtcctctcattcctcctcaccaaattcgcactatagccctgatttgaacaaacagatctactcaatgttaccaatccatcaagagcactcgggtttgagtaacactttcaaacatcaaaacccatccggccaccatatgtaacccaaaagttccaagcttcatcggaactgctaaatgtcataccaatttgtggaattcaaaaaggaattgcagcaactatgcggttgtaaataatgcattcagaacacgaccaactggatgttctcatcatttaaagtagaacttcaaccatgcagaaacgaataactaagtaggagtagagcacaaaccttgcaggtgattcctcgagcagctgctgggtgttgtccatcgcaacatcaatagcttgttgggcacctgccggcgtgcttggtgctcttgtggagattgtacaggatctcgggtagactgcacagcgccaactttcttcaccacggacatttttttagtaccagcacagacaccttgctgcctccacaatcaacgaattgagagtgcaggaggacatcagctccagcacgtgcagggcagcacaggtgacggtgccttcatgcttcgtgggaagaggcattggggcaacgaatggaggagcaggcgaggaggtgcacacatggcagaggtggccccggaggttccaaggtgatgcagctctccagcctccctccactccgagcaaagcgaaaagtggtgccaaagcttgtgtttttttgcctccaaaggagcagagaaggtggcgggggcttgtaaaatgtggcacaatgagcatgaggtgctttgcccttcgatttgatatggacgaccaagattgtgagactgctacagttgcagtctctagctactgcaccagatccagggatcaaatgtgcggtgatagagaagaatgtggagttcactaggcacccacgagcgcacttcatcaacaaccgcacaatggagattttgacaaggtcattagtcctgtatccgttgcacatttctcacagtacaagttagttgatttgctactcaagaagcttgaaggtattggtttccagacatgctttcccagtgagattggtaactcaacacaagatttggtactggaaagcaagatattgatgggacacaagtgcacatcccttgatcagactgatgagggcattctggttggagcatcagttaacaatggagggatgataatagagagaaagctacactgtggtcttcttatagggacagatggcgcaagaagtacagtgcgtgaattggcaggtatatctatggaaggtgaaagggatttgcagaaactggtcagtgtgcattttcttagcagagatctaggcaggtatttgtccagtcagaggccagggatgctgttcttcatttttaatccaggtgcaattggtgtactagttgcacatgacctagagaatggggaatttgtattgcaggttccattttatcctcctcagcagatgtttgaagattttagtgctaaggtatgcgagcaaattattttcaaattagtcggatgggagccagcagatgttcatgttttagacataaaaccatgggcaatgcatgctgaagttgcagagaagtacatctgctgcaataatcgagtaatcctctctggtgatgccgcacaccggtttcctcctgctggtggttttggaatgaacaccggtgtccaggatgtacataatttggcttggaaattgggcttactgctgaatggtgtcgcctcaccatcaatattacaaacttatgagtcagagcgccggcctgttgcaattttcaataccgaacttagcgtggagaatttcaaggcagctatgtctattcctacaacccttggccttgatccaactgttgcaaactcagtgcatcaagttataaatagaagcctcggatcaatcattccaagaaatgtgcagaaggcagttctagaaggattgttttctcttggtagggcacaagtctcagactatatcctgaatgagaaaaatcccattgggtcgttgagactagcaagattgagaagtattctcgatgaaggcaaaagtcttcagctgcagttccctgcagaggatcttggcttccactatgcagaaggtgctctagttgttgaagctagttgtgagaagactcatgaaggagaaaaactacagcattctaagagggcatcaagagagtacatcccatctgctaaggttggttcgcggcttccccacatgctagtaagagaagtgcctgcttcgagtgagggcgcgttctcaacactggacctagtgagtggggataaactcgagtttgttctcatcattgcaccagtgaaagagtcatatgagattgcccgtgccaccctcaagatagcagatgagcttacgctatcagccagagtatgtgtaatgtggccacgaggttcgactgatgctgaagtggaagagagcagatccgagttgacaccctggacaaactacatcgatgtcgaggaagtgcctagggtgtcgggtggttcatggtgggagatgtgtcgtattagtaggaagagtgtccttttggttaggcctgatgagcacatagcatggctaacagaactggacagggtgagggatgctgagtcagaaattaggagggtcttctctcatgttctgtgcctaaatagccaccgggtgtaagaatttataaatttccttccatttaggctttgtttagatactttggtattcactttaatccacatgtatggaagcggattaggttataaattaaattaatttacatcctaatccac

SEQ ID NO: 43442 - DNA, 204 bp, Zea Mays
ctaacattgtgctcctatgctgttcatggttggatgcttgggcgattcttcagaaagaaatgtcaagaaagatgttgctggaaggaagttcgcttctcagaagaatagttaaagagttctacagaagggagtttggctgggcgccggtagactatcgtttgtgcagttgatgtcaagcgcgttggtttttctgttgtgtgctcc

SEQ ID NO: 43443 - DNA, 2576 bp, Zea Mays
caaaagttagattgattattaatgaaagctaatgaggcgtttaattttcaactccacttttaatcatcattcctttcatccagtttagtttggaagtgtccaccactccttttttctttgctcttttccccttgtagattattgtacgataaagccagacttaaatgccaaccctgttaactatccggtagcattctatgtagctactggtcacaattttttttgtcttggattcttggttaccatcgcaatctccaaagcatatttttattgttaattcgtgctatagtatgtttttagaacctaataaagtgatgaaagtacattctgagacaaacctagacgtgttctttcgagtttgcaacatatttgcatgaaaggttattgatcaaaattttgaagttcgactgcttatgtccaaagcaagtagtatttctaaccattggttgtgaatcggctaattggctatcacatgatactttactaaacgtcggtacataaccatgattcggtaaaccagctcacgtattccaattaagacatctaaaaactgtggtctgttgctcctgcacatggcaaccaatatatttcattcttgttgcttgcatatctagcatttggtatatctctacttcgttcgtacaatatttttcttcttctttcgatggagttaaagctctgacgtttagtaagacaacttctcatgatatataaaaatgggtgaaatgtctttatgttttttctatttttgttttacttcctttatattgtcttactctatctattttctgttaccatcttactcctgccagatctatgtgctatctaatccagatccaatccagaagcagcagtttgtaaagtatcactaattgtatatttacatttctacgtgttatctaatccagatcctaacaatgtgcatgatgataactaagccctacttagtttttgtagaaatttacaacaaattcaatggtaccatctgaaggtcaaagaaaatggttcttgtcattgtaattgatatatgcacaatttagttttaatgagtacaggtcgaagaaaacatttagcctaggctcaggtgcacaacagtatagggggacgtgagaaggggggcgtccaacgacggctggcggcggaggcactcaaggtcggggaggacgagggcaacagtgttgagtgactagggttcattctgacggagaaatgagggagagcaaacatggagaggggtgagcccactagcccatatcctgagccacatgagcctgaaagatgcaacatccattccttctgcaagaccttgactacttcagatacaagcacccatggtggattctctgtccttaggaggcttgttgaagagggtctgccccaactggatatgactcataatccaccatggcaagaactggtggctaaagatctccatggaaatgaatggtatttctgtcacatatttcgagggcaaccaaggaggcatctacttatgacagactggagtgtttttgttagctcaaaaagattggtttctggtgacacatttattttcttgagtgtgacggcattgcatgttaaagttgtcttgtacatttacatttgtttcctggctctactgaatttttggatcaaccttctaactgttcttcatctaattgaggtgagaacaaagagctgcgggtcgggttctacactcgcagccaaaatgtatgttcatacagtgggaactcctgcatacattgctcatgatgttcttctgaagaaggaatacaatggaaaggtgttatgcgtagtgtcgttgattattctacacttgacatactgtttctgttcaatgtgcatgttattcttctccacttgaacaacatgtttgtttttcaaaacattttatacacgcacagtttgtagtcatgcataacagggaactatgttggaaggtccggatgctaaattagtcactaactctttgttactgaactaaggttgctaatgtgtggtcatgtggagtgacgctatacgtgatgctcaggatcaccatccctgagataagaaaccatccatggttcttgaagaacctcctagctgacctaatggatgatagcatgatgacagctggttcacgtggactcaatcaatttctgaatgatgacattgacctcgacgatgacatagaggacctagactcagatgccgatcttgacctggaaagcagtggggagatcatgtatgctatttgacagcattgaatactttgttgtgtcgcaagttaccaagataattagagacaagggggcaggttgctgtgcttacaagtatctgttgcaggtgttgttcatgcctgatgctgatgccccttttttcgtactgttgtgtttggatggtgtaccaccagtgttttacaacagtttggcccttggaattgctactgctaaaacttcgttcctctgagaagaccttttgtttttgcattcccaaccgagggacaacaaagtacttgtattattacattgtgtttgtaacatatgtatttggtgtaggaaaataaagaaactgcattgctcgttcttgttcca

SEQ ID NO: 43444 - DNA, 1801 bp, Zea Mays
catcctcctagtttttttcttttctatttttcagctaaccttatcttcttcccgcgtcctttccagcctcccgtcccgtgtggcgtctggcgtgtgcgcacgcacctccccaggccccagtgccaccttccctcctcggctcgacccgcccggcgctccgccgcagctggctcatcccaatcccctcgtacagtcgtgctccgcgcccgcttcaccgcctgaacaaagatggaggccttcctagccggcctcttcagggcgcctccacgggccgtccccgcccctcggggcacgcctctccccagccttcctctcttctacggcaggcgccgcaggaggccgtcctcctccgtggtctgcatggcggagccctatctgattgccaagctggactctgcggagaaggcctggaaagaaatgtcggttaggttggcagatcctgacattgtctcggatccaagcgaataccaaaaaatcgcgcagtctgtttctgaactggatcaggcaattcaaggattgtgagaggcaacttgaagcgacaaaagctctggaaaaagagaacgaaggtgaccccgatatgttagagatgatagcttctgagttggaggctctatctaaccagctcgcagagcttgaagaaaaaatgaagtttctactgcttcccagcgatcctctagattcacgcaacatcttacttgaagtaagagcaggtgctggtggtgatgaagctgggatttgggctggtgaccttgttcgcatgtaccagagatactgtgagcgcaacaattggaagtttaagccagtttcttgctcagaagcagaaatgggtgggtacaagacatacgtgatggaggtcaaggggaaacaagtctatagtaaactgaagtttgagtcaggtgtacaccgtgttcagcgtgttcccttgacagaggctatgggtcgtgttcatacgtcaacagcaactgtagctattatgccagaggctgatgaagttgatgtggttattgatccgaaagatattgagcttaaaacagcaagatctggtggagctggagggcagaatgttaacaaggtggagacggctgttgatcttattcacaagccgacaggaatacggatattctgtacggaagagagatcacagctacagaacagagagcgggcatttcaattgttgagagcaaaactttacgagataaaattaagggagcaacaagaatcattaagaaaccagaggaaattgcaggataacagagtgacagaccatcgcttaaagatgaactttgagctgacaagcttccttttaggagacatcgaatcggctattcagtcttgtgctacgatggagcagcaggagctgttggaggaaatggccagttccgtgggcgcagtaaacgtatgattcaggcaaattcggcgttgaggccaggccatcaaactgaaccgcgaaactcatgacgtgctcggactcggtgaagatgattgatagctgtacatgaagaaaactgacaagatgaactccccccataggaactttttccccccctgtagtccgcagggtacaacacacacccacccatgcatctcagcttccttgacggcagcagagttactagtagaaaatatacatggtttgtgcagttcaacgcttcaactgctccagtattcacagtttaatgcattttaggtatgttgctccagtttctcaacaattcactgcttgcaattaaatctacagagcaaagttctcagctagctacatttgaaccaatcaatcaaccacttttctttttgaaacgag

SEQ ID NO: 43445 - DNA, 2150 bp, Zea Mays
gggatattttggccgcccagcagcagccttatcttccaacgctacacgccctgaagctctcctgcggcgtggagattttttttctcctctcgacgttatctctctctctccctctgatttttcctgcgcacgtcgtgttctccaacagctctttaccttcctgcgcattcctccagcgcgcccatggacgtgtgctccatcttccccaaccgcgcatccctctgttggccggagttccttggtccgaccccgtgctgcgctcgcctcggccggccatggtggccgcgcagacctcctggccgcgggcggctctggcctaggccgccgtcgcgcccgggattttgctcaccgacatgctgccaggactcgcgtgcgccatggctctggttgccacgctctcgcgcctccctgggctccttttgtcgcgtccagttctggtcacggttatctgctgaaccatcgtcgcgccgggttgcccctgattcgtgaagttcaccggctttcccgtgcgcagtcgcggatgtcgtcgctcggcccttgtgtcttgctgagcttatcaccgtcgcttatccctgacgctcgtcatggacctcgtcgtcggcccacattgtatccacgacgtgctcatcgactctgatgatctgttttccaattgtgtgctgcctacatcgattttcggaactccttgtcgtgctcggccctgctcccttggccgtgctcatctccagttccgtgttttgtctctggctgcgcgtgcgtgcttccctgttggttgtcattgtccaagctcctcttttaggctctccaaccaccgttgtcctatccgcgtcagcacgcgaccggggtcgtgttcatcgagttcgccaacgctctgttgccgattcgaccgtcgtcactgctacgtgccttgttgcgtgttcgccgagtgtcgtttgttgtaccccagcgctcgtgcctactgctggctcgcgttggcgctcgcgtgcctgctcgtcgtctctgcggtgcacccgctctcatccatcgggtttcacgcgtgctcgcgtttgccgtcaagccattgaacctgtttttcccctgctcgacctcatcttcgcccttctggtggccgtcgtcattatggtgctgaactacgctccatcatctagtcgcactggctgttgactttgttggtcctttccatgttaaactagccagctccgccatcgtcactcagctgctcaccccgcgtgtgctcgtcaattttcttggtcgtgtctgccgagctgaccaacgctttagctcgccgttatcgccaagttccacgcagccgtgatgttctctcatcgtcgtccattcctatttctttcttttcccccgccatatgccgcctcgtcatggcacgtgtcatcgtctttagtttcagtagctcttccgatacgcgcctcgccgtgcttcgcctcctcgtgatcagccccatccaggtcatggggggcggaagatctcaacacctgtcagatgttcgatgacaagcccgagccagaatttatcatcattctcacaagtattgagtcacatttgatgctggtaagctgaatttatttacttagtaattttagtgctttgccggtaggcgctatcgacattttatgcgaggaattttagttgtgcagtgaagtcagtgctatcattcatgtgcattatgcaaatcatttaggtacgtttattgaccacgtgatgcggagaaccaaagatgagtcaaccacaagatgtcgctgcgagtgagcttctccagaaggtgatgctgatggacgaacctgaagatggacagacgaagcaagtatccgaacaaaggctgatcatcaagtgatcaacgtctaacaaacactaacgtagtgtttattccaggcaagccccggtgcatttcccacctccttgttacttttaaaatctttctcacttacttgatgcattaggtgataggagttgtgtgctaaaccaattcgtgcatttcctcccttggattacttctcctgaaatccctgttttacaaaaggtttttcttatgcttcgctttgctttagaaaaacaaaatgttttgttttctcaaaagatgatgttgcaaagtggatgggttgttttcgaaaataaaactggatggtggatccatc

SEQ ID NO: 43446 - DNA, 656 bp, Zea Mays
aaatataaaagcagtgacaatccgggagggaaacacaacttcttcaccagccctgctttggcgacagagatctagtgcacgtcagttctcatcccgaacaggcaaatcacagcaggggtgtctatcatcgagatttgaagccaaaaaatattttgttcgatgagaatagtaacctgaaggtgtcagattttggtctaagtgcacttgctgaatgccatagacaagacggtctgctccacatgaatataaaagaatgcgcccattgaaataactaaaactaaagcctagacttgaatataaaagacaacataccgtgttatccctgtctgaaaaggaccctgtccagaaaacatggaaatataatcagcaagaaagtgcatgtcatgttttcctagggtctctctgttggagaatgtacattaccatttcacttcaagacaataaaatagaagcattactgttaaaccaacataagcaaaatccggaaagtgaatgaattatcttcagatgtgaacatataacacaaaatatattctgtatcagtaaatttaactgcgtttaaagaattagtaaacgtaaattagagcaggtcggggggaactgcagatcataaacctatcatcattttggtatgaacatagatcataaacctccta

SEQ ID NO: 43447 - DNA, 3611 bp, Zea Mays
cgggagatcgtttctgtgacagattaatgcctactgcaagcttgaagtcctcgaggacattctcgattgtttttgtggctgccagaacaaaaataaaaatcaagggttttagaagggtttggtattccttcgtttcctccctttcttcctctgcaagcaaaaacaccgcagggaaaaaaaggcccaaaacaatctgcgacttcgagaaccctagtatcaagcgcagaactccgtcatgctgcgtgcggcggcggctgccgccgccatattcccggcgcgggtcgccgctgcgccggctgctgcggcggcggaggaacttaggtatccgctgctcagggttattgggacgctgaggggcagccgcggctcggtgctgctggggaggagggtgcgtttctgctccaactcctccgcgagcgactccgaagtggcggcggcagatgcggaggcgaatgccgaggatgcgaccgttgcggaggaggaggcgggcagcaaggcgtcttccgccatcgtgccgaccagcaccaatatcgacgactgcctctctgttatagcgttacctcttccacatcggccactctttcctggattttacatgccgatctatgtaaaggaccaaaagctgttgcaagccctaatagaaaatcgcaaaagatcagctccgtatgctggtgcctttctcgtgaaagatgaagaaggtactgaccctaacattgtgactggttcagattcagagaaaagcattggtgatctcaaagggaaagacttgctgaagcgtcttcatgaagttgggacgcttgctcagattacaagcattcaaggggatcaggtagttctacttggtcacagacgtttacagataactgagatggtcgaagaggatccactcacagttaaagttgatcatctaaaggaaaagccctacaacaaggatgatgatgttataaaagctacctcattcgaagttatatcaactttaagggaagttctaaggacaagttccctttggaaggatcatgtgcaaacctacacacagcacattggtgacttcaactaccaacggctagcagattttggtgctgctatctctggtgccaacaagttgctttgccaggaggtgcttgaggaattagatgtatacaagcgtctgaagttcactcttgagttagtaaaaaaggagatggagattagtaagctacagcaatccatagcaaaagcaattgaagaaaagattagtggagatcagcgacgttatttgttgaatgaacaacttaaggcaatcaagaaggagctcggtttggagactgatgataaaacagcattatctgcaaaatttagggaacgtatagaatcaaagaaggacagatgtccttctcatgttttacaagtcattgaagaagagcttaccaagcttcagcttttagaagccagctctagtgagttcagtgtaactcgtaattatttggactggctgacagtattgccatggggaaattatagtgatgaaaactttgatgtccaccgtgctcagaaaattctcgatgaagaccattatggtttgagtgacgtgaaagagaggatactggaattcatagcagttgggaagttaagagggacttcacaaggcaagatcatatgtctttctgggccaccaggagttgggaaaactagtattggtcgttcaattgcacgtgcactgaaccgccagttctacaggttttctgttggaggtttggctgatgtggctgaaatcaagggccatcggcgcacgtatgttggtgcgatgccagggaagatggtgcagtgtcttaaatcagttggaacagcaaatcctctagtattgatagatgagattgacaagcttgggaagggtcattctggggatccagctagtgcattgttggaactccttgatcctgagcagaatgttaatttcttagatcactaccttgatgttcctattgacctatccaagcaaatgtaatagagacgataccaaatccgttattggataggatggagatcattgctatagctgggtatataactgatgagaagatgcatattgctcgggactatttagagaagaatacaagacaagcctgtggcattaagcctgaacaggttgaagttacagatgctgcccttcttgctcttattgaaaattattgtcgagaagctggagtgaggaaccttcaaaagcatattgagaaaatttaccgtaagattgctctccagcttgttcgccaaggagtatcgaatgagccagaccaggagtctctcggtgtcactgtaaatgaggaatctaatagtggtgatagcatcacagcaaaagatgagattgtgaaggatcctgctgtagaagatgcttcagtcgccaacaatgttacaaatcctgcctctgaggaagctaatgaagtaaatttgacaactgaagcaccaaaagaagacagcacatctaagggcaacaagaaaacagatggagtagcagaagatgcagcagacaaggcaactgagaaggttgtggtagattcatcaaaccttggtgattttgttgggaaacctgtgttccaggctgagcgtatatatgagcagactcctgttggagtggtcatgggtttagcttggactgctatgggtggttctactttgtacatcgaaacaacaaaagtggaggaaagggaagggaaaggtgaccttgtgctgacaggacagcttggagatgtaatgaaagagagtgctcagattgcgcacacagttggcagaactgtattactggagaaagagccagataatcatttttttgcaaactcgaaggtgcacttgcatgttccagcagggtccaccccaaaggatggccctagtgctggatgcaccatgataacgtctatgctgtcgttagctatgggaaagcctgtcaagaaggacctcgcaatgacgggtgaagtaacattaactggaagaatcctcccaattggcggggtgaaagagaagacgattgcggcaaggagaagtgcgataaagacgctcatatttccggcagcgaataaaagggactttgacgagcttgcttctaatgtgaaggaaggactggaagttcattttgttgacacatacagtgaaatatatgatttggctttccagagtgacgccgggactgagatgatttagctttacattacaggattgagattttttccccttctctagatctggttacaggctaaataccaaagaagtttgtcagcagaggcagaccattgtaaccaagatgagtggagttaattgatatttacgagaaagaaaaataatatttctttttttggccccaatataacatcattgaatctaagagatttatttggctaggctgtacgtaactagtgtgctaggtggtggtattggccttttatattgttgggacttgggagtgtgggaaaaacagtactggtgcaccatctgttatttattttaagtgttttccaaaggcagcaaggtcatatacctcatatcataatttagccacaaatggcctgaatattttgtattttggtcatttttttttcgaaaaaatcacatttagacccctaaaccacttaattctgtttttg

SEQ ID NO: 43448 - DNA, 4660 bp, Zea Mays
acatgatcgtatggaacatagagaaaatatgaataatcattttagatcattagattattcatattattattaaatatctataaacaaacatcaatgatattaaattacatatgtaccttcggcttgatagaaggtaaaaatccaagagtgacgtgcaagtgattacaagtcagcgtgaacagtacagtgttactgttcatctatttataggcatatgacgcagcctgaccaaaattacattcatgtccctgacatttactataagtcaaaaggtaagttgtcgtggactaaatagtcttttcccctttaggtcggtttcattctccaccattgtgccaagccgaagcttcttcatccacagcttcgaaactggttcatccttcttccggatcgcgtctttcataccatgtacacattcatctcaaagtcgaagcttcctgtggcagtatattatactggaaaacatgttagtcgtgttgttgaggaactttgaaagatgaagcccccaacagtagcccctcgtagtattaatttgtttttgtatctaacaaattcagactgcgacgtgaacgaaggcctttagccgaaggtccaaaaaaacaccttcccttagttagaatagcgaaagccaatgacaaatggggcctgccaagttgcaatgcactaggtatataaacagatatccacagcggcagcatttgttgcgccatttcagttgattgtgctgttttctcaaattttaattctcttgccatcagctatcgcttgacttgcaagcttcgttatatacacaagtgcgtgttgaatgtctgaagagaagaagatgtctgatgagaagaaggttatggaccctgctcttgctggattttacgaagctatggaaaaaacgaacacagagaagatcacaaacgaaataatggcagatttgtctgaaaattctgacgatagtgatgactatgatgtgaaaagtggggatgaagatttcgaagatcggccctagtggccaagccataccatcttcggaaagtcgtccattaaacagagtcaaactgacgccatgaagggaagatactttcgtgacatgtctattgtaagggttggaggggacagcaccgcccctacacctgaagaaaatgaggttgttgtctacagaagctttatgaaggcgggtcttcggttcccattgagcagatttttgtttgaagttttgaagacatttgaaatcttccttcatcaaatcactcccgaagctataattagaatgggtatttttgtttgggccatgaggagccaagggctggagctgagcgcgaagtgcttctgcaacatgcatactgtacgagacgaaggccactagtaaagagcaatatcacaacaacatcagttgttatggcttcattcctcgttctgatgtgagttatcccgttccaacctttcgaaaaaggtggccccggagcctggatggaggaatggttttatgtcaagaataatctgattgaaagggaagacataaaggggattattcaacgccccatctggtctcgcttcggccttcgaaggccgaccactgcgcttgaaaatgataccgaagcatgccagaaggctttcaataatgtttgcgccttcattggtatgagagatctggttcaagagcacatagcctacagggtgtggccacttgtcgataagtgggagatgtcgaaggagactgctgccgggtccagtcaggttggcctggtttacttgaaatacaccttcaggtacagagaccggtttgacgaaccaaacgatgaatggctgaaatgtattgaggctactagcgacgagttacttggggcatacactagagccaaagatgatgctcttacctcagccttcggaggtcgaggcaagaaaaggctgaacagggtttttgacgttattggcttcgtgtatccaaactacacttacccctcgcgaaagcaggggaagaaaaggaaaactagcgcctcggccacttctgctgcgccgaacaacaagaaaattaaggtcctgacccaccggccaagatacattgagacgtgtaaagtcctaaaatttgtataaaaaaataaacacatgaatttacataaaagtgttttgggattatggaacctttggagatcatttgatttttttatgtgtgcatattcaagtaagggaaataacaaacaaatttagaaatatatatatatacacatatgtctaatcttgatatctaaataagagtattttctcgtaaaagtaattatatactataaggtatttcctcataaaatataataagtaataaataatgaagctttggaatgaacctctaatggactaaacattcgaaatattttcgtaaaatgaatatttgtgttgcatattgaaaacattgcctaaataaataaggtaataaataaatgaataaacttaatacatgaaccttgcattcatgttgaaatatatttttggtgtgcaaattagaactttgtttgaatttaaaatctaattggaatttgaaaagcaaacaaaaagaaaataataaaaaaggacagaaacctcaccttgggctgatttcacgtgtctcggcccacctacaaccgtgccccactgattgtggcagaacctcccaagttattgggcccacatgcacctatccttgtctcaaagacctcagacggctgtgcatgtgcaccagataacttaacatgatccgtctgagtgtcccaaggaccccgaataaaccacttacaaccagaaccgcgagattaagtaaacacaaatcacacaccaacaattttgcagcggaaaacttattaccaaattttatgagttacatcaagttttataatgtacatgatcggagtgcttacaaaaagtgattcaaatgaacaactttgaactattataaattatttatagttttgaaatatatgctagctcaagtgaccatcctcaatatgaagataaagacggggtatacttatataagaaggccgagcccaccagcacttaacaccatcaacatcagcacaaaactataacttgaaaaacaacagggaataaaaccctgagtatggaattactcagcaagacttacccgactaaagaaaagactctcaaggatatgctagatttgggaatcaaggagaggctttagtaagaatcaatttagatatttttgcagaaataacttactaaagtgagtccttactttcaacattttaatgctagattaagtattaatagaccttgtttgcatctagtctaatttcaccatcacattaatcaatccaacatgatttttgctcattaagattccatccatgacttagattgcagggcagtgaccaagtcttcatgtccgcgaagttacagcgatctgaatcgattatactcagctgaggatctctaatcacacgacatatgtaacacttaaaccttgcatatgtaaactcgccaccggggttcttaagaccagatcaggttcacgccaacccagagcacagatacacgaccgtccagcctcttgccacggagggtacacgctactctcgccatctctccactctcattgcgtgttatcttattctggtattagtctgcccgaggcaaagcttacccatgatgaggcatgtgaccagttaaagggtcctcgatcagcaagcctacattcagtataatccttaatcaacctgggtagaacatcacctgttcctagcccaagtcccgatttaagaacttccatccttagcattgtttgtgttccttaggatgaaaagagcatcacagggaactttgcagtaagatcctaccattgctcccaatgaaaatattcttgctggcagaagtcatccttcctcaggataacccctgagctaggcattaacgcaaaggacaacctctatccacaagatttacctctaagcaaggctaagcaattttgtaaatcatattttgatacttcatcagaagtatctataaaggtatgtatatcaaggtaggcaatgcatcaaagggtttccaagcaactcctataaacctaatgcacatttcactagacttaaagtgtgcaaaaattatttaaaaacacaaggaagcggttgcatgcaccggggcttgcctggaataaacactacgttagtgtttgttagatgacgtccacttgacgaccatcctttgtcttggcattcgttcagtttatccatcttcaggttcgtccatcagcatcacctcgcgagtggctcacgctttacatcagcttgtggtcgactcaaccttggtccttcgcatcacgtaatcaataaacatacctaaatgatatgcataatgcacatgaataattataaataggaatagcacaagcctaattattgctacacgatagcgaattaaacacctagcgacgaggcacctaataacatttaaaagcaatcactagatgccgagatattactaaatacaatcagcacacttttctagcttaaacaaatctaactcaaacatcaagaacaatattgcaagataatattacgattttacacagtaaagaattaaacacttaatgagaaggcatcacgacatttcataagcaaacgctagctatcgccatataaccaagcgcaataatcacgcttctcaagattaaccgaat

SEQ ID NO: 43449 - DNA, 1950 bp, Zea Mays
  misc_feature (1950)..(1950): n is a, c, g, or t
gtgattcggcccattgtagccccgagacagcgtccgcctacggcctatccgcgtcagcccgccggcgagtcgcgcacgagacctgcgaggcgcgatggcaggccgcggcggcgccggccggcggcctcgcgccgtcttcatggccttcggcactcagggcgacgtcttccccatagcagcgcttgctgcagcttttgcgtgtgaccaacaggagtatgctgtggtgttcatcactcattcagcgcaccggagtttgtcagcacatctagcagccagcagtgttagatacatgcctgtgtcaagcccgcctgtcctcgctgccgaacagttagagaatatctcaagtgattctattcaatcaaaccatgagcgtgagtccttttcaatgcggaaaaaagccattcaagcggagcacaggaaagaatgcttgtcttttgtggaagaagtttttggaaacgacccaagcatcagtggggattttattgtgatcaatttcttcgctttggaaggttggcaccttgcagaactattccaagtaaagtgcgtcattgctgctccctattttgttccatatagtgctcctacatcattcaaacgccaatttaaacaaacttttcctctactttacaagtactttcaagaagctcctgcaaatacggtctgctggactgacattatccattggatgtgggcactcttcatggaaagttggggatcatggagaaatgattgtctgaatcttagccccattcctttcacagatccagtaaccaatcttcctttgtggcatgtgcgagaggagtcacctttattactgtatggtttcagcaaagaaattgtggagtgcccaggatattggccgttcaatgctcatgcttgtggcttttggtttctacctatggattggcaattttcttgtgacaaatgcatggagttgtctggaaatatcaattcttcatttggtggtatgttgtgtgcaaaccattcttccctggaacacttcctcacaaggaatgcttattcatcaagacctatatttgtaggattaagttccattgaatgggctttcttagaaatcctaaagcatttttaatggtgcttaaggctgccatagagtcaacggattatatgttcatccttttctcatctggatacaagccattggattctgcaattcaatctattgcttcatcagtaaatgaatcaagaggggtggattcaccttctcttggtggtgacagcgctctcctttttaatggccgccttttctgctttttaggatcaataccgtacagttggctttttcctaggtgtgcagccgctattcaccatgctggcagtggatcaacagctgcagcactacttgctggtatccctcaggtgacaacaacactttctacagcttcaccccatgttttgaggctgtctttctgctgctcttttcttgtccttttatttattcgcaacctgtgatacctggatgtgtaggaagcatcaagcctggtaacatgccctttcatgatggaccaattttactggtcagagaggctacagtggttgggagtggcgcctgaacccctacaaagacaaaatctagtcccagataatgatgacgccttgagcatccacaatgctgcagatgtgctagttggagctatcaggtcagctttatcgccggaaaccaaagctcaggcggccagaattgctgataggctttcttctgaggatggaattggagaagccctcaggatattgaaggcgagagtgttgactcagaacaaaatcatcagctcattcatcgcaagtaaataattagtactgatatgatatgaggcattgatttaaaccactaaatttaagaaatggacttctaatgcaccgccccatgtaagatagagtaatttctcaaaccaatcaactttacggggcgtttggatccctttattttan

SEQ ID NO: 43450 - DNA, 4698 bp, Zea Mays
ataaacaaaatcaacctccatgattaaacaaaagttcaacgagtaattaaataagcgcccgctgggtcgttcgttgccagatcatgtttttcaggtctgtctacctccatgattattaaattttttttcgagcgatcccgattccaacaggggacacgagaacggctttcgaggctaggcatgtggtttggaggaataatctcacgtggtaccacgctttggaggggcacacgagatgcggtcgtgcgtgcagatgggtttcacatggcagcggtttcctggtctgggccagctcgatcaccgagttaagaagctgactgaagccacaagccactgaggcaccaaagaatacgcaaagctctctgcagacctgcagtctgagctacactcattcaaagtttcggctaacaaaaacatttggaggttgcacagaacaacacatcatttggtcagatcccaagtataataccctgtgtttcctctcactcatgctaatttcctggtgatgttagaaacaagaataacataaagggtgttgtcccagggtacgagcaaggaagggacttcaagaaatacgggtgggatggaagttgccttggtatcaactgtattgaaggttttggggacgaagttagctcctcttgcactcaaagagttgagctctaaagcaggtgtggccaaagatcttcaggaactccaggacctagttgaggagatcaacaattggttgcaaacagttggtgataaagaccgatcatctaaatggctcaaaaaattgaaagaagttgcttatgatgctgaagatttagtccatgagttccacatcgaggctgaaaaacaagacagagaaattactggtggcaagaataccttggtcaaatacttcatcacaaaacctaaagcaactgtgactgaatttaagatagctcacaagatcaagaaaataaaaaacagatttgatgcaattgtgaaaggaaggagtgactatagcacaatagcaaatagcatgccagtggattatcctgttgagcatacaagaaagacaattggagaggtgccattgtatactattgtggatgagacatcaatatttggcagggatcaagcaaagaatcagataatatctaagctgatagagactgatagccaacaaagaataaagatagtttcagtaattgggctaggtggctctggtaaaactactctcgcgaaacaagtatttaatgatggtaacattataaagcattttgaagttatattgtgggttcatgtgtcaagagaatttgctgttgaaaagcttgtggcgaagttgtttgaagccattgctggtgacatgtctgaccacctcctattgcagcatgtgagcagaactatctcagacaagttagttggaaagaggttcctagctgtcttggatgacgtttggacagaggatcgtgttgagtgggagcgattcatggtacatttaaagtgcggtgcacctggaagtagtattttactcactactcgtagtagaaaagttgcagaagcagtggattctagttatgcatacgacctaccactcttgtctatggaagatagctggaaagtgttccaacaatgttttggaattgccatgaaagctctagaccctgaattcctacagtccgggatagagattgtggagaaatgcggaggtgtgccccttgcaattaaagttattgcaggcatcctccatggaatgaaaggaattgaagaatggcagtccatatgcaatagtaatttattagatgtccaggatgacgaacatagagtatttgcatgcttgtggttgagttttgttcatttaccggaccatctaaagccttgttttctacactgctctatatttccaagaggctatgtaatcaacaggtgtcatttgatttctcaatggatagctcatggcttcgtcccgacaaaccaagctcgacaagcagaagatgttggaattggctactttgattcccttcttaaagtggggttccttcaagaccatgatcgagaccaaatttggtccacaaggggtgaagtaacatgcaaaatgcatgacctggttcatgatctcgctagacaaattctacgggatgaatttgagtctgagatagaaacaaacaagcaaataaagagatgcagatacctatctttgacttcatgcactgggaagcttgataacaaattatgtggcaaggtccgtgcactctatgtttgtggccgtgcactcgaatttgacaagacaatgagcaagcagtgttgtgtccgtaccattatattgaagtatataactgctgactcattgcctctgtttgtgtcaaaatttgaatacctggggtatcttgaaatatccgatgttaactgtgaagcactaccagaagctctctcgcgttgttggaacttgcaggcccttcatatattaaattgctcaagacttgcagttgtacctgaaagtatcggcaagcttaagaagcttagaactctggaactgaatggtgtttctagtatcaagagtttaccacagtctattggcgattgtgataatcttcgaagattatacctagaaggttgtcatagattcgaagatataccaaattccttgggaaaattggaaaatttaaggatacttagtattgttcattgctttagttttgaaaaactttcgccatcagcatcatttgggaagcttttgaacttacaaactatcacctttaactgttgcttcaatctccgaaacctacctcagtgcatgacttctttgagtcatctagagatggtggatcttggatattgttacgagcttgttgaattgcctgaaggcatagggaatttaagaaaccttaaagttttgaatctgaagcaatgcacacaattgcgtggactaccagctggttgtgggcagctaactcgtttacaacagttgagcttgtttgttattggagacagtgccaaacacgcaaggatctctgagcttggtaatcttgataagttggatggtgagctgcagattaaaaacattagatatgtgaaagatccaagtgacacagacaaagttcgtttgaagaaaaagattggcatccggaaattgtcgttggattggtattcaagattggaggttcagcctgatgatgtggaagaagagttatcattaaatatggagaaggaattgcatttgctcgacagtcttgaaccaccatcaaaaattgagaagctgagaattcgtggctaccggggttcacaattgccacgttggatggcaaagcaaagtgactcttgtggtccagcggatgatacacacatagtaatgcaaagaaatccatctgaattctcccatctgactgaattagtactggacaacttaccaaacttggagcaccttggggaacttgtggaactgccactggtaaagatccttaagctcaaaagactgccaaagttggtagagctgcttacgaccacaacgggggaggaaggagtggaagtgctatgtcgtttccatcacgtttccactctagtaataattgattgccggaaacttgttgtgaagccgtactttcctccgtccttgcagagattgacactagaaggaaacaatatgcagttggtttcttcaggatgcttcttccatccacgtcatcatcatgcatctcatgctcatggtgacgagtcttcatcttcctcctattttgcggatgagacgggtactcacctcgagagacttgaacttcgtcggttgacaggatcatcatctggttgggaggtgctgcagcatctcactgggcttcataccctagaaatatacatgtgcacagaccttacacatttacctgagagcatccactgccccaccactctctgtagactgatgataagaagttgtgataatcttcgtgtgctgcctgactggcttgtggaactgaaatctctacagagtctggacatagactcatgtgatgctctccagcagcttcctgaacaaataggagaactctgctcactccagcacctccaaataatttctatgcctttcctgacttgccttcccgagagcatgcagcacctcacctcgcttcgaattctcaacttgtgtgaatgtaacgcgctgacccatcttccggagtggctaggcgaactctctgcgcttaaaaaactcttgatccagagctgccgtggccttacatctttgccccgctccatacaatgccttactgctctcgaggaattatatataagcggcaaccccaaactgcttcagatcagtgcatcatattctaaggaagacaaggatggccagctgcaaccgttccgatgttgcaggcctgacgaccagcattgcagtgaggcccaagagttcgatctggtccggaacatgctcatcgtcgcagtagaagaacgctacaaggatgctgctcaatacagaggccaacattccatgttgcggtcaaagaaaaagaacgcgatatagcaggcccaggccgttattatgtacatccacatgtgtgccaagttcaacttgttaggtacccatacagttcgctcatgtattgatctggcgcaagcttcgatgaacattttttggtttcatgtggttgatatgttgcttgagccttgtcagcttgacgattttttggtttaatgtggttgatatactgctagctacatcaccgctgtttgtcttcaaatcgg

SEQ ID NO: 43451 - DNA, 1457 bp, Zea Mays
tcctctgtcttttccaacaataatagtataatacaggcagctcacctccaagataaaatggcctgacgaaatgagcttcagggaaggccgccgccgcctactcctcgtcctcctcttcctggggtgtcgacaagccgcggcacgctcccacggtcggagacgaccaagatttcctcttttccgaggggagcacgagcacgagcaccaacgccgaccccgacctgacgcatttccaagggactcccctctgcaaatagacctgtccaccgcaatcctgacactgtcggagaacggggagctgcagcggatccatgacaagtggctcaagacaggcgactgctcaacggacaatgctgagttcgtggactcgaaccagctccgcctcgagagcttcatgggcctgttcctcatctgcggcgcggcatgcgtcctcgccctgctcatctacctcggcatcacgatacgccagtacctgagacacgaacagccggaaaaagaaagagaggggtggaaatgggatattccattcctggtacccttccaggcttccacctgtgctttctttatggataacgatgatgatgactatgaggcggccgttgtgggcgcgccattccggaccctacactccagctccactctcccatggcttcctccgccctgccttccagaaccttgcaccgccgcgcgctcccctcgtctacgccgtgccaccctgcgacggagaccttcgcccccggcgccgtctcccggcggcgagcagccgtgcggctcctctccgccgggttcctgaccgccgtcgcgccgccgccgtcgctcgccgcgaggaggggacgcgttgtcgtgccaccggaggactacgccactgcacgtacgtaggcgtgcctgcttcctggcgctgctggtttctgcatccgcgctcgttttttttcttcttttcggctaaagttggcacctttttttgcgagcgactgactgaatttcagctaatcacaacctttttcctggttaagaccaggatccttttcttttactgcaaataatgctggtgcttctaactcccgatggtctcaagtactacgatcttgtcgaagggaagggaccaactgctgagaagggctcaaccgtgctggtccacttcgactgcatttaccgtggcatcaccgcggtgtcgagccgtgagtcgaagctcctggcggggaaccggagcatcgcccagccttacgagttcatcgttgggtcgctgcctgggaaagaacgcaagcgggatttcgcggacaacgccaacgggctgtactcggcgcaggcggctccgaagcctccggccgccatgtacaccataaccgaggggatgaaggtggggggaaagaggagagtgattgtccctccagagctggggtatgggaagaggggaatgagtgagataccgcctgacgctcctttgaactggacctcga

SEQ ID NO: 43452 - DNA, 1846 bp, Zea Mays
ctccgttctgttccgccccgccccgccccgaagcagcgcgaaacgacacacgcgagctatcccgacagtaggaagcgagacggggccagtaggaagcgccaagcagcaacgcagcgcatccactcgtcatcggcaaaccaacacccccggcccggccgcgggcggctgcgctcacactccactcccctgacggcctgaccccgcgcgcacaagcaacagcagcccgatggccgcaccgtcctccgccgccacagcctgcttcgtctccccgctcccgccgcctcgccgcccgcgtcatttcctcaggcacctcgcgcgcgccgccgccgccgagcccacgcccgcctccgcctcctcgttcgccctcccgtcgccatggccgtgggcgcggcggctccgcgacctggtccccgccgaggccgcgggccggctgctgtcgtcggccgcgggctccctcatcgtcgcgctcgcctccgcgtcgctcgtcctcggcgacgccggcgcggcctccgcgttcgtcgtatccacgccgcggaagctgcaggcggacgagctcgccaccgtgcgcctcttccaggagaacacaccctccgtcgtctacatcaccaacctcgccgtcaggcaggacgcgttcacgctcgacgtgctcgaggtgccgcaggggtccgggtccggctttgtctgggataagagcggccacatcgtcaccaatttccatgtcatccgtggcgcgtcagaccttagggtcacacttgctgatcagtcagtgtatgaagcacaagttgttggatttgaccaggacaaggatgttgctgttttgcgtatcgaagcaccaaaggataaactaagacctatacctgttggtgtgtcagcagacctactggttggtcagaaagtatatgccattggaaacccatttggccttgaccacactcttacaacaggtgttatcagtggattgcgccgagaaatcagttcagctgccacaggacgtcctatacaagatgtgatacagactgatgctgctatcaaccctggtaacagtggtggtccactccttgatagttctggaaacttgataggtgtaaacacagctatatactcgccctcgggagcatcatctggtgttgggttttccattccggtcgatacagttgggggcattgtggaccaacttataaggtttggcaaggtgacaaggcctattttgggagtaaaatttgcccccgatcaatctgtggagcagcttggattaagtggagtgcttgtcctggatgctcctccaaacggaccagccggcaaagcgggtctgcagccaaccaaacgagatccctatggtcggcttatcctgggtgacataattacctctgtgaatggcacaaaggtgacaaacggaagcgacctgtaccggatactggatcagtgtaaagtcggggaaacggtgaccgtggaagtcctgcgtggcgatcataaggagaagatccccgtggtcctcgagccgaaggccgacgaatcatagcgaacccagcagacgcgcaaatacacaagggcgcgtgtcctagcattttcgccttcgttcgctgtacataattcctgctggtctgctggagaagaaggggggtactatccaggtcgccgcccgtaatgccgtctcagcattttctgtgtgtgtgcgtgtgtgctgtagcatgtcggcatcctacagtgctttagagtttatagatagatggcctacccttattaatacgagatgttgatcagatgaccatccatccagggaagggaaactgcgggtagaggaccaatgagcttactgatatcacggatcacctaaacctttttgacc

SEQ ID NO: 43453 - DNA, 1316 bp, Zea Mays
caacgagcttgatgatccctccacatccgaagcacaaccggtggctttcaaggcgacggaggagaagaaggaggagtctaaaccaagtagacaaccaatcgacgcttcaaagctcgacaacgaggagatggctttaatcatcaaaagctttcgccaaatcctcaagcaacggaaggggaagaattacaaatcccgttccaagaaggtttgctacaagtgtggtaagcccggtcactttattgctaaatgtccattatcaagtgacagtgacagggataacagcaagaattgcaagaggagagaaaagaagaggtaccacaagaagagggtcggcgatgcccacgtgtgccgcgagtgggactccgacgagagctccaccgactcctccgacgacgaggacgccgccaacatcgccgtcaccaagggactcctcttccccaacatcggccacaagtgcctcatggcaaaggacggcaagaggaagaaggttaaatccaaatcatccactaaatatgagtcttctagtgatgataatgctagtgatgaggaggataacttgcgtactatttttgccaaccttaacatggaacaaaaggaaaaattaaatgaattaattagtgctattcatgaaaaggatgacattttggattcccaagaggacttcctaattaaggaaaataagaaacatgttaaggttaaaaatgcttatgctctagaaatagaaaaatgtgagaaattatctagtgagctaagcacatgccatgacactattaccaaccttaaaatgaaaatgccaaattaattgctaaggttgattctcatatttgtaatgtttcaacttccaatcctagagatgataatgttgatttacttgctaggattgatgagttgaatgtttatcttgctagccttagaattgagaatgaaaaattgcttactaaggctaaagattttgatgtttgcaattgttgggggccttcggcttacgaaggtcctcaaaaacaggatttaacagtatttctggagtttaatgtgtgaacaggcatcttcggactcaagtcggtatcacagcagaccagaataatacgaaggttgatacagtgccgaaggagtgagcaggaaagcttcggtatgatagcaacaaaatgaaaccgacttaaagatgaaaaggctattcagacctcgatagactactatagaattattatcaaatgtaaagggtatgaatgtaattttgtatgggctgtgtcccgtgcctataaataggtgaacagtacccccgtactgttcacgctgatttttggcattcgcttttg

SEQ ID NO: 43454 - DNA, 6462 bp, Zea Mays
aagaaaacacaaacaccttagaatcggcgattcagtcccccttgagtccccgactccccactcctgtctcgactctttacctaagcttctgctcggccccatccccgtgcgtctcctcccggctttcgtctcgctctgagctcgcctctaccatggcgactagggtttagtagcgccgcagcctccatcactgccatcctcaactccgtaccggatccggaagaggcgtcggttcgtcctcaacgtcgccaacctccgctccccgtcgtcctcaccccctctatctcgtcaaggcttgatatttaacgggctctgggcagagtttaacaagtttcagcaatggggtttgataatgaatgtatcttgaatattcaatcccttcctggtgaatatttctgccctgtttgccggacacttgtgtatcccaatgaggccctacaaactcaatgcacacatctctactgcaaatcctgcttggcatatgtagtggcaaccacacaagcttgtccttatgatggataccttgtaacagaagctgattcgaagcctcttatggaatcaaataaaactcttgctgagactattggcaaagttgcggtctattgcctgtataataagagtggctgccaatggcatggagagctatccgcctgtaccacacatggtactacttgtgcatatgggaactctcctgttgtttgcaatcgttgtgggacacaaattgtgcatcgtcaagtacaagaacatgctcaactctgccatggcttacaatctcaaacccaacaagctgatggtagtcaggtgcagctagcggcggcaacaactcagccagtcacccaagacccatcacttgcttcagctggatctgctgcacctgcagttacaaccctaccaaagccatctttaactacagccacagctgtaacaagttctgcaacagcaacaggaggggcagctggtgcaaccacagcagcagtgccttcttcagccgcatctatttctgcttcccaaactccaacagctgagcaatggtaccagcagcagcagcagctccaatactcacaatattatcagcagcagcatcctggatccaacccttacatgcagcaatatcaacagtataaccaataccagcaggcgtatcagcattacatgcaaccttcaatgcaagtaccatcccaaaatgtggtgcaaggatctgcacaacctgcttcttatgttcagcctcaagtgcaatcctcccaactgatgatgcaagctcaaagtcaaccccaggtccatccattgacaagtcaaccgcagcttcagcagcatccagttcaacctcatccccaaagtcaccctcatctttcccatgttcaactacctgcagatcagtcacagcttcatcaatcaattcagtcagcccaagttccacagttccaaccaagtcatgttcctctccaaccatctggtctccaagtacaacctgcagcacatccatctgctcttactcaagttggtaaccagcaagttgctactcaagcaacggctcatcaggtgcagccacatgtacgagttcaacctccgcagcagcaacatattgttgcacagcaacaacatccacatctgcaagctttacctccacatcaaaatattcaacctcagatgcagttaaactctcaagttcagctgcagcctccacatgcccagcagcaagcttacccacaaccacaggcctatcctcaacaaacacatcatatgcacccccagaatgcttcatatacacagcagcaaacacaaggtgctcttttgcaacctgtacctgtgtcccatcaacaagcacatgtttctcatcatcctgcaccaatgcgtcctccgttgccaagtcaacagccagctttgcagccttttcagggaattcaacgtacaacacaacatggaaaacatattggatttcatgctcagtggccaccaatgggttccaacatttcttcccaggcaccaccacagggattccctgcaaactcatctgtttcttcacaatcagttcaaccataccagcaaggaatgtcttcatcacaacaggtgcattcccaacctggtcagccttatacacagcatcatgttactggcaatactggacatgttcaaacttcagctggcagatctatgactcatcttgcaccaacacagcagtttcagcaccaacaatcagcagtgcttagaactgagtcacctgctgctgcgcaccctattgggcagggttctttagatcttgaaaaacatacttcaaaatcagggaagtcagaaaatgcaattaatgctgctgtcagtgaaaataaaattagcggtgctgactcagctgccatgagacctacaaagcctcaatcaggtgaggaaaacatgaacagtgaacaaaatggttttgttggtgttagaaaagatgcagtgcaaactggcattgtatcacacggtttagatggttcaattaggagggatgggaatactgaccaggcaggtaattcacatggtctagttgtgcagggaggcaaagaccataaggcttcagatgttactaatcgtgagaaagaacaatcatttcagcaggcatcactgcaaaatgcaggggcactgggctcttatgtgcccccaggtgtggtaccacaacatccatctggaccagataaaatgcttcctcagcatattatgaatcctggtcataagcatggttcctctgaaaatatccgtcctccgttgcaacaaccatatggtttgtttcattctggaaagatatcaaggccatttggagagaaccagattcagatgcctatgtcacagcctgggggtatcagacctggtgatggtatgatccgacctcctgtggttggcccattacctggacatcatggtgcagtgttgtctccttttgatcttgaacatttgggccagccacattctctcggaatgttgaacagcaatgactttggtggtgaggggttcaatacttcaaggggtgctgcatatcccggaagacatgataatatcgaagacgatcggaaacattttccagcaccagcccttctggatggtcaaggcttgcaaagggaccctagacattttgagagagctttagttagacctgatggtttccttgattcagtacctggaaggcctccttttccaaaccatagaagtgtaggtttgcatgagggttttccaagaaaacaaaacacaactgccagtcaccctgacgtcctgtcacatggagcagaatttgatcatcacagggctattggaatgcctaatttcagaaatccaggcccatttgctcaagggacaagtggtggtcctggtgcgccccctaaaaaccagcttggctctggtaaccttcctggaaacatacaacatgcttttgcaggcccagacatccctccagctccttttaaccttggtgacatgcatccaggtgaccctcatcttgttgctgactattctcagcatggatttcctaaaactgcagcacactttggtttgggtggattctcgagaaatgggaattctggttggtgccgaatatgcatgtttaactgtgggaccgcagagaatctggatctgcatgtacaaacaagggaacatcagcaatgtgcaatggacattatcctgaaaatgaagcaagatgttgcaaagaggaaaaaactgaattatggaggccccaagtcggtcaacaacaaaaaggtttctgggaagggccattttcgtgggaataggcgctagtgttacctgattcagcttgatgtgaatttgaaggttgctactggtgcttttggacgtttcataggcaattgagagttgagatctcttcagacatcatgttcacgcggttcagagtatttgaagtggaacttgtaatgttcccaaacttttgttgccatgttgatctgcagagttcacatggctatgtttactttacgtatttttgctgaagttctgggattgcttaacatgctagtacccttcttctgtatgcgatgatttatgactactgtttgtttcaactaggctcatgctttgtctaatgcgacctaataatagaccacactgaaacttttacaaagagacatgtaattgtgtcatcagacatccagaacatggtaattttttgttggaatcttttggtaaggggctgatgggaacatgtaaaaggtactttcagtgcctgaaaattatgctagtttttcatagtttaattcaaaaaaaaaaatctaagggtgtggtgtctaaatagagttcctttacaccactaagcccaatttgcttaatgatatattttaaaattattgaatgctgattccatgatatgttcccattcaaaacaagggaggacaaaagtgctgcattctggaataaacacatgggctagagttgttgacatatcattgcatgacaacaacaaagccatccaaatcaacaaaaataatctcattaaagtggtgcctattttgtgcctgagggatccattagtgttaaagggaggtttggaagcctggaaggaaacacaaaagtatgaagaggtttgaattgggacatgtactttgaatgttagcatgagatgggagggaattgatggtaaaccttgtttggaaccaaagtatgtaggttgtgctcaaatatagaagaaaaagaaagatatcttgattttcatatgaatactagtacgtgcatcatgtatgcagagctttttgatactgatactggagttttattattcacttctagttagttagttagttattcgaggtagtgatggttttattatcatgggtttgatgttcagaataggacatcattgaaccctacaagcactaaatgttgtgggtaaaatacctaagtttctaattcactgctgctgggcagatggcttgttcagttatgtttgatatgatttttcgcatgtgatatattttgctgatggtggtgtttctctagatgtctgttttaaatcatctgtatttgctgtttgtttgctaagcagaaactggaaagtgtaggataatttccagcagagggctcctgtcatacttgcttgtttccctaacgatggttgtttggggttagacttgttacatacattcttcacctgctcatggattttgtccaaactactcatagggttatcgttcacatgtgtaacttattcagcacactactgtgatttttttatagaactaggtaggatggttatttagcaagatgatggtatgattcaaaacaacttggtgctttctgctactacccttgacttgtagcccgctattagtttggatataaccaatcaattaaaaggcaccctttggatgtaagcacaattcggttggctgcttccaattgatttggctacagatcaaatcctcttcaaaattgcatggtgtattttgcgttgctcaaagacaagaaatcattcaagatgcttacactgcccctatttattttctctgactggaacggggttggctaccatgacgacttagcaattggaatgccaaactctaggttcatcaatggttttgtaattttgaggtcaccagtgatttgttatacagaattgtgggtgaaaatgaaaacatctctggcaagttccagtcagtttctgaccagtttttgacacagactggtctgatgttgattgtcacatttttgtagcacatactcttaaggatcgggccaaaaagtctgttttcttgaatggttccttcctatttaggtttgaattgtagaatcactggtgctggtgcccctttgtcactcgtgtcaaatagtaaaaggaaatgtgccgttatcgatcggaattgtagaatcacattactgtacgattatcgatcgaattactgttacaatagtaacttgcagtgcagtatattcaatttggtagtaattagcaacttggtgacattgttgttcgtgcttggcataatgtagacgatctatgtttcttctgtctcttttcttttgtgtttctttgggattcttgtagatggtggatgtgcctgggtgccgactactgtttgaacgaactgatcgtgccttgctcattttctaccggcatcggatgtttttgaccgactccagggcacctcatatctaccgttgctgaggtttaaattgtaaaattcccgtcctgtagttctttaattacaactaatgcaccaggcgaacgaaaattcttgtaatgtattcacaaatatttctagagaagtttgcagtgtaaatataacaatgttcgtttcaatggagtgcacctactaattaatgtaccttttaaagtctatttaatataggagtgttagtgtaagaaaccgattttccattcagtggtgtatgactaattaacctacctcccggtgtatgtaaattattgtaatatatttttaagggcactgatgaagttccttgtgtttaaacatttctatatgaaaaattcta

SEQ ID NO: 43455 - DNA, 3553 bp, Zea Mays
ctccgctctcgcaatcctgtcattatcactagtccccgccccacctcctctccctgtaaagatttcgttcgttcctcttccgggttcctgatctcggtctcggtccccgattcgacctgtggagtctttcctgcaatctgtagcagtagcacgttgcctcgggaggagtttgtgcgttcctccagaggagccgagtccgtcagtggtcgcttgccactagcgcgaatcacgtccgggttgcgtcctccactccgtgccaatctaattccgggcgcccggggaaggattcgggacggaaggcactggtttctgtgcttccttggattccacggtgaaaccagcctgcgtggtccgcgccggctcccaccgcattccggcgagtcccgagtaacctcgctgtgggggggatggtgtcgcaggctcccatggcaggggcgggcgcgggcgcgggcgccaacctcaccgcggcgctgtgcaggaagagcaaccgcgtcgcgcgggtgctcgcgtacgcgctgctcgagtgggtcctcatcgcgctgcttctcgccgacggcgtcttctcctacctcatatcccggttcgccgccttcttcgggctcgcgccgccgtgcgcgctctgctcccgcctcggcgtcgacagcctcttcgagacccacccccgccaccgaggcgtcggcgccgagcccctgcgccgcttgctgtgcgacgtgcacgccgccgagctgtcgcgcgtcgggtactgcagcgcgcaccgccggctcgcggacgccggggacatgtgcgaggattgcgccgccgcggcggcggcggcgcccgggaaggcgttgctgtcatggatgggccagagcgagctcggcgagcgggacctcgcctgcgcctgctgcggcgtcgcgctcgagagtggcttctactcgccaccgttcttgctcaccgcgtcggcgccccgtggctcagattgtgggcacaaggaagaggaagaggcagccaggccaaatggagacgtggtcttcgtctccgaggaaggtcctgtgatcgagcttttcgacgagaagccatttgtggagggtgactcaatcggcgtcttggcttgtggtgccgaagttgttgccaatgttgagcggctggtgcctcttgaatcaattgactcgttgcccgtcgccatggccaccatgttatctcaatccggtgttgaaggaaaggaagcagttgatcatgatgatgtaaggcagaataacgtggatatggagcacacagttagtaccgatgaggagacaattgtcatgacatctgatgatgacaaggttgatgatgtggttgatcggctgattgatgaacatattgcagccgtagtctttgtgccagcttgtatagaatctacgcctaacgatgggataaatgcaggcaaaacggtggaggcctttgcctttgctgatcatcagtctgctgaggatgacagtggattgaaagataaggatcagaaaatatctgatatatctgaggatgagcaagccgaacaggctactccacaacaggaattgtgtgctatgccgacaaatcctagtgaccatgaaattgttgagaggttagacagaagtattgacttggagcattttccacaggctaagtcaaagcataaaatgaactctatgccagtggaagcttctgagcatgtcactgtaactcagattgaggagaagcaggttcagcaagctgaggtaactcaggagttggattcactaccaatatgttctagggagcaagctgaggtaactcaggctgggttggaacaagattgtggctctgtgccaattgattctggggaacatggttgcctgacttcatatgctcatactgatgttgagcaagctgaggtgaagcagaaagtcacttctgtaacaagagatgttctcgattatgcagcgggcacttttaatgttaacacaaacacatggaaaggaaccgctggattctaaagcagctgtttctgatgctaaatctgtagattcaggtgttgctactttgtctactgatcttgaaagcacggaattggtgaatgccgatcaactaaaatctgctttggcttccacacgcaagtcattgaacaccctatattttgaacttgaaaatgagaggaacgctgctgctatagctgctgatgaaaccatggcgatgataaaccgcttgcaagaacagaaagctgcaatgcagatggaggcgatccaataccagcggcttatggaggaacagtcagagtatgaccaagaagcactggagaggctgaacgaactagttgtgaagagagagaaggagaagcaagatctggagagagagctcgagctgtaccgccacaaggttcatctctacgaaataaaggtgaggaaaatgtccaggcacaaggctgatgaccagaacggatcgtcgtcaacttcatcgagcgccgaggatagtgacgacctttcacaaagcttctatgaaggtgatgaatcttcccacggtcttaatggaagcaacgggagtattcccacagatgtcgtgctacaagaaactgccagacatctcgttatcatcgatggctctttagctgattttgaggaagagaggctctccatactggaacagcttaaagtgctagaggataagctttttgatctcgatgatgacgatgaatccgatagcaggaagcatttcccagaagaaaaccacttcagcggtgcctcgaacggtttctctgacgacgatagctgctctaaactccgtgacaaaagaagagttgtaacctacagaggaaaggaactccttccgttgttcgacgatgctacgactgtggaagctggaaatgtccccaatggtgacgaggcacatcatccagcagaggctacactggacctcgctagagagcgacataagcttgtgatcgccaacgaaatcgatcaagtgaatgagaggctacaggcccttgaggcagacagggagtacataaaacagtgcgtgagggccttgaaaaggggaggcgaagggttcgatcttctccaggagatattgcagcatcttcgggacctaagaaggatcgagcagcgcggaaggaactctggggagctttcgcctcattacctacatctttacacggactgaagatcagctgcaaagtctcgtgcccaatattgcttgaagatggaaaccataggacaatgataaggggaaaaaaggattgtcgactaataactagcattgtcattggagaggtttcgttgttggttcccggagaggagaaaggagctcctcctggaacagtcacagtctgttcggaaacgccatccggaaggcagatcgcggagcaagtctgtctgcattccaaggtccagggttagtgagctgcccgggtccatgggggtgtgcttgtgggttgtggcggcaatcatggccctgtgcaagcttttaaaagaattcatttatcctgaaaacatgccgatgccagctttgctgccggatacggatagagtgggcttcactagtttttttatatatttcttttttccctcctaaattcttt

SEQ ID NO: 43456 - DNA, 802 bp, Zea Mays
gatctctgggctccaaaaaaacacccgaactcatccgctcgggagcacatcgcgtctccattcctctcccagggcaggtgcaaggattgcaagtattcagagaacaaaaaagacttcagagcttaaggatgaaagaaacaagggtgatgatgaatttataaacaagcctcttccctactatggcaaccttgctacaatttttggcaatagtgttgcatcaggacgatttgcaaagacatcaaatgaccctcttgctgttgatgatggtgaagatgtgcaaaaggaagggtgtattgcaacatctagtgctgtccatgagaatgaccctgcagcaacatctgcaactaaaccatccaagaaggccaagagggaagacaatggtactgaattcttagttgaagcatttcagcatgccactcaaacactagccagtgccatcaaggaggcagcaaacaaacctttgccagctggtttgtttgaagctgtagacaatattccaggatttgagattgcgcacaagtccaagtattattctcatttggtttctaatcctgacattgcacatgctttcatggatgtgccattgctttacaaggtctctatgattaccgacttcgttaatgagaagttttaggctttatggtaatctaataatacatttcacaatttgtatggatctatgtaaggacctatgtttgtttgaaactatgtatggacatgtgtgtgatatgttatgaaacttatttttgacataacacttttgtgatggttgtatggatgagtcatgtgtaagattatggag

SEQ ID NO: 43457 - DNA, 4663 bp, Zea Mays
taacttatagactagagcaagctagttagtccaattatttgtgttaggcatttcaaccaccaaaatcaattaggaaataggtgtatgcctaattccctttcagccactcgtcgcccgcggattgcgtggccgaccgttgcgctggcggccgttggctcaccggatagtccggtgaattataatcgtacgccgccaaactttctcgagagtggccagttcgccggaagccagcctggcgcaccggacactgtccggtgcaccatcggacagtccggtgtgccagactgagctgagtgttggctgcttagagccaagtccttttcttcttctcttttttttttgtttctagcacttagacaaaacatgttagtactcaaaacaatgtactaagtctagaaacgtatcttgttacatgatttgcacttctcttttcatttggcatatactcaactcacttagtatgtgttggacacttaatcaccaaaatataatagaaatggcccaatggcacatttccctttcacaacgcttgagcccatagagggtgaaccgactgtaagggtgattttgtccattaacggtggtgacattgtattgctcgagttagtcggagaataagacatgtcggcgacgtgccgagggtggtggcgcgtgttattcttgaatagtcggcgatgacagcaagtggcgcgtggaagagagagagtcggttgagaaaatgagaggcttggaaagcgcaaaaaccctagcaacgatcattcccttctataatcatagtaaaataaagggcaatgataataacatcagtcgtttcacacactatacaaactccgagtaaaaactccagtgtaattaagtcagggtcgatactattgcgtaattaccccattgtacattattttccaagaatgtagcaagtaaccaggggttcaaacgtacttaggctccctgattaccctataaatacatccatctgcaccccagatgataggcacttgacaagacattcgtgcaccctagcctcttgatttgttgagcaatgttgcctcacttgctcccaagtgcttgggcccacatgtcaagatccaacaatcatgccaactaattgggtaccaattgatgactctacatgctatgattctgacaactcataccaccatgtcaatatcgaccatgacaatgatctatgagtgttgttggtgtcacccgttgatagatgagtgcttatgttatgaacttttgggaactatagtctctacatttgaagccagtctataattcaaagtttggtcacatgttttagtagttgaacatcaacaataactttgtagtttgttgcagctatgtgtaaattaactactgtaatgatctaatgtgtttctatccttgaattattgagtacttgagtatatcattgcattagaaaagtaatgtgtggttatgattggtgcctatttcattgtctactaagtactataatcgttgcacttcaatgttgtataaagtatacactttgattgttgttgcatcgaatacaggagcaaattggacccaatttggatgaacactttgatgcagacatccacaagtgaattggatctaagtccatacaccacttcatgtaaacacttatcagacatggtatcaattcttcaggataggttcctcaacctacaggcactcctgtcatgccatcatctactggtctaagtttaggaaatattagggtggcattgaaaaccaaacttccaaatttctcaattagcgaagatcttacacttatttcctaatggctaaacatgagcctaaacctagtgggtagtggctggtaagtaggtaaacatagtcttttggaatgtggtatgagtttagtacgttgatcattagtgtatcacaatgtgagaatatctagttgtaggtatgagacaacataagtcttccttttggaaaggtatataaagagagtacaaaacctaaagggagcattgtaccccaactaaaaattatgtagcttggaaggccaatgggatcttaccaaagagcaagtgaccaagttcatgtcgtaccactgccaagtcataaacaaaaacgacagtagcctacaagactgtttttgccatgaccttgtacaatagcttagagaaaaggcccttctctacttctcattgttgggaggttctaaagaatgaagcaaaatggttagacttggagtagggatcaaaaaatgttgatgtgttagtggactaaggtgcagattctatccccatgggcaatggtaacatgtgtctggtttcttaatctaataacaagagtcgactcaagagagacaatgacaagactaccaagaagaagacatcaacatacccgacatttgacagcactgagtacatctccaagatgtcaaatttgacaatgaagaagattgagtacttgtagaggtccgatggaacacttggcactaacattcactaacttgttcaaatagaggaaaagaagatggaaatggagaaaggcatctaaccatcaaggccaataaggaggagagtgaagctgagctcacgacaatggcaagggccaaggaagacgagcagatcatgggaattgacctagaatcttgcaatctagcaaaacgatcattttatgatgccatgcaacatgacattctagaaatatgggtggctaccacgaaaagctacaatatatctttccaagcaagctatattaacatgcaccaagggggaaaaaggaaagagtattggcgcaaaccttgggcttgctggagcaatccccaaagccgggttagcagcaggagcgacgagcccaaaccttcctacccctcgtcgtcctcggctaatccgccgcgcctccgatactcccaaggcagcgcccgccagctgcaacaacagcatcagcaagcgaggagtagccaccagcccaccacgatctcatcagactcctctcaaatcctcccgcccactctccatttccctcccctcccccgccaccctgcaatggccggtctcctccacctccagtccacgcttctcccatcggcgtccgcgctccgccgccgtgcaggcgtgccggtgccatcctcgtcccgccgccgatgccggattgaggccaagatccgggaaatcttcatgccagcgctcagctccaccatgaccgagggcaagatcgtctcctggaccgccgctgagggcgaccgccttgccaagggcgaccccgtcgtcgtcgtcgagtccgacaaggccgacatggacgtcgagaccttctacgacggcttcctcgccgccgtcctcgtgcccgctggcgactcagcgcccgtcggctccgccatcgcgctgcttgccgagtcagaggaggacatcccagtggcccagtcacaggctgcctccttctcctccacgtcccccttaccgtcgcctccgcaagaaactgctgctcaagaagcatccccttccccgccgccacctcctcccccagggccggtgtcagtctctgctcccacgccgcctttgccagcaacacaaggcgagcgtgtggttgcttcaccctacgccaagaagctcgccaaggacctcggcgttgatcttttctcagtcacggggtcaggcccctgtgggcgaattgtggccaaggatgtcgaggctgcgcttgctgcgcccaagaaggccgcaccagtgactgctccacggccggatgtgccattggggtcgacggtaccattcacgacaatgcagggtgctgtcagcaagaacatggtggagagccttgccatcccgacattcagggtcggatacaccatcacaactgatgctcttgatcagctctacaaaaaaattaagtcgaagggggttacaatgacagcactgttggctaaggcgacagcaatggcgctggttcagcatcctgtggtgaactccagctgcagggatgggaagagcttcacctacagcagtagtatcaacattgccgtggcagtggccatagatggtgggttgattacaccagttcttcaagatgctgataagcttgacatttattcattgtcaaggaaatggaaagagttagttgataaggcgcgagcaaagcagttgcagccccatgagtacaactctggcacgtttactctctcgaatcttggtatgtttggagttgataggtttgatgcaatactgccacctggaactggagcaatcatggccgtcggggcatcagaacccaccattgttggtacaaaagatggtagaattgggatcaagaatcaaatgcaggtaaatgttaccgccgatcatcgggttatttatggagctgaccttgctgcttttctgcaaacacttgccaagataattgaggatcccaaggatcttacattctgaatgtcccaactgattgtttttccctgaggcaatcaaaaccgggtgcttcttacctatcagtagatgtgtagtttgtcttctgtttatgtgattaggtgttttaagctgtcaccaatgtcagcatcagaaatatggttgacgctcttgcaagggtgctgacgctatatcttcagggagatctgtaaaaacgggtcacatatctgtttgttttacatgtgaaggagacggatcatggtttctccaaaccactccaatatgccaaggctgtagggtatcgg

SEQ ID NO: 43458 - DNA, 2214 bp, Zea Mays
aaattccattctggtcccttccttgccttctccgcctccgcatccatccggtctccagttgtctcctcccgcctccttccggtcccctcccggcgcagcctctcccgccccctccagccaagcggaccctaggcggagccaccttccacgcttcccgaagctcgcccgtgaggggaggccaggatggcagcgacgtcggcgccgcccgcgagcgcccacgccaacggcaacggctccctcgtgggggtggcggcgccggtgggagcgcccaccaaccccatggcgacggctctgctcaccgaccagtaccagttctccatggcctacgcgtactggaaggccgggaagcacgccgaccgtgccgtggaagttgactgctctgatgtagaggtgtactccattcctgagggatcagtagtttttccaaaagtgcccttgatgagagttgagggtccagttgctgtggttcaacttctggagactccatttgtgaatcttatcaattatgcctctttggtaactactaatgctgcgcgtcatcgtcatgttgctggaaagtcaaaggttctgttagaatttggtttaagacgggcacagggacctgatggagcaataagtgcctcaaaatattgttttatgggaggttttgacgcaaccagtaatgttttggctgggaatttgtttggcataccacttcgtggaacacattctcatgcttttgttagctcatacatgagccttgatgagataccagacaaggccctcaagagcaaagatggctcaagactttgccaggattttgttagtttagtgcaagagtggcttcaaaagattcaggcagcaaattcattaggtggtgtatttggtgatacaaataaaagtgagctggctgcatttgcatcctacgcattggcttttccaagcaacttccttgctcttgtggacacatatgacgttatgcgaagtggtattccgaatttctgtgcagtggctctagcacttcatgacttagggtacaaggcatctggtattagattagattctggtgatctggcctatttgtccattgaagcacgaaaagtgtttagtgcagtagagaaggaatataatgtacctggttttgcaaagatgctcattactgctagcaacgacctgaatgaagaaacaattgatgccctcaacaaacagggtcatgaggttgatgcctttggaattggaacttaccttgtgacgtgttattcccaggctgctcttggctgtgtctttaagctagttgagataaataataaacctcgtattaagctttctgaggatgtggcaaaagtttccattccatgcaaaaagagatgcttcagactgtatgggaaagaaggctacccactggtagatatcatgattcgcgaaagtgaaccatcgcctaaggcaggagaaagaatcctctgccgccatccattcattgaatcaaagagagcatatgttgtcccccagcatgttgaggagcttctacagtgctattggcctgggacatcagataaacctagagcagagctgccctccttggagaagatcagaagccgctgcatgcagcagcttgaaatgctgcgcccggatcacatccggcggctaaatccaacgccctacaaggtgagcgtgagcaccaagctgtacgatttcatccaccgcctatggctgaacgaggcgccagtaggtgaactgcagtagatgatgatcatataaaagaagttttgggtcatctgcgatacagcagcaattcatcgaagaaaattagagctcttctgcacaacatcaacagttgagcccatggcaggattttgctccccaaattttcatctctagtcaccggtatagaggcaggttaatcaggttgtctagtttatacgtcccttaattggtgggatgctatacacatcatcatcagaaaagaaccgaaatcatatggagccaaaaatgttactaggtcgtccggtgtttgtgctcgacggtgtcacatttgtttttctagccgatcgtgcatatggtcatataaaacactgcactgttgattgtactgtttatatagtgaaatttgaaatgatagatgaaataggagatagaatgagtaaacgatccaactgaccaggcacgctgcgctagcgaggcttgaattgctgctctctgcgttgcctgttctccttgaattatgcaaggatcgag

SEQ ID NO: 43459 - DNA, 478 bp, Zea Mays
gcaaaacagagtttttgattcttgataagccataccttgaatccctctagccagcatacccttgagagtcttttctttagtttggtaagtcttactgagtaattccatactcagggttttattccctgttgtttttcaggttctaactttgtgctgctgtgataatgttaagtgccggtgggctcggccttcttataagtctaagtacttcttctatacttcttattgaggatggtcacttgagctagcatatatttcaaacttatattttttgtaatcactccgataaaatcatgtacaatttttttgtaacttgtaaaatttggtaataagatttccgctgcaaaaatattgatgtgtgtgatttgtgttacttaatcttgcggtcctggttgttcgtggtttatccgatgtccttggggcaatcagacggatcttgttaagttatctggtgcacatgcatagccatctgaggtct

SEQ ID NO: 43460 - DNA, 2413 bp, Zea Mays
ccagataggacgagacgatggtaacttaagcctactttgctcgctgcggcgatgccacgatggcgccacgctcttccaccttcctctcccgcgtcgccgacgccgcgcgcccgctctctgtctccgctcgtccccgtctctcaccgtcctgtccctctcacaccgccgccgcgcccgccttcagcccgcccgccttccacacgcacctcgcatccgtcgcgtcgcacctcccctccctcctagccgctctctcccgcgcccgcgccgcgcggctcccgctcctcccggtcacccgcgcgcttgccgcctcagcgctcctccgccacggtcgtctacccgatgccctcgcacacttcagtctcctcccggattctgaccccaccgctcctttacccgtaccgctatgcaattcccttctctcagcgctagcgtcgtccactgggtctctcggccacgcgcgcaaggtgttcgatagaatgctggcaggagctgtcgagctgaacaccgttgggttcggggtgtttgttaatgccgcaggtaggaaagatgacggactggctgaggtcctgcgcctggtggatgtggtgggctgtcaagggagacgggttaacaggtcggttgtggtggcaatgcttgtggacggtatgtgtagggagggacgaattgaggatgcttggcgtgctatggatgagatgaggctacgtgggtggaaaccagatttcttggcatataggattgtggccgaggggtttagggtacaggggagggtggaagaggaaggaaggatcttgaagcagaagaggaagcttggtgttgcgcctagaaaggatgagtacagggaatgtgtgcttgtgttggtgtccaacaggctgtttagagaagcgaaggagattgccgaggcggttgtgttgggagatttcccaattgatgatgatgtgctgaacattttggttggttcagtgtctgagattgatgtcgatggtgctgccatgttctgcaagttcatgatggggaaggggaggtttccaagtactgagatgcttgcacacctttgcgagagtctttgcaaaagtgggaagggcgacgaaatgtgggagattttgagggtgcttttggacaaggggtattgtaggaatgcaaggggttaccatttggtggtgtcattcttagggaaggctggaaaggttagggaggcatatgatgtgctcaaggaggtgaaaaaaaagaggctagagcctgacatttcatcatataactcccttatggaagcgctgtgtagaaatgaccttcttaggccagccaagaagttgtgggatgagatgtttaccagtgggtgtagcccaaatctgcagacatacaatatactcataacaaaatttacagaaatgggtgaaagccaagaggtccaacaactctttgaccatatgttccagaaaggatgctggagtggctagttttgtgctgagtagttttatacttgcactctgcaaacaaggtaatttcaaagcagcattgagtgttatgtgtaatgttccatctaatgttgagaacttgaactcacacatcatcttgctgaagcatctaaccgatgttggggaagtggagatggccattgagcacctagaatggattaggagcaactgcagctctagttttgagaacataatgaatgagttcatggcttctctatccacatcagccagtcttcaacatgtgacaaagttgatacagtatttacactcacggagacttattgatgatgcacattgtaggttgggggaagaatgattgagactattatgtggtccgatcaggcagccacaacattattagggaaacaagatctatattgcagtgtttatgcctatcacaaaatgaccagatcacaaaggtacaggaaagtgtgtaatgtaaccacactattcttacaagaaagagtgcgactagggtgcgactgtgcgaggtgtgtgtggattgcgggcgcggcggcggcttgagaggaacaggacggtgggagacagagagggggtgtgtggtggcggtggcggtgccagcgacgacgcaggagaggaaggtggaggggcgtggtgtcatcgtggcatcgccgcagcgagcaagtaggcgcgaagttagatcagaacgggttcggatcaaattatattgatatgtgcctctctaatggatacatccgatcatttttttaattgagtcagatctttttagctttgggttagatttgattttagatttttaaaaaagttggtctgtgtccgatcgaccaatcgatccgtggtcaaaaatatggtttgtgtctgttcgtagaatttgatcggttggattgaatttttttcaagcgagttaattgaattggacggatatggcgagttaattaaaattgttttaagcgagttaa

SEQ ID NO: 43461 - DNA, 1678 bp, Zea Mays
tcctcggtcaaggaggcccccgaccccctcttcaacgctatcctccaggagctccggctagacgccctcccgatccgtctccccgcagtgacgccgacgtgcgtggaagtgttgcggtgaactgcaggctatgggaccacctttatgtggctgcgctgttgctgggtgacggctggccgggcgcgggcgaatgagagagtcgggcgacgccacgaggccattgatgtgctaacatgcgaatgtcagggcctatcttagagtcgcggtaggagccttccaaaagcaaattctccatcaccaatagcatcatagaggtaccacacgcagggagatatagcaagggaatgaacatgcaaattcttaagcatgccctctaggcacccagacaaaccgtagatgaaggatctttcagtttcaagcccggttcagcgaagtttggaaattactactaatccttacaaatttctcaaaggaggttcggtttatttcagctcttttcgttcaagctcgtgcaacaggacgtttgatccttctacaatttgttggcgaggcggatgaacactacacagcttaacaagaacgagctatcctcaccaccgaaaatgtagagtattataaaaaagtaggacaaacagcagatacattttaattttaccacaaacttatgtacaggatgaagcacacccaagttgacaaagtcctagattctacaattccagaaaatgaagcttgttacatcctcatgacatgcatgaaggtcaacaagcgcgcatggcgcgcacaatacactagttatgatataaatttgcatcatctatagagtaaggacaagtgatttcgctagtatgagacgattggttttggtgtaaaaggaaatacatcttttgtattatgtattgtattagaaaaaaccatgaccatgaaatagttacggttaagtccatataactcttttatgcgcttgttatttgtttgctatataatgacattctagtcttttgtcgaatgcattgcaagtaatgtaggaaaactagaacttcgatgtaaattacaaacatgtgaactaaacaaaccattatgccgtagttgacaatcatgttatttgaaaaatgatatcacaactatatttcacacaattgttgctccaaattatttttctataacagaaacctaatgtaggaatgtgtaggatatttgttttgcctgttaggtaaagatttgataggatgtttgctttgcttggtagggaaatatttgatgggatgtttgctttacgtgataggaaaatatcaacattgtcgtttttgggccaacaatgtagtcaagtgttgttgttgccacatagtcaaatggtcatgtgcttttacttcatgtactatctgaatatagagtacagtgtaaagctccttttgcagattggacctgctggatggtcaggttcttatatgtaagcataatcagttcttgtaagctgcacggtagtaagctattctccccatcaatattgcacactttaacttgttacccatatttagttcgtttgtatgtctttatagtggcttgttaatttacactactggttcttgcagccttttacaaattgatctttgttctcaatagatgattctcacccatacacttaatgatttctgccattaagtccttacactaaggatga

SEQ ID NO: 43462 - DNA, 1074 bp, Zea Mays
atggtgactcagggagagagatacagatacctggacaaaattgggcacgtcttcttctccgcgaacctcgcgtcctcctcgccttccttcctacaagtctcctcccctccccatgcctccctcgggcctcgcttctcgtgctcttcctctcctgcccccgccagcctccaacaacccgcgagggcgccgtccgcccctgcctccgggagcgatgatgatcgcgcgacgcctgctctgatccaacaatgcccccgcccaggcaagcagcttattgaagcatgtaactggcaccgcaagtttgcaaggctatgcggatagcttgttggatgcgacagtcagacattttggttcagcaccgtctgctcagcctgaagaaaatgggtacacaggttcctatgtctatgacattaatgggaacaagtatctggactctcttgcaggattatggtgcacagctttaggtggtagcgagcctcgattagtcaaagcagcaactgagcaattaaacaaattacccttctaccattccttctagaaccgtacaacaaaaccttcgttggatcttgcgctggagatccttagcatgttcactgcaagggaaatggggaaagttttcttcacaaacaatggttcagaagcaaatgactctcagagcaatccaccacaaccacgacgcgaaggactccaagctacaatttctgcatcactaaaacaaaaaaacaacagtaatgcatccaagttgtgcaggcttggagctgaagtttgggagctgaaggcaaagaggcagggactatgtgcagaaataagaaataatgattagatcagtctaggatatacatgcttcccattttctgaacctggaacactatgaagatgcaagggcttgctgcatatggatatttgttttgcatattggttatttatttaggatctagatcaccgatgactatgagtcatatgtaaatatatttttatcataccaaaagtgtctcgaacatatattatatatgaaactatggatcaacttcttgtaatgcaattattgatttttaatatatattattttttcttctt

SEQ ID NO: 43463 - DNA, 1053 bp, Zea Mays
tgaaagcccccccccgggaaatctggaatcaacccggtcaaagcgtacctcgggtacccgagctccttgctcagggctataagacccagcctccgctcctcgttaccccgacttcgcaatcgtcgtcgtcgccgtgccatagtaacgccaccacgacgttgtctgggtaccggaattgagccagggaggtgtgcgcaactccgtaggactatcccgtgccatcaatcgtgcgcgggagctggtccgccaggcacgggcatcgagctcacagcgtcggagaacttcatctgccgcgggcgattttcgcttgggactcatctgctatggccgtaagcctctgctcaatttgtgccccagccaggatcggctgtcgctcacgtcgtcggcgcggcactccttaagcacgacggcgttcgggcgttcttgtttatcgtctccgcggatccgggtgctacgtcactgcgtctggattactggtaagccatccaccatgatgttcacgctattacccgcttcgcgtagtatcctttagcactatcgttcggtcaccaggggccgggggcctgtgcgcgccagcgacccgccgccatggtacgcgtcctggtttccgcagtcaggtgacagagaaaggagacactcacccgtcgttgaatgcgtcgtgggcgatggagatttgatctagataacgtttcgcctgcgactgttggatccagatcgggtggttgaggttagttagggcaggatgaaatctgcaccgttggatctttatccctcggtggtggttgtgtacccgttcattggagttctcggtctaatctgggcgcttggttgtggatccaacgatggagaattgcctataccctttcgtcaaacgagattcacaaaagaacccctagacttcttagttatcaacccgccatccgcaatccacacagagtaattatatccgagcctaggcattttacaagttaaaccctaggttctcgagaattaatgtgtgcagtccagaactcggaagaattaaataaatgagtaaggaaatgaatttctagt

SEQ ID NO: 43464 - DNA, 862 bp, Zea Mays
cagagcgaatgatccaaaccttggaagatatgttgcgtgattgtgttctgtcttggaagggtagctgagaagatcatcttgcattggcagagtttgcttataacaacagctaccaggctagcatcaagatggaaccatttgaggctttgtatggcaggcggtgtatctcccctttgtgctgggagaccttgggagagagagatccctggttggtcctgattgggttcagcagacttctgaaaaggttcgggaaattcatcagaatattttggccgctcagagccgtcagaagagttatgctgatgtgaggaggcgggatttggaatttgcagtgggtgacctagtccttctcagggtatcacccactaaaggagttgttcggttcggtgtctccggaaagcttagcccaagatatattggaccgttcactatcttggcccgggtgggcagcttggcttatcgcttgcaactgccggattccatggcaggggtacacccagtttttcatgtctctatgctgagaaagttcttgtgggatccggaccatcagattgagatggaaacaattgcggtgcagcagaatctgacattggagtgtcgtccggtgcgtatcttggaatcctcgaagcgtgttttgaggaagagatcaattaagtatgtcaaggtcttatggactaatcagtctgagcgcgaggctacgtgggaacttgaggagctgatgcggcagaaatatccggaactttttgttgtgggtaagtgttgttgagtcattaatttttttccttttgtcgttctgatagaagcgttagaattcgagatcgaattctttttaaggggggtagagtgtgatacccgatttgca

SEQ ID NO: 43465 - DNA, 3172 bp, Zea Mays
caaatacccagcaattacaaaatcattttcccattgagaacacacaacataatggctgattataggtttcttgttcaagaaactctaatagcattgtgccttctcctctcttttccaccgggcatagcctccatccattcatccacactgaacatgagttgcatcttagaggagagggctgcgcttctatcaatcaaggcaagcctcctggatcctaacaactacttctacttgtcatcatggcaaggtcaagactgttgcagctggaagggaatcaggtgcagccaaaaaactggcaacgtcgtcaagctcgatcttaggcgcataaatccaggaaactttgtaggtgagataagctactctttagttaatttacgacggctgagatatctagacttgagttacaacaacttctctggggtacaaataccggagtttcttggttccatgtcaagacttaggcatctcgacctttcacacacctacctccatggaaagatacccccgcaacttgggaacctcaccaaacttgtctaccttgatctcaaatgctgggacttttataaccctatttactactatcccttctcagtcaaccttgcatgactgtcacaactatcctcattgaagcacctagacatgagctttgtaaatcttagtacagcagttgattgggctcatgaaattaacatgctttctacactaaaggaactacttctgcaacagagtggactcagatctacagctccttctcttcgtcagtttaatctcacgatactcgaggtgctcgacatctccgggaacatctttaacacttctattgcccccaactggttttggaatgcaactagcctcacttttcttaacatgaaacagtgttacttctatggttccattcccgacgagatagggagaatgacatcacttgaacaagtttctttcaatacaaataatcacatgtcaaccatgataccgtcaagtttcaaacatctatgcaacctgaagatgttagatttgtctgcgaacaatatcagtggggagctcccaaatctgccagggccactgacaaacctgacctacttcgttttgtcagacaacaagctcacagggacaataccagcatgggtatggacactgagaaaattgtttatcttggaacttcgttggaacaagataaacggtgtagtcaatgaaggccacttaaatggccttacggacctagtgttcttaggtttgggcttgacacagcttcaaataaaaattagaccggactggattcctccattcaaactgcaggcggttctcttagactcgttgcagctgggaccggcattcccatcgtggcttaaatcacaaacaagcatgaagatccttagcatttcaaatgcaagcataaatgcaatcccagattggttttgggttgtattttcaggagcggagttattgaatttatcagataatcagatatttggcgcactaccagctacattggaatttatggcaacaaataccatggtattgtcgaataatagatttaatggtacagttccaaaatttccaaaaaatataacctacatagacatatccagaaactcattatcaggaccactgccttatgattttgtagccccatggttgagcaaacttttgctatataacaattcaatatcaggcaccattccatcttcactgtgctcattagaaaaattggaactattagatctatctagaaacatgctgactggagaatttcctaattgccaagagaattcagaaccattcatgaaattacgtatattaaacctaaataccaacaatctctcaggagagtttccttcagcttttaaaggtcgtcaatttgtagcatttgttgatctttcctacagccaattctccgggaatctaccagtgtggatatgggaggagatgccaaccttggcactgttacgtctgcggtcaaatatgttttatggccacattcccgagattacaacgagtaaacaactgcaatttctagacctcgcgtacaacaacttttctggaagcatacctcactcaatagtcaacttgagtgcaatggctcgcacttctggatacagttactttcttgacataatcttagttggtataggttatcaactgtataattcagaattctattgggttagttttagagaacaagtttcggtttccacaaaagggcagcaactcgaactttctagtgagctcagccatatggtgattctcgatttgtcatgcaacagcttaactggagtgatacctcaagacatcggcgctcttgtcgcactaaaaggttttaacttgtcttggaaccagttaagtggggaaatccctgtcactatcgatcagctgaaacaactggaatctcttgatctctcacacaaccagctgtcaggctcaatcccttccagtatgtcagggcttacctatttaagccgcatgaacctctcatacaacaatctgtctggaaagattccaacagggaaccaattcgacacttatgacgcatccgtttacattgggaacattgatctatgtgggttccctttacctagtatctgcactggaaacacgtcaaaccaaggcacacatggaaattcaaattatcgtgatttggatcttgccatggcaatagggtttgtcattaacctttggtggatcttctgtgtgatgctattcaaaaagagttggaggagtgcatatttcatgtttgttgacgagttgcatgagaagatttatgtgattgtagcagtaagatgtgccatcttgaagaggaaatttggtaaaaaataagatgtgttcaccatgtgttcactacagaactcagagctggtacgtaatgtagcagtaagatgtgtcagtgagagtggctatatatgtaatgtagcatatggaactgtatgtccgctttggtattttcttcccataaactatcttgtttctgtcatcattatgtaatttcatcagtgtgttgtaaatacgtataggatttataatccttgagaactcagtttatcttaaataaaaatttgtggaatccttatctcgagcaacgagcatgacatgccaggcagtatcaatgtttcaaccggtatgggcaagatggccgtaggccctttggtattggcgaaggcaagatatatttgagcct

SEQ ID NO: 43466 - DNA, 1528 bp, Zea Mays
ttggggctaaaccgcacgacccactcggcccattccaagtcccaccttgcgtacgtgagccaaacgctcctggtcctggcagtctccatctccacctagggttccggcgatggtgcacggcggctacccgcgccgcgacgccgccgtccgccggcccaagtcctcgtcctccgccgtagttgccgaccgcaagcggaagtggaccgccgccgccaagaacacctcacttaaaaaccagatccgttccactgagcgctttctccacaaggaccttcctgatgacattagggttgctcaagagaagaaactggaagaactgaagaggcaacaagagcttcagaatcaactcgttgttcagcgaagtacagttgagagatagaaagataaaattctttggcggaagattgagaggatgataaggcgccttgagaagcagcaacgttcaaatggtgatggtttcagcaataatttgtcaaaattgtgagaaaatcttgaatatgtcagagtaagcttcttacattactgccctgccctgccctgcccatgatcctatgatgatatgagatataagtatcatcacaactttcttttccttgttggatcgaatcgactggagggtataatgaacccttgtttatctgtacctgcttgaatcctgagctaaagcttatacatctcatctcatgtgtagttcttcccaaagaatgaaaaatatgtctcgcttttcactggagggaatagctcagatattattcaagagaggaataaatggtgtaaacatatcaaggagaatctcatggctactgcagcaaactaaaaagatttagaagagctaacaagcgatgatgataccttggatgtgagtgatgatgactttatgtctggaagttcaagcaatgaagaggctgatgatgagtggactgacaaaagtgctaaggaaccagcttccagtgcttcaggtagggcagcatctggcatgtcaagcgatgaaaagaaccagcgttagagagatgctcgagttcttatgccaccaccacgctcattagcaccaaatagagctagacatgcagataaacgtgtgatatccagctcaagcaatacttcaaacagcacaagcggtgaatcatttaaaaatagaagagtaccaaatcgacctggggataataacagtaatctgagttcaaattctgatgcaattaaaccacgctgcaaaaggaggcataaaaagaaaaggaagccggcatggtgaatattcccaaagcgcgtgaatcgtggtgcgtggaacgaacctgagattcccagcaaagtttgactttccagcatggtcaattcggagagaagaaaaaaaaaacacagcatgtgcgatgtgcctgagcaagttgattgatctgtaccctcactcctaatgtaaaaaaaaaaacccgactctgcatccatttgttcacggatatcagtatatcactttacggtggaccagatattgccggtctaccgaatgcgtgttccattttcgccgtgtagccgtggt

SEQ ID NO: 43467 - DNA, 1221 bp, Zea Mays
cgcgactgccgtccagaccacaaagcagtccgcgtaataaagttcacccggccgcgacctcgctttgctctccgcgtcgctgttcgccggatcagtcctcatgtgtcgcgtcctgtttcctgttcgccagtgcgccctctcggctcgctcggctttaatccccaatcgtgtcgtcgaccgtcgaccttgtcgttgcctcacagcgctcggcgctaggctcgtccgtgcactcagctctcaccagggtcgcctgagccggtcgtcgatctcctattcgccatggtcatcacgtcggctgtccctatctaagccaacctagctcgccggcacgcgcgcctgtccgtatcgccagcagctcggcctctacgtgtgtctcccttaccatctcgacaccgcaactccatcatgtctgtatgtgtgtggaagatcggagtcgatggagaaggcagtaaagtccgcgtggtgctcaccacgtgctcgacataatggcagaatcagaaatcgtagctgtgctcgtggcttgcaagatggattaaattactggtgagctgtcatcgctctcgcttttcgttttaatatttctcgtcagtttagtatacttgcgctattaacgtgggccggtgacatactcataaatcgcagtagtaaattagtgccagaataaaatttgatcgggtagaatagggaagtctagtacgtcgctcgtcacgtatttagtgttatgcgcggacagggaagcgtcgttgatttcgtgaattcaagtaggattttagtatggcgagtcgatttgttattcctgttggttgcattgtttgatagattaaatagatatgtgtggtacaaaataaaattaaaataatcctttgtaagcaaaatagtataattaataaagcgagggataagtttagaatttaattaattagctgataagtcgcgtttaggctaattgaatttaaagtgtatgatttgttgtttgtgatgtttgcgttaggatcgttaatctagagaagcgtaattattgcgcttagtcgtacgtcgataactagtatttcaattcaaaatagtacatcgcctcgccgctaggagtttaattcgctatcgcgtagtactatttaggtttgaaatattcctgtttatatgcattcatgtgcatcgtgcatctcaattaggtacgataattgatcgcgtgatgcggaagacgagccaagttgaccccaagcg

SEQ ID NO: 43468 - DNA, 1113 bp, Zea Mays
tgagaagctatttgattgtgctcctactgaacaagaatgggcctttgctagagaggtgcttggcaggcttaaattgtttaatgatatccctgaagtattttctggaacaaattatgtcactgccaatattcaacttcttaaaatttgtgaggccaaagagcagattcggcagtgggttgtatgtggtaatcccataatagcaaaaaatgtcatttgatatggttgagaagtttgataagtattggaaagaaattcaaggaccaatgggattggccaccattcttgatcgtaggtttaaaactgactttctccttgggttcattgaaactcttaccgatgaatcgagtcaggcttgtatagagaaacttggcaaggtcaaagagtctctatatgagttgatgaaggagtatgaaacgaaagaggatgaagataacacagagtcatcaacacctgcacttttcaattcaggtgtactatccacaatcagtgcatgtgttgctagtagaaggccaacaacaatgaggttcaaatctgagttagagaggtacttggaggatgagttggttccaatcggcacagaaaactttaagattcttgattggtggaaggtggctggtacacactatcccacattaaggaaggtagcacgagatatctttgcaatcccagttactacagttgcatcagaatcagctttcagtactagtgggagagttcttagcgaacatcgtagcggactcactccagatatcttggaggccttaatgtgttcacaagattggctacgcaacaagtataaaggtggcaatgaagatactgcaagcttttggagttgtcttcaagaaattgaagatgatactaagggtcttgcactggtttgagttaaagactggatgtatgtgggcatcaatatcatctttggctgatatgacctaagaaacttttggaggttcttttggatagttgcctgttagacactgagcaactatattgctccaagcaatgctttttaagtactgtcatctggcaatttggttctgttatagctagacatgaacttatgtaatatgttattggctagacatgaacttatgagtggtgactgatgtgtgc

SEQ ID NO: 43469 - DNA, 4243 bp, Zea Mays
gtcccggcaaaggcacccggtggccgcgtccagcgcctaccgtttccgggggggctcctcgcctcctcttcccccgtccacccattctcctggccgctcttccccttcgtcgtcgcactccgctagctcacctcctcgtccccatataaaccatatccctctccgggccccgcgcagccgccggcgacaagcgcgcaggagcagcagttgtcgcgcctcactgatggcgaccgccgtggcgtcgcagccgtgccaccttcccctcagcgccggcggagatcccaggtgcgcggccagcacttcgaatgttcatactctggagaaagtatatggtttcagattcatatgcagaagcattgttgatgaccatccacagtggtagatggttggagtttcggagacacaagggagtcttccagagaactagaaggatggttcacattattccattggcttctgatggtgatggcaaccatatatctgttaatggagctctgcaagttggttctacaagcaacattgatgaaataaagttgaaattgaataaagcattgcagagtgaagatatcagcaatggactcgtccagtcgatacatgatgctgcaagatctattgagttggctctcatagagcacagcaaattgccaaagagctcttggtttccaaagacatggctaggcgttgagaacaatgcttggataaaatcactgtcttaccaggctgctgtagactcattgttgaaagcagttatcgatgtttcatctcgtgggaatgacagagatagagatattaatgtgtttgttcaaaggagtttgtcccgcctgctcaccccccttgagagtgttatcaagaatgaattatctaagagggaacctgcattgtatgaatggtattcatccgatcaaaatcctttggtggtgagacaatttgtaaacatttttgaaaatgatccaatgttttactctgctacagcaatatgccttgaaggcgagccgatgaatactagtgaaagtgatctttctctgcttatgctaggtttgatctgtcttgctgcaatcacaaagtttggatcagcaaaagtttcttgtcagcaattctcttcaatggtgcctgatattattggtcgattcatggatatgcttcttgagtttgcccctctaagtaaagcatataacttggcgaaagatattggtcttcggagagaatttttgtataattttggtcctcgtgctgctgttcctaaacttggcaatgaccatggacttgaaatatcattttggattgaactggtgcagaagcaattactctgggctcttgatcgtgaaaagatatggtcaagactgacaacaagtgaaagcattgaggttctggaaaaggatcttgcaatatttggtttttttgttgctttgggtagaagcacacaaggatatttgtctttcaagggtttgactgatttggatgattcactgaatggtattgtaaggtatcttatcggtgggagtgtactatattatccacagctgtcctcgattagttcatatcaactgtatgtggaggtagtctgtgaagagctcgagtggcttcctttttacaatgatgatgttttaagtgcaaaaactgatactgaaggtagagaagaagtgcctaaaggagaagtcatatcaagagtcctaaatgtgtgctcttactggatgactagttttacaaagtacagctcatggcttgagaacccttcaaatgtgaaggctgcaaagttcctttctaagggacatgtcatgttgagtgactgcatgaaggagcttgacatatcaagaaatatgtcaaacgacagtggcttcctagaacctgaagaagaattggatactggaacagaattagcttcctttgacaagtcgcttgaaaatgttgaagaagctctggttaagttagaaaatttgcttcaagaattacatgtttccagttcgcactctggtaaggaggatctgaaggctgcatgctctgatcttgaaatgataagaagactgaagaaagaagctgagcttcttgaggcatcctttctagcaaaagcagaatatctggaggccgatgcaagtagcggatcactatctcctgcagaggaaggacctgtaaagacaagtagcaggacgaacgatacatcagcaccacaaaaaacaggaagcagggtggataataaacgtcgcccattttgggacttctttggtcggtctttgaaagttgatccagctcttgcagatcaggatctgatcactgtcgccaatgtggagaaggaaggcatggagtcaaatgacatcctccgcttcgaacagttaagacgtgagctgattgagttagaaaagagagtgcagaagagtgcggatgaagctcaaaaggaggaggagatggttgtcgcagaaaaaacaactgcaccatcgcctggatcatcagtttcttctcgtcagactaccaagaaagaaaatgtcataactaaatcagtggagaaggtcaaagagactacaacgactgtgttgcaggggacacaactattagcaattgatacaggagctgctatgggtttgctaaaaagagctcttattggggatgaactaactcagaaggaaaagcaggctcttcaaagaacattgacagatttggcgtctgtcgttcctataggaatactcatgcttttgccacttaccgccgttggtcatgctgctattttggctttcatccagagatatgtgccatcgatgatcccgtccacatatgcccccggtaggttggatctccttaggcagattgagaaggttaaggaaatggaagttgctgaaggcagcagtgaagatatattggaggaactgaacaaatgaaataagctgggcatgtacagatggacatgattatactgcttagcttacggtctttcctgtaaagttgttttggaacaagacatttgagggggtttgttttatctaaagattctttgaatggcatacccgctggaaacagaagtgcaaggccctaggaataagtaaccaatcattgtgtcgacaaatgttccacgtctgcaggctggtgtatacataaaacatactccacattatacattacatgggcggctcacggtgcccttcaacatagtagaggatgaatgtccaagttcctcctggacagtgttctgtgtagggtagtggttttgatagaggattgtatatctagttggtatgttggtgatcacctttgttttgttttttaggaaccaagcctactacatgcattattgtctgtacccaaatgccaagttcagtgatctcctacgggattgagtggtgcgggcattttctaataataagccaagcccgtgagcaagatgtaggcgtgaacagtgttcgtcagtcgccgccaccgtctcccctcctgatccaatccaatggcgcgcctccacctcgtagccgtggcaatgggcttgctcttggccttgacgacggcgcaggcaccgggcgcgtccacgatgcccgcgcccatggcgcagcctccggcgacctcggcgcctcctcgtcccgcgccatccccgacccagaagaccgctccagctccggcgcccaatgccacggtacccgcccccgcctcgccgccggcgccgagctctatcgggcagacgccgaccgaggcgccgtcctcccctccgccgcccagcgccgcgtccagcgttgcctccgccttgtacgtggccgccgctatggcggctgtcgtgtttttcttctgaggtcggtactcggcgccgatggatccgccgcctatggtatggtacggtgcggtgtggatttgacacgatggctcccgctaccgctggtcgagtttgcttattaggatactagtagttaattaatagttgggttgatcagatcagatctagcgtttttgttgagtggggatattatttcttctacggatctgcacactagggttatgtcactatggttgccattgttattagggaaggtgcaaacttctaatttgaatcacatgatgttgatccaagggacgcataagggacgccaagcttattaaaacgataaaacgatggaacgctcatgggtgaaattttgacttttaaacgtttaaactttgtttaaacatagttttaaacaacataggaaaaataccaatatatcataatttcagacaataatatgaagttaaatactccctccgtcccaggatataaggcgtaactactttttat

SEQ ID NO: 43470 - DNA, 2632 bp, Zea Mays
atcctatcttcagtctcctcaccgcgcgctctctaccgcttgtccgtttcttcctcttccgaggtagcaacgtggtgagtgaggcagccgctgctgtgctgcactgctgctgcggaggcccaagccgaccggcggagagcacccgtccttgggcggcggagggtggaagaataaggccgggcttgcggatgccggggtgcggagtagcggggagaggtgatgtgggggtatcgtcggccgcgcgccgcactccgccacaagggaagagccgcccctgcctctggatgactatcgctcgcggttacgggaggcaacatgagctcaaatattgcacatcgccacaaagcaaatctctgttactagaagcaagatttggtcgacatgttactaggagcactgcttatctgctccaaaattcccggagcactgcaatgacaagactacagaagtctgggaagtttctgcaacctgtcttggactcctcaagaaattatttgactagtacattctacaatgcaagcttgaagaggagagttctgtcgagggttgagtgctttgtgtcttcagatccaataaacaatggttggttgaaaccaaggaggtcagagaacttcactagtttggagagcgcatgtgttcagccagaatacaaactaccagtcaggacacgtgctgactgtaaagcagagcagtatgaaataacaggctcacctttgagcccttctgatgttcctgctgatgccgttatgattggagatacaaacgagatttctccctggtggcaggagtttccaaagcgctggacggtcgttctcctctgcttctttgcgtttcttctttgcaatatggaccgtgtcaatatgagcattgcaatccttccaatgtcgtcagagttcagctggaatccagcaaccgttggtctaatccaatcatctttcttttggggttaccttctcacacagattcttggaggtatttgggctgacaggtttggtggtaaggtagtactaggatttggggttgtatggtggtcatttgctacagttcttacaccccttgctgccaagattggtcttccatgcttactcaccatgcgtgccttcatggggataggcgagggtgttgccatgcctgctatgaacaacatcctttccaaatggatcccagtctcagagagaagcagatctcttgccttggtgtacagtggaatgtaccttggatcagtcaccggcctgtctttgtcacctctgttgattagcagatttggctggccttctgtcttttatgcatttggatctcttggaaccgtttggtttgcactgtggcaaagcaaagcacacagctctccagatgatgatccggagctaagtaaagctgaaaagaggcatatactgggtggcagtgccttaaaggagcctgtcacttccataccatggaggctaattctatcaaaggctccagtgtgggctctcataatatcacatttttgccataactggggaacattcattcttctaacatggatgcccacatactacaatcaggttttgaagttcaatctaactgagtcggggcttctctgtgtcttgccatggctgacaatggctgtttttgcgaatattggtggatggattgctgatactctagttcagagaggggtctctgtaacaaacgttcgtaagatcatgcaatcgattggtttccttggaccagccttgttcttgacactgctgagcaaagttcggactccagccatggctgtgttatgtatggcatgcagtcagcgatgctttttcacagtctggcctgtattcaaatcaccaagacataggaccacgttatgcgggggtacttctcggactgtcaaacactgctggcgttctggcaggagtttttggtactgctgccactggctacattcttcagaaaggttcttgggatagtgtgtttaaggtgtctgttgtgttgtacatagtaggaacggtggtttggaatgtcttttcaactggagagaaaattctcgaataagctgtggacattcctatatgccactatacggaactgtgtgattttgatgatgtcattttggcaaacaaaataaattttagaagagatacatctggaagaaaactccattttatgcaagaggtgtacctgaatctgatgtttgggctatcggaagaaccagatcaaattagggtactgtgtgaggtcaagaaggtacacttggaacttgggaaaattcttgtacacaaagcaaccgcaccaagggcacgtcagatttttgcagttgtttcttgagaagtccaggcttctgtcaagatcaccaatccacatctttttgttttaaaatgattgacagttaaatcgtgtatcaccttgcctttgcttaaggcgctacaggtactgccaaactaatgtatgtgcttttcttatcgaaaaacctaaatgtatgtgcttcagatatcttgaacatctctgctgtttgcgtcattgctactattgtttcgtgtaagctgcataatgatactaaatgatgatggtgtcatttttgttttacttctattgacagacaaaaatatcctcacatgaaaattagattgcatcattggtcacaaaaacaaaaagaata

SEQ ID NO: 43471 - DNA, 861 bp, Zea Mays
gtctggtaatgtcttctattttttcatcaattcatgttaaaaaccatcaagatgcaactagaaaaattgccccaaggcatatccactcttctacttgccaaaataattataaacttactcctcactttttacattcgacgcatgagagaaatgttgtgtttttatttggctgtatcattgttgccatcacggccgggtaatacgtaggacaaagttagtatggagcgactctgctccataagcacatatgattagtggacgctgccctctgtctttggctagctccccaaaccatgctataaggatcataggaccaagaatagagtgccagcagttgctgtagaggcgatgagcacccagggaaactgtgagacgcacgatgcagtagtgccagggaaactttactttggttttaatgaatactgcaacgatgagaatgagagagttcaagtgctcaccattgtcaagaaggacgagcctgtagatgacattgtcgaccgtattaatcctgggacaattgcagggtacagtgaagcgaagggtgctgtaggtgcttctgccgccacttctgcggtgcgacctgctggctcccgatcatcaagtttccatggtgtgactagacatagatggagtgggaaatatgaagctcatctatgggatagttcttgtagagtagagggacgtagaaggaaagggaaacaaggtatccattttttaaccatctaaccagaactaggagaccttcaatctaaaggagatttactctttatataccgaaccgttatcttttgtcaataaataataattctatgacattgccagatatagaaatatggccatgtaaataaaataggtttcctt

SEQ ID NO: 43472 - DNA, 3040 bp, Zea Mays
cagcgctcccgctccttgctcgcctccacccgcggccaccaccgccctgcggcccccgccgcttgctagcctccaccgcgccgcgagtcacgccgttcatgcaccggctggtcctggagcacgggaggacgagcatgtcctggttcggccccagccccaaggtgaccatcgtcgacccggacctggccaaggacgtgctgtccaacaagttcggccacttcgagaagctcaaggtcccggcgctgtccaagatgctgggctccggcgtggccagccacgagggcgagaagtgggtcaagcaccggaggatcctcaaccatgcgttccatcttgagaagctcaagcgcatgctgccggcgttttctacgtgctgcgaggagctggtgagcaggtgggcggcggagtcccttggctccgacggctcgtgcgagctggacgtctggccggagctgcagaacctgacgggagacatcatttctcgcaccgtgttcagcagcagctacagcgaagggagaaggatcttccagctacaggtcgagcaagcttcgcttgtcatgaccaacattcggaagatcatgatccccggctacatgtacttgcctaccgcgaacaacaggaagatgcgcaggaacaacagggaggtggagtcaatcctgcgagagataatcgggaagaggatccaggcgatggaacaaggcgagggcaccaaagacgacctggtgggtctactgctggagacaaacatgagagacgacatggggatgacgatcgaagacgtgatcgaggagtgcaaggtgttctacttcgtcgggatggagaccacgttggtgctgctcatgtggacgatggtggtgctcagcatgcacccggagtggcaggaccgcgcgagggaggaggtgacggctctgttcggcagggacgacaagcccgagtatgacggcctaagccgcctcaaagtcgtgaccatggtgctctacgaggtgctccgactgtacccgccggccacctccgtcgtccgacaaacgtacaaggagatggaggtcggaggcgtcacctaccccgccggcgtgatcctggagctgcccgtgctgctcatccaccacgacccggacatctggggaggcgacgcgcgcgagtttaggcccgataggttctccgagggcgtgtccagggcctccaaggaccccggcgcgttcctcccgttcggttggagcccgcgcatctgcatcggccagaacttcgcgctgctggaggccaagatggcgctctgcatgatcctccagcggtttgagttcgggctcgcgccatcctatgctcatgcgccgcataccatgataaccttgcatcctatgcacggtgcgcagcttaagctcagagcaatatgatctcgacacgatgggtgtcccatcgttgatgccattgttatgtataaccttacaattcagataggcattcggccctgttaatgtctgaaataagtatcttcgcgttggcattttgtaatgtgcttttcacgtaccattggtgctttattgccttttgtatataaacatgtggatatatgtaactcatacattacacaaacaaacacaaacacaccagagccagagctatagggtggagctataaactgtggctctacttttgtacacaaaactggctccacatgttcttccaatcctgcaactgcgtttttcgcatccccgtttgattgcaaaaacgggactgctaagcaagctaagatttcaatggcatattccttcatacataggccattgagcgacgaggcacgccgcgtcagcactcccttggtggtcacttgcaatgaccagagacgggaggtctccgttgcccagaacatcgctaacaaggaaattgaccgcaccgttgcattcgacaaggtgctaggtccaaagtctcaacagcaggacgtcttcaaccatgctgttgtgccacttgtcagcgaggttttggacggttataattgcacaatatttgcatatggccagactggaactggcaaaacatacataatggaaggaggagggggcaaagcactgaatgctgacctcccgactgatgctagtgtcattccaagtgctgttaagcgcatatttgacatcctcgaggcacagagtgcagagtacagcatgaaggtttcttttcttgagctgtacaatgtggagctcactgatcttctagctctacaatgagattgcaagaacgggactgctaagcaagctaagatttcaatggcctattccttcatacataggccattgaaccggaagattttgtcggtattcggtaactataggatcatgtggttgttggtcgagttggaccaattatgctggctcatttgttggatgttttgacaagtcgattctagcttccttatgatctatgttagatttggtaatgcataccagttagtaaagcatttatgatgtacattgttatacatagagctttacatcacaaaaattatcagtttccctcagttacgatatgcatttagtatttatcgtattttgaaaattaataacctattatactatgataggcttgacttcatgtttatctaaataacttagtgcgatgatgcttgaaaacttatcttccattttgccagatcaatgaataaaaggattattcatatcaatgtccatgcaccttctcagaaaatccttttgtgatgttggtgttggtttcctggacctgtactggtacatatgctaagtcatccacaaatctgacccagaattgtaccgttctttttatagccatgtttggtacttgtttgagtgctccatagttcgcaagtttttttgttatgatgtattttgacatttgaatctcagacatgcttaggaactactgatttgaatttatgggctaacagttccagtatttcaaatagaaagtatgctatatcaaataagttgatgatacttttggtactggagaatgaagctagactgcatttgatattagaagtctgtttgtctgattgcagttgattataaagaagctagag

SEQ ID NO: 43473 - DNA, 3302 bp, Zea Mays
cctgtcgtgatcatggtcacaattgcgctcaagacatgtcttggtctttaccttctgaagactctgagtcaccgctgatcgtgctaacaagccacatgcccacattgtctgagctgtcatcatcgcattagacctttggcagatggaattgtgcttcgtcgcacgtttcattatatacagataagtacatgaggattacatgcattaaatttggtaacagacaggagatgaaagatggattagattaaattaaatgcaacgggtccacacggtcttgacgcgatggagtcatggatgatagtgacttggaactgccaggcaaaggggagggaagaacagtgcatgtgactcacccttgaaactaggaataaaaaatccccatcagaaactcttgccttctctataaaagccttccactctcaccatctgattggatgagatttgaattgtcacaagccaatgtttgattgcaattgtgatgtatttttcagaaaacgactgttgaattgtcatgagcaatgaagtggtggtgcgctgccttcagttgtgacgctgacagcccaaccagggtgaaatccttgattctttaaaaagaaaagagaaggggtatcagcaaggttcctaaatgtgaaatcgccattggatgccttcctcaagaaataaacgggcagacaggagtattccacaactgaaaacgcaaggcaagctagaattaagatgagaacaaactcactgacaagatcttactgtgattagaggggggaaaaactcagagacaatgagaggctgatctggccggaacgtataaaagcttaaacactgttggttctttgtccatggaagtttattaaaaagaagacagtgacagcgacctctgtgtctctacatataaaacaatgaggcagccacccactcttcccattagcaaagcgtacatccctccaacaaaccttgagttgagagaggagagaggagacagcaagcgacacaacacagaggtaaccggctcacgcctgtctcggtggccgtgggcaatcatggccactgtgggacagtctggggccctgaggagggtcaccgtgcactacgccaactcgcccacaggcagcacggtggcagaggtgagctttgacgaccttgacgacgagctgctcctgtttgtgctcgccgatcttcttcctggccaggaaggtttacaccagtcgatcttggaaggaacatacaacaaccaggagaaccacatgagaggtgcagcacccagtgcaccatatggttattcacggccagaggagtaccgtgcagagagcagcactgctgcagcagcagcaactggttctaggaattcaggcatggatgaacagatcgcctcggacttcgagtacgccaagcagctgcagcaggagatggaggacctcagcgtcaaagacgaagacgacaacgatatcagctgcgtgccgtctccatctgactctgacgatgagcacgagcatcatgacgaagaggaagaggctgacaggcaggaggacggtgatggtgatgatgatccagacaacatgacttatgagcaaggacaggcacttgtagaatctgtggggactgagtacagaggtctatccgatgagctcatctcctacctgcagccatggaagtacaaggcagtcaaggcttcagggctcttctcccggaaaacaaaccatgaagactgcccgatctgcctgtccactttcagaaaccgggaaaccatgataacgttgccgtgcaggcatcactaccacgcagcttgtgtcaccagatggctcaaggtcaacaagacatgccctgtatgcaaatacgaactgtttggaccttcctaggatccgaccacgtcgacgatggagctgagaggataatgatgatgacgacgacaacgacagatggttgtgtcatctgctctctttttttagcgccaagaaaactggaaatgaaaaagggaaatcaatccgaaaggagaatagaaattaggaagtataggtagaatatctctcttgccagtgactgtgcgatgaattaagcatacctcgtgctatttatgatgaaaaagggaaatgaaaaagggaaatcaatccgaaaggatttttttatatataagaacttccccgtggaatcactagaaacggtgactgttatgacagggaagacggagtcctatcacaggactaaacaacctggcaaccagacaactgtgcactcatcgctctcgttcgctcaagcctcgctcgaaaataccacagccgtatcagtgccaaacacacagggcaatgaaccatagagaatcgattcctaaacattagatcttgtttcttctataatttgatttcatagaaccatgggaaacacacactcacgccgtgccagacaacaggagactataatcgacactcctccatagcatgaaaatgataaccacagcaacatgtcatacgcacacgctaacagctctatagattgcgccgttcccgactcccaagccaaatccaactcgctaccttacataattgtatatggcacgatcatctgaaactgtcaacacaaaaactccagaaagagaagggtggcaaagcttatattgttgcttggcgctttcggtgaaggaactcgatagtagtgtgaggcgtggtgggacatgctcaccacccttgtccggcgccgaacaacccgctctccatcagttcgtttgtgatcaagccgtcgaggtcgaggtcctccagttgatggaaggagtcgtcgaccttcgagttcaccgcaatgccaccggtagcagcagctggactgctgctcaccgacttgaagctgttgtttctgccggggggcatgctggctgtgttgttgatcacattgcttgggccagtaccagctggagcagcacccttcaccgcgccgttatggtcacgggtattactgttgatatgctgtccctgctccccagcagcagcaacgttgggaatagcaactcctggtgcaagaccgccgctcgctttaggtgcatctggaggcagttgctgtgctttcacgtggttattgttcttaacttcctgcagaagctgattaagcacatggtgctggtactgtgggttaacaccaccaaagccctggaaattgctctgctgcggcataggctgctgctgctgaatcgccgcagggtgttggaactgcacttggttaggtccacggaaggatctggctgcttccagctgtatgccactgtgcattgctgtaggacctttgaagacactcgatgcctcctgctgcagcaagactggatt

SEQ ID NO: 43474 - DNA, 337 bp, Zea Mays
atcgacaaccaatggttaaatgtgtttttgatgaccttcgaaagaagaaggcccccaacagcacgcgtgatgaatgagctagcaagagcaaggcgagacctcaagacttgttcagcaagactataaaggaaaaggatgacaatgaccttagtcaactttgtagctcatatgtataggataggtttgagggcatgattgtattttttatgaggttgtacctaacgactataaatagggcatgttaccatgcatacacaagttttttggctgaggagaactaactcgctcagcctacgaagttatatcatgttcttcctttgtattgttattcgccgag

SEQ ID NO: 43475 - DNA, 2622 bp, Zea Mays
cttctgaaaaatccccctcccctccccgaggttgcagcggcgagggaggggagagataataataatcgcaggagggaaaagcagcagcgcaggcgcaaaaagcaaatcaaagccacaccaccaccaccaccggcagctgccgagagccgcgcccgcgcccgaacacaagggagagcggccggagaggaaagccaaatccatccactccacccccttttttttcaggaattcctgaagacacattgagaaattttatgtccaatgtcttgcctgctgtattgatcctggagtttctcagtgggaccaatttgattgttcaaacgtttgctctagaagtagtcgcccctgccatgcctccattccaagatctatcacgtcctccagtgcagcataccagacacttagcaacagctgctcctgctcacgtagatgctgaccctccggatgcagcttcaaattctagcgcagctcctttgggattagtgcagcctccagtgtctcctcacagtggttgttgtgcaccgaacatggtacaaaaacgagggacccgggactgccattgtgtttatccagtgagaattgagctcttccttcgtaatgtttccttgacttcaaactggagcaacaaatttcttcaagaacttgcttctcagctcaacctgcgcgttaatcagtttgagattgtaaatttttatgttgttggagcttctgggctaaatatcacaatggatatagctccctacactggaattagctttgctgctgatcaagtcaaggcaatgaattattcacttactctgcatacagttcggattgatcctgtgttggtcggggactataatcttcttaatttaacttggttcaggtcattggctccagctccagctccagcattcacaatggcacctagggcctctccatctacagcatctacctttccaagacagagtgagggtccaagcaaaaatagacatgcaagcctgatcacagtggttattatatgtgttggttctctaattggagtcttgctgattgttttaacaatatgcttctgcacatttaggaaagggaaaaagagagtgcctcatgttgaaactcccaagcaaaggacagcagatgcagtttctacagtggagtcccttcctcgccccaccagcacaaggttcctttcatacgaagaactgaaagtggcaacaaataacttcgagccttcaagtgtgcttggagaaggtggttttggccgtgtcttcaagggggtactgggtgatggcactgctgtcgctataaagaagcttactaacggagggcaccaaggagataaggagtttttagttgaagtggaaatgctgagcaggttgcaccaccggaatcttgtgaaactgattggttattacagcagccgtgaatcatcacagaaccttctttgttatgagcttgttcccaatggaagcctagaggcttggcttcatggtacacaaggtgctagccgccccttggactgggacgccaggatgaggatagcacttgatgctgccaggggattagcatacctccatgaggattcgcagccttgcgtaatccacagggatttcaaagcatctaatatattgcttgagaatgatttccatgctaaagtgtccgattttggtctggcaaaacaggcgccggaaggtcggacgaactatctttctactcgtgttatgggaactttcgggtaatctgaatgtccttttacatttagccatgggtccatggcccagcaatttattttctgaatttaccttcaccttgtacttctggcctttttgcaggtatgttgcaccggagtacgccatgacaggacacttgcttgtaaaaagtgatgtatatagctatggagttgttctacttgaactactaactgggaggaggcccgttgatatgtcacagccctctgggcaggaaaacctagtgacttgggcacggccaattctccgagaccaagatagattaggagagctagctgatcccaggcttggcggccagtacccgaaagatgattttgtgcgggtgtgcacaatcgcagcagcctgcgtttcgccagaggcgaaccagaggccaacaatgggcgaggtggtgcagtcactcaagatggtgcagcgctctgtggagttccaggaatctgtgccaacacctcccgctcgccccaacgtccggcaatcgtcgacgacctatgagtctgatggcacctcgtccatgttctcttcgggccccttctcaggcctcagccccttcgagaccgaaaccattccaaggactgcggttttctcagaagatctccatgaaggtcgatgactggtggggggtggctgccttgccatcgccgagccgagccgtttctctagagcctgtagccatgtagtcaagcattcaaaggctggtggtccaattggcctggccagccattgggaggaaaggggtacctgtaaattccatttttctgcgccgtctcaaaagactactactagattattacaacccacaaggacgttctctggctttgtatggaagaaatggttttgttcgaagttgctgctgtcctcagtccatagctcctgaattacgcagacagacagtcctaac

SEQ ID NO: 43476 - DNA, 423 bp, Zea Mays
cgttttgcgtgcatttacatgcagttgtatgggcagcgcctgcttgcgtggagatgctcacctgctgcgtatgatgggagtttggctgtgctcctcgttttgtatctattcagcctgtatgtgatgtgaagccaaccaaacatcacctgctttgagactccgcggctgcaggtgcacgctcgtgtcgtccaaccaaacagaaagtgatttaagaatgtgaatttgattttcattttcattttataattaatcaaggaactcatacaacataagcattaaattgtgtataatttagcgtaaaatagtgctaacgttatacggtcaaggggtccactagtcgtaaagggagtagttgttagggttgggcgaaatgctcttggctcgtcaactcgctcggttcgtggtcagctcggcttggctcgg

SEQ ID NO: 43477 - DNA, 532 bp, Zea Mays
cttcaatgcatccacaactattttgtgcttttccatcccctacagtttcctatttttcactatccaaaaaactacagttttcacaatctatagcttcaatgcatctataagttaatgttttccactatcatgtgatttcaataaacctttaaatacatttatgcacaactcaccattccaacttaacaactacagaaaactacaggcggtaaaggtaaagaagtcgatgctcctcttcagtctcctcaaaaaaggctcaaacaaggaccgctcaaaaatcaaagattccacagaccaaaaagaaccccaaagaatgacatacgaatcacatcagactaattgagattcaattcttctctacattttttgtcattacttatcagtatgaatgtataatccacccttttgtaactaaatatacatataaatcacccttcaactgtagtactaatcgctagaaacagttagcgtagtatagcttgtatctattttggatggtgatccacttaaataggactgaaagagtatatgt

SEQ ID NO: 43478 - DNA, 422 bp, Zea Mays
cgtgtctgaaccgacatacccgggcaacagtggcacgctgaaggtcaagaagatgcggatcaacaaccaacagtctcagctcagtcttgtcacgctccctgaagcgaggtggaggaatgggtggagcagaagtgggagagggagcgggagcaggagcaggagcagtggaagatggagtagtggagttggtggacacagcgggcttggtggatgactcaggagcgacaggagttggcgaagtgggaggtggagtggaaaatgtggcagaaggagcgggggagcagtggagcaaggtcgagacgcgaggagagaaacccgatatgcaatctaatcagatgaaatctgtagctggcctccccccacagcctagtctgctgctgctaccgctgcaagtgcggctctatccatacatctcttcttcc

SEQ ID NO: 43479 - DNA, 851 bp, Zea Mays
cggaaaaaaaatcccattatggacggcgactggtactttttgttcgcggggacggcgactggtactttttgtcgctgcggagacggggagtcttccgactcttccccaacgggaattcctcattcacatccctacgcacgaacggaaacgccccatgctgcgctcgcagtctcgcatggactccaccactgctgctgctaccgcggccgcggctgcggcgccggcgccggtgctgctggtgacgaacgacgacggaatcgacgcgccggggctccgcttccttgtcgaccgtctcgtcgccgcagggcgataccgcgtactcgtctgcgcgcccgacacagacaaatcgggtgtgagccactgcatcacatggcgccctgcactccgctgtaaacgtgttgatataataggtgctacagcatttggagtttcaggaactcctgctgactgtgcttctttaggcatctctggaaaactatttgatggtttggttcctgatctggtacttagtggaatcaacattggaaataattgtgggtaccatgtgatcccactatgcaccggtgcctctagaggtctccgttgaacatgtccaaaccatctcaaccggtgttggacgagctttttttcaattggtgctatccctaacctatcacgccaacattctgcatcatgcaacatatcaggtctaattgtcatcatataaaacttgcctttttagctttcgtggcatcctcttgtcacatagaacgccagatgcttgacgttactttatccaccttgctttgattctatggctaatatcttcatcaatatctctgtctctgtaggattgatcttaaataccaaaa

SEQ ID NO: 43480 - DNA, 415 bp, Zea Mays
ctgcctataggtaaatcttgcagatagagtttgtcctttgcactaatgtctagctcaagtttatccttaggaaggatggctctacctacaagaatattttcaccaggatcattgggagatctaatacaaggttccctatgatgttttaatcatcctaaggaacacaaacaatgctaaggatggaagtacttaaatagagacttgggctaggaacaggtgatgttctgcccaggttgattaaggattatagggaatgtaggcttgatgatcgatgtcacacccggtttttgggaaggcaaactaaattgcgaaccatgtacgtgtcgggatcagaactcacgtacacagcgattacataattggacatcatcacacaatgctcaaagtcaatagcgaaaaggtactttaattacat

SEQ ID NO: 43481 - DNA, 795 bp, Zea Mays
gcggatcatacgtgttcatattacaacaaacaaaatatacaactcatgaatcgaatcaaaaagtacttttataaaatacacaaattaatttggttcgtcttcaaccttgggttcgtgcgtgtgacggggatggatcgacgggttttggccggatggagaagagcaggggcttgactacggacggcggatggcatagcttcggcgaactccacgggctccggtgatgacgaactccggcgaactccggtgacggacggcaaactccggcgacttgcggtgtactggcgagcgaggagagctagaaagagagacaagttcgggtaggggagaatgggagagaggctcggttcacttttatagagagagggagaggagaagaagggtcggccagggagaggaatcaatggccggtggtccttccaggccattgacgcgtcggtttcaagaaaagaaataatgggaggaggaagaaacggatgctgtgaagttccattatcacgaacaagaaacggatgcgcggggtgcgcggcgtcgggtcagggtcgcggtcgagccgacgtgtgcagggacttcgggcgcttggcgcggttctcgcgcgcgcggggcaggcgcgcggtcgtcacggctgtgcagggcgccgtgggtcggctggcggctgtgcgcgcaggtcggacacgctggacgcggcatcgcgcggtgcgggcggcgtcctccagtgcctgcgtgagagagcagagagagagacgcttgagggagagggagaacagagggagaggaacacagggggcggcggcg

SEQ ID NO: 43482 - DNA, 203 bp, Zea Mays
ctcccaaccatcggtcttatcctctcccttgtccctgacttctggtttcttcaccatgcgtggagcactgcgatgcgtgccagccccatctcctctgctcctctctccctcatctctgcagctccccatgtccgtcgccttgccttgctctgtggggagttcgtgccccttttcttcatcctcgacatggcacacatcgccct

SEQ ID NO: 43483 - DNA, 1750 bp, Zea Mays
aaaccccccccccccccaagtggcctcggccttcctcacacagtccgatccagcccaaccgaacccaaaagtctagcatatgggaacctgagccctcaaaccccgccccttggcctcccctaccgtccacgccgaacacccgccgttctcaaaactgggctcctccccttttgtgattggacttaagtgggattcatatatcaggagtttggattcttctctttcctctgctgatttgccgagtatcaatccgggtccccatttgttggtggttgaagctcgatttctccatggcgcttcgtgcagcttcatgaatccaggttctcaagtgtatttgatcatgattctataaacaaccatcttatattactaatctgtatgagtttttttacatgttggtggttcaagctgaaaaaattaacttaggacaaagctagattgtcttttacatttgtgattggaaggagtaaccgttttcagtatccagtggcagttataaacagttgttgcgcttgtgcagcttcaaatattttgggatgttgccatgttaaggtattagctttttgttgtttcagtatactggcttcctaaaggatcaatgtcggctatctctgatcagaagaaacgcaccttggaagcccttcagcaacagtatactgctgcaaaagctaagaaattgcaagatgaacaggttaagagtcagaagaagagcaattttaatacccctaagcctaaatgtgatgcaccaaggggaagcaaaggtccagaaatcactcctcgacgaacatatgcccaaccttctcataaaggtgtagcattttctagttctaattgtcaacaaaagccttccacgtcctcagaaaggtggagatgctgggaaaattacaaagggtgccaaaaagttgaaactggaaaaagggatccttttggataattatgttcagaggggttctagattagtggattcccaagcaagatctttgttgattcattcaaagcgatcaaaaaggcacatgtctctaaaacaacataagaaatgtggttcatttgatttagatggtacattccacaagtacgacctctataagccaatgcatgagatgtggaaggactatatcagagagcttatggatctgagcccgaaaaagaaatttactgagaaccttctttcagcagatcttcatggggcccttctaatagtggcagaatgcaaagctgcttcatataaaggtgtaaacggcatcatgattcgggatactgcagagacgtttggaattatatccgaggacaaccgcttccgagttgtaccaaaagctggttcagtgttcgtacttcaagcagatcgctggaagttcacactgattggcgacaagctctcgcccagggagaagttgaaggaggatcagcgtcaacaacgtgcacaatcgctaatcagatagtttccaatgtgccagctgttctctcaaaatttttgctccacgaaatacttgcttttgtttagctgttttaccctttttagtttgcctctaacattgaaggtagataatgggtgtctgtttttgcaactattgattttattttacacagcaagatgtaactgcaacggccacgccgtcattgtttaactgtcattcatgctctccatgataaatatatagagttaataggaatgggaatgaggttgacctactaatttgtcactacagaatctgccttcagcggtccactaaaactttagtattgtacatat

SEQ ID NO: 43484 - DNA, 323 bp, Zea Mays
gttagttacttcatgtggatgacttgaagcttagaatgtttatgtatatatcttatggaaaggcttcacccttccaattgatgtaataagttatgcacttcaagtactatcaggacttgtaataaatacatctctctctaccatgtaaaacttgagttctagaatgtaaagtgtactttgtaaaagtcttccgctctatctccaatgtgtgtgtatcaaatgtgattactgtaatatacctgttatgtgggagatccttgggatgatgagttccagttggcgaactcgatagccttgttaagttacccggtacacgtgcacag

SEQ ID NO: 43485 - DNA, 1302 bp, Zea Mays
gataaaacacacttcggagatagagcggaagactttacaaaacattctttataattcccaaaactcaagttttacatcatagaaagagtaatatttattacaagtcctgatagaactcaaagtgcataacttaattacaaagcaggaaggtagaacccttccaaagctcacccataaacctaactaatcctcctttaagactggaagcatcttccagccacagggacacctagaaagctcatgattacctgcaacaacatgggttcgaaaaccctgagtatggagtgtactttcgcaagtcttacccgactaaggaaaaagactctcaaggatatgctggatttaggaatcaaggaaaggcttttagcaagaatcaactataatagtttgcagaaaagcttactaaaatgagtccttactttcaacattttaatgctagattaagtattaatagaccttgtttgcatctagtctaatttcatcatcacattaatcaatacaacatgatttttgctcattatgattccatccatgacttagattgcagggtagtgatcaagtctccattgtccgaggatataacggcgatccaaatcgatttacccagctagggatccctaacctcatgacatatatagcacttaacccttgcatatgccaacccgccccctgctatctcaagaccagaccaggttcacgccaaccgagagcacaattactccaccgtccagcctcttgccacggagggcacacgctactctcgtcatctctctactcccattgcgtggtagcctttctggtattggtcaagctgagattaggcttaccctgtcccataccagggcatgtgactagttaatatagtcctcgatcagcaagcctacattctctataatccttaatcaacctgagcagaacatcacctgttcctagcccaagtctcgatttaagtattttcatccttaggacttatttgtgtgccttagaatgattaaaacatcacaaggaaccttgcattagatctccccatggtccgatgaaaatattaggtagagccatccttcctcgggataagccctgagctaggcattagtgcaaaggacaaactctatctgcaagatttacctctaggcagggctaagcaatttttgtaaacaatatttgatacttctaaagaactatttatagcaggaatggatatcaaggtagtcaatgcatcaaatagtttccaagcaactcctataaacttaatgcacatttcactagacttaaaagtgtataaaagtcttttcaaaaatacaa

SEQ ID NO: 43486 - DNA, 346 bp, Zea Mays
tgcttaaatactgctgctgtaatccctgctgttctcaagttttagttgcttcacttggtgtcttagcggttcgtgtttgtaagtctaagctcctcttcccagccaccaactcgatctgccctagtcttcccatctcctacttaagtcatggtccagtaggccgtgcagtcctagagctcgagtgatctccttggctcttgtagcctatgtttcctcggagttaatcccctcccaatatcttggtccatctgcccagagcttggtgtaccagtccctaggtggtgaccatcatcggcagttagtccacctcgccgtgaccagaattcccaaaagaagaagatgaaat

SEQ ID NO: 43487 - DNA, 2111 bp, Zea Mays
gtcgcagcatcccagtatctcaactccgccaagccaagctcagcgaaaactcaggcgatcggacgacgccccaaggaacaagtgcagcggaacgaagcttcggcgtcctcgtcgtcccgtcgcaagatcacaagtccataacaagaaagacaacaaaactatgctgaaagatgtgcttgcatagaagagacttctgcagcaacaccaccaagggcctggtggttcttgcgcaaggtccgcaggcctgctcgtctcttgacttgagcggcggtcaccttgcctgcatctactccacgcccttcagactccgacgccaccgacccataaggcgcagtccacctgattgacaacagaaagctagccctgtgcgtgatcacatagtttttatggagataaaagatatgaagaccagagggaagactttgacggagcggtacgagatggggaagctgctggggaaaggcgcgttcgggaaggtgcactatgcaagggacctcgagtccaaccagggtgttgctatcaagatcatggacaaggacagggtgctcaaggccgggctctcggagcaggtaaagcgtgagatcacgactatgcggctggtggaacacaaaaacatcgttcgtctccatgaggtcatggcgacacggaacaagatctacatcatcatggagtatgccaaagggggtgagctcttagacaaggttaagaggagcggcaggctgacggaggctgacacacacagatacttccaacagctcattggcgcactggatcactgccacagccgaggcgtgtaccaccgggacttgaagcgtgagaatctgttgttggatgagaatggggaccttaaggtgtctgactttggactgagcgcgttttcagagtcgaggaggacagatgggctgctccatactgtctgtgggacaccagtgtatatagctccggaggtgatcaagaagacgggatacgatggtgcaaaatcagacatctggtcttgtggtgtcgtcctgtttgttctcgctgctggctacctccctttccagggcccaaacatgatggagatttatcgaaagatacatgatagtgatttcaggtgccccagttggttttcacacaaactcaagaggctgctatacaagattctgaaccccaaccctagcatgagaccttcaattcaggagataaaagagtctacctggtttcgaaaaggtcctagggagatcagtgcagtgaaggagaaagttcttagcgagaatgccaccgccacaaatgctgccccagtgcttgctgctaggcgcaaggagattgctcacgaagataagaccctggttgccacaaaactcaatgcctttgaaatcatcgcgttctcagcagggttggacctttctggtctgtttatcaaggagtgcaggaaggagacacggttcacttcagataagcctgcattggccatcatctcaaagcttgaagatgtcgcgaaagcactgaatctcaggataaggaagaaggacaacaacactgtcatcattcaagggaggaagcatgggggcaatggtgtccttcagtttgacacgcagatctttgagatcacaccatcctgccatctcgttcagatgaaacaaactagtggcgatctacttgagtaccagaaactgttggaagagggcatccgaccagggctgaaggacgttgtctgggcttggcatggagatgatctgcagcagaagtaggagtagcttcagctgtctcccgtagattatgttctacattccattccttattttttagcaacaacattcccttttttgtattggtggtgatatgaaccattaggctatgttttgtttgagcaataattgttgtggagttgagttgttgtgttacattctgaagattgttacagttttgtaatggctgtcaatatcagtaatgaaaataaatgttgttgatccttaaaaagggtcgagctttccaggtgatacattagtagtttgatgtgtagcagatgcaaccatattatcctcttgcaacattatgcagtgctgcatggtgcacacaaatcttcagtgcaaaaaggagaggctgactgaaactgaaaccatagctgagta

SEQ ID NO: 43488 - DNA, 460 bp, Zea Mays
cggaaaatggcgtgcgctacccgtgtgctgaaggagataggctaacatctactatatctatatccatatctatttaactacgaggaggaggtcttttacaattctgtgcaggtctgttcgtcttcaattttccatgttttttccaaaaatgggtcgttgttctgttttttcttttaaaaagatggatgcaatgttctatcgattccttatctgtgttaagcttatagtctggactcatgatgttgcctgttgcaatttactgtagtgatctattgacttccagctgatcagtcgttatcgcttgtagaacttctactttgcggtattctttaagttcgacaatgtcatcttattcatcaatcaaatggtggtcatacagattatagatatttatgatgtcatttatatgatgcactacagtacagctcatcaaaacctctgcacacagattatagagatt

SEQ ID NO: 43489 - DNA, 2272 bp, Zea Mays
ccccgtccaacggagagtagagaaaatgggatgtggactggacctgcagagaagcgccatgtttcctagtttctcccaggaagggtgaacaagagttgggtcatctggagagagaatttgacgaatccactgtcggatcgatgcacaatcggttggttcctctcacaattgacgatcagattctagaggatgtgtcaaatggtactgaattccatgggaagatggctaccattgttactcgattgttcctgcgtgtccctgctatttgtttgacaggaaattgtgcatcgcattgttgtttgacagagaattggctaggttcactgtaattttaagttacagggttgcacaatgaaagatccggttcagtctacaaacaacacatgttcagtgtactctggaagttgcagttctgcacactcaaacacatgttcagtcaaacacaggttcagtctacattgcagaagataagctggagggaagtagtgcagaagataatcacctgagttgttgcagtgctgagcgctggcgaagaaaagtaaacaagcgacacaaaaaaatgacatgtggacgcccaactgcgtcgtgtggtggctacgacagatgaaaaataaaaaagcgacctgtgaacgtccagcgcgtcagctacaagaaatgaaatcatgcgccacatgtcatgatatcaataggcctgcaaaattattctggttgtttcttttgttctctcggaaaatgacaagatttatgaggtgtgtgtatggtctttccttcagcagtcacacagctgcaattgctgctagaaacaatgggattccagtgcaaattatttgacagtgaatgtctccattttttccttttcataattcacttatgccatgtgttgctcttatgctctctttttgtgtgactattatctcgcactataggtcaaacaatggacttcagaacacagaacaacaaaagatatccaagtatatcagcacacatgttacagaggctttccctgtgagaaaagcaggaaagtttggtaacgaaaattgcaagaatatcgtgaaggtttctaagtctgttgattctacaacaacctcaagttttgcaccatcttcactataatgtttcaaggaagttgagaaatggagtgaaaatgctttgtggagtgtatctgagcttcatgttggcgatgagaagcagactggttctaacaaatttgtatcacctctagattttgcctcaaagactagcttgcagtttgtttcattgtcaccagtcaagtggtgggtgtgcactagcttctcttgctgttgtgtatcgaaattttgccagttagaaattgtattaatattatgtctatgttgtctgaacctataacatttccttaggttggaattatgttctattatttctgcattttagagctgatgcatttactgctttggcagccataagtgtacatctttttaaagtagcatgctgaaggttgcaaagctaaattgtctgttgttcaatgaaaacaacactcttcaaccaaaagggtcctagatattttttaatattttgtggagtaaagtagaccgatcatttaattttgtgtaggggataattatcttaactttttcattaattggttataccgtaccatatcaaggttagccgaggatacgaccgctatgacatttgttggcagaaatcataacaagacacggtgagtccgagtaatatgtatagctcatccaatgcatgaacacctttgcacttttacatctatggcactttggttacttgctttctttgtgttctggctttcctggtagcatgggagatgatttgatcatcaatatgtctaattcaaagggcaggtcctatggtcgtgttgttgcccaagttgctataatggctgggagtctattagattttacaaaccattttgctatttgtttatcaaagttgagtgtgatatgcttttattttacaattggttgttcttccatatattttggcacaacaaggaagctctcaggctaaatattttgtctcacgcctcaaggcctgatcccagcacatgagcaagtattttgtacctgtgaaccttacaatttgatttgtctgaatctattgcaactatatggtctaacggaaacaagttgtcctgctactgcccagtttgttaaaagaagaacttttctggttttcaggagtcaaggttttctcaattgcagatgctcgcttgctgctatgtgatccaaaccccgatagggcgagggcgcctgaatgg

SEQ ID NO: 43490 - DNA, 713 bp, Zea Mays
atttgggcgacttcatccgcatcataatcttcatcccctacgaatggtacatgtgctccaaattcaacaatgtcccatatgcttgtgtggagtgaggttaggtgatacctcatcatatcactccacctactataatcttcaccatcaaaaccggtggtttgcctaatgggacaaaaagtaaaggagtatgtttagaaatgcgagagtagcgtaggggggtcttactaaacttcttgcgctcatggcgcttagaagtgacgaacggtgtgtcggagccggaggtggatggcgacgaagagtcggtcttgtagtagaccactttcttcatcttctttttcttcttgccgctccgatgcgacttgttgtgtgaaggggatcccttcaccttgttaccagactctcccgatggagctttcccgtggcttgtggcgggcttctcgccggtcaccatctccttcttggcgtgatctcccgacatcacttcgagcggttaggctctaatgaagtaccaagctccgataccaattgaaagtcacctagaggggggagggtgaataggcaaatctgaattttataaactttaagcacaatctacaagccaggttagcgttagaaataaaagtgagtccgaaagagagggcgaaaaacaaatcaaccaaggaaatagagcgaatgacatagtgatttgttttaccgaggttcggttcttgcaa

SEQ ID NO: 43491 - DNA, 564 bp, Zea Mays
ctttgcctccctcgtcacctgcgagggggccatgaatgcgctgtctcgtgagggctgcagacactacgaggtcttcgaccaatcagacgagagctttgaacgcgagatcttcaaggccgaagaccctgtagtgaagcagtcagcgggggcactttttgataggatgtggggggcgcatggtcgggaggctgtcagggagcgatccgaccgggcgagagagcaggtgaaggttattatttttctgtggtttgttgtgtgtgggtatgtgtagtttttgcggagtgaatgtgctgttactgtagatggagcgtgccgaggacgtcgaggacctcggaggtctggtcgacacgccgctcgaggctgcggaggtcaaatcggtgctgccctcggatgtcggtgaaggcccctcggccacgcccgtgcctactatggccggcgaagaccctgcgtcggcccctgtgccgatggtcgaaggagccccggaggtggtggcggagctggcggtcgaaggccccacggccgcggctgtgccttcgcaggtggctaagtagttaaatatttgca

SEQ ID NO: 43492 - DNA, 351 bp, Zea Mays
ggaaagttggcaccctagtacattggcccgtttcctattcttgaacaatgcagactagtggcataccgacttcaactgctagaaacattatccgcagtacataatgtgttccatgtatctcaattgaagaagtgcctacggattcctaatcgaaccattgaggtggtggacgttgctttggaaccagatttgacctattcagaacatcccattcgactttttggatcagaagtacaagatcacccgaaaaaggactcttaaattttataaggtacaatagaaccagcatattgaagatgaagctacctaggagactcaagacttcttggaaaagaactttcctagtttttt

SEQ ID NO: 43493 - DNA, 1506 bp, Zea Mays
cacattagatcattcagtttttttccctggtcgcccacttccctggtgctcgcccttgcacttccctggccggcgcccctccatggtcgagctcacccctgcagggagcccctcccatggcgcctagtcctcttcccatgtcgagctcacccaaccaatcgtctccatcgcaggtgttgtgttccccttccctttcctcaagtttggtccttggcgcccaagcttctatgtccctacagcacgcacgtcgttgcccctacccccatggtcggccgacctcgtcagtgagcccctggcgctaccctgcagctcgccctcaagcctagggtcttgctgttttcctttgccccacgcggatgttgtagccgggctatgtctctccctgtcgtagcaccccgcaaatgttttgttcatcgccggtttgtcgtggaagaggaaagtccatttggcgcgctctaggtgtttggcaaaaagcttaaaccagaaatcgtcatcgcccttacacatatcgatttggtttatgacatgattggataggagctccgaacgcgagccatagacgggagttgatgccactgggcgatggatggtcgcatcctcaggacctcggcgtgcaacagtagcggctgtcatttttctcatcgcctacttcaatagcctacaatattagcagtaccttgctttttacttcacaagaaaaggttggccgaggtccctcctctagcgcaaggatttctactgcaacgattgcaacacacacaggttgtggaaactgagatcattgtaactcaaatgagagcttggcacttagcatatagacgcctctagaaccaatctagaattactgtgaggtaattttatatcttgttctgtaagttggagaattaatagctagctagcatatgcttccttaatgatgttttctttttccatgcatcttcatattaccaaacccttttcttgcaggaaaaacggatatagagtgataaaaggcattaatgtaagtactacataaatgtactacttgtattttttttaataatcaatgcttcaaaagtctatatagatgctgacgggtgtcatggttttttcattattcgaattgtgtatgcaactactgtagcatatcagtgaccttccgagaagatacaatggtgttcttagtagtaacgctgcttgatttctatagttggagtcatcaaacagctaacatttacacttgaactatttggtgaaatgcttgggagaaagaggtcagcaagaatggagtcatggaacatcggcaggaggggtgcagcagtggcaactgatgtatcccttgaacaatctggttttgacaagatgcaaatcaatctagtgtacactgtattctacacttgcacaaattgtttgactaattacaagattatcttagtgttttggtttggatttaagagtacacttatgtatgaaatattgactggtactcatctatattatattaattatattattattaaatatata

SEQ ID NO: 43494 - DNA, 1000 bp, Zea Mays
atgggcactcttcttgttatggatcagataggatacaatgttggtcgcacaccattcacagacatctcaaacaccatcattacaggtaatcaaaatgaatcgaactcgcttggaccaattgtcgatgctaaggaacgtaagaggcaaagggatagggaaagatatgctgcgatgactgttgaagaaaagaatgagaaaaataggaagcgtcgtgaagcacgtcaacgaaataaaggactatcgatagagccactatcatctagaggcatgtgaggtggttagctttccagatgactgtagcaccattgatttcacacatttgtcaacacaagatattgcaggtggagacgaacaagtaaatctggatgcatgtgatgatagcgattggttgcataggaatgagacattccaggcaaacaacattgtcacaagtaaagaccttttgacaccaggttgtgtgcatgaaactgttgataacatacctaagcatactatgaaaagggccgcctactttagtgagcggtacaaaaacatgactcccgtcgagagggagtctagacgtgtacgccttaggttgtataataagacaccaagacggaaagatgctaacaaagagtgcagcagaaaacgtagagcactgcagggtgacactttgaatcaggagtccatcgccatggaggacccattatatacccctgaggttgttatccctgaattcgtcatgacatctttcctgccaacttcaacacagactaaggatgttggttcactcgatatgtctactgagccactaagacatagacatcatgtgctatctgagacaagaccagctaccttaggccatcgaaaccaacaatttgaagccggcattgcaaggaacgtggctacagtgaccgaggatatttgtgacgctatggaagaagacgattggacacatccccatccgaatgcagagctccacaacaatggcatggttgaacaaggagtggaccatacacat

SEQ ID NO: 43495 - DNA, 756 bp, Zea Mays
tttatgttttactttattttgtattatctttataagtttaattacgaaggtgaaaccttcgtaatattattctcgtgaccttcgtccgaagtccattaaatccttgtggagataatgcttcggcggacgaagggcattgatatttaacattttatgttgccttgttcttaattcaaagcatttgagaacaagtccccaacaggaggtaagtgtgtttttccttttctgtttgtattttctattttatttttgatttttattttgaacctttaattcaaacctaggtttagcaattcaaatgcaccaaataaataaaccagcatgatgcaaagttttaattttatttatttgcttattcattattgtattttatccatgttgggggccttcgatttccgaaggtcctcaaaaacatgatttgacattgttttccaagtgaaatatgtgagcaggtatcttcggaatcgaatcatgagtatacaagagcacagtcaggacgaagcctgaacgagacgaaagatgattatgacgaaggtctagatgatcacgaagctgtgcgcaggaaagcttcggcatgatagcagaaaaggggaaccgacttaaagatgaaaaggcaaattagacctcgaagaattactatagagctattagcaaatgtaaagggcatggatgtaattgtacatgggttgtgtcccttgcctataaatagatgaaccgtactcccgtactgttcacgttgactgggcattcgctttt

SEQ ID NO: 43496 - DNA, 510 bp, Zea Mays
cccgcgcccaggtcaggtgcgcttgcagtaggggggttacaagcgtccacgcgggtgagggaagcgagcggccccaagagagcgcctgtcctgtcctcggtcccgcgcggccaaccttctctgagaaggccctggtccttccttttatagtcgtaaggagaggacccaggtgtacaatggggatgtagcagagtgctatgtgtctagcggagggagagctagtgccctaggtacatgccgatgtggcagccggagagatctgggcatcctgctggcgtgatgtcgtggctatcggaggtgcggcggagcctgatggagggacagctattggagcggtcgagtccctgctgacgttgtcctgctgccgtaagagagctgggggccgccgtcgtcatagagctcgtggagcgccatcattgcccctctggcggagctggccggacgagacgccggtcttgttctccgtgacccgagtcgattcggggtagggtgatgatgacgtttcctgtt

SEQ ID NO: 43497 - DNA, 867 bp, Zea Mays
cgtcagtaagcctgataagtggaagcaacctcctcactgattccagcgttctggtcctcgctgttccaggcttcatgttgcagaccgagtaagacaagaaaaagacaaacaacacaatcagtctggtactcgagtgaaaaagatttcaccatagtcaggtccatggttatgacaaatcacagttgtctgttacattacatcgatgtaatcttcacgcaagatctcaacaatgtttggttggttacttacaccccactctagattaacatgttctgaattttttgttcaaagctacaattaacacatgctaaatggtaatttctttaaaatgatccaattgagtttgcaactgcacatggtttttgccaagtttcatcaagtactgctccaacagaacaaacaatcatggaaattggaatgttgagctaagtcattggggtctcaagaagaggtccaggaatcctaagaatgatatgataaccatgcttaaatacagatggcataaattttgcattgataacgatgtaggttggtgataggtgttttttcatgttcattcatgggcctcaccttttctgatgtgacgaaagaaaactatattgatcttgatctgagctatacattgaaggtcgatatagtaaaggagcacttagacattgctgctcatagatttaggtgctcatagatttaggtactgccatcaaacattgtcttctgatccttatatgcagtgcctggttcttatagcttgcatgtattttatgcattgactatagggaaaagaagtgtgtgcattgctggtgatccaattacctctaaatcaagttaataacttaaaataattgcagtttaaatgttatgtcgtat

SEQ ID NO: 43498 - DNA, 611 bp, Zea Mays
  misc_feature (610)..(611): n is a, c, g, or t
gcaggcagcaagccgaccgcgcctgcaacgaccgcgactcagctcggcgcccaggcggaccgacgccggccacccggccaggcccgcggagccgcagccacgcgcgcccagcaagtcgagcttatctgaatttgatgatcttgtgggccaccctggattcgacaagcaagggacacgcttcaagcggctcatcaaagaccagaataatcataaggacctcgaggagggaattaaccgtctagttctttgctctggaaaggtgtactacgaactggatgaagaaagaaggaagacggagcgcactgatgttgctatatgtagaggacactgaaaggcggacgtgcggattggcttatagagaaatgtattgaacttggagcttctagtgttacccctgtcctgacagaacaatgtcacacaatagcggaaaatcgggtggacaggctgtaatgccttgtgctggatgcagttaagcaatgtatggagtttgggtatcacctccgttcttggcctgttaaacaatgtacggagtttggggttaaatgattttgtaaagtgtttgcaaatttgttcaaaacatgataatgtgtaggttttgtgaatgattttnn

SEQ ID NO: 43499 - DNA, 981 bp, Zea Mays
aaaactcttttgaacacgtctaagaatgtacggacaaggacctgctctgtttctcggcgagtttttcccacttccacctctccgtccctgccgagctgcggcggccgcatcgactgttagggcgaaaatccgttctagtctctcggcgattttcggcaggcggaggcagcaggatctgcgggaaggatttcgtgtcgagatggctgggcgcaaggaaactgcactcgacctggcgaagttcgtcgacaagggcgtccaggtgaagctcaccggcggccgccaagtcatttacacaacctcttggcgtgcaacttccttttgtgttggaatcgttcatctatccatcttaggcatacttgagctagttgctgatgaatgttgacaggaactctaaagggatatgaccaactactcaacttagtgctagatgaagcagttgagaatgaaagagagcaagatgatccattgaagctatcagggaaaactagacaacttggcctcattgtgtgcagaggcacggcagtcatgctggtctcaccgactgatgggactgatgagatcgccaaccctttcctcgcggacggagcatagcttgcacccctcggaacaatatgtccctgtgggaaaagaaccggtttctcgtgtatctgttgtatcgtgtgcagctgtgcggcttattagtggtgtttaaatgcactagatctaatagttagtgactaaaattagttggagacatccaaacatcctagctatgagttcaattattagctatttttagtaaattagttaataattagctatctatttgttagctagctaaatccactagtatttttttagccaactaactattaactatagtacatttaaacaccccttagaatttagggacaaaatcagatctcacgttagggttgtttgatagatatatttagcccgtaagtttaaggggctgtttgaattcaaagttttttaatacta

SEQ ID NO: 43500 - DNA, 221 bp, Zea Mays
actgaatttggcatatagctgatgttcccttaagcgcgttaacacgatccacatgtgttttgcatgctcctcctcattcttagaatagatcagaatatcgtcaatgaagaccaccacaaacttgtttaactcagtcatgaataccgaagtcatcaagtatgcgaagtgtgctagagcatttgttaatccaaaagacatgaccaaatattcaaataatccat

SEQ ID NO: 43501 - DNA, 1175 bp, Zea Mays
ggattctggacttcattgggtgcaccggaggtgcacccaatgggtgtagaccccgacctttgagtagattttagaagataatctactcgaaggtcttccccaaagattatctccattcgcgctcctgcatctcggttgaggattggtcttttcaatcttgtcccacgccttagaagtcggcactatatcggtttagaatgataatccatggggtgcaccaaaggtgcacccaatgggtgtagcccccgaccttcaaatggattttttaaggataatccgttcgaaggtcttccttttgcttgtaaaagttggcgtgaagctattcgcattatgctttggaggtcagcattatgtcatccggattttgctgccgaggtcagcatatattttgtctctagcagccgagtttgcaatccatccatatcttgctaggtaatgcaatttatttgcttctgcgacttgattggacgtttgatggacgttctctgtctagtcctcacatcgcttctgtcggccgtctcttgtactttgctggctatatttggctttcctctgatccttactgatatctcatttttgtcttgaagtattttactgcgtgccctgcacggatgtgaccgttttgaaaaatatactgataattcctgggcgtcccccccccaatgggtgtgggcaagggacggcttggtacgctgagtgttttagccggctgcttctgagtagtaatgtgatgggacggcttgtgtaatcatatcctttgtgctgttgactggagtcccaatgggtgtggtgctgcatgaaacggcgtccgtcgtctgacgtgtcttcagatgggtgggagtgcttattgaatgctttgtgactgttcagtgaccgcggttggaagtgagcggttgcctttcccttctataaataacgcctttgcttctctggttttttcacatctcttcgctgttctttactgccttcttctcctcccttctgtctgcttccaccatgggcaagggtaccaagcgcaagcgcgagccgactcctccgtcggatgatttcggtgactcggaatactcggaggaggagttctcctccgagtccgagggatctccggctcccgtctctcccccggcgtcgtctgatgatttagacgactcccaggggattgccgcggaggtctggac

SEQ ID NO: 43502 - DNA, 3132 bp, Zea Mays
ggctccctccctcctcccctctcccctgtcccctctctctttctcaccgtccacgcgcgactgcgcgggacactggtcaacgccccggtggcaggcggctccgttggggggtgagtctagctccgtctgttgcgccggaataacgcggcgggtgctacctccggccctcgggttccatggggaggaacggtagcgtgaggcgctcggcgttttcgggcgccgcgggtgctgccgcggggccgccgtccttctctgtgaatcccgccgactaccggttgatggaggaggtggggtacggtgcgcacgccgtcgtgtaccgcgcgatcttcctcccgactaagggtgttgtcgcggtcaagtgcctggatctcgatcagctcaataacaacatcgatgaaatacaaagggaggctcaaataatgagcttgatagaccatcctaatgtcatcagggcttactgctcatttgttgtggagcacagcctctgggtgataatgccattcatgacagagggttcttgtttacacttaatgaagatctcataccaggaaggttttgatgagccgatcattggctccattctcaaggaaactcttaaggctctggattaccttcaccggcagggtcaaatacatcgtgatgtcaaggctggtaatatccttatcgatggtgctggggtagtgaagcttggagactttggtgtttctgcttgtatgtttgatagaggtgataggcaaagatctaggaatacatttgtaggaacaccatgctgaagtgctccaacctggcactggatataatttcaaagctgacatatggtcatttggaatcactgctcttgaactagcacatggccatgctccattttctaaataccctcctatgaaggttcttctcatgaccctccagaatgcaccacctggtcttgattatgaacgtgacaaaagattctcaaagttgtgaccagtcatttaaagaaatggttgcaatgtgcttggtcaaagatcaaacaaagagaccaacagctgagaagttgcttaagcattcatttttcaaaaatgcaaagcctccagagttgactattaagagtatcttatctggtttacctcctctctgggaccgtgtaaaggctctccagcttaaagatgaagcacaattggctttgaagaaaatgccttcttctgaacaggaggccctctccctgagtgaatatcaacgcggcgttagtgcatggaacttcgatatcgaggatctcaaggctcaagcatcattaattcatgatgacgagcctcctgaaataaaagaagatgaggacattgcaagaaacattgaggttgaaaaggacttgtcttcacggaaccatttgggaaagtcatttgcaaatgagtgcaattccaggcagcgagcctttgtcaccactttaaaatcggatggaaacagacccaccacgaatgaagcttttgattttgattttgattttagcgaggctgccactacaagaagggctgatggacatgaaagaaacataagagagaatgattcattgccctctacagcaaagcgagatccagagtcgaatcattggacaagtgacgttgggcagagacaactgtcttctggtgggagcaatagctcaacagctgaaaggggctatggttttgagagggatgcagttgtgcaaacaatacctgaaaaacaaagaagtgaggcgagaaaaacagcaagccttagtggtccactttcactgccaactcgtgcttctgcaaatagtctgtcagctcctattcgatcttcaggaggttttgtagattcatcaggtgacaagtccaaacgaagtgtagtagagattaaaggccgcttttcagtgacatctgagaatgtcgatcttgcaaaggttcaggaaggtccacttagtagcctctcacggaaatcaccagagggttcactgctaaaaaaatctgccagcactggtgattgtttgattaatactaagctgatgcgtaacgctaatcagctgaaggaattctgcaatagttctgtatcatcttcagtattaattccccaccttaacaaccttgtgcaacagaccatgtttcagcaggatgtaatcatgaacctacttagtaacttgcaacaggatgagaaagttgatagaacacagcctggaatatcttctcaagtccgaacgatggagaatggtaaagtggctgatacagctaactctgagaaggaacggtcattacttgttaaaatttcagaattacagtctaggatgataacactgactgatgaactaattgcagctaagacaaaacatgttcagttgcagcaagagctaaatgctttgtactaccgagaagaaattgaggatgttagggatgaggatatcgaagaaacatagtgtatgaattatctgcctctccctgagacagatcaattacccgcctctccctgaggtcaggggagaacaagagaaggaaagcggcagggagaactagcgatggaaagtggcgatgccgcaaatatttgctggatctagagaccagctgcggttctacggaatttgttctttgaaggttgccgtgcccctggcctgctgccatccagtgtgtataaccgtcttagttcgttttttttttgtggccacaagattgaggcgtggtcatgcagctatttcggccatgcctatcattgggagtagctgtagtccgtaggctaccgggtggttatctatgcagaatttcagaagactgcaaaataaactgtattttatctagcaataggatgtatattggcgcattcgttgatatgtatcatatagggctattcgcaaacatccaaacagagttgtttgcacatatctaataaagtatgcatttactgcatttatcactgccatgtactaaatgattgttttaaaggcattatacattacatgatctgggtaaatcttctctataattggatcttcatgctattttccagcggtgtttctatctcattacatattttacctcctatttcaaatttcactatgcaaataatactatttacaatacaaagcaatgttataaacgattggaaagcaatgttataatactatttagtgatctttctttctttttcttttcc

SEQ ID NO: 43503 - DNA, 161 bp, Zea Mays
acgcggtgttgggtagcctctgtcgcttctactaccctggcatggtggagctcaatggcgagaggttcgtggctatgcagtgggccgactggggtctgaaggactatgtccagccaggggagccaggggaaagcagtagtggagggggaacttcggaacaa

SEQ ID NO: 43504 - DNA, 2638 bp, Zea Mays
aaaaatcttctcatcgcgctcctcaagcgctttcctggcgtcttcgaggttgtcgaggagggcgtctactccccgctgtcgtcgctccccgccttgctctgccgcggccgtgcctcgccgccacaggtccaccgctcgagatcccggtcgacgctccggcctgatctccatttttggccttcggttggagatcggcacttctcggtgatgtccctttggctgcacggccacccaatcgggtgtttgggtcttcgatttgggtctgtagcgttggagatacccccttcaaactgctgccggtccggaagccgtgcctcctagccgcccacgctcgccgtccgtgatccgttctcgactgttggtgctccggactcacagtccatattgatggctacattatcatggtggatggaatggtcggtggagaatgttcgtgaggcatttttctcctatttcggggaaaatcagcacgtgaggttgccatctaccccagtgatccccgttgatgatccgaaggtgccccttcttcatacatgtttgcaccggttcaaggggacccttggtggcagagagaggcatcgcacctgcttttcgctgaggtgcattattgcaagtggtgacgaagatttgattgaccgcttcagaattgacgctactttccatcgattcacggagatccttgggagttggtctcatgggtactatttcaaggaggaagctatcggcttgttattcagtcttctcaccgagaaatacaagttacctcagtctagaatatatgcctcatactttagtggtgatatgtcctcttgtttgagttcggacgacgagtcaagaaataccttgcagaaatatataggagcagaaagaatcttgccttccatgtccaaggttgatttttggatgcccggtgaaactggtccttgtgggccatgtattggttttttccttgattgttcggacaacaatgatggtgttgattccgtaaggaacataacggatggcaagcttgtcgagatatgccgtcttgtgtttgttgagttcgatcggcaagcagatggcgtcttggagcctttccaagctaagcatgtcttaacagggattaatcttgaatgtttagctgccattcttcaaaagaaagaaagccactatgacttagatgtatacgcttatgtaattcgtcaagtctactggcgtactggtaaaggtttcaaggattacacaggtaaggttggtgctgctgatacagatggagttgatacggcataccgcctagtcgcagatcacatgagaatgatcgctgttactaatgcacccggttctcaacttggttagagcgttatgtttctgttggtcacgaatgttaatatagttacgacatcaatgtatgggtttgtcatgagcacgagtacaattattggtcattttcaaggaacaatcagaccaatctgattgttggatgacttattacatgaatacatttttttgtcattacattgttcttattgtgttaaaattggctttcatctttatgaataccagggttaggaaatgaaggtcgcgagtatttcctgaagtgtgctgataaacaggctgtgaagtatggctatcaagtacttaagataaatgaagaggattacgacatgatgtcttcttcaatgcaccggtgcaaataacagagcatccagttaggtcacctgtcagtcttcatgattttcatgttgttgatgcaattcttctaaatgaacctgatttatgtaccgagcttgaaagagaaataatcgacagaatagtcaaagatgaagtgatgatctacaaaaagactaaagcagaggcaacgttctcctgcttggagagaaaataaccctcgatttagatatcaagaaagtgttggagagccatctcatccatcttttccagaggcctcttttgtgtggcaatacacaaatgcaggcatgcaactgtatatatgcaagtgttttgaaaatgaatgtccattaactcaaaagctaagctactgtccacttatactgcagttggaacagaacttggaactatcagagttcaataaacaagttcttggtgtattgccgaagcttacatgcagcttatactttgatgtgacattttctagctcttgtggcttagagaagacctttgaaactgcactgtttggttttcttggtgtccctctacgccatggctggttggtagatccccaggatgctgagttggactcctcaatacgtggaagctcctactccaaactttcgtataatcttgctatctatgaatcaattcgacccaagacaaattcagggcctcaaaagcatggtcgatatgaagatgatatgttctattcagcgcttgcattctctaaaactggatcagaaaaagaacttgattctacttcttattctcttccttacataatgacctcagagcgttacaacctactgtcctgatctggaatgaaaacttaattacaatatctaagtttgaagacaaaatatatgtgttgctgaacgatttgtccttgttgagaactgaaaccgatgctgtgtgggaaaggttaacacaggcaaatagtaaacagggggaaactaatacactggttctacatatccgacgctgtcgg

SEQ ID NO: 43505 - DNA, 369 bp, Zea Mays
ctttgttttggtacttgatcgggttatccatctacatcatcctgcagattagctcgtgcttggggtcgatttgggtcgtcttctgcatcacgtgattaattaacgtacctgaatggaatgcattatgcacatgaaagcatatcgacggaaatattacaaacctaattagtgttacgcgatagcggatttaacatctagcggcgaggcgttgtacaattttatacgaaaatactagttatcgacgtatgactaagcgcaataattatgcttctcgaacctatcgcaaacatcacgaacagcaaactatacacattaaatacaattagcctacacaactcaccagctaattgattaaatgctaaccttatc

SEQ ID NO: 43506 - DNA, 415 bp, Zea Mays
gtaggagcagttcatggagggactcgttgggccactccagtatcagctggtatctcacaccttcccagatttctagaggcttctggacaaggctatagctgttgaacacaaacgtgttcagctgggcaagatgaagagtaaggctatcacctaggggcaggggagcagtagcttccatcctcgctatgttccaccccagggtacaccagctcgcccaggaggagggcagcagtcctaccaacgacctgctcagtatacaccatagttgactccgcatactcatcaggctgcccccactggcaccccggcgagatctgctggccagggtactactacagtcaccacttgcttcaagtttggtgaggttgggcactacgccaatgcttatccaaagaggaaccccaacacaccgact

SEQ ID NO: 43507 - DNA, 515 bp, Zea Mays
ccaccttcacctacccccgcacccacaaatctcgcctcgccctgacctagctcgccttgtgctgactgtcgtcggcagtttctagaatgagagaagaaaaaggtgcgagatcgatgagcagtgcggtagtgcccagtcgtcgccgacggagccaagcagtggaccaccatgcccacatgggggcaccctaggggcgagctcctctaagacgatgtggcacggagtgcaagccgtctacatcgtcctcgtcaagaagcaccagccgaagctcgccgtgctaggcgtccacttgcaccgcctactctccagcagcaactgttgtcgccgccgcctcaccgcgtgggaacgggagcaaaaccccgtgctgacgatgtacctggcgcggtggtgcaaccgtacccgcacggccaccgccgcgcgtcgtcgaggcacgcggccccgtccctgtcgtgccggtccatggccccaccgtcgtcgtgcgcagcaagtaccaataccatccccgtaaggtggag

SEQ ID NO: 43508 - DNA, 2356 bp, Zea Mays
gatagggaagtattcgtgttcgtgtccgactccagtggacaaggcatggcggggagaggcggcggcggcaaaggcgccgcagggaggatgatgtcgctgcaggaattcgtgtcctgcatgcagccgctcatcgatctcgagaaggcggcggagatatcggcggagtccgagacgagcgctaagagcctggagaggagggggtgcgtcattgccaacctcaagtgcactgatgcccagacgggactgatggggaagacgctcctggagttccaacccaacaaaggcgacgttctcccgtctcacaagtttggaacacatgatgtggttgccctgaagccaaataaggcagatgctggatctgcttcacttggtcaaggtgtagtttatcgcttaaaggattcttccattactgttgcttttgatgatattcctgaagatggcttaaacagccctctgcgtcttgagaagcttgcaaatgaggtcacttatcgcaggatgaaggatgcactaattgaacttagcaaggctgtccaaacaggaccttgtgcaaaccttgttcctgttttatttggagagaaggcacccatgcgctccaaggatgctatgaaattcagtccattcaacaagaacttggatgattcacagaaagaggctatttcgaaggctcttggatcaagggatgttttcttgcttcacggacctcctggaactgggaaaacaacaactattattgagataatattgcaggaggtcaagcgtggatcaaagattcttgcctgtgctgcttccaatattgctgtggataatattgttgagcgacttgcacgatacagaacaaaattggtgaggttagggcaccctgctcgtttactgcctcaagtgctcgacagcgctcttgatgcacaggacaattctttgtttccctttggttagatcaccttttgcctatgttattacagggcgattatttcttttcccagcatcaagaaatgaggttttacgagctgataatagtagcttggcaggagacattcgcaaggaaatgaaggtgctcaatagcaaattgctgaaggctaaagataggaacactaaacgggacatcaggaaagagctcaaaacgcttgcaaaagaggagagaaaacgacagcagcttgcagtcactgatgtactgaaaaatgcagatgttgtgctgaccactctgactggtgcatcttcgaaaaagttaaacggaattacatttgatttggttgttattgatgaagctgcccaggcacttgaggtggcatgctggatagccttgttgaaagggccgagatgtattcttgctggagaccatcttcaacttcctccaacaattcaaagtgttgaggctgaaaagaaggggatgggaaagacactctttgaacgccttactgaagcttatggagaggaaatcacatccatgctcactgtgcagtacagaatgcacgagcacattatgagctggtcatctaaagaactttacaataataagatcaaagcacattctagtgttgctgggcatatgctctatgatctagaagaagtcactagatcttcttcaacagaaccaactattgtactcattgacactacagggtgtgatatggaagaagtaaaagatgaagaggagagcaccatgaatgagggcgaggcagcagtatccattgctcatgccaagttgcttgttgagagtggcgttaatgcttctgatattggaataattacgccttacgctgcacaggtaacctgcttgaagatgatgagaaacaaagatgccaagttgaaagatttagagatatctacagttgatgggtttcaaggccgggagaaagaagccatcatcatttctatggtccggtctaactcaaagaaagaggtggggttcttgagcgatcacaggcggatgaacgtggcggtgacgcgagccaggaggcagtgctgcctggtgtgcgacgtggagaccgtgagcagcgacaggttcctgaaacgcttggtcgaatacttcgaggagaacggggagtacttgagtgcttcagaataccagagcagctgactggcgtcgatcagatccattcagctcttcttctagtggctcgtggtggcatctggctggcatgtccgtggagcaagtggataggatccgcatggagtcttggagaacacaatatcaagctttggttcctagatatctcagcttttcttttcttttctcttggtgaacgcataaatgatgtattgttgtgacgttgccaatgccatgggaatgagatctttaacaaaacaaaaaacaaaaaaacaagagggcagtggagaatgtgctgtggcatagtgtgtg

SEQ ID NO: 43509 - DNA, 1255 bp, Zea Mays
ctccatcctgcccgccgccgtagctggtagctaagctacgtgaagaagatggttgggctcctccgtccactctccgccgccgccaccttactcctcgcccccgccacgccactcactggttcctcagtctccgctagttccgtcggcggcaggcggtggagaagcgtgagggcggacgccggcgggggctggctatccgggctgctgggcggcaagggcggcggcgcgtccacggcgatgatggtgacgccgggaaccgtgaaggccggcgaccccgtcctgcacgagcccgcgcaggaggtggcgccgggggacgtgctgtccgagaaggtgcagggcgtcatcgaccggatggtcgacgtcatgcgcagggccccaggcgtcggcctcgccgccccgcagatcggcgtcccgctcaggattattgttctcgaggatacgcaggagtacatcagctatgcacccaagaaggacatcgaagcacaagaccgccgcccctttgatcttctcgtcggtcattatcaatccaaagattaagagcacgagtaaaagaaccgcgctgttctttgagggatgtctcagtgttgatggatacagggcggtcgtggagcggcatctggacgttgaagtttcaggtctggaccggaatgggagcaccatgaaggtacgggcttcaggatggcaagcgcgcatcctccagcatgaatgtgatcatcttgaaggcacgctgtatgttgacaagatggtagcaaggacattcagggtcgtcgagaacttggatttgccccttcccactggatgccctcaactaggtgcaagataatggggatagctttccatttttcctcgtcgaatagatggttcagtccacaagtacactagtgtgagcaattgtagccatggaggttgagagcctttggagcgatagaccacacgtggcagagaagcttgagcaaagacttgatgccgatagaacaaagcaacagtgaagagcaagtgaagttctgattgatgaaccaataaggacacatgatgacatgaagtggatcatatcattcatgatgttgattgcatgtttctgtaccatcaccattagagaaagagataaaatggaatgcacaaaacatgtataatttgtagaacatttcattttattattcaaaggttgtgtagagaagtaattgatcaggttgtgctattaagatgggaaaactcgtttgtatatcggtcatctagtgctattaagaggggaaaa

SEQ ID NO: 43510 - DNA, 1097 bp, Zea Mays
acatctagagcggaacaggcccaaagcccgcagctcgggctaaaaccctaacgacctggcctcgccaagacgccaacacaccggaacccccaaaatggcaccggcgccggaaccgaccgcagcggccgccggccgcaagcgcaagaaaccgcacgggccctccaaaatcatcgcgaagaaatccgcggatcccaaacgggcatacgcgaagaagaagaaagagaagcataagcaaaaggagaagaagtcgcggctaaaacccgccgagccggaccaaatcgccgccaccatcggagatggcgtcgcaggggcaacggtcctactgtcggcattgatgcagccgtcgcggcagctcgagtttctcctccgtagcttcgagcgcgcctctaagatgcgcctctctcctctcgaactcgattcctactcagagggctgcatggtgcagcttgcggagggagcagcccaggacgtcgagagcttcggtgatcatgtaaaaggggtgttcggctcttcgtggaaggaagagctctgtgagggaaatcacatcgatggtgagatcgccgtgggcagcccaacacttctggttatcagctcatctgctttgcgatctttagacctactgaggggtttgaagatgtttactaaagaatgccgaccagtaaagctctttgccaaacacttgaaagtggaggagcaggtggcgatgcttaatgctcgagtaaatattgcctgtggtacaccgagcaggatcaaaaaactaattgacatggaagctttgtccttgtcacgcttgaaactagtggtacttgacatgcagaaggatgcaaagtccttcaccttgtttacattaccacaagtcagcaatgagttctgggacctgtacaaaggttacctagatccaaagatccgagaagggaacatgaagatatgtttttatggtgccgtgtccgagagagacatcaccaaaacattttcactagctgacacatacaagttgaacaaaggaacactatatatttgagaatagacaatgaactccatgaagatcaaacacgatcatgacaggcaccacatgtttctgttttgttgatctttat

SEQ ID NO: 43511 - DNA, 2220 bp, Zea Mays
gcaccatttccaccgtatcactgcacggccgcgcgaaaatgtgcagcgccacaagtgcattccggccccgtgagtaatcgtaacagaggatcgctagctagtgtgctaccctgtacggcgcaggcgcagccatgagcaacagcggcaggtggcggaggaggacgaggtccgtagccccttcgccggccacctcttctccgtcgtctcctggcctccgagaagcgcagccgttccggcttccccagtggaagttctcccaggtcctcggcgaactgccgcccgcggccgaagcccgccgcgacggcgctccccgtccgcaggacgacgacgatgcggacgaaatctcggctatcgagttcgacggccgcggcgagtacttggccggcggcgacaacgccgggcgcgtcatcctcttccggaggaccgacggcgacggcgacgacgcgcggcctcgcgcggagcttgagcgcacggaccgtgccggagcgccgccgccgaggtacagctacgcgacggagttccagagccacgaacgggagttcgacgtgctggacagcttggacatcagcgagaggattaagaaggtgaggtggtgcgcgcggcccaacagctccctgctcatgctcgccgcgaacgaccgcacggtcaagctctggaagggcaggtctccgaacacaaggcggaggcgccgaagaaagggaacggtcggccgagttggggcaccgcggcgctgtcggcagccacgaaactgccgaggggctgttcgtctgcagagcctgacgaacgtcctgaaaaggcagcaggcgatgtcggagacggctactctgcgaaatgccggagagtcttcggccgcgctcacgagttcaacatccactccgtctcgaccaactgtgacggggagacgctggtgtccgcggacgacgtgcggatcaacctgtggcatgcggaggtgacgcgccagtgcttcaacatcgtggacatgaagcccgcggacatggaggacctcattccgagtgttgtgttggttgggtgatgatgatgaagcagaggtgatcaccacggccgagttccacccgtcgtcctgcagcatgctggcctacggcagctccagcggcctcgtcaggctggtcgatctgcggcgatcggcgctgtgcgaccacagcgtgagaatgttccaggaccgcgagaaccgccctcagcccagcacatttttcagtgagataatctcctgcatcaccgaccttaagttcacaggcgacggggaacaccttctgactcgcgactacatgaacctcaagctctgggacctgcgcgtggaaacctcacccgtcgcaacgtacaaagtccacgagttccttcgcccaaagctgtcggagctgtacaccgacgactacatcttcgacaggttcggctgctgcgccagcaacgacggggcctacttcgctaccggatcttacagcaaaaccttcagagttttctcccgtgccgctgcgcagacatgcggcgctacgttggaggccagcaccaacccttacaggatacaattacatgctcctacgaagatcccagcgctgcttagcaatttctctctcggagttcatagaaaaggtcaggatggtcatccgaggtcagacggcaaggaacaagtctcgtgcaacatggcgtccaaggtgaagcatctagcatggcacccggcagaaaacttcatcgtttgcgcagccaatagcagcttgtacatgtaccatacataagcacgctcatgttatgtgtgcagagtgcaaatcacagaacagcgttcgtagctaattagattgaagccagaaaagaagatacttttcccatgttagggcttgttcggttattcccaatacacatggattatatgggattggaaaaaattgagaagaagtttgacttgtttgggattcaaaccaatccaatcccgctcaatccacatggattgagagctaaccgaacaagcccttacggttgcatgttgtgaacagggatattgaactgactgtacattgtcaaggatcttggatcttcagcagatcatagaaaggaaaagatactctcgtaacgaacgaaaggatcgcctccctgactgtcctttctgctcctcgatacatccttgcaatattcctgaatttcgaagggttgacctgcaactcagacttgctttgtgcattgattaaacatcatggaagcactgaaagg

SEQ ID NO: 43512 - DNA, 148 bp, Zea Mays
caccttgtgccgaggaagccaaacgagaagcaccgagttgggggaaataggagatgtcgacgcagttgaactcgtggagaagcggagcatagaccttgcggggtgcgtggaagtgatcaccgagctatggcgaactcgcctatggcgg

SEQ ID NO: 43513 - DNA, 683 bp, Zea Mays
catgaagatctttttcgctcttcttccttatttcatgagccatttctcggccgccatcttcccagatatcagtgaaaaatttcccgcctattagacttgcttcggccgaggggtccttcgtgatgtccacagagaaggaagcttcgcttgggtcaaggttttaatgtgatcacaactcgcctttctctaagacggccgcaattcctctaacaccagaaaatgcgcaaacgtctccacggtcacttaagatttcttcaaaagattcggctttcattactgatccactcgataacgctctcgggatcgcctcgtatgaagttgtcctcacttgaatacgcgcccacgttggcgaagctagtctttattttcctcacgcactccacagatttttcatagcacctttctttggatgcgcgaagctctgcaaccgttttttctagacaatttttccaatattcgctggcatctcgattagcttcagcgatagcacactttaagttggcttcagccagttgtcttcgaaggtcttcaatctcattcttttgaatttcagtttgagccttgaagttagcttcatcctcctttactttgtccaccaatgtaagtagaattttgtctttttccgtggcttcgtttctcagcttgttaacctctgttcgacggttgttgagagcaatagtgca

SEQ ID NO: 43514 - DNA, 2001 bp, Zea Mays
agatacggaggggcaaggtacgtggtgccttaccttggctaaggcactgaatctggatccctcctccacctccacgcgagcggacgacacgaagcggccatagccgcacgttgggatcccctccgctacgcctctcgatggtctccgccagcgcgccgccgccgcaggcccagtccgacgcggccgggtcgggggaggaagtgagcaagaaggtgcggaagccgtacacaatcaccaagtcccgggagagctggacggagcaggagcacgacaagttcctcgaggccctgcagctctttgatcgtgactggaagaagatagaggcttttgttggctccaagactgtcatccagattaggagccatgcacagaagtaccttttgaaggttcagaaaaatggaaccagcgaacatgtcccacctccacgaccaaagcgaaaagctgcccatccatatcctcagaaggcttccaagaatgattcatcttccatccataggaactctggcatgaacgtgcctgtttcttcatgggctcatagttccatcccacaagctgttgcttcatcaatggtgaaagatttaggtgctggaacaccaggttcaaacaatttttgctcaagtagtactgaaggccttccaagaacttggcaacctggtgaaacaaatgatccaataaatcaaattccgtcactccgccgtcagtacctcatgatatttctgataatcatcttgtagtgcaaaatacttactccgattctgtccatctctactatttctaagaattatgtcttaaccatcctcctgtgcatcttttcttgtgaatttgtaagcttcaatctcaaatccgctggccccttcttttagaatgaaccgaacctccaatattctcttgatgatgcttaacatacagagaaacggtgtaacacaaaacagcacaatccatttctttgtactgtttctttttcaaatattttactgttttcaatattgaatctatgtcttgaatgaattgctagcttatctaattcatatttacattcttgacatttcaattatgtctttccaatgtttgatatagttatgccagattttgcgggagtgtacagcttcttaggtagtgttttcgatccaagtacaagtggtcatctgcagaaacttaaggagatgaatccaattgacgttgagacggcactgttgttgatgaggaatctctccatcaatttaaccagtcctgattttgaagatcaaaggaagttgttgtccttatacagcgcttctgatggacctgggctagggagctcaagaagttcagctctagcgacgagcgcgcctttcatgtaaggtctctcggcatataatttcagttcgacagacctcaggaggatagtgcctgccctggcgtagtagcaccgatgagtgatgaaggaggcgtttgcaccttttgtgcttctcgctagctccatgccttcggctgacgattgtgaagcgtgcacccttcctggcctttcctatccccaaaagctcggccatctaggctcgtgaaatgctgcttcagatcaaggctgtccttggaaatgggaagatgaaaggagaatctgggtaatgccggttgctccctttcccattctttgttgagttcagctttctgattggtttctggtggccctcttgatacggaacttgtgcgctccgtctgagaaagcatgtgtgcaaagtttcatttgaggagttgaggcgatcatggcgctgtaaaatgcggcttatcttcccccttcagggctggtttggtggaccaaccctcaaacatttgcaattcctatgtacgtctgtagtgcatcaggtgttgttgcccacgtgtaaaaggaaaataaattcacaatgtaaaggagacttgtgcgttagcactaccatttgaatttatgaaatgtcaaagcagcccagcgagtttgtacttgccacatttttttgtcgctgtatcagcagtctggctactctggcatcg

SEQ ID NO: 43515 - DNA, 1255 bp, Zea Mays
cccctccactttttccagccgccactctcttcttcctcctctcccacacgcacaactctctcctccttgctccatggcgcagcagcaaagtccttcttccccacatccggtcgttgtccccctggtcctgctcggcgatgcccttctcccctaggccggtgagcaggtcttcttcctccctgcttcacggcagcaagcatggacgccgctgctccttttttttcctctcgctctgctcgctcggccgccagcagccatggccgacctccacttccatggagcaggcgcccccaacagccatggcgcccttccctgttctccagcgccctccctgccatcttccctcccatgggcgcgagcttcaccctcggcaatggacgctgcgcgagatcccccttgcgcccctgttttcccagccgtgcagctccctattcgacttccatggtcgcccagctccctgtccacggcgcccaggaattccaacagcagctcatcccctcccagcgcccccttctgctccatggctgcaagaagcctctccatggttgacgcacaggtggccagcagctctgctcgccccttgtaccttgagcagcaagaagcagcgcccctatctccttttccccgcagccccaccaaatcgacgcgccgtaggtgctcgacaaaatgcgcagctccatttctccatggccgcgagcatttccttgccgcgactgcctcccaaggacagcgcgtagcagcctccccgtggccatggtctgcaacatgaagtcgcacgctacatgttcgatgttttgcgcagcagctccgacgtctccacgcggctcgctgctttgtgctgcgcagcgaacagccgtcgacgcccgccgtgtgttcgctgttttgcttagccccaatatcgtcgtcgttcaccccggtgagaccacgacaattcttgtttaatttcacatcgacattattctccggtgattaattgtgtatgtgttgcttgttttgttttgtggaggagacgaaccccgtgttttgcggggagaaggcaagtcgttcgacgctcgtcgacgttcgaagttatgcgcaaatcggaatcgccatcgtccttacaaacaccgattgggtttgtttatggtgagccgatgcatatcgctctcgatcgactcgattaattattttgaatggatgtgtgtaaaatgtttcgattgtgcgcattggtaggatcgcgtttgcgattggagaacaagaagttgtttgatgtgtg

SEQ ID NO: 43516 - DNA, 548 bp, Zea Mays
ggaaggtagacatgatgttcctagtgagacgcaaatgtattcgcaacttggtcttattgaagaggacgaggcagagggaaacagaagagatgaagccttacgaaggtggtacaactaattctgatgaatcggaccacattgattcaggagatcaaaatacagaccaaccatgtgaggactacgtacctgacgagaagagagtgaagtatgatagaattaatccctcaatgcagccaggcagtttgtatcctaacatgaaggaatttagaattgctatgagacaatatgccataaagcatgagtttgagcttggaatcgatgtgacttcgactactcgatatgttggctattgcaaaggcggtgattgcccttggaggatctatgcaagggaggaaaagaaaggattaccgaccatcgtggttgctgtcttgcatgatgtgcatacttgcacatctagcggcaagaggaagacgacaacaccaagtagtggatgggtagcatttcacgctattccactgcttatgaagaaaccccaaatgggtgctaag

SEQ ID NO: 43517 - DNA, 931 bp, Zea Mays
atttgttccagtgacgaatgcggcaaggatgatgattttgacgagtcagcttatgtcccagttcaactggccctgatttttgcgcacactgagaagtaccctgatgaacctccggtactgaatgtcaaaagtgtacgagggattaaaccacatgatcttgcatccctaaaggaaaagcttcagcgagaggcaacagagaatcttggcatggctatggtctacactcttgtttcatcagccaaagagtggctaagtgagaaatatggtcagaatggtggtgatgaggaacctgaagaatctgaagcggaaaaagaggaggttattataccgcatggtgaagctgttactgtggagagctttctggcttggagagaacgctttgaagctgagttggccttacagcgtgctaaacttatgccagattcagctcttacagccacaaaggaaaagaaactcacgggacggcagtattttgaaagtggaaggcatgcagtgaaaggagcaagcacagttgctgatgaagatgaagaagaggaggaagacattgatttcgatgatgattttgaagacgacgaagaggacatgcttgagcattatttagctgaacaatcagggaagtcaacagcttaaccttcttggccaaagaaactctatcaagggggctgtggttctcattaatatatatatgctgaaggagttagaagaccaagctgtaatttactgtattttttatcggctactacatgtgtgttttgcctttgccatgtggagcatgttgcatggctgggacaaaacaacgacgataataacaaagtccaaaaattctggggtgtgttaaagttgaaactcactagaactataagtcaaggtctatgtctatggatagctgtttttatgtagttcttatgctaaacctttgagtatatttcat

SEQ ID NO: 43518 - DNA, 508 bp, Zea Mays
cacagactaaaatattgaaggcaatgtcgtttagtatggtctataaacacctcacctgaaccaatttctaggacacatatttatccacatgtttttataaaaaaagagaagaaaaattctatttttctttcaccattttatatccccagcattatctcttctcatcatcactcctctcatctaatgggtagcgctctttgattttttagccaccgctttgcacttctgcattatcccccgacgccgctttaatcccagttccatctctcgtagctgtacttggtcttatccgtgtacagagttcgttcatctctccaacacgacatccctctccagctcattccagcgcactgcaccttttgctcgatgtcgtccccagctccttcaagcagctgacatctagattcttttcctcactcggccatggtgtccaatacctccacccatgtgtttgctcccgaccacgcacttcctgcaagctgctaagccatatccccttcgagctcct

SEQ ID NO: 43519 - DNA, 460 bp, Zea Mays
taggagccaggtgtattgaccctgcagtgctggccccctgttagtttttcatcacagcgagccaaaaacctctacaaagatgttggagacctggtgttcatgctgatgttaactctccccagcccctcccaagttggcactgtccaaagcttgcacgccgtgacctaccagtagtgaccatgccggtcagtttggccatctcgccgtggccaggacaactcagcaaagtacacgatcatgctatgtttgttctgtgatcaccttgtcatggccagaacggagtcacgtcatcgtggaactagcgctgcgggcagcctcaccgtggaccgatcgactggagtcatccctggtcaatctcgcgcacgcaccgagactttggaagaacacctagaagaagtggtgtttgaaggagtcaactccagtggttgctgatcaagtggaggagccatctaactgtgta

SEQ ID NO: 43520 - DNA, 3389 bp, Zea Mays
caaaaatatcccacccaaacaactccaccctaccgcaccccaaattcgcaatccctctccacctctcctcccaccgcagcagcaggcaagcgcgaggcggaggcggagagatggagtcggaccagggcaagctcttcatcggcggcatctcctgggaaacaacggaggagaagctgagcgagcacttctccgcctacggagaggttacgcaggccgccgtcatgcgcgacaagacgacgggccgcccccgaggcttcgggtttgtcgtcttcgccgaccccgccgtcgtcgaccgagcgctgcaggacccccacaccctcgacggccgcacggtcgatgtgaagcgggcactctcgcgggaggagcagcaggcctccaaggccgcaaaccctagcggtgggaggaacactggcggaggaaatggcggcggcgatgcaaatggtgctcggacgaagaaaatattcgtgggcgggctgccctctactctgactgaggatgggtttcggcagtatttccagaccttcggcatcgtcactgatgttgttgtcatgtatgaccagaacacgcagcgcccccgtggcttcggattcatcacctttgactcggaggacgcggttgaccacgtgctgcagaagaccttccatgatcttggtgggaagctggttgaggtgaagcgtgcattgccccgtgaggcgaaccctggtggctctggtagtgggcgttctggggtgagtgggggttaccagagcaacaatggccataacaccagctctggtagctatgatggtagaagtgatggtggcaggtacgggcaggcacagcagggtagtggtgtctatcctggctatggtgctggggcagctggatatggatatggtgctaaccctgcaattggatatggaaattatggggctggaggatatggaggtgctcctgctgcttatggtggacattatggaaacccaggtgcagctggttctggttaccaaggtggacccccaggctcaaatagaggaccttggggcagtcaagctccatctgcatatggaactggagggtatggtggcagtgctggctatagtgcttggaacaactcttctggtggtggcaatgctcccactagtcaagcccctggcggacctgcgggctatggaagccagggttttgggtatggtggatatggaggtgatccatcgtatggtagtcatgggggatatggagcttatggagcgcgaagtgatggtgctggcaatcctgctactggtggagcatctggatatggtgcagggtatggaagtgggggtgccaactctggctattcaagtgcttggagtgatccttcacaaggtggtggatttggtggttcagtcaatggaggttctgaagggcaatcaaactatggcactggctatggcagtgtgcagcccagggttgctcagtaaagaaggcattttgagtgtctgaaatgaaccagcacatctgggcagtctatgtattgatttgtcattccagttctgatttgttctcagcattctgaagattgcccatttgctggttaaatcagtatttctccgggttgaatgggatgacattccttttcagagatgatacccaagcaaggttatgaaatcaggcatctgaaaaaaaatgtggcagtgattttacatgacgagctggtaaaaagttgcaatattggggtgcagacagaatgcaagataccagcttgagcgtttcattgtctgaagggtcttgtgctgtgctacaagatagtgacgaagtgcaacatgctgactcgagcagtcgagctgctgtagctgggtcttgggaagggtctcggctgtgtgtctgcatactgatgatcggtgatgcttacgatataggaatgccccaatgtataggtgaacttttagtgctatagaggcttccttttgttgtcatgatgtctatgctctttaagtagctgcataacaccatgtatactcagtatagttctacacctgggtatggaagccattcgtgtttttgtttagtatgaatgccatgtaattgtacattaggttgacaattcagttgttgctaaatcacgctccactagtgaattgtgtaaatggaaagaaatgaaatgcatatatataaaactctgatcctttactgctctgatttgacactgatgggttatttgacttgttccttattactctctccggctccagtggcctctggcgttggaagcgaaggggaccggggcatcttgtggctggtgtgtatcatcttcctaccatcctaggacatctaattagtttgattagtttcttccccgttctagtggactcggttgctgcttttggctttcaccgaatcctctccaaaggtggcgctggtgctactgttccttatggtgatgattttacttctgaccatgattgttacagcggtaaggcggtcttaggatcttttaacctttaagcatggagacgactttatatacatgtaagtaaggtgaataataacaaaaaaaaaatgcatagctaagtagatagaccatatatatatcatagaacatacaagccttaatgaatagcataatttataaaatagtataattgatagttcataaaactaacaaacagtagttcataaaactaacaagtccaaaatatatagttcataattttgtaaactaacaagtccataaaagaacacaaggcaacattaaatttagattctcaacacttagggcctgtttggtttgtggctaaatgtgtcatactttgtctaatgttagttgttcgaattgaataactaatcttaggcagaaaagttaggcaaaatgtggtaactgaggtagtgaaccaaacatgtctttagatagatctgggccgcctctcttggacagctgcccctctagggctgctgccagcctaccacccatgtgccgcgtcgccgcaacaaagtgcacatatcttctccctcctcttttatgcatccatgacagggacctcacgcgctcgtgtcaaagaggaggccatggccttccgcaagaagatggcatgcttgttacggctcaaggtgcagacaaggaggctgtcaacgcacacactcgcgcccaagtaggatggcaacgcgcaatcccccgtcggggaatacctccccgtccccgcgacgattttttttccgtagggattcccacgaatacttgtggggaacatttcttctctatccctgtttttcgcgggataaatctccaaaagtgatccctatctctgtttaaattataattaaaatatgcgttatttattattaatattaaacattatcacttatacacattatcagatgtaagaaatcattatgcacacatcaaaataaatatatttgtacaattagtg

SEQ ID NO: 43521 - DNA, 2306 bp, Zea Mays
cgaactcacgcaacgcaagctgagcaaccgctgccggccgcgcacggccgcccacccaccagtccaccactaaagcctcacaccgccacagcagctgccgcggccgagccgacgacgaggatgagcggggccgcgctgtgcgcggcgctgacggagctggggttcgacggggaggacccgctggacgcggatgcgctggagtggccgttccagtatgaggaggcgcgaccgctgcttgcctggatctgctcctgcctccgcccctctaacgtcctctccccgtcccacctggcccagtatgaacaactcgtggaagagggaagactgttagagtatttcagctttttcaagcaagaaagacaatcaagaggctgtgtttggatcggaagaaaccattcttgatatccgtgaagcaaaactagcatatagagccgaagtttttgagttacaaaagcagcttgtgcggcagcaagcacaatttgatttgcttgcaggccaggcttcaactcttattcaaggtagaagatcacgtgtatctgctatgtctgcagttagtggagagcttatatcgctagatgagatactttcttccagaaacttggagatgaattcagttcttggaagaatcactgctactacccaggaactagcccattatcattcaggggatgaggaaagtatatatttggcatattcagacttccactcctatgttgttggtgacttggcttgtacgaaagagctaaataggtggttctcaaagcaatttgagaaggggccatttcgacttgttgctgaggaggggaaatccaaatgttcctgggttagtcttgatgacatcactaattgcttgataagaggagattctgaaaaatcgcatcatcaccaacgtgtcgctgagttgcaacgacttcggtccatatttgcaacaagtgaaagacaatggattgaagcgcaggttgagaatgctaaacagcaggctatactctctatattgaaagcacaagtgtcatccgacgaggctcatatacatagggatatccattctcttaggagaaaaggttctgagcttgctggagagctctcgacactttctcaaaaggtgcaagctttggtatctgagacaataccatgcctgtgttcagaacttgctcaacttcaaggcacatatatcttgcaaggggattatgatttaaaggtcatgcgccaggagtactacattaacaggcaaaaaacgttcatcaatcacttggttaatcagcttgccagacaccagtttctgaagattgcttgccaacttgaaaggaagaatatagctagtgcgtactcattgcttagagtaatagaatctgagttacaaagctacctctcagcagtcaatacccgcttgggtcattataattcattgattcaagctgcatctgaagtacgagaacaaggagctattgatgatcgtgacactttcctccatgcagtgcgagatctcctatgtattcactcaaatgtccaagcaacagtgccaacatacatgtcagcacatgcattggttcagcagatatcagcacttcaatctgacttgctttctcttcagtctgagctggagaacacccttccagctgaccggaaaagatgtatcaatgaattatgtactctgattcaaacagtggaacagcttctatttgcgtcgtcaactactgcagaaccaatattgacgccttggccattgatgcgggcacttgatgatatggaaaatgccaacgctcaagtcgaagtttctgtggaagaagtaaccaaggctcgcacccagaagataaagatctttgaaaatcgtgcccatgaggtggggagggagaggcaaatattcgttgatttcttctgcaaccctgaacgcctcaagaatcaagtcagagagctgacctcccgtgtgaaagctctccaggactaacctgtttctgtaggctggtctcacaggtcgtgatgctttttttttctatgtaaagtttgacttcactccagcgtcaggttggggctgctgtgcagggacggtatggaacaatatacccatcatgtagctcgggggggttcaggctgtaggtccttgtgccacccggaataggatggcattgttgtgatattatttgtagcgatatgtatgttgtaaagtatctcagaaatcacgagccctttctttcgtgtatggttttgcttttgagtaggttgtggtggtacagttgttagcgtccaaaggcacaatcggtactgtagtttggataaatgggatcgatttcctcttcactcgcctctca

SEQ ID NO: 43522 - DNA, 285 bp, Zea Mays
ggaggatcaaaaacttacttctgataagtataagacttttccaaataaaatggaggctgagctgcttgcttccttgtgctatacatgtcaaacttccttgtgcttccttcgttgtgctgtctactaacaaaatctgtaataaaatggaggctgagctgcttgcttccttgtgctgtctactaacatctgatgttagtattcaacaatttccaagtcctcaaatgaagcaatcgacgttttcttcttctacttgtgattttccaaaatccaaaagttacagtaaaa

SEQ ID NO: 43523 - DNA, 832 bp, Zea Mays
cttgccttcaatgagctcctgctcagcaacttctatatgctgaacaccagactcctcagtggctggctcgtctactcgcatcaatacaaacaagcacagtatatagagaaaattaacatcacaccaaacatgtaaacaaaatacataataataatctacacattaaaataagatcataggaacaggaatcattaatgttggggacttgttctcaaatgctatgaattaagaacaaggcaacataaaatgttaaatgtaaatgtcctccgtccgctaaagcattatctccccgaggatttaatgaacttcggacgaaggccatgagcaaaatatcacgaaggttacaccttcgtgatcagacttataagacaatgaaaaatgaaatataaaatataaaatattagagaaaagtataccaaaaacaagtaatattattcacatattttattatacaaacctaaatattaaaacataatatttagatatatttataccttcgtcttggcagaaaacaataattccagcgtaacgtgtcagcgattaccagattgcgtgaacaatacaggggtactgttcacctatttataggcacagggtgcagcctgtgtaaaattacatttatgccctttacaatcgactacgataatgacacaaaacatcatgggcctttaagtcatttcatctttaagtcggttcgccccttcgtcttgagatctgtcactgtgccgaagctttataggtgatagcttcggcgctgcttctgagaggatctaccgaaggtgttctcttgctttatgatcttcggctacgaagcatacccccaacagtagct

SEQ ID NO: 43524 - DNA, 4034 bp, Zea Mays
gttctgccatcgtctcctctccgcgacgcacgcctccctctcctccgccccaccctcctccccacgccatcggcaccgccatcatcagatccggcccaagacgcctctgccccacgcgcccgagtcgtcgaggcacactcctgcccgcctccggcgtccacgcacatctccgcctcacctcggcgcccgagtcgtcgcacgcgttcgaggtggcgtccatcccggcaccggcctcacgcaccatctacagctcccaactctgctcctctcagttctccctctgcattccaccttctctcccttcctctccaagcaccgtcctcctcgcctagatccgtacaagctgcaaataacctctccggtggcaagacagatggagtcgatctccggcgaggatgctccgaagcacaacctgatcctgtccgcgctcgtctccaacctacagtgcatgctcgccgcccgccgcccgttcacggcagaggtcagcaccgccgccacagctagcgaggctgaggccttggctcaggaagcagaggcgtccgatgcccccacgggagatgggacgctggcgaggcccatcgtgctgctgacctgtgccggaggggaaccggtcggcgggtctcgcggcgctcgtcgacgccctcgttgccgccggccgctgcgatgtccacgtgtgtgcccccgaatcgtacatgctgtgacttagaaaaccaaaccacagcgggaccggtgctcggatagggtccaacggcgatgcaagcaaggagtggcatgcggccggaggggcgcagatcggctcctgcacgtgcagcgcagccgcgtgacagtgaagcagggaggccgcgataggcggcacagggagggtgcgacggaggcaaagtgcaagcacctggggacttcagtcactgaagcagaaagaaagagtacaagtctactactgcagaaagcaaggaggatgccaacagaagcagatttcatgtttggatcgggtattgacctttttgtgttctcctcaactcattatttagctacatatcttattaaatcttaatatttggtcattagctaccaacttgcactattattgtgaaaatccattaactttagccaatgaaatggttagactatcaccacgtaggtgatattagtggcattaagttattaatctgtggcaaattctattatcaactattttcttggctaatcattacaatatataatgaagaatactatggcttgaagggatatttatacagttggctatgtatacggtctgcccaagcgcccaacaatgaatgatgtggtgaaggaacttgagatcatcagatagaatgaaggggcacaattgctaaactcaacgtctttatcagttgaacaatttggaaaaaaagagaagagatccttatgcatttgcctatggatgatggaagcaacaacaacacttttgactacaacagtgggagttcaattaagttgttcacccaagtagatagttgtctccactctttcaacaagttattggagtgattatatatgtctgctccatatgaatgccttttcgttttagtatcacatctgaaattaccaaccttttagatcgggtattgacatctttgtgttctcctcaactcattatttagctacatatcttattaaatcttaatctttggtcattagctaccagcttgcactattattgtgaaaatccattaactttagtaagtgaaatggttagactatcaccacgtaggtgatattagtggcgttaagtgattaatcagtggcaaatcctattatcaactattttcttggctaatcattacaatatataatgaagaataccatggcttgcagtgatatttatacagttggctatgtatacagtctgcctaggcgcccaacaatgaatgaagtggtgaaggaacttgagatcatcagatagaatgaaggggcacaattgttaaactcagcgtctttattagttgaacaatttggaaacaaaaagagaagagatccttatgcatttgcctatggatgatggaagcaacaacaacacttttgactacaacagtgggagttcaattaagttgttcacccaaataaaatcttaagcaaaatgggagaaggtttgggttttctgcaatctgtcgtctcctcttctgctgggtatctccgttattattctaatgaagagggctatgagttggattttcgtaggtacatttgagcgtgttttggaatgctgggaccgtgaaacacatgaatatgttgccataaaagttgttcgcagtatccacaagtactctgatgctacaatgattgagatagatgtgctcaatcgccttgtagaaaatgaaaaatatagatctctgtgagtatctcagagacctaattgcttaaagtataaccctattctatttttgacttgacagttcctcttcaatttgtcagctgtgctcaaatttagagatggcttgactatcgtaatcatatatgcatggatgcgttactttatgtttgcttgtatttaatatagaaggctcccttgccttcgttcgatcatgtggtatttgaaagtgatgtctctataaatgaagtaaggtagggcaatgcttatgttactgttgtcagttattagctttttaaaccatgcatctgtcaatgtgtcctgtttcaatagggtcttattataggacgtgatggcactgaattaggatgtttgttcttttgctacctttgttaaacaacatcagatcattcgtattgtatccttcctcggattgcttcttttgttctactacaaatatgcccaacatggcagggagaggtatgctcctaaatttcttattttgtgcattgtgaaatgattgttctaacaacatcaagtttgtgttcttcatataatctatctcagattgctctgtgttttgcaggtctcgaggtcaagcctggacccactgtcaagtgtgtgcttggacatgactttatcctgcactttccactgctgcacttggggaatcaaagaaaagtgaaagtaccatgtcaaagttgatgaccagaagcttgctattggaaccctctctattgaaaaatacccctagatagaaattgatttggttttcaataaagagtgtgagttgtcacacacatagaaaactacctgtgtatttttctttggttacaaggttgagcaaccaatcgaggaagatgaatatcctttttaacattgatttttttagttttatttcatgtaagactgatctaaacaatttctttgtggagtattttgtttccttgatctcatttttgcttcttgcctcttacataatggatcttgattctgaagatgaagagaaggagctaaacattccagtaatcaaggaaaatggcaaaggtgatgggaaggcagttgctgcagcttcaaaatcaagtcttgggcttgaaaaaaagcaaggatgagtatgagtctgatgattctgatgagggagaaggtgaaaccggagaatgaggagatgtggttgttcatggacgacagcatcaagaaacctgcaacatgcaacctgattttaagaaatctgccacctgcaacatgactgggcagtggtatctctgagatataatgtggacaacggcaaagaatactatgcatacacaacaaaagagtcctacaacctgattttaagtccatttgtagcaaaccatcttggaagccattaactcgttgaatttgaagctgatgtgcagttttatttttatgtcagttttactgatgcagttagttcctaagaagatccatggcaacttgtttcacgctgatgcttgagaagttgagagggatggaaatgacactcacaataaaaatttgattttctttcttgtgatcgtcgatcacaataaacacagtggcacaatataccgtgtaattgtcctttcctggtagaacatgaaatgttgaacttcctcttgtgatatataaagcctatgtatcctacataatatttaacatcttacggaaatttatttgtgctgtccca

SEQ ID NO: 43525 - DNA, 2296 bp, Zea Mays
aaatcggcagtggaccaatcgccgctcaccaaggccacctcatcacccagccacgttacatgaccaatcgcctgcgccgtagcgcgcacacctacgtgtcgagccgtcttcatccctccgaccggaaatcaacggaagcggacgcgagaggagactaaccgacctcggatccatcgacgcgtgaagatgtcttcgcccgccgagtactacaaatcacttccacctataagcaaggcatatgggacattgtgtttctttaccaccgtgctagttcagctccagattttgcacccattatttctttacttagattaccccttggtgttcaagaagtttgaggttagcttctatttctgttttcccttacgccacgtttggattattggaattgaattccattctaataatagtaatttaggcatatatcaattaagctaattcagttttatgcaaaatatatcggtatattattattagcaagatgtcggagatatttatgtgctatatttttactgtagatgagtgaatcgaggagcgtcctgtaagttacaaagtagatacaaattctactaatacataaaatcatttctcatcctccactccatgaatttgagatagacttatatctgaactttggaaagtagtggaatgtcaaattccaagctaaataggttattttataagcaaattccaattcctataaaatgtagggatccaaacgccccgttatcctaattgcatcacatcgatacagtttaacattattattgcttagttttgactgcacaacattgtaagcctctattgggaaggatgttgtaacatgccacattatctttcctgataattaaggggaatttgtgttgctaaagtttgttttgggaagtcttgcattccacccttctatatttgatgtttttgaatggatcagagtacttatgttttgatttaatatattcggcagtcagtcatgtaattatgccttggatcttgtacattacattttttgcactctgcgccacacattccaatgtttttaaaacgatggaccttgcagatatggaggctattgacaagtttctttttcctggcaccattttccatgaaatttggtattcgccttctgatgatagcaaggtatggtgtcatgttggaaaagggtgcatttgataagcggactgcagatttcttatggatgatgatatttggtgccatctcactattggtgttgtctattattcccctattcaattcttttttcttaggaatacctatggtcagcatgctcctttatgtctggagccgagagaatccaaatgctcagataaatatatacggcctcgtccaattgaggtccttttatcttccatgggctatgctcttattggatgtgatatttgggtcatcattaatgcctggacttctgggtatcatggttggacatctctactacttctttgcagtgttgcaccctcttgccaccgggaagagctacctcaagactcctaaatggacataagattgttgctcgattcaggataggcatgcaagcgaactcacccgtccgtccaccagccaatggcaacagcgggtctggtgtgtttagaggaagaagctataggctcaatcaatagattcacccacctcgtaatgtgatccatggtcggagtggcaatgtagaagcaaagaccagaacgcatagtagggtcaatcaaaattaagggttacccgtcagagattttcttaaaaaacctggacggacggaatggagaacccttccatttgctcatttagttgctaacaatgttcatcgtccatgtttacacatgaatataattctgtaatgacaatttgtgtacacttatgctggacttattgtcgcctctttttagctaggataagaacaaaagatgatgagtttgctcatgctggtgcttttggtccttactgggtggatttgtgcatgctgaacagcagaaggctagatctcgggttattgtcatctggcccaaaaaatgacatcaacaggtttccgtcacacaagatcggagtttgctgataatattgtagagacaatttagactttgcttgatggttgtcatacgtcaatgacgtcgaaagaaaatctgagaacaatacggctgtaaatttcacctttgtgtaattgtatcatagatatcgtcgagaaatcccaaatgcagtaatggctcgttgagcagaacttcaacactttttgcgctaggttctgggcattcatcatcatgttaacatacttcaagaaacaaagatgacaacg

SEQ ID NO: 43526 - DNA, 292 bp, Zea Mays
cggtgaggcaaggcgttcggatggcgatgcacggatggtccagttggtgtgttgcgcgatcgcgtcgacaatgaacggcgtaactccggcgatgcgtttggatggcgggcacgacttccggtgaggttccacggattgcgaacggtgtggacgaactccggcaaggcacgatggcgagcggtggtgctgctgcgcgcgtgggcaggggttcgacagtgggtgcgcgtgagcagagcgatggcgtggtggcgtcgactccggcgaggttccggcgaggtggtggttcggcgcg

SEQ ID NO: 43527 - DNA, 2029 bp, Zea Mays
gacccggacgaccggaggcagatacgtgtgcgaccctggacgcgcgagaagatccatccctccacacggatctcctcctgtccaccaggctacttaactgatgagacggcacggccaaaagattctcgtggacgtctccggcgcccaattgtatagtagcccgcgcgctctagcgagaagctagcgcgccatcgccgccggcgtcgtgtcatggaaatggtagagtgctccctcgttgctacacttgctccgcgcccgctgcccggacaggttcggaaggccttgccccggccggcggcttttggggcgagagcgagactccgggtgcggtccgtgggccgagaggagcctctgcatccgcagcagacggcagtccgggcttccggaccggatcacggaggccgggcgctggggcaggctgcggtggggttcgccgccgctgccgttgtgtcactaaccgggttctccggggatgtgtccccgctgccgacgccgcctgcccgggccgagtcgctcaccgtcgcgttccccgtctccaaggcgcgcgaagtgaacagagtgcagaggacgctggtggagacgtgggggctgatccgtgagacctttgttgatcccaccttcaaccaccaagattgggatcagaaactacagcaaaccatggtagagatatttccactgaaatcagcggatgctgcctacagtaagattagtgggatgctgtccacactcggcgacccatttacaaggatcatcagccccaaggagtaccagagttttaggataggaagtgatgggaatgtgcaaggggtcggggtgtttataaacaaggagccaagctctggacgattgcttgttatggactgcattcagggaggcccagcagatcgagcaggcatacatgaaggcgatgagctagtcgagatagacggcaaaagtgtttctggtttggatggagaggctgcagctcagaggcttagaggccgtgtaggaacaacagtgaaagtgaagttgttagatggaactgacgatgaaaggggtgggggtttaagacaaaaggaggtccagctgtctcgtgaaattatcaacctttcacctctgtcaactgcaattatctctcatagaacagacgatggccatgagtgcaagactggctatgttagattagcttccttttatcagactgcagcagctgaaatggaaaatgccgtaaaaaggatggaggatatcggtgtccagtcttatattctagatctgcggaataacccagtcaggaggtttagtaaaagctggtcttgatgtggctcaaatttggttggatggagatgaaacccttgtcaacactattgatcgtgaagggaatgtgctaccaataaatatgatccaagggcattcattaacgcatgatccccttgttgtgcttgtcaatgaaggaagcgcaagtgcaagtgaaatcttggcaggggcattacatgacaatggacgagctattctggttggccatagaacctttggtaaaggaaaaattcagagtgtgactgagctggacgacggatctgctctgtttatcacagttgcaaagtatctatctccagcgctgcatgaaatcgatcaagtaggaatccaacctgacatacaatgcagccctgacatcctttctttgccaagagcgccttcgctaagagaaaacagcaacgccacaaatttggagatggattcgtgtatcatggtagcagaacaagcgttggaaattcagcaaagcaagggttccgcttcttagatgcactatgggctctgtacattatttgcattctacagtagattggatagcttaccttagagacttataaagttctgtagcggtatatagagagaggctgatcctcacatgtttcattttaggcattatctattcggtgattcatgggaatgtatataagttgaccttgtcatatatctgtgtcgggttcattcttgactatccatactcagaaatataacgtgcaatttttttgcaaaaacaaaaaactaa

SEQ ID NO: 43528 - DNA, 2504 bp, Zea Mays
ctgctaccccaaatacgttttttcccttcaaaatttaccctttccagttttcttaagtacttttgctgttttctttttttccctctgacctcaaattaccaaattacccttcatgacctgaacgaagtctcagcattatttttccgtcttctcttaagttctcgtgttctgtctctatccatttgtttactcccgatccccatcagccatggcgataaagtgagggttccaggcggccgccgcttcagggagggctcgcggcggagacaggctcggcgctcgcgcggtcggcaggagctcgcagcgggcaagggctggctctcgggcaggaggtgctcgcagcacggtgctggcaggggtggctcgtggcgcaggcaaggagaagctcacgacaggggcggctaagacttcggtgcgggcacagttgcaggttgcagcagccactcgttgaagatgtttccctctgacgtcgacgatgctcactagcaagcttgcaaaaggactttgctgccagggtgaactggggcagcaaccaagaggtgtgttgataggaggttgtacttgtttgctgatgtggtagataaatcggctcaggtgattagtaattctggtctcacagttgttagtcacagtggtgtggaaagtgcagcatatgcatccaggaaatggccacacccaaaaggcaacaagttgtgacaaatcaatcaactaatattagtcctgtccctgtcacaaggaggcaattggcattatcaatgctcgatgaaagcacaagtcaggaattggccacaccttcgagggcaaccaaatccccttccaagcctacatcaaggattgcaaggaagatcactccaagaaaattcaaaaagtgaatgtttttgtgtctacaaaactatgatattggatgcttttgtaatcttaattaattagaacggaggcatttggatgatattttggcatatgtatggattgttgacattaaacttgttattgtgcttgctgttatgcttctgtatgggattattgacatttggatgacatttgggcttaatatttaaatcaaacttgctattatgcttgaacgtggtgcacatgtgtgcacgttgctacaattttttaatgcatgagtttgtattttctaccatacctattcttctttttttacattttttattcgtaatgtcttttatactttgggcaaactctgattatactttgggcaaactctgatgtggatgaggaggaccaaacggcgcagctctaatgtgcacaagcagaagggtactttggtcatttgaggtcagagggaaaaaagaaaacagcaaaagtacttaagaaagctgaaaagggtaaattttgaagggaaaaacgtatttggggtagcagccgaatggctaacgtactaagggataaagtctgaaaggctaacgtattgaggggcagcagctgaaaattctctatattaggccccgattctgatgaggcccatatgtcccggcacgtaattacgagcacctcccagtccgacctgttcggatacggagcccacgaggccacgaacgaagccctaatcatccgctccaaactccccgcaccggcagagatcagccgtccacgagagcatcacggctagggtttccgatttcaactaggacccctggatctatgattctatgaaccagaggcgagacgagtggccgcagcatcaggaccgtctccaactcgccagtactcagccgccgcaatcagggacagggagctcgagcgcgcgccccacctgcgccgacgcgatgcgggccaaggtatagggacattctgttggctgtcatcgtttcatgctacttcaagttgtttcttttcacaatgatggtttgggagtttccatcatctgttatattcatcgttgaaatgtttgttttctagtcagtgggatgcatatatacattagtaacagtcttgttgttccgcagtttccaaaagcccattgtttcgtggtctgcttactagcgcatgcagcaaaatacttgacccagcgatggatccttggaacgacatgagcctactcgtccacatcatcctcgagcttcaagcacggccctaatcttcggatggactgttctggtgcttctagagacgtttaggtatattgtgccctgattgatgagccttgccatttcctacccagaaaaaaaaccaaattagagttgcttaatgattcaaacaaagctgcttaatcacgcaactgatttaatagtagggctttatataacgagaggggagaccatatgtctctaccaagatacttttcgtgtactcatgttacagtggtttggacttcatgctctaacaatattataaagtaagaccactgcttcacctgttttacatctcccctctcgggacaaaagaaattggattcttgtgtttttgcagataggaattaatttaggctccctttggaacaaaggaaagaatatagaaaacctactgcccctttggaaagt

SEQ ID NO: 43529 - DNA, 2174 bp, Zea Mays
gcaccatttccaccgtatcactgcacggccgcgcgaaaatgtgcagcgccacaagtgcattccggccccgtgagtaatcgtaacagaggatcgctagctagtgtgctaccctgtacggcgcaggcgcagccatgagcaacagcggcaggtggcggaggaggacgaggtccgtagccccttcgccggccacctcttctccgtcgtctcctggcctccgagaagcgcagccgttccggcttccccagtggaagttctcccaggtcctcggcgaactgccgcccgcggccgaagcccgccgcgacggcgctccccgtccgcaggacgacgacgatgcggacgaaatctcggctatcgagttcgacggccgcggcgagtacttggccggcggcgacaacgccgggcgcgtcatcctcttccggaggaccgacggcgacggcgacgacgcgcggcctcgcgcggagcttgagcgcacggaccgtgccggagcgccgccgccgaggtacagctacgcgacggagttccagagccacgaacgggagttcgacgtgctggacagcttggacatcagcgagaggattaagaaggtgaggtggtgcgcgcggcccaacagctccctgctcatgctcgccgcgaacgaccgcacggtcaagctctggaaggtctccgaacacaaggcggaggcgccgaagaaagggaacggtcggccgagttggggcaccgcggcgctgtcggcagccacgaaactgccgaggggctgttcgtctgcagagcctgacgaacgtcctgaaaagcaggcgatgtcggagacggctactctgcgaaatgccggagagtcttcggccgcgctcacgagttcaacatccactccgtctcgaccaactgtgacggggagacgctggtgtccgcggacgacgtgcggatcaacctgtggcatgcggaggtgacgcgccagtgcttcaacatcgtggacatgaagcccgcggacatggaggacctcgtagaggtgatcaccacggccgagttccacccgtcgtcctgcagcatgctggcctacggcagctccagcggcctcgtcaggctggtcgatctgcggcgatcggcgctgtgcgaccacagcgtgagaatgttccaggaccgcgagaaccgccctcagcccagcacatttttcagtgagataatctcctgcatcaccgaccttaagttcacaggcgacggggaacaccttctgactcgcgactacatgaacctcaagctctgggacctgcgcgtggaaacctcacccgtcgcaacgtacaaagtccacgagttccttcgcccaaagctgtcggagctgtacaccgacgactacatcttcgacaggttcggctgctgcgccagcaacgacggggcctacttcgctaccggatcttacagcaaaaccttcagagttttctcccgtgccgctgcgcagacatgcggcgctacgttggaggccagcaccaacccttacaggatacaattacatgctcctacgaagatcccagcgctgcttagcaatttctctctcggagttcatagaaaaggtcaggatggtcatccgaggtcagacggcaaggaacaagtctcgtgcaacatggcgtccaaggtgaagcatctagcatggcacccggcagaaaacttcatcgtttgcgcagccaatagcagcttgtacatgtaccatacataagcacgctcatgttatgtgtgcagagtgcaaatcacagaacagcgttcgtagctaattagattgaagccagaaaagaagatacttttcccatgttagggcttgttcggttattcccaatacacatggattatatgggattggaaaaaattgagaagaagtttgacttgtttgggattcaaaccaatccaatcccgctcaatccacatggattgagagctaaccgaacaagcccttacggttgcatgttgtgaacagggatattgaactgactgtacattgtcaaggatcttggatcttcagcagatcatagaaaggaaaagatactctcgtaacgaacgaaaggatcgcctccctgactgtcctttctgctcctcgatacatccttgcaatattcctgaatttcgaagggttgacctgcaactcagacttgctttgtgcattgattaaacatcatggaagcactgaaagg

SEQ ID NO: 43530 - DNA, 497 bp, Zea Mays
tgggccgcatcgggctagtttcagcatagtactattcatagttttcctttttcttttttctgtcagacttggaaaattataggaaattttagaaaaatggtacaattataggaccaatttttctagactcctaaattcatctagcatttaataaaatagttccaagatttttagtccaaacctggaattatttagcatttaaagatgcctaaacctatccttttagaattaatttggtagctccaaaaataataaaactttttgggtaagccaagtttgatgattaaagcccttgggtggagtttgaaaggatttggacattgcttggtcccaaacccaatacactagctttctagggtttaattgcctagtactgatagaatactaactcaggaaaccctagtgactaatgtgtaccgtgaaggaaagttgtattcaagctacaacttagtgtgtttctattataactacacatgcatagcatcacataagcattc

SEQ ID NO: 43531 - DNA, 538 bp, Zea Mays
atcggagttcgcacaactgtagtcgctcccagcgatgccatccgcaccaccggccaggatgctgagcagcaccaacagcaaggtgcctacggggcggttacttggcaccggggaacgggcggtgcacgatgttgactcgaggcttcccggggaagggcaaccaccgcagctgaaggtgacaccgattacaggtatgtactgtctttgattgtgctttcgtttaaaaggtagttttgtcagttcacattaccctgcaacttgttaattttatatctattgaaaggagttgtctattatctgcaacttcacacagcaggtcaatacagacaagacaaaaaaatactaaacaaagcattggcaatggtgacctaccagaaaaatatattcttaacagacaataagattatttcaggctctgttcatcctactaacatttttatttagacatataccgctacgcttgtaattaatatggtgcttatcatcttctagcccattggaagttttcttctcatctctgttatcagggaagcatttg

SEQ ID NO: 43532 - DNA, 1310 bp, Zea Mays
taggcttctcagatttcctcacccctcatctctcctcccgtgccgttgcctcgcatcgtcatcttcctccgtgtgctgccgctaccgcgacccccctgcctgctcgcctccacggccacacggaggccccccttgttgctctcggatatgtcttgccaccaccggcgtcgctggcgccggccgtccacgcaacctagacgcgagagctggcgctggccggagctgcacaaggtgtcgctgctggagcagcggacgacggcgaaggcgctgcagcagcacctggtgctggcgctacactacttcttccccatcttctacaaaatcaaaatagcagtttcaagtaccagatgatgcaaggctttcagccagaagcccagaagtgtagctgttctctgaaatctttgccaaaagttgttttagtagtttggatgaccagcaacatttgcacttgtccatgctgatggcactacaacattcctaggctccttgatgccataaaagaatattactgaaatgccttctgcttgttcattcgattcacatatattgggtgcacccataaggcgagggcatctatcacaaaagtctgtcatgaagcgaaagagatcttcaaagagacaaaaggccaagttggtcatggaaagcttgaaattttattgcatggcgtcggagaagaagcagtcgaacccgatgcgggagatgaaggtccagaagctcgcgctcaacatctccgtcagcgagagcggtgatcgcctcacccgcgccgccaaggtactggagcagctgagcgaccagtcaccggtattctccaaggcaaggtacactgtgaggtcgtttgggatccggcgcaatgagaagatcgcatgctatgtgacggtgcagggtgagaaggcaatgcagctgctggagagtggcttgaaggtgaaggagaacgagctgctgaggaggaacttcagtgacactggttgctttggatttggtatccaagagcacattgatcttggcatcaatggatatcacaaaaaatatacatccagatcatccaaagtgcaggtaactgttttattcagacatatatgattaatcatcattcatcaatatgtgaactccattgagcaagtatattataaagtcagaactaaaaagaggaacatttggttccaccatttcaccttattatgtactaaggggaagtatttagagattgaattgatggcaattacttcagtctttaaaactattattagtgttgataatgttgattccattcagctctgtttttttctgcccaccgaatcattcgttcctcg

SEQ ID NO: 43533 - DNA, 4859 bp, Zea Mays
tcgaagatgaaggttatgacttaattacctaaataagtaaggaatgtaaagaaattttaacataataattcatctttgatgtattaatatcatatttcttctttttcgtataatgaatttataatcgtaccttcggctctacagaatgagttagaacgaatgtgctctagagaaaagattacacacaacaattgttcagcccttcaaaaggaaatttatgcagggcactattcatctatttatacagaatcgtacagcttcatacaaaattacacttacactcacaaagattacacacatgagttacaaaaaatacaaggacaacattatcttttgctttcagtattcaggatgacaccttcttcttgcattgtctccctgtgttgctatgacgaatctagcttcgttgcccctccattgtcctgcatcgaaggtgctcgggtgccgaagctcctacaatacttggtaacatattgatagccaatgattaaacgtgtttttgaggaccttcaaaagacgaaggcccccaacattgattctaaatcaagccttagcaattagtaacatcaagtcatcttaaagactaatgtgtcattcaaccaacgatatatagggtatatttggatctcattcttattatgggactttgagttttaggcaatcaatataaaatttgaacattggattttaaaatgagacatgttagatctcattctcatagcaataattgtctttgtacagtagaagtctccaaataaatttatcgtagataactgatctaatatttcttacgcaacatcttatttttttaggagactcaaacaacgccacattagtttatgtttagcgttttattgtatgtttggttgcttgggctccataggcctaggtaggcacaagaagcatggatggggttagccttggtatgcctatttccttggcatgaattatgtacccttaggatagccttgtgaaaccaaagtatgtaaattacaaacttaggatcatgaatgctcaacatggtaagttgacaaattccaattggtttctaccttcacatgtctattggaatggtcaggatcaagggtgatgacaaagtttgtcagtcccatccagccccactgatacctcggaaaatatcgaagcattgctaatacttgctttatttaagtatttatatttgtgtaattatattcaagtattacattattagaattgacatgctagaataagattaaaacctagacgtaaaacttttgatcgtaacgtagaaaaacacttctaagcaaaaggggtgaagtgggctttttgctaagctttaatttacggggggggggatagacaagcccaattcatcctctcttggacatttagattctttcaacccaatataaatgtgggtagacccttctcatctaactaacacataagtgaaccttggatcagagtcaacaaccgcaaaaacaatttggttgtagtgtgtttctcccctaaagttatctccaccaacttactcatcttcatcttttatttcaaagtctactatataaacaatgcaatatacaacacaaaacaatgtttttgcacgaccatatggatgatctgctagccatagcctaagaaagcaaccttagaattaatagggacccttgtaaggacatgtgtcccatcaatagccccaatacggtcctagattatataactagaacattttaagttatttaatttacctaagaaagttaaggattatgggttaactacccaaccatgaaaagaggttaactaacatgtttgttggctagtgaggtcacaggactccgtgtaaaaagccacatgtggcttgggtacaaaactacaaacaagaccaacagagggaagaaaacaatatgagaggtagagcattttcatcaagctaatagtccacttttggattcgtcgtgtttggcttagatgcatgtgtagtcaaacatgtgagattcacattacactagtctgattgacctttaaccacacatgcaaacacacctttgacacacatgttttgtagattaccctgtttttagaattatttcgtttttccctatttatcttaggatcaatttggtagagcccgctccatgattttatagctctgagacttgaatctccatactccgctagagtgattttgagtgggtttttagcaagggtaaatctatctaacaaaaacaaagcgatttctaagggattagaccgaagtgtgaataaagtgatttctaacagaaagttgtaagaagatttatatataatagatatttcacttaggacatctgcaatggtcgtcttaaatacctagctgatagaagaataaaaatagtaatttatttcatcactagtatttggttccagacataatacattcagtttcttaaaatacttgaaatcttctcatatttttaactatgtagcaaagagattgaatctagctagtcattgggacacccttagcccataccataaggcatatcttttacggtggcggaaactcccttcatttctttcacctccgattcgattccttgtcccctcttgatccgagccgccaccaaaccctaactatctaaaccccccgtctcgctgtccgatggccgccgcctcgccgccgccctccccaccccacgcaaagcgccccaagatgtcctcctcctccgacccggaagccgatgctgagcccacctcggcctccgccgccgttgagggcgccgatcctgcgcagcgtcgtcccaggtacaagcgccgcaaggtcgccatccttctcgggtactgcggcgcggggtatcagggcatgcagaagaatccgggcgcgcgcaccatcgagggggacctcgaggaggcgctctaccaggcgggcgccgtgcccgaggccgaccggtccgcgccgcgccgttacgattgggcacgtgctgcgcgcaccgacaagggcgtcagcgccgcggcgcaggtggtgtccgggcgcttctacgtcgacccgccgggcttcatcgatcgcttgaacgcgcagctcgcgccgcagatccgcgcttacggctacgtgcgcgttaccaactcattcaacgcgaaaaagttctgcgaccgccggaggtacctgtatctgcttcccgtatttgctcttgaccccagcgcacacccggaccgcgaggccgtcatggcgagcatggggagtgggagcgagcttaccaagtgcctggagtgctccgagagaggcaggaagattcctggtgtcatgggccgggaggggaaactgcccagccccgggcagaatggtgttgatgctcccgtggagggaagtagccatgacgaatctggaacacttggggatgcaaaatgtgaccatacaagttcagatggtaataacccatttgcccatggggaagttggatcgaacagcaaggagaagcctgatttaccggtctctggtgatagaactgaagttgcaaatgcaaagatgggatcaaatggcgacggtgctgttgtatcatcagttcagctgatgcagatatttatattgggaacgaggagaagaaacttgagcctgcagccactgaaaataaagctcaaggtatggaatctgagaagatcaatggagaagagaaactgccaactaagagtaccttttcttacactgatgaagtgaaggagaggttcaacaggattctcaagtactatattgggacacacaatttccataacttcactacaagaaccaaagcagaggatcctgcagcaaaaagatttatcatttcctttgctgctgaccgtgttgtcagcctggatgggattgattttgtcaggtgtgaagttgttggacagagtttcatgctccatcagatccggaagatgattggtcttgctgtagctgtgatgaggaactgtgcacctgaatcaatttatgatgtcgcttttcgcaaggatgtcaatcttaatgtgcctactgcacctgaggtcggactgtacctagatgaatgtatgttcacatcatacaacaagaaatggaaggattcacatgaggcagtttccatggaaccttattctgaggaggccgaagagttcaaggtcaagtatattttcactcatattgcggcgatggaacacaaggagggagctgtagctttgtggttgcattcattgaaccacagaaattatccagatttccgttacatggaaactgccgagcacaatcctggtgctgaagttgagagtattgctgctggtgcagagcccaaggttggagctgaagttgagaatactgaagaagtacagatgccaagcgacaatctaagtgagtaataaattttgccaaggggcatgcaaaactgaagaaaatatctgtttgtcgtgttactgagagggacctcaaacatttctaatgagatatcgtaatatagagaatgaaaactcatatgttctccaatggaatatgaacatcaagaggttaatgtgcatcactttatgccatcatgatccctatgttaatcttctgaaataagaacctataggtctatattagtcttatatctgaacttcattaattgcttccagacaattgtatgacaaatggcactcggaaatgtttcagcaatgtttttgtttgctgaaattattatgggattcactattttctcttatctacaatataggtttattttcttgcacttttttcttttcttttggtaatagctgtatatcacttagactgccatagtgcgtcaaatttcattgcagcataatatctattgatattgctagtacattttttgttgagcaaatgttggagccaaaggctgttccaggcatgccaaatattgtgagctttaagatac

SEQ ID NO: 43534 - DNA, 317 bp, Zea Mays
taattttgtgatgaaacaaagtttcctgatgaagtattatttctacagagtatgctgctgagtaaagcactgaggatgcaacaagacctcgaagacaagaaaaacaaaatcataattgagggcttggaaaacaagattaaagactacgaagcttctctagagaaaaaagacttcctgcttcaggcaatggagggttcacttgcagaaattcaagccgaaaatgctaaattaagcgaggaacttgtccaaaaatcagagagcttccaacaagagaaaaaagatttgcagacaaaatacgaagctgaagctgacaaaaa

SEQ ID NO: 43535 - DNA, 3048 bp, Zea Mays
cccgcccatgatgcccgccaccgcacgcgtcttcctccttcctccctgctagctccggcttccttcccccaccaacgcccacccccgccaagtcccccaccaacgccgctatagcccgcacctctctagactagggcacccaaacctgagccgtcgtccccagtctgcctctcgacgcgcagccaaacccaaacccttccaacgggcgacggcgatggccgccgcgacagagaagacggctgaggacatccgccgcgagctccaggagctccagcgccagcaccgcgaggtacaccttcttctttgtccggcgcatctcgaagcctcgagtctccgggccgtctgccctgacccccttgtcgtcccctcgcagatcaccgagcgcctgcgcgacccctgtggccttcgccgcggcacccccggccctggtcctggacctgggcccccccgcccgctccgtggcttcgtgagaccccatgtgggtgtggaagtggtggattagcctccacagaagcgtcggctcctatcggccgtagttaaggttgatggctctgaaaataatgaagatgacacaaaggatgccgatggggaggggcaagaggcgggttcaggtgccactgaaggcagtgacaggaggactttcaacattggcgggttcagaagggacgggagcctgtggatgcagaggagggtggactataattcgctgccagagccagctccaagggagcttcccatgaatgaggacccgagtttggctgagcaaaaggttcgtgaagaaagtgaaaggctgcgacaacaggaacgtgagcaaattgcagagaagcgtaagtgtgatatgatgctccacgctcgtgtagctgctaaggcagaagaaaagagtatggagctgttgtacattcactggactgagcatcataaaaggctgtccaatttcttaagttgtttaagtgagtatgcagtatatatatcgtacatgaatgctggatgtatggttatcagtggtgactcatacaccgtttatgcccattctaaaattatatgccatcaatttgcaatgttttgccctacagaggtggactacacaatcagcaaaaagaacatgacattccaaatatattgttgcccaaggactactgcagaattggaggcacatgtagctgatacatctcttgtgtctgctgatgcacctcgtgtgcttgctgatactgtactggatatatctggtggggagcgtgcttttattgaggcagatgaagcaaaggaactgcttagtccacttacgaaaccagggaattcatataaaagaatttgctttagcaacaggagctttggtattggtgctgctaatgttgctggtccaattcttgattcagttaagaatcagctcacagaggttgacatatcagattttgtggcaggaaggcctgaggatgaagcccttgatgtgatgcgcatattctccaaagcattagagggttctgtcctgagatatctgaacatctctgacaatgctttgggtgagaagggtaggaagctgcgaaagctctatctgagcttattcctgcaactgaagcttaaggttctccacttccacaacaacatgacgggagatgaaggtgctatgtatattgctgagatggttaagcgttctccgaatgtagagagtttcaggtgctcagcaacaaggataggatctaatggtggagtcgcattgtctgaggcattagggacatgcactcgcctgaagaaacttgatctcagggacaacttgtttggtgttgatgcagggttagctctcagcaaaacccttccaaagcttcctgatcttgttgagctttatctcagtgatctcaatcttgaaaacaagggtactatagcaattgccaaagccctcgaacagtcagcaccgcagttggagatactgttgaagatgctaccaaaatattacaatcatgtcagagcttatgataatacactcattacaaaaaaatttggcgtccacaggattactctgaaaggcggaagaaaggttcgctttgttgtgatgggaaatatgttttgcactgagctgcgaattcctcgtaagtatgacttaaagggttctacacaaggccgatcaaccaaaaagcaaaatataaatgagaacgcaacactgaaggaccttgacctatcatatgtttttcatgtcgataaaccatggcgggacacacttttcagaggagcatacccgtgaggtgaacaacagttagtttgatagggaagttatgaaggcactgtcatcaagtgaccctccacttctgactcaaacagaatcagatgaagagttaactggtgatgactatgcatgcttgagaaggaccttaaggaacaacaggttgtgcatggtgaggtggaaaacactttagggcctggttttatcaacttggcattagagaatccaataccaaaggtaatctgtgttaatggcaatgatagtggaccagtctcgtgcagcagtaactctcgctgaccactgctgtcagttatggacttgctaccagggccccatcaattttcgtatatttgtgaagatggacggcagtgacctgcatgttggcatggcaaaattgaaatgggggcatgcagtgcaatgggtgggctacgtaaggtgttggttgtgtgctgacgaaattcggtcgaagccgtcctaatccagaatcatttagggagatgctgagttgacatgttcgaatgacctttttatagatatagtacgtatgtccatgggactgggaggaaccgaggacccatgagatgcatatacgtttctttcaaacaattcatcttatgggttttaaacgcaacatgattatgtatgttaacattagacaagccaattccttcaaaaaaatgtcatacaaggcaagacatttctggtggcacttgatgcgcgtcctcattttaagcatcacggatagaatataaccacatgttctgcttgctaatcgatgtgtctaattcaaagggaaagtcctacaatggttggacatttcctttcttgaatat

SEQ ID NO: 43536 - DNA, 2090 bp, Zea Mays
atctcctggtgcttctctcaagccaccgacgctcaggctctctacatcctttagcaggcgccaactccctggagctcgccttcctgctggccgcccccagcaccgacgccccttctttttccccatctccttccttggcgcgctcgcccaggtcacgcgtgtccctgctcgcccaggccgcgacctcgccaaaccgcgcagtccctgctctccttccccagccgcgctcagcccagcccttcctccttcgcccttgtcgagctccctcagctcgcccccaaccacaactgcacgccaacctcgccctaggccatggagcagcaacaaccatggaaccctttcgtgtcgcgccctcgatgtgctcgacgaaagttggttcgatgaacgggttggctaatcgcgatgtgtggaggagacaaatttctaggatctgagggtaagagaagccaagacctagagcgatgatcactaggtgttcggtgaaaaggatgaaccggtgatcgtggttggtcttgcaaaatccgagttctattttatgttggtaaggtgttgtgcggtgtgatctccaattccatgttgctgatgtcttgctccatcatgaccttagggaaggatgttttcctctaaattatcgtaataattatgctgggtttatgtgttgttttagcatacattgtgaaagcatttcttgctcagcaggacaaggaggggctttcatgaaataacttttgaccacttatgttccttttccaaatataaatcagttagaagtgggtcttggcaataattagctcatgactatttgttgttggccctttggctgcaatttctgaatagtttgatgtgaagggaccttgctgagctttgtgtacttgatatttgaatagtttggagaaaggattaaaatctaccctcactaattttttagatgccccttaaaactgattttgaggagttattttctagggagctcttggagatgctcttattcctattggtacggagtaatatgtatattgtgcaattaaaatggcctttatatggtattgaacatttcccacaataatctgtaatctttccatgaattgttttcctatatgtggtattattaattggcagtgctcctagacactgcacatccatttcctgtgaaattactaaaagattgccgggaagtggcaatgggactgttactgatgaaattttatgagaattattgatttcgaagtaacttctttctggacttttttgccagccaacattgttttccatagaaaatggtttttgaatattcatggcaaaattttatggtttacaaaattccttcatttcatctacagaaaatcgggcaggctctactacctttacctggcgatgctaaaagccaaccagcactagcaacagcgactcaatttgctgccacaaacatctgcaccagcagaggccgctaccgcagaagccaccacggaatcagatcctgcaacgtccactcctctttcaccttatacaaattacccagattgtggtgcccgacgaggtggggcgtcgtttgagagggccgatgaggcgtcggagaagaagcagtcgaacccgatgcgggagatgaaggtccagaagctcgtgctcaacatcttcgttggcgagagcggtgatcgcctcacccgcgccgccaaggtactggagcagctgagcggccagtcaccggtattctccaaggcaaggtacactgtgagatcgcatgctatgtgacggtgcggggtgagaaggcaatgcagctgctggagagtggcttgaaggtgaaggagaacgagctgctgaggaggaacttcagtgacactggttgctttggatttggtatccaagagcacattgatcttggcatcaagtaagatgatctcatgtcttatcgtaaataatttgaatgaggcctgtttgtttctgtgaacgggtgttttatgatgggcattgttgcttgcctgtaagcaggggaaaagatatgtaactttgtattcatgtagcctgtacccactatggtcactacgtactgggatagcttaaggctaagttcttaacacagtttataaccatgc

SEQ ID NO: 43537 - DNA, 5672 bp, Zea Mays
tttccctctctccaccgatcacacaaggatcggcgagctcttcttcttttcaaggatcactcttgatcccacaaggaccaccacactctttggtgtctcttgctagcttttacaagcctccaacactttggaggaagttcaatgggagtcaaaactccacgcacaaatgaacacaaagatgtagtacacactatctctcaatgaatctcacaaggcactagtgctaaactcaaatgagtagctctcttttgcttactctctcttttgtggcacttgtgttggttgtagtgatctaaatcttgtgtataggatggatcaatgaatatatttggttgggagggcttgagtatgtcaactagatgacttggaatgttgcttgggctccccctctttgaagtggccggttggggtggtatttatagccaccaaccaaaatctagccgatggtgaagtgtgctggcgaggggcgcaccggacagtgtccggtgcgccgccacgtcatcctgccgttaggtcttggagctggtcgaccgttggaggctctgtcctcatgtggcaccagacagtccggtgtcgcaccggacagtccggtgcccctctgaccgctgctctgacttctgcgcagtactgttcactttgcagagtcgaccgttgcgcgcagatagccgttgctccgctggtgcaccagacagtccggtgaattatagcggagatgcgcctgagaaacccgaaggtgaagagttcgagcagaagcaccctggtgcaccggatactgcccggtggcacaccggactgtccggtgcgctaagccagggcaaccttcggttccctttttgctccttccttttgagacctaacttgttcttttgattggtttgtgttgaacctttggcacctgtagaatgtataatcttgaacaaattagttagtccaattatttgtgttgggcaattcaaccaccaaaatcaattaggaaaaggtttgaccctatttccctttcaatctccccctttttggtgattgatgccaacacaaaccaaagcaaatatataagtgcataattgaactagtttgcataatatatgtgcaaagattgcttggaattaaaccaatttatcattttataagatttgcatgaatgcattctttatatttaatgttttagaccatgcttgcaccaattgttttgtttttgcaaactcttttggaaattcttttcaaagtgttttgcaaaatagtcaaaggtaagtgaataagatttttgcgaagcattttcaaaatttgaaattttctccccctgtttcaaatgcttttcctttgactacacaaaactccccctaaatgaaattctcctcttagtgttcaagagggttttgatatatcaatttttgaaatactactttactcccccttttgaacacaataagatactaatttgaaatttatcatttgagaatactaccaattgaaaaactctctttaaaattaggtggtggtgcggtccttttgctttgggcctaatactttctccccctttggcatgaatcgccaaaaacggatactttgcgtgaaatataagcccttttactttctctccccctttggcaaataatatatgagtgaagattgtaccaaatttgaagagacggcggaataccggcagagagtggataataccaatggagttgagtggaagcgatgtctttgccgaatacgccatttccctttcaatctaagacttaatacatgagatgctcatgaaaacatattagtcttagccttggcataaatagagagaagaaatatgaaaatgtaccaagggaaagagacatgattaaaaaggatatgtcaattaagcttaaacaattctatacaatatagattgctccccctaaatatgtgcatagagagaaaaacaaatttttggtctaaaatgccaagtgcacataattaggttaatgagatcatatctatatcataaagagtgtacagtgcattgtgccaaggtataggtgtgatgctcatgacagtttatgcacatacgaaagcatgctgtgaatatctcaagtattttcccttaaggatttcaaagaggcttaaggaccatccacctttggaacaaaggcagcttatcctcgttacaaagttaagctttaagctctttgacaataaaatcacttcatccagtttaaacaaagatgcaagaatgaatgtttgagaagttaaactaggtatgaagcagggttaatgcatgaacatgctttctcttccttttaaacatgatatgcaagtaatgtaggaagatttaggtacatgtataaataagattaaatagatttacccttttgtaccttgacatagtgatgctcttcttcattgtgctttgtccttagtcttattaaattcgcctaagacttatactcaagacaatgtatgaaaatattttgcacaagagagggttctacaactagtgatccttttctaaatcatgttattatatatcaagtagatcacaaattgcataaatatatcatgaattctccttttaacttagtgcctatcaagatagatatcgattgaaattaccaattgaaatcaatttgagattacatgaggcactaagaagcataagtgataattgaagttattcaatgatcaaacaacagatgcgatcaaaagaacatcataggcattatattttcaatcaagctcaaaaataggagaatccaataaatatgctactttaacattgaaagctacaatccttgataaagatgacattattttaccaagatggattgaaatgtagtagcatgccttatgagaaacttgttctcatataagagactatatgagattactaagataacgtgctagtctcaatataatcaagatatagaaatagactccccctaaagatatgcattaagaatgaaagaaatgggtggatgcactctttttcaaaggcaaaatatggagaagcactatttatcttgatcaaggcttaaaagatttgcaataaacaatttttgcctagttttctcataatgaaaagatttagaatgattacaaccacaccgttgaatgttttgaagatctcattatccaagtaggtgttgttgctcttgatgtcttcctttttcatttgagtgtcctcccttagggctgggcattttaaacccgtgaaccgaacccgaaccgaaccctaacccgaatagaccgatttggtcggtttttcgggtttcggttttcgggttcggtccaaagatcgtttctattcggttatcgggtaagggttcgggttttatagcgtgtaacccgaatagactaaaaaaaccgaaatatacctacgtaggctacacacagcaatcagcccaataaaaaatagctgacggcccagtccgcccaggcttcctgagacttgagtccacagccgccactccgaccggcgaccaggcaaccctagagctagacgctccccgtccggccgccgcctagagctactcgctcgtcgctcctgcgtccggctcgtcgctcctgcgtccggcgtccactgctccccatccggtgttccactccatttctccactgctccccgtccggactccagagttctgctcctgcgtctagcttcggttctccactgctccccggtcggccggtgttctgctcctgcgtccgctgcagctccggcgtccactgctccccgtccaggctccccgtccgattctccactgctcaccgtccaggctcccagtccgctgcagctccggcgtgccactccctcgctgcaagctccggccacattttttaagttaatttgtgcagtattgtgtgaatttgtttctaagttaatttgttatgaactttgtatggacctatgtgcagtattgtatggtattaatttgtgtgaatttgctgagtatttgtacctgattgtgttattcgggttctgtaggaaccgaatagaccgaaccgaatttttcggtctatttgggttcggttcctgtaattttgggttcgggttcggttcctattttatataacccgatttttgtagaaccctaataaaccgaaccgaattacccatattacccgaatgcccagccctatcctccctttatagtcgaccctttttcctttcaaacttattgaaaatacttaagagagatgttaatagcaccagggagtaaatgatgaatgatggtttctttagatagaaaataagaacaattcatcatccatatacataaacatgaagtaaacttcttaacattagtgcacatcaaaagaaatatgcactctctaaacattttgatcaatcacaggaaatttacttcttcatattgaatttattaatcattacttggaagcaaatcaatatgagaacaaatatagcaaaggtatgaaatatattctaatggataagtgcattaatgagaatgagattgaatgcacattttagccaattaagttcaataaagaatctatttcttcacaaagatataattagagtgaacaatcattgatgggaactaaattaaagagatgagttctcatacctttgctttgaccttttcttccttttgggtgaagagtaccctttgaggcttgtggctttaaccttgcacttactctcttgtagattttcataagtaggctcaagagaaatgttaatagcaacacaagcactagtttccctttttgtaatcatttttgataaggaatgaaaagtgaattactaaagcatggaaactttataatatgaactagattatccctttaagtatgcttagttttaacttatggaacaagcatagttagttcttttaagattatggggaaaaaatctaattcataacatgaagagcgataaatgtagaagaatcatatctgtggcagaacctcccaagttattgggcccacatgcacctgtccttgtctcaaagacctcagacgactatgcatgtgcaccaaataacttaacaggatccgtccgattgacccaaggacatcggataaaccacttacaaccagaaccgcgggattaagtaacacaaatcacacacacaacatttttgcagcggaaatcttattaccaaattttacaggttacaaaaattttacattattttatcggagtgattacaaaagtataagtttgaaatatatgctagctcaagtgatcatcctcaataagaagataaagacggggtatacttatataagaaggccgagcccaccggcacttaacaccatcacaacagcacaaggttagaacctgaaaaacaacagggaataaaaccctgagtatggaattactcagcaagtcttacccgactaaggaaaagactctcaagggtatgctggataaataggaatcaaggagaggctttagcaagaatcaacttagatacttttgcagaaatagcttactaaagtgagtccttactttcaatcttttaacgccatattaagtattaatagactctatttgtatctagtctaatttcaacatctcatcaatacaacatcatttttatctatagtgttcacatcctgactttaggttgtagaaaagtgaccaagtcttcataaccgcgaaggtacgtcgatctgaatcgattatactcagctgaggatctccaatcacacgacatatgtagcactta

SEQ ID NO: 43538 - DNA, 2270 bp, Zea Mays
gaattatcatatgaaacaaaaccttggggtaaggaacaatatcacaacaattttggctgctacagttttgtttctcggtccgggtcaagctgccccgtgccaacctttcggaaaagatggcccggagactggatgacagaatggttctatgtgaagagtgatctgacaatacgagaagatatcaaaggtataattatgcgccctatttggcaaagcttcggccttcgaaggccgaaggttgaaatgaatgaagttgccgaagaatgccagagggccttcggcgcagtctgttctttcattgggacaagagacttagtacaagagcatattgccttcagggtatggccgctcgcggagaattgggaaatgccacaagaaaccgtaaaagaggccgacgaaggtggacttatcaggttgaagtacacttttaaatttggagataaattcgttgagcaagatgatgactggttaaaaagtattgaaaatttaagcgatgaactgcttggggcttattcgaaggccgaagacactgcaatgtcagcagccttcggaggtcgaaaaaagaaaaggcttaatcgggtatttgatgcaatcgggtttgtctaccctgactattgctatcccattcgaaggcaaaagagaaaaagcacaacctctgcaaaggaagaagctgcaattgctcctagcgagccagaaccgaaaagaaagaaggtaaaggtcctcacacatcggccgcgctatattgaaccagcttcggtgcctgagtttaccggaggaactccttcggccgccgaagctgaaaaaccagccgaaccaaccttgctgccagaagtcgcagaaacggccgaagtgccaacaaagatagaattggaacaatcggagattttgttatcagaaatgaaagagaaggccgaagcgccgtccacagaaaaaatggaagaggtaaaagaagcaactgagggatccaaaacatcagaagttttgagtcccgcagcaaacattgatgcagtaaaaaatcaaaaagtgccagcagtgactccaaaaagaaagagaatggctaatgtgctagatgtactggaaacgatcaaatcttcaagcacacctccgaagaaggctgctgtcattcctgaaacaacaactgaaatttctggttctagagctccagggcaagagactgaagccgaagctgggccctcagagcctgcaaagataaaatccttggaaagtgaggcggaaaaaataacaaagccaacttttgttgaagaaaccggtgtcattgcccccgaagcatccccgaatgttcgtgattatattcttcgtcatgcttcggggaaaaaattatcagaaaaagaagagcaagaggcccagcactacgcccaaaaactgaaatatccaaagggggcgttaatattcaatggcagtggggaagaagacttcttgtattgtctccccgatagcaaggaaatttctgtctgtcgggagatgagcaggagcttcggattcccaactttagaagacggactttcggtgctgtcaaagaacgatctggccgacagcctagcttacaatagcttaaaggtgcgacaaatgaaatccttgtattttttgttgagttcaaaatttttcgtttgtttaaacttattgacacagacatatttctctttgcagggcctgatactcagcaatgccctcagggcacagaaagatgctgaagacgaagggtgttctatagccctgagcaaccttcgttccgaagttattgaactgaggaacgaaggtctagaaaaagataaaatgttgtactcattgatacataaaataaaggaggacgaagctgcttttaaaggccaagctgaagctcaaaagtgagaaattgaagaccttcggaaacaactggccagagccaaggaagaacgcatacttgaagaaacaaagcgagaactcagcgaccaatgggccgatcacctagaaataactgttgaagagcttcgttcgtccaaaaagagatgctataacaaatctatagagtgtgttaaaaagttaaaaggtagcttcgccagggttggcgccttttcaagcgaagaaaactttacgagaggcaatcccgaaggtcccatcgaatggatcgaccacgaagctgaggccttcgaagaaattttaaatagccgaggagatatatgtgccttctctggtgccagagggattgccaccatcttagagaagaaaggctgcgaacatgtaaaaattttagcacagtccgaagctgcttt

SEQ ID NO: 43539 - DNA, 1894 bp, Zea Mays
cgccgtttttctcaaacctggccatcctcatctaccttgcagcgccggcgccctatcttccgctccttccgttccttgcgctcggcgcgcaggtggcggccccatctttcgcttcctcccttcctccgccaccactcaccccttgatccgttctgcctcctaaatttggcgtcaccaagcaaccccactcatgccgttctcaaaaccctacccgaccaatccgtccaattccaaggctgtcggctttgcgttatgagcgccgggtcaggggaggggcggaggatcagatcagcagccgcacgagcattgagcgatatggcttctatgtaggatgcaactggacatcgccgtccactcgtctagctattgatgctgaagtcccgatgcttcatgccaccgcgatggtggctggttgatctccgatatcaagaggagggaagaggcactgaagaatggtgcagatccacatttgtttttgcataattgctgccttagctccaccaattgtatttcatgggaaatcattaacgtaagtttgccactccttttatctaaagtaatcaaagtcattagttattatgggcttgggtaatgtgagtaagcaccattgcatagatagccagtgatgttggctgctggaaaaggagaaatcaatgaattatagattgggatcacagaacttcatagaggaaactaggttgattgttcaatatctttttaagaacacttagtatcctggataatatgtgaaacaaacaatatgtgaaacaaataagtatttaaccagccgcatagaagcatgtttgctttgtgaccctagaaaccagccaggcacaagcagcacctcgaccccctcctcgaccagatgactactgtctcgaggcgtacagtggccactcacctagcgggtgtgtctagctcgtcatcggtctccaatgccacgttcgcgctactactccaatcattgctgacccgtatgatctccactgacttccacaaggagtgcaggcaccttcggtcccatccgctgttaaggcttacctcgcttatggtgttccacagagtgacatgaaactattttcacttatgcaaaaggtttgataaaggaactattgtacttagattttgtcctacgtttagcatgtcagcaatttacattagatttgttcctacgtttacacctttttagccctcagatgcatgcataaatcttgattggtagatatattgacaagacatcattttccatatgctctaaatgttttagtagtttatgctgatgattttgctttctttccagttatgatatttcaatagacctttttatatgtgctaactacacaaaagataagctggtatctaccagctcaagacattgtttgctagtagacttcatattagttgatgattgtctcggtacaactcaagacatttttcataacaccattgttggtctatgagaaaataaagacaaccctttaggttgctgcaattttcatcgacctaggcacatgtgattattacacttgttgtggttttattataatatattgttctaagtctgattatgctttttagatgtacatatcatcgcactatatatgcaccccttttgcaactgttataactagccatggcaccatttatgcatccaactgttataccattggaaatccgcgcaactgcactatatccattggaattctgtgcttttgtcagtaattggtttgatggatttgaatttatgatccccaagtataatggcagatgcttaaatagttattggaaaatgggaaatctttctgctagacatgtatagggatgttttttgcgctcacaaccagttgattggaagcacattaagtcattagctctgctagtttatggaatatgg

SEQ ID NO: 43540 - DNA, 411 bp, Zea Mays
ggcttgtgcagacacacgttggcgcttggcctcaagtatctccttttgcttctggagattgcggttcttgatgcgcagggcgcgcagctgtagctgttctttcgctaagacaccgatgattttgccgtcctcggtgaagtccgtgccctctggtggagcgaagcctaggggaggttgcggctgcccttcagggccgcaggtgcggagagcgtcgtcttcgcaggtgcagagaacgtcgtcgtcagtagcctcttggtgggtggagtgggtgagggcgagggccttgcccttttttgcggccagcagtgctgccttcgcagcctcggcagccttcgagctagctttattgggtgccatcgcgggtggttgttccaaatgatttgagaaaaggtgtgagttttcaaaagaaaa

SEQ ID NO: 43541 - DNA, 858 bp, Zea Mays
gtccgattgtgcgctgtcgcagcctctgccctctcccagcccgctcctccatctccggtgagacgcgaattgaatcgcatcgaatccatgggcagctcctcgaataccaacacgagcggcggggccagcgacaaggaggagaagaagaaggaggacaagatcaaaggcaaggactcgtcggggccatccttcaaggagaacgaaagggtcctcgcctaccacggccccctcctctacgaggccaaggttcaaaggatcgaaaaccatgaagatgaatggcgctactttgtccattatctcggttggaataagaactgggatgaatgggttgcaaatgaccgcttgttggaattgacggaggaaaacgtgcgcaaacaacaagagcttgataagaatcaggtagttgacaaaacaatgaagtctggacggtcaacacagcataaaccaaaagtctccaatgcggatgcaaaagctgataaagatgacactaagagtctcatttcagtgaaggggaagaaacgtaaaagtcagcttgggactgagtttcctttgccactgaagaagcaacttgtggatgattgggagtttgttacgcagatggcttgtgaagctaccacgatcacctactgttgatgatattctaaagaagtacttggaacaccgggcaaagaaggatggcaagataaatgactcctatgctgagattctgaaaggattacgctgctactttgataaagcattgcctgcaatgcttttatataagaaagagcgagatcagtatgctgaagaagttaaaggtgatgtctcaccatcaactgtatatggagctgagcatctattgcgcctttttgtttgcag

SEQ ID NO: 43542 - DNA, 2376 bp, Zea Mays
atcgaacatcggagagatgcgcgcgggcggcggcgcgcctccccgacacgcaccactctccccgaccgcctccgccactgccacgctagtacccgcttctgtcgccatgcccacgccgcgcctcgtacacctccgccacctcctctcattccgctccgcccttccccgcccgctgggtcccaaccaaagccacccgctccccgggtcggttcacccgtcccttctcctcccccgtgccatggctggtgtcgcatacgcaggtctggcgacggggtcggcggaatacgaggaggtgctcgggtgcctcgcgtcgctgataacgcagaaggtgcgcgcggacaccggcaaccgcggcaaccagtgggagctcatgtccaagtacgtccagatactggaactggaggaatccatcgcgcagttgaaagtggttcacgttgctgggaccaaagggaagggttcaacatgcacatttgctgagtcaatccttcgatcatgtggtttccacactgggctcttcacttcaccacatttgatggatgtccgcgagcgatttcggcttgatgggctggacatttcagaagaaaagtttattaggtatttctggtggtgctggaagacactgaaggacaagactggtgatggtgtaccgatgccggcctactttaggttccttgcactgctagcattcaagatcttttcagatgagcaggtcagagcacctgtagtttgtggaataacatcccttgggtatgatcatatggaaattcttggaaacacacttggagaaattactagagagaaggctgggatactgaagaaaggagttccagcgtatacagttccacagccagaagaggcaatgtctgtactgatgaagcgagctactgaattgggtgtttctcttcaagttgtccaccctttggacccacagaaattagaggatcaacctcttggactccatggtgagcaccaatacatgaatgcaggtcttgcaattgcattggctaatacctggcttgagaggcaaggccatttgaacagattacatgtcaaacattctggtaccttgccagatcagttcatcaaagggctgtcgagtgcttgtctgcaaggtcgaggacagattattccaaattcacaagtgaactcagaaaatgatcgtgattcttcattggttttctatttggatggggcacatagctcagaaagcatggaaatgtgtgcaagatggtttgcccacgctacaaatagtgatggaatacagccaggtccttcggagcagcctcacactgatagggattccaggaagtttctccttttcaattgcatgactgtaagagatcctcagagattgctcccacgtcttctagatacatgtgctcaaaatggtctccactttgagcatgccttatttgtgccaaaccaatcacagtacaacaagcttggatcccttgcatccccaccttcagagcgtgaacaaattgatttgtcatggcagttgtcgcttcaaaaggtgtggggaaacctgcctcatcacaataaaggtctaaatgatgtaaactctagcggagctacctcggtttttgaatctcttccattggcaattaaatggctaagggaaactgctcaacaaaatcaatcgattcagtttcaggtcttagttaccggctcgctgcaccttgtcggcgatgtcttaagattgctcaagaacaataagtaacttcatttggaatggcacattgttcagattgaactggctgcctacggaccactaaggcactaactggagcttatcgaaatttgtgattgggatagcacaacataccaacttggttacaaggctggaagaaattgaaagacatttttatttcagttccaatcagcggtaaaattgttgtatttaatcgtttctttaagttcctggcgttatgtgccatcacatcctcactccagaaggatgtaaccaatttttagaatgtacaattagtggattctcagcgacacatctttgtatgattggtggacgggtctgcgtagcctttgcaacagacaatcaagaagacgctttgacggcctgctaattcatttttggtggaatttatggctggaacgaaataacagaattttccaaagtcagcatagaagcgttaatcaagtggcccttgcagtcatcagatattgctagtagctgaggtcttgttgatctggtctagtgggtttttgttcttctccttttattttttcttttttaccctctcccctccggttctctggttttgtatcttccatttctttgctctctaatctaatatatttcggagtggcaagtcttttgccccttcctttcaaaaaaaaaaaaacaattagtggattata

SEQ ID NO: 43543 - DNA, 3799 bp, Zea Mays
cagggaaggaaaggaagagaggaagaaaacggacgctccgagggcaagtggtgccggatttttgtcagtctcctccccacctagtctcttgtatccaatacaacctttgccttcattgccgcagttccgtttcacatcccatcctctccatttccaccccctcccatggcctgatttccgagcccccccgccattcgccccgcccccgaatccgccgtctcatcgaacgcccggtgccgtggggagaagcgaggctccggttctttgtttcttggcggccgaaatataagggaatatgattgacgatgaggaaagccaagggattaagaaggtgcatttcagggattcgttctcccagcaccctatagttacctacaagaggcgtcggcagcagaagccacagacgcagcagcaattacggcaaccaccgccatccctacagcagcatccggagccacagctacaggtgaagctggagccaaagactgaagatgtgccggaacagcagtttccgatattgagagcaagggatattggctgggagcatgctgtggatcttgatggaaataaaagacggtggcaatgcaagttctgttctctatgtcgaagtggtggtgtaactactttgaaggctcatctcattgatgacagctgcccaaacgttccaaaggaaatttcaaagaaagtatcaaacttcattgaagagaaaagagcaacacgccttcttttgaataattatgtctttaatgttgatgaggacttcaacacaatacttcaagaagggactgtagaatatgtaaatgaacaacaaccttcaagaaaggctacatatgtgcaaacattatctaagtgtgctattaatgagatgttgaaaccatgccggaaaagtgagtttaacacaaggaagcacataattattgttgataaaattgggaggcattggaagtgtagatactgtggcatggatgtgtatggtaaaaagtttcagctccattatcatctagctggtgcatttcgtcaggctaagtgtccaaatgttcctagagaagtttttgcaaaagcaagacagcatgttctgacaaagaaaatgctaaaaaagagtaaagctgagcaacagattccttctagtccacatattcttgcccaatctggtgaagaacggcagaacaatgatccattttgtgggaatcagtctcaactgtcaataaacaatgaacctagggaggtacacaattaccctgcagtgctaagggacagtgcatgggaacattctctgatatatgagaaagaaaacggacactggaagtgcaagtggtgcagtattgagggtgatcatggtttaactagattgatgtggcatcttgttggatggcagaatcgacctcagtgcccaaatataccaaaggatgttgctgaaaagatgaaggatcaaatgatgtcaaagaaggagcagaaagcgagatcaggtttgtttgacggcaatggctgttgtgaggtgttgtgctcttctaatagttcacaacttgatcagaaccatctcactgcaagaatacatgacagatgttcttcccaggcttttgaccatgctaacagtgaattaaaaggatgcaacatgttatccaatactattctttcacaacagagttccaatcctcaggtgcatcatgaggatcctcaggtgtgtcatgagcaagagaggaaggaggttgccacctcttcagaacctggctgtgagcaaggtcagaggatgcagtggcagtcgcaaaataagccaatgatggaaggacctcatgacaatggattatgtggtgacacaaaccagttggaggaacaaaaaagtggctttggaattagtgactgctggaggtatgttttggatggacaaatgcacttgcctgatgtacaggagggtgctggaattgggacatgcatccgtgatgctcttctctatggttgtgctgaatttggcacagtacctgacaaaatggaaatggattgtgataaaacagtggatgcgaacactgctaagtgccagaatattcttaaggatgttttaagatcggagaactttgctttgttgtgcagtgtactctgcagaactgtacatcaagatggggaaagaactagatattttgattttggtgtgattgattcaaggatgaaaaatggaaattatgggcctgaacctgaattattcgtccatgatctgaaactgttatgggaagatcttaaagtggctggtcaagatattgttcacctagcaaataatctatcaagcctcacagaggactcctatgaaaagctggttggaagagagagaggatcagatgatgatgagctcaatgaagctgtggtggccaggtctgaaccgaaaaacctagttcaaccaaatgcatcggtacccttgacctcacaaggctttaaccaattattggatcaacccgggccttctgatccttctgttgtatacaaggacagtatctgcaaccgatgtgggaaagtagcaggagctggtagcgttctcaaatgttacaggtgcatgctaccttgccacatttcatgcattgaggctactggttcacccatttcaactggaaggtggtgttgtaaaaactgcagcgctggcactaaggaaccagttgaaggagacatggtcttagcccatggcaatccaaattgcttgcatgaaagttgtgtcgtctgcgacagacttgcggcctgcaggtctccaaaatgtgataactcaagagcattggttatttccagcgtggacccagagattgatacatgttactcatgcaagatatgtggaggcaccgaagaggatgagaagaggttcttgatatgcggcaacgtcctctgccgatacatgtactaccacattgggtgcctcaagtccatgcagatctctaccagtgtagagaggggcagcccgtgctggtactgcccgtcttgcctttgccgagtttgtctgtgtgacaaagacgacgacctgaccattctgtgcgatggttgcgacgaggcttaccatatctactgcataacacctcgccatacttcaatacccaaggggcagtggtattgctcatcgtgcagcgtggagagggcagaagaggggatgagacagtacgagaggaggacgctgaagctccaccggaaggaggatgctggactacaaagttggaattttgatggtgtggacctgctgctatctgccgcggagcagctcaggatagatgagcagctggagactcgtacagattagcgtgttgcacctacactctggtccttttgccgtgctaaagtgagtttgttgtttgaagagcagaggcctgcctcaggatcagagctcgggcaagggcagttaacaaaatttgctgcagtcctctcacgaactgatgaaaatacaaggatcttcaaacagcattcgccttttgagatgcgtgctatatgataacatgctgtaggatatttgtttcgtttatctgtctttttgctttgttgcacttgcacctgcttgagaagatacttaactcgatacaccttactggtatccaaactgcaagggatgttcttaaattcaaggaaaatctccaatttgagagagcaagccgtctttgaaaactgcctcaggtttttgttgaggctgttattatgctttgtggcctgaattattttagacatacaaacttattgcttcacgaccttcttctcaagtcggtctagatacttcttggggcaacgtcgaatgctatgtccttcatccttgcagtagtagtaaacactatttgctttgagg

SEQ ID NO: 43544 - DNA, 1405 bp, Zea Mays
acccgcacctgcactgcagcacacgcgccgccgaagcgctctgcccacctcgctcccctccagtggccgccggcgcggctcagcggtccatcctcctgacgccacctgcaacggcgccaggcggtgatccattccaactcgcgctccgtcctggtatccaaacatgtggtctttgggaaggtggtcagtggaatagctttgcttaaaaagcttgaagcagttggtagtgaaactggaaatccttcttatcaagtgaaaattgtagactgtggtgaagtttccaacacaaattctccggatctgctaaagggagagaaagatagtggctctgattcagaatcagattcatcaatggatactagctcatccagtgatcataggcgtaagagaagaaaaggatctaagaaggataagcgcaagcccacaaagagaaagggtaaacatacaaggagtaagagaaagagtagaggatccaaaaggcgatctagacggagccatgggagttcaagtgatgattcagtaagctcaaagacagataacagcagttctgacagtgaaaagggtggccatcataccaagcgttccttgccgaaaggtatgaaagaaatggtccttacagtagacgctcgccagtaaggagataccatggctcgccaagagccaatagcccatccaggtacccaagaagagaacgaatgaggagtaggtcacgcagcccagtgaggcgccatgaccgtggagggtatcaccgccccagcccaagacgtagccgcagccctgcagaaccgagacagaatgtgaatgataggcctcgatcaggtcatggcggaggcgatcctgaccacagccctcctgccaacaggtccagatcgaagagccgggaccccttgggacccagatctcctgatgctgccccagccaagagggagagctccagatacaaccgcaggcgcagcagcagctcaaggtccagcagccctgatggaaacaaaggcctggtttcgtactgagaagtaacggcacaacagtttgcaggctccatggaccatgtttcttgctagtttagcatcatgtactcttttgtaatggattctgaacttgaactgctttcgatgcaggtgtagatttatatgttctgttagatttgaatgtttcttatgccagatatttatagaactactgagtagagcaggggaaaggctcgagcctcgtgaactggcttgagcttgctaaggcttggagaggctcgcgagtttgtaagcctgaatcgagactacttttatgactcgctcaaacgccgagccctgagcgaacttgagtcgactcgggagtctgcctaataatattgtgctacgttgttatattattatgtttttaatttattttcttattttttatggattca

SEQ ID NO: 43545 - DNA, 704 bp, Zea Mays
gtttggttttgaaaaacagttttgaaaaactataatgctagcgacatcctctattaagcactaagttaaggactatcaggtggcttagttcaaaaccactaacccacaaccgggggtattgcatacatgtgtattgttatttttgaggctattcagttttgaatggatcgacgctcaggtaaggtgagttgtgagagcatgaccgaacaaccgtcggtctaggggagtgtttaaaagtggcatccgattatatacatgttctacatatgtatatatgaaggctgcgatgtggagtaattacttttctgggaattcagtaccccatggatgtgtatgggtatacagacatgggaatactaagaagtgtaatgtacttgcaacgacgcatctacgctcaggtaagaaggtgagttaccataatgagttgccctatggttaaagtgtggcaacggcgcctatgcgtggctcgacgcttaatgatgagctggcctccatatagcaatatatggagtataaactgtgataaactgtcatgtgtgaactgcatcattgggaaattgggctgtgatggattttctgcaggtacactaacctcgaaaacgtatgtgtagctgacgactagaaaaataccgtgagagtcgtaagtatgccaccgagatagaacgctattgccacatgtgttggcaaaatttgtgaggacgtat

SEQ ID NO: 43546 - DNA, 1221 bp, Zea Mays
cggccctccccgccatggacgccgctcttccttcctacagatgttgacaattggaaatccatgtagcaaataaatgattttggaactgggggcagacattggaggtggatttccctcaattggagatattgacaaattggaaaaaaaatgtgacttgacctgtgctgcaacaaccttaaactaggaggggattctaattcttcatctctaccaacaatcctctcctgttactttttaaaccaataactttttcatgtttttgtgcagatgcacacatccttgagccaaaatagaaaaaaatcatagaagagttctttggctgtcacgtgattcaagagtattaatgatatacaaaagtttgctttatggcaagttaggtaaccacaaattttgggcaatgacagggacgtgcagtggtggtctcttaaaagaattttgtgtccagtgtagctatttccactgcaaactatcaaatcattacaaactgctgggaacatgctccatcttatcgaagcatgtatcttgagaaagttgatcgatacatctgcttatttatggcctggttatgttgtaccatctgggactttaaaagatacagctttgccccaagaatccccttggttaaactttatgaaagtgtctcgactttcaggaccccttattgatgctctggtcgcatctcctgcttcaaggtgtttcaagctctgcaaggtgaggtctgttcagtttggccagaaaggcatctcctacctgaacacctacgacggccgcacaatccgctaccccgacctgctcatcaaggccaacgacaccatcaagatcgatctagagaccaacaagatcatggacttcttcaagtttgacgtcagcaacgtgttcatggtaaccggcgggaggaacaccaggcgtgtaggagtgatcaagaactgggagaagcacaaggccagcttcgaggtcatcgacgtgctgcttggagctttttgcatgctatgtctagttttctcctatttgttgtacaagaaaacataaaatggaattcaaatttggtggtcgcaaaagtgtggagacttgaattcatataaagttaggcttaacattagtgcaaaaagttgtattttagtttagatttagagtacacttatgtatgccttgtttgacaatacttatttatgatatattgaatggtacctattgtaattgtctattattgtaggatattcg

SEQ ID NO: 43547 - DNA, 1280 bp, Zea Mays
ggttgctgagactgagagcacgggaccgtgaaggcgtgaaccgagcccacccaccaaccaaattccgcgagaccgcgactgcttctccatccttccacgaactagacgagggaagagcgctgaagctgtggaggaaaacgaaggatctccccgtgcttgtgtatgccaggtcgcctgctctccgtccgcatcccgtccctcgcgaaactcggcgctcccagcaggtgtgcaaaatccatggcttcagacactggcaagaagctcatccagatcgatgtgagctcggacacagtatgcccttggtgctttgtcggcaaaaagaacctcgagaaagcgatggagcaaagcagggacaagtttgacttcgaggtccgctggcatccgttctttctaaaccctgatgcgcctaaggagggcgtcaggaaatctgacttctacaaggcgaagtttggtcctgttcagtatgagcgtgtcatttctcgcatggccgagatatttcgaggactcgggcttgagtatgacatgtcggggctgacaggggatacgatggatagtcataggctcatagcacttgctggacaccaaggctatgacaagcaaaatgctcttgttggagaattattccttaattacttttgtgaaggaaagtatattggtgacaagcaggttttgctggacgctgcaagaaaggtgggcatagaaggggccgaagaactgtttcaagaccctaccaaaggagtcgatgaggaagaactcaagaagtattcatctggcatctccggggtaccacattttgtgatcaatgataaatatcaactcagtggtggccagcctccaaatgtattcatgagggcgtttgagatggctgcaaaagatggagcttaatggcatttaaaaggagctcctccagtagtcttcgcatatgttaaaaaggaataggagccgaatttaacaataaagttccagcacagctcatcgctgatttgcgaaaaatatgtggaatcagttgtatttccgtagttctgatatggtgataattagtggtgaagatggtgtggatgttcactttcgaataaaattctaggcgatcggatatggcatatgggttagaatgccccatcatcagagcccggtctgtatttacatttggttcgataggatgtgtgcaagatatcagaaaacaacaaagttcagatttgatattcgaaaggaataaaaaaaaagctagcatacacagctgcatttagattgattgttaccatttacactgaatattccgc

SEQ ID NO: 43548 - DNA, 203 bp, Zea Mays
gaaaaaatgacgcggagacgtacgacggctacatggacagtgttgggtatggtcgagtccacgcagagctccaaatcaacggccactaggacgagctgggacaatctgacgatatcggctagctggagcgctgggaagctcggcagacgcagtcaaaaaaattggcgagcgtacgcggggcgagaggccgacgcaggagagca

SEQ ID NO: 43549 - DNA, 929 bp, Zea Mays
cttgctgtggcatgcttctttgatcctaggtataagagaagggtcatagagttttacatgaaaaagttttatggtgactattatcaagtgacccttgaagaatttatgagtgttttaaggaagttgtatagcttttatgcttctgaaacaccacgtccgacaaagactactgaacatatcatcccaacaaattcatcacaaaagaggaatgtaaatttggaacttgagagttacttgtatgatgacttgcctgatagagatgagtctaatgaattggataaatatatggctgagccacttatcaaacaagatccgtttgacattttagcatattggaagaaccaaacagataagtatccaattctttcccaaatagctcgtgacttaatatctgttcaagtgtcaacagtagcatctgagtcagcatttagtgctggtggccgagtcattgatccatatcgtaatagacttgaccctgaggtggtggaagctctaatatgcaccaaggattggataaatgcagtaagaaaagattctaaaagcgttctttcaattgtggctgaactaaaacccctagagacaaatcctttatcccctaatgctagccacttgatggatgatgaggaacatggctgagatagtgattcccaattcatgaatgaagatggcgagctgtgaagaaatcttgcaaatgtgtgtttgatgttatcgactcatgaagacattgaagaacttatattgtgtccatatgtgtgtgtccgtgtgtgactgagactattattctgttaactattattgtgtctggactgaatttatgtaagtttacttgttggatttggatttgtgctatgtgctcatgtactattgtggacttattttcttgttgttcaatggctatgtcggtggacttattttcctgttgttcaatt

SEQ ID NO: 43550 - DNA, 2474 bp, Zea Mays
cgccttaagaacagtgatagatgcatctctggctgttcattcattggaaccttcaagtgacgaccttagaagtactgaccatgttgaggagaacacagttggctcacaaatacagggtggtacaagcaaacatttaggtgatgctgcaatggaagttgaaactggaaacaggaacactgctttggctgattcacctcactttgacaaaccagctttgactgctccatccaggcaggcaacattgctggtttctcgagaaaccgagatgctgagcaatcttgtggaccaatgtgcacaacagagtttagtgtcagcacaacctttgcaggatgagtcggaacaagcagatttgtctagtgcagcatcaactcaacccttgcaatctgagaggcaacaattaatctctgtttccaataatctgcttgaaagagcacagcttgatcagagtcaaccaaattatcagacagatgcggcacctggttgtgcgcagtctacagaactctttccagtgacgtcaatgatgtttaatcacgcacctattgattctgaaccactgaaaaatgagttgcacaaattacgattacacatggacacactcaataaagtccatgaaatgaagaaaacccaacttcagaccgcatgtagccaagaactagagaaggtaaagagaaaatatgatttgttaattaaagaacatgattccactcatcttcagcaaaagaaggcacttggtgatttttatgagaaagttcagcgcaaccaatcgctggctgaggattttcgggccaaattcatatcactgtctgcagcacaaggtgcagcaaaaggccatacccctccagttcgtcacacacctcaggctacccaagtggtgtcctccacatcatcaattgccctgtcatcagcttgtcgaccaccagtgccgaggcctagggttcaagctccacaggtggaccaaccattattgtcattgtcgcagttctcccgtccgtctttgcaagtggtccaacctcccaacctggaactaggcaatcttttcagagcaacgtcaacgactcttagtcatatgccacctcaacgtgggagctatggagttcagagtgaattggctcctcgctcacctgctcctcatcttcagttcagatcgccacgggcacattccatggcacctggaaatcagcagcaatcgccagcaattagtgtggatgcaatgtcctcaaggacacaaccagtgctggcggcaagcacatccccatcagatatacatgtgggacccctagcagcctcagccttgtcaagtttacactctgttctcccttcaacctcattaccctcaagcttgcatcctagtcacctggcacaacgtgtgccaccaactcctaacccaactttacaagccggggcaccgaaaggctcgaatgcaacaatgccttccatccctacaggcatgcagctgccagattctggttccctatcgctggatgcatggcttacagctaatcttgggttgaatgatgcgtctacagctcctgctaaggatacagccagtcttgggttgagcagtgatgcccctagggcagctcctgatacaaatacggccagtcttgggttgagcagtgatgtgcctaggggtacggctcctgctacaaatacagccagtcttgggttgagcagtgatgtgcctaggggaacgactcctgctacaactacaaccagtcttgggttgatcagtgattcacctagggtgattgctcctgccagcagtaattcgcctggggcgattgcttctgctacaaatggtggttccgagatagatgtggtatgcctgtcagatgatgaatgatgctagcacgtgtacaaggctgacagttatagatgactgcttgaaaggactaggcattattttacggctcccttgagtccgttctgacaaggtgggaatgttgtttgtgctgtgaatggctggtaacagcaatgacagttttattaagttcattgtaaatgtgtattatgacaaatgcctgccaacgtttgctgtaaatcgctaacctctggggaatgtggatattaacctctgagatggagttgggtttcaagcgctatgaggtttctgtacatgtttgtcattgattagttccctgaggtgttcgttgtaggccggagtgctagctccgtgtatcgttttggttctacgtatgtttcttttttttagtttgacttaaaaaaacagtagcaacaaaaaacagtagcaacatctccatgatagttattatgtataataaatgctgaaattttcttgtatatatttgattgaaacggcgggagtatgtaacagagcaatttagaccaaggcggtcacttcaacgttgtattgtatttctcttcttggtgaaatacggcagcactgtcctatgttaagttttatatctatatagctagctatctatgtatctgtatttatacctgttctatat

SEQ ID NO: 43551 - DNA, 834 bp, Zea Mays
ctgcaactttcctatgcggccttcactcgataatgtgatcatcttctgatgaccatcacctgctgcgtgttctccaaatttctcagttcatgccaatgcaatgcagcaggcagtggcgctgagaggctccgggatctaccaccgccccgggatctaccaccgccctgagcagtcatcacattcttgtcaagatctggcttggcctttctctttgcttctgcaattacgccatccttgggaacaacagacaaaagcgttgggtttattaccttcgagcaatcatggaggacttgaaaggtaacataagctaagaatggttggacttgagacattcaagaaatgcaaggaggaacaacatactgcgtagaaaaattagtccagaattcctttctcaagtcgtctggatgcaacactaagaaacaagtgcaagctgccactaagtgcaaaagccattctggagctcacagccataaaaatgaataaccagtatgtatggcagcagccttgatgagcaactcaaaaggcgagatgattggtggaggcaacaagtatcgtcagtataattcaacgagattgaagcacacagcattatccacagcaccgccattgtttgtttgaatgaaatagctagcaaaatcgtatagaccaacatcacaaatgtgaacgacggggatcaatttttccttctctactattcattacaatagatgagctctttcttatctccaagaacatttttttgtaacacaatggcaggagctctggagcccagcatccgcgactttgtggggtagctcggtgccgccgccgctggggagcctactgctcccgagt

SEQ ID NO: 43552 - DNA, 2639 bp, Zea Mays
atgtttatctcttgcgcgctcctcttcttcctccctggcgctcggtcgcttctctctggtctccacgcgcaccgcgtccagctccctcctccagctgtgtctgctgctcgccccagcctggagcttcgctcggcttccaactccggcgcccggccgagctccctggtaccgcgcccctacttctccttcttccctgccgcgtgctgagcgctctgctccctagcgcggccctgctttcccaagccaagtccctctttctctctctggtctatgtgccgcgcgtcctggccaagctcccagctcagcgcccagcttctctgcttcctgacgcgcgcgcccagctgagtctgaccccgtcgtgagctcgcccctggcgctcagcttcccgtccagccgcgtgctcctccctgtgccccagctcggcaacagctataagctccctggaaccagcgtctcgtcgagccccgccgcacgtcctgtttccttctcacccatggaagctacgcccagccttaatccccgtcgcgccgtgctcctccctctgtccctgctgcgcgcgtcgagctctggtgattttcctccgcgccctgttccttgcttgcccctgtgccgtcactcagctcgccatggaggttgtccgccatggtactctgcatcccgagctccctgcgccggatccctttccatgcgtgtcgcgcaagctcctctgttgggctcgccagcctccgttgtcctatccacgccagcacgcgactgtggtcgtgttcatcgagttcgccaacactctgttgccgattcgactatcgtcgctgttgcgtgcctcactgcgtgctcgccggggtgtcgtctattgtattcttacactcgccttgccgcttgtgccaacttcggccatcgcgacgtctgctccatcccggcaccctgctcttgtgcttgcactacaagaaactgataaatgttcgtgggtaaaattaagaacgtgggtacttgagttaagttcataggttaagttaagaacgtgggtacccacgttcttaagttaagttcgtaggccctggataaaaccgtcgaacttaacgagttaggaacgtgggtacccacgtttttaagttaagttcgtcgggcttgtggacaccgtcgaactttagaagttgtttggtcgactgtttttcgcccgtgatccatttgcaccgtgatttggtcccgttgttctgcgtttggttgggccgacccgtttccaatagcgtcatgaccggatacggacccgtagcgtctgattaccgctccctgcactgcgtgaatcgatcccgctccccacgccgcctcgtgtgaccggaggacgagagccctagctgcaagacgaccgccgccctgcaaggaccttcgacgacgtgctcatcgccggtgaggaccacctcttcctctctcctctcccctctctcacaccttctccatctccctgttgttcaataccaccaccgatggggtcgctgggtcgccgggacgccggatctcggagtggagggcgccagcaggacgaatgccagggagggggcctccgtcacgacgagctttgacaggctccacaacccgccgacggccagaatctcgctccgccaccgcggctacagggccttcgtgtccgtcccgggggtagcagccaagggtgatgtacaagttggaacttcacttgtactggccactgcacatggtgtatcacaatacaacagatcccttctatagaatcacctgatataagcgtccaaaccaatcacccttctctagaatcgtcttgcttagtccaagagaatacaacagatccattacagaaattcactgctactactcaagattatttgctccagatctattactcaagattatttgccagatcatcttttgcagctcccaatctcaggtcttaatgtatttttggattactgtgaagttgcaagagtacaatctcaagtcttattgtatcttttgcagctcccactctttatcactttatatggttggagcctggagaatatgcaccagggctatcccaaagaaacacttgtgcgtttccttaaggctagagagtggaatgtagcaaaggctcataaaatgattgtagaatgtttgaattggaggattcaaaatgaaattgatagtgtgctcgagaggcctatagccccagtagatttatacaaatcaatacgtgattcacaacttattggcctgtcacgatacacaaaggagattcttctgtacaacttcgatggtggtacaatttgttcagtggttattttgaaagaatggcttggcatccatcgcgtcgctgctgctgaaatatctaaaggtctcccaatttttggcattggtgttgggcatagcacatatgacaaagcttcggctatagctacagccaaaatcataaaagtgcctggtttgaagctatcagcactaagccaaataaaggtggctgaattttcagatttggaacagcgtctaagtctgaatttccaaagtagtttcttggacagttaacatcgcggatcctttgcacgatgcatcattttaaataacacggtgctgcgaaatgaagtctgttttcactctcatgttcatgttcatgcacaaatatggaagccaca

SEQ ID NO: 43553 - DNA, 649 bp, Zea Mays
tgagattacaagaagtaggggcaggcatcatcttctcggccctaaaagagatcagctcaaatatgcactacaacttctgtttcctgcctccaacaacgttgcataatatgaagccttgatacacgagcttaatatcattgtgtcactcgggatcaaaacattgatggtatatggagattctctggttgtcattagctaagtcaacaaagattaggactgctccacggaattaatgagcaattactgtgccacaatcaggaaagttgaggacaaatttcaagggctagagttccaccatatatatagagagagaccgcaacatggcaactatcgctttatccaagctaggattgagctgagcatagactccaccgggtgtcttcgtccaaagaggtacaacaacccagtgtcacgtcagggccaggggaagaatgtaaagcaatagattaagcggaactagatccgaacgacttgaggtcaccaatcatcaaatacatcaaaaatgaagaagagccagatgatagagccatgatcgagcgtatcgcgatgcagtcggctcactactcagtcataggtgatgcactgcacaaaagaggggtcacatgtgttttcatgaagtgcattgactcaggggctagaaaacgcttac

SEQ ID NO: 43554 - DNA, 2391 bp, Zea Mays
ctaccgcaccaactcttttaacccccttcctctccagggaacgagaccagaatcccccgtcgacgcgcacgcgcagagctccgcatccgcaccggccgccggcggcgtggatggggaagctctccgccctgaagcgggaagcggtcggagtggactaggcgctcggtgacttcctagtttagaagcggtaggtggaggcgatgcggggcggggcgatgaaggccctgcggcgatccagcacctcctcggcgccatcgccaagggtgccgtcttccccgcggtcttattcgtggatccaccgccggtcgcttctcgttacctcgccggcctcgccggcgacgtcctctgtgtctgaatcggcgaatttgcccgcggagggttcggattcagcgccagcgtcagtggtggcagcttcctcgtcgccctcgctggctgcttcgtctccgaacatggaatggggtggaattaaatctccgtggtctcgaagaaaaaggaaacgggcgcttacttgtcaacactggaatcgtctattttcagcaaatgggaagcttcgtgatgggggaagaaagtttctaaagaaggttcgcagtggggggattgaaccgggcataagggctgaagtttggccatttctgcttggagtctatgatttgaacagctctgaagaggacaggaatactatcaagataaagaaaaggaaagaatatgaaaaattgaggcgacagtgccaccgcatcctgcattgtaatagagaaaatggtctgaatgttataaatgagttcatgaacgaggacttttctgatggggctgaaggttcagagtcaccatattcaaatggtgttagtaagagggtttgtgtgatgcccaaagaattgaaatctttaggcagtaaggcagaagaatcagagagttctaactgggatgctgtgaaatgcatagatgaagacataacctctgttgatccatgtttggtagaatcagaatcttctgaatctgagtcttcctatgaagaggaccctgatagaacacctgtctctaccaatatggaagagaactgtggtcccaaaccaaaatttgcccggaccgcttcatctaagtcggagattattatttcagacagaactcctgaggattttgccacatggcagcgcattatacgtgtagatgctattcgagcaaatacagaatgggttctgtttgcccgtaaccaggctgaagtctctaaagagaaagcgctgcagtctgcaatatctgtcgggttgaaagattttgaccatttagagccttacatgatctatcatgctgcacgattagttgcactgcttgaggcatatgcactttatgatccagagatcgggtactgtcaaggaatgagtgatctcttgtcaccaataattgcagtcatggaggaagatcatgaagcgttctggtgctttgtgggtttcatgaggaaagccagacacaacttcaggcttgacgaggttgggataaaaagacagctgaaaaccgtctcgcagatcatcaagcgcaaggattcacacctctacaggcacctgcagaaacttcaggcggaagactgcttctttctgtaccgaatggtggtggttctcttcaggagggagctcacttttgagcagactatgtgtctgtgggaggtcatgtgggctgaccaggccgcgatacgagctgggattggaaggtccacttgggcaaggataaggcttcatgccccgccaaccgacgacttgctgctctacgccatcgcagcctgcgtcttgcagaagaggaagctgataatcgagaagtacagcagcatggatgagatactgcgggagtgtaatagcatggccgggcagctagatgtctggaagctcctagatgatgcccaccacttggttgttgaccttcatgacaaaatctgatgcgactgccttcctcagctatgtttttgggtagagtatgcagacatgaacacattttccgaggtgtatttagtaagctgttgtgtactgttcatcacccggaataaaaaaaaactttcatgggagtacatgtagagaaccttgtagcttcaagtgaggacgaagttgtcttccactttggttaagctgataaaccattggatagcgcaatggtttattcaagccatccatagttaaaacttcatggaaaattttgttcttgcttctaatgtctgtccttggcagaaacaacattttccatgaagttttttacaggaaagttaagttcccagattttgggtgtaatgtgtagtaataatgaaatcacagcagtttctttcatcatgtgtagtaatgtactccctctgttttattttagttgtagctggatagtgcaaaattgaactatcaagcgacaactaaaaagaaa

SEQ ID NO: 43555 - DNA, 3209 bp, Zea Mays
tgccttccatggatattcaattaagcaatatatatatcatggatacaaaaaaatatgctcatctctatgattatctctagggcatatttctaacagtacagtcttgagtggttgtacttgtcatgagtataggtagtgaaggatgacaaaccggtccttatatgaggggacaatccttctgctcatgcctaaaccagctgagccatcaccttaggccctcccctaaactagggagtccctaatcatcccactcacaaggtgataagggtgaaaacccttcatcatacacattttgaaaagcattttcttttgaaaactcacaccttttctcaaatcgtttgtaacaaatatatcaaggattgattgcggcaagtagatgggtggccataataacttgtctcaaaattatatcatgcataaaataacaggttgagggttgtggttgaaaaatcataggtaatttatgcatcaaagggatccagtgagcttgccgtgcttatccggcgaaagggagggagagctcacggaactagcttctggctccactgcctggcatagacttgcagatctggcctccacaagacggcacgaacgcttcgataactatgcaacatgaataggcaaacatacaaacctgcaagtatatcaacagatatttagtatagtggtcagaatagcgatacatggatgtgtagagtcttgagtagaatctgtgacatgtggtgttgagatactactagtggtggagcggaggtgcttaccaggagggtggactggaggcgaagcgacactatgcgtgtagccggtagagcggagtaactgagtgggtggggtgttttccttggctgagggtgttgagtgtgtgtggagagggagagggtagctggctgtatttatagctgggtgtatgtggtgtagcacagtgaagttcactattagtgagaatagtgatgaatgaatcgactgacttagtctgaacagggagattacaggcagaatatgggagaagagtattttaggagttttctggaatatgaaccatgcttaacggatgacatggttagatagggaatagtttgataagaatttagaaatgagaattattggaatatgcgtttggaagcctggttcgaaggaatctcaaagttaagcatgctcaacttggagaaacctaggatgggtgactggatgggaagttccctactggaaggaaaatcacagtcaccagagttcgtatgactggaatatgggtctggctggtcttaggtggactagacagcatgatggatgagtagttgaaatttggggtgatcggatgatagatgaatagtaatgatgaatagtgacaacaaaaagttattatagatatcatcggtgaatagtaacgatgatgaatagtgttggtgaatagtaacgatagtgaatagtgtcgacgaatagtaacgatgaatagttcgatgatgaatagtacaaccactcgagactgtatgggcagtcactcaatctgaactcgtacggtccaaaccctagagttacgatggctggggagcactgggaggataaggagagggaatgttttgtccggtttggacatggcggtggcctgactccttccggtataaccgttaaggtcaggacgtgcgaggaaagaaagagattcggattcgggtcttattggccatgagaccgcagagccggatagtgggtaaagtgtacccctctgcgcagagttcaaacctattcgaatagtctgtgtccactggaatggacgagtctggtgtggtatgacaattagtgtttttgttttccaaaaatgcttttgaaaagtggttttaaaaggtccggcgattgagccgtgagctatggtggacgggaagtccagtagctatttttgaaaatgaaaaccagtgggaaactgctgagatacctggatggtttagtccaggggattttgttctatattgaaaaacttcctgctcctttgggagaggatgtgctttgaaaaatacaaaatgttttacaaaacgaccctacatcaaatattgctatttctgcaaaatatcctaagctccacatattccatgcattatatctgatttccccattccgcgggtgaaggtgggctgctgagtacgttagtactcacccttgcttatttgttgtttttcagagaaggacatcgctgattgggtaagagttacgcctgttcccaaccttgcttgtggctgttggaccgttgatttgcttcgttgcgtatatcgggctgcttcagccccactctgatgatatgtcccgagttgtggatgaaagggaattaggcttacacctttttcctaattgattttggtggttgaattgcccaacacaaataattggactaactagtttgctctagtctataagttttacaggtgccaaaggttcacaacaaagccaataaaaagaccaagaaagggttcaaacaaagagagcaaaggacaacccaaaggcaccctggtctggcgcaccagactgtccgatgcaccaccggacagtgtccggtgcaccagggcacctgaagctgaactagctaccttcgggaaattcagagggcgctccgctataattcaccggactgtccggtgagtcaccggacagtgtccggtgccacaccggactgtccggtgtgccagctgagcaacggctacctcgcgcgcaacggtcgactgcaacgcatttaatgcgcgcctgcgcgcgcagaggacagagcacgcgcagttggcgcaccggacagtctacaggacctgtccggtgcaccaccggacagcccggaggccccacaagtcagagctccaacggtcgaaccccaacggtctgctgacatggctggcgcatcggacagtgtccggcggcgcaccggactgtccggtgcgccatgcgacagcacacttccaacggccatttttggtggttggagctataaataccccaaccaccccacattcaatggcatccaagtttctacacttctacaccttacaagagctatagcattcaatacaagacacaccaaagagatcaaatcctctcccaactccacacaaagctttagtgattagagagagagatttgttgtgttcatttgagctcttgcgcttggattgcttcttttgtttctcattctttcgtgatcaactcaattgtaactgaggcaagagacaccaattgtg

SEQ ID NO: 43556 - DNA, 3133 bp, Zea Mays
ctgcaactgcaagtctgcaaggcggagaagccggtcgttcgttcatccggtgcgctatcccaaatacagcggacaacttcgcacctttttcacccatcactcgcgaacgcaggtcgcactgtcgcagcatgcttcgcctctccatcgccgtcctcacctcacctctcctccccacgtccgtccccgccgtccgaccccatccgcgccgcctactccgcctccgtctgcgctccctcgccgcctcctcctcgctctcgccgtccgcccgcagcctccgcctcctcgagtggggcaaggtctgcgacgccgtcgcctccttcgccggcactgcccacggccgcgacgccacaacgaaacaactgtgggaggtggaggatgtgagctatgagcagagccagatgctgctccaggagacggaggcggccgtgttgctgcttgacaacgctggtggggcaatggatttctcggggttggatacagttgcgagtcagcaatacatagtgtctctgggggcgctgtgataaaaggcctggaagcaatggcagtcactagcctgatgatgtttgttgaatccttgcaagtaaacattaaagctgccatgaaactggatgaaggctcatgtagtcgattaacaacacttacagaaacaattttagatgctgtcattaacaagtcattagtgaaatccatacaagatattgttgatgatgatggctctgttaaagacactgcaagccctgagctgagacggtatcgagagcaagtacagcgtctagaaaacaggttatatcagcttatggacaagttgatgcgcaatgctgatgatgaagcttcattgaagtatgcattgtaaatggaagatgctgcattagaacaaccatggataattcttcattttttgatggattattgctctccaggtcagatgctggaagcatgatagaaccaattgttgctgttccgttaaacgatgagttgcaggaatcaagagcattagtggctaaagctgaactggatgtcttatcaaaacttactgataagattcgtcttgatcttgatagcattcagaatttgcttcaggaaacaattaaactcgataagatcgcagctcgtgcaaaatacagtattgcatatgatggaacatttcctgacctgtatttgccgaactttgagaatgaaactgtcactagtgctacaggtggatctatcaaacaaatttcctcagctcaacttcctaagaaggcatggaaactgtatatgccaaatgcataccatccactactacttcagcggcatcaggaaaatatccatcgtgccaaaagggatgttgcaagtgccacagcggagatccggaggaggaggatatatgggcaagatattgcagaagaagatcaattggcatcagaccttgattccatgaaacttagggtttcccaactggagaaagaccagccagtaccagtagattttatgattgctgaagaaactactgtcttggtgataactggcccaaatacagggggtaaaacaatcagcttgaagacggttggcctggcatcattgatggctaagataggtctatacattctagcttctgaaccagtaaaaattccatggttcaatgctgtttatgctgacattggagatgagcaatctctgacccaatcactctctacattttctggacatctgaagcagattggtgccattcgtgcagagtcaacttcagagtccttggtccttttggatgaggtaggcgctgggacaaacccacttgaaggagccgctctggggatgtctcttttggagtcttttgctgaagctggctcctttctgactctagcaacaactcatcatggagaactcaaaacactaaaatacagcaataactcatttgagaatgcatgcatggaatttgatgaagagaacctaaagcctacattcaagattctgtggggaataccaggtcgctcgaatgcaatcaatattactgaaaggctgggtttgcctttggatatagtagaaagttccaggcgtttacttggaacagctggtgcagagataaatgctttgataatggacatggaaagactcaaacaagaatatcaacaacatcttcaggaggcacaatatcttcttatgcagtccaaggagcttcataacaacttggaactggcacaaaagagcattgtagaccacacttctgctcagagaaaacgaaaggcgagagtaatttcagagtatgctgttatggcccgttctatcattcgtaagaagtttcagcagttccaagaatctgctatagctgaaagagtgaaagaagaagagaatgctgtgaatgatgccaaatctgacagagtgaaggatcctatgccggcaaatacatctgccattggaaacatacagaacatagataccagcttgggcatgacagccaacgatgatgaagatgaggttccagaagttggagattcagtgtacgttcctaagctcaagaatgaagctaccgtggtgaaaatagattcgtccaaaaatgaagtgcaagtccaagccggtatgatgaagctcaaactaaagctgaaagatgttaaggttcagaagcggaaagtatccagatagaacatctacactgtcctgcactagcagatattcagataaatatgcatatgctgtttcgtccaattcgtaccatttcattggcctcattttcagcaataataataatgtggtctttcaagtgaaaatatggatttattatctgcatgtacttctcattcttcactacttgcggtactcaaaaccttcagcagagttccagaacatcttcagattatcacttctttatagaaaatgagcttgtgatttatcacttgtctatataaattttagttcttcgaaggttcttaaaaagaagtagcatgccaatgaaatagttggcactagctggttatttgaaattgccaaattggccacattgtagagatgtttctgtgcggcgccggttttatatggcttcacgctatttccaggagccttctatcccatctatctcatttcttattttaaattttactatgttttttccctaaaccctaaattgtactatgtaaacactgcaatataatgaacggca

SEQ ID NO: 43557 - DNA, 1999 bp, Zea Mays
acagtcaaaagctccccattcctcttccccttctcacccggcactcgaactctgcggccctgcaaaccctagctttcgctccatggccgacggcgatccggagccggcgccagcgccggcaccggcactggctaacgagaagctccatgtccgggcggcggcctacgtggatgagacgcgcccgccgccaccgctggagccctccgggggtccggacgaggagaagcgcccgcccgaagaggtagaagcggaggtggagatgcacccgccgcgggaaccaaccggggagccgcccgttgatcgcccgggggtggaggtggtggcggacatgaaggcgaacgaagtggagaaggaaaggggggatcgggcaaaggagaagcgggagaaggataaagggaaggggaaggaggagaaagagaaggtggacgaagaggcgaaggggaaagtgactgcggtgatgaaggtggatgggacggagaaggaggtcaagccgacccggcggccagctggggccagcgcggagacgcccatcctagcggtgccggtggtggccgtgccttgcttcatcgcgcctccagggtttgcgcattcaccatcagtaactgaaggaaatatttgtacaccaattgctgacaagtcattttcatctgattcaaaatcacaccatgttgtaaatatggtagctgatggcttcaactggaggaaatatggtcagaagcaggtgaagagtagtgataattccaggagctactatagatgcacaaactctggttgtctcgctaaaaagaaggttgagcatttccctgatggccgcgttgtggaaatcatttacagaggagcccataatcatgaaccaccacagaagaccagatttgcaaaggaaagagtgactcctattagtgttccctctggaggcgaaaccttgaggcttgtgaacacagaaattgtagaatctagcacgcctacctgtgaattggaacggagtgccatctcagaaacttctgagcagcatctcttttgctcaagtgactgcgaaggggatgctggtaacaaatctgaagatgaacatcctagcgcggaagccctgccaaagcgaagaacacttgaggctacagcaccaaatttaacgccggttcgcagaactgttagagagcaaaagattattgtgcaggctggaaagatgagtgatggatacagatggcgtaagtatggacagaaaattgtgaagggaaatccaaaccccaggagttattaccgctgcacgcacggtggatgccctgtccgtaagcatgtggagaaggcgccagatgatgttaacaatattgttgtaacgtatgaaggcaaacacaaccacgacgaacctttcagaagcagcagcataccagtttctgtaatcagtccatcagcgacagccactgagcaacccaacacatcaagtacgtcagatgagagacctccaaccattacccagaaggacgccaacagtgagtctgataaggagacaaccttgaaatttggaggcgagaaggcactcgaatctgcgcaaacgctgctcagcatcaaaactaactccgatgacatgaagaactctgtcctgaaggaaacttctgctgcagttccagtccaaaacaattgagcatgctgagatagggtgattctattgacatctcttaggctgtcatatttattggttgagtgatatgctattatgttaacttgtatgacgtgaggcttggtgttcggtattccgtgtggagcatttgaggaagcattaggtttcaggaagccacgactggttgtttctgcctgtatagattcccattccctagtgtgtacaggtactgtattttatctgaggccagataacatgtgtggggtggttcttgagaacctgtgtgtgctgtattgttctagctcgatctattgcaatagctgatacgagattgtcatttatttatcggtataacacatcgtgcgtgccgtttgcagtttgtgatag

SEQ ID NO: 43558 - DNA, 3712 bp, Zea Mays
atcaagggaggtggaaaatgcaccggggcttgccttcgttaacaggtgagtcaggctcggacccgcagatatcgaagtagaaacagttcccggcctgagaatccgaaggtggtggtgtcttttcttcggtcacttcaatctcttcttcgttttctaaatataaccatataggtatatatataagaatgaatgccatgtaatgctcatgagagtgcgaggataataaagatttattatctaagtcttgaatacaactttccatcacggaactccgagagcttagggtttccggagtcagtaaaggagttcaaagggcaggggggttttgggttctagttatcaaacaaggtccaaatcaattcaaactctacccaaggcttctaaataatgtgggagttcatataaaaattttgaacatttttggcattactattaattctctaaaattctagaactatttctttaagctattttaaatgccctaaaattccttatttaatctaaaaatcatgaaactatttttattaaatattatgtaaaataagaagtctaggaaaattggtttcacaattttaggattttctaccattttctataattggtttggctctggaataaaaagaaaaggaaaaaccggtgaatagtactgggccagaagcagcccatacggcccagccactcagagaaacggggcgcgcccgcgcccgcgttggcagtcttgcagaagggcccccgaggttttcactatatgggaatgggtccttccactgtttaacacagtcactgacactttgcagaagagtccctgaggttctattcctttaccgcgccaagtccctgacgacggtgagcacggccgagctccggcgacctcgcgcactggccaaatcgcaccaagaccggcgccctgctacggcctaaaccaaattcacgccccaatcagcgtttcccctaacttaattgtgcaaatggtgatatactctcttctgtccacgagaaccgcggagactacggacacttgatcgtgttcccgacgattggtggactcctagtgcgaattggtgacacggtaagcatcccagagcgacaagagtgctcgaacgaaggagagtgagggatgaactgacctggaaagggctggccgcggtgatgtgtggttcacggcggcggagagtcgatttgggggaaaacccgaattgcggggctacggtgaacgagtggagatgagagtgggtgctatagcttgacgattacatggcgcaaccgacctggccctcaatttatagaagggtaaagcggtggccagcgaatttggggaggacgcgcggcggccggaaatgaagaagaaggcactggtcgcgtgagtgcgtgtccacagtcgtggcgagctcaccggcgacgatgggactgctataaggagtcacggcgacgcggtggaaagactcggacacgcggcggaaacggagatggcacgacggtggcgagcagctttatccacggcggtgagcaagggggaatgaattgcggctagccggagtggtttccaagtcaccggcggcgaagatattttgaccctgcgacgttatcgacttaccccgagcgtgaatcttgatgcaggcgacgcgaatcacggcgggggaggtcaccggtggtgggatttttctgtcgcgtccgatttgatccgttggggacactgtaccatcgcgagctcccatcagagcacctgacagccaatctttggtctggtttttctctcaaatcttcatggcactcttaccaaggtcggcagcaaagttgttcctatatagtagctctacaactttgttatagcaatcctaggtagattcccactggatcttagtcgaaatggctctcaaacttggaccaaagtcactgtccatctgaagttcagactatatcagcctgacagtccaactttgggcttcaatatctcctaaatcttcttgacaactgagctcacattcttaagcaaagttgtccacctatgttaggcctataactttgatgtggtgacctagggcaaaaaccctatactttgaaagttacaaggctccaaagttgagccctcaacactgaatttcagacttagtatagaactcaattgaggtccattttgcaattaagtccaaaatcaaatatttggcttacaagtccacacatttgtgaaccaaatgacttaggatacttatttaacctggtttttgcactttagtccaaaagtggactaattttgcacataggtccctagggtttggttttagggttttccagggttccaattagggtttctggtatcccaggggtataaatgtgattcaactttatttttggggatattttatgactattcccctaaagcttgtaggttttctcaacttgggttaagtcttaccccctttaatccctaattagggttaagttccctatctagggttctatttgcaaaataccaaaacaatacaacttgtttgaaatttttacctagtgaatgcactctaggtgtgtcaaacatatgcaatgccaatgtttatgatgccatgctcaagttttagttgctgtaacagcaggggtgttacaggtgaggtcccggaccatccctgtatgtgtgccggaccgtccgcgatgcatagaacaagttaccgtgtttggccacctgtttgtgcttgcacccagcgttggagcgggccacgcgtcgtccgcggatttggcggccgatcgttgcgctggcggccgttggctcaccggacagtccggtgaattatagtcgtacgccgccgaagttttcccgagagcagccagttcgccggaagccagtctggcacaccggacactgtccggtgcacctagaccgagcagcagttggttatacatagccaacttatttccaaacctttttcttctgtttctatcacttagatacaatgcattagtacccaaatcaatgtactaagtcttagaaacataccttcttgttgatttgcaccgcattcctcatttggcatataaaaacccacttaatatgtgttggacacttaatcaccaaaatatactagaaatggcccaagggcacatttccctttcaagtgtaaggctgatcaacaaaataaaggttgaagctgagcattgcttttataagttggtcaaaattttattagcagttactaagtgtaagtgaatatcaaaccatagtaataataaataaaataataataaagtaatcccaatgcgatgcaaatgacaaattaagtttatttccatagattaatcatgtgagggtccgagctgctcatgaccgtgagcatagctagtataccagttttacactctgcagaggttacacatctttacccacaagtcatgttacccatctgccaagagatggtcaatcccatacacctctaccgaagaggagaggcagggtaacactacgaggcctttacaaagttccactagcttcagaaaacccgctacagtttatagggagctccagtgcagagatccctcgcctgaccgccatcgcagcaaaatcaacccaaggacctacctacactgaccactcccatactgcccttgcccctatcgggtaaggtagtcatccactagctttcctagttaatcagccaagggcatcccatactacccttgtggtagcactgttttctcgggtggtcgctccatgttcccattaaca

SEQ ID NO: 43559 - DNA, 277 bp, Zea Mays
gtcagccacgatccctgttcatctcctcacatgcgccgatatcctcacgcggtagttgcaatcttccgacgcgctcgcccagctggccgaggcttcacctcaaatagctagcgccggggtctccgccactcctccgtgcctctaactactcagtacccgtgagctttggctgtgagatcggaagtcgttcacagagggtgtgcgccgtcgtcgtgcgcagttagcagagagagttggagagctcaccgccccccaccatcgccaggccttgtggaat

SEQ ID NO: 43560 - DNA, 396 bp, Zea Mays
tggaagcccaaagccgcggcctgcttccccatcctctttacgcgcagtcttccagtgaagttgtttctacagcccagctccacaccaaaacgcagcccatctcttcttttctctccgtgctaagcctggtgaagcgtgtggtcagctctagcggtccgcggccgtagcccagcagcttgaggcccagtatcgcgtagcctgtttttgctgaaagcgcgcactccctcttctgtctcgaccaccgacaagtgggtcgtgccttgcttccactgacaaccgggcccgcgctgtcagcttcttcctcttcctcatgctagagttcggatcggacactgtctgatggcgttcctccgctggactccttcccccgcgtgcttcccacgtcaggacggacta

SEQ ID NO: 43561 - DNA, 1361 bp, Zea Mays
tcatcaccttctgcgagaagcaactctcgctcacacagacaattctgttaccgacgaaaaagtccagatactcgaaacaagaggaaaagaaacgcagctttacaacacggcgagggtgtgtttgggcctcggcggccacagaaaacacacgctacaagatgatccgatcccgcaggctcggatcttgacggttgaagggagcggcagcaccctcggcatcaactacaccttcggcgaggtccgacctagcctcggacggcgacgctgtccgagggtcaccactccgaaggacgacttcatcatcacgcccgggccatcgccgcccgggtcttctccgagaatccggcccgagcaagcggctcggctggtcaccccgaggcctcggccagctgtcccccgaagacatcagcccggcccgagacctcggaagatcaactccggcgtcggtcctgctaacggacgacccggccaggctccggccgaccaggtcttcttttcgagccaactctgcctctgttcgtgctaacaccgctacccctagcctcggctcatcaaagagcggccgaggggttcctttaactaagcaagagaagcctcggacgacaaggctgaccgagccgagggactcctacgcctccgggatacgaatacctcactcgtcacctttacacggggcaactcacgcttggtgaagcggttcagacaaccaacaggcgagtcttagtgctcgaaaatgaggaaaaacacggctccgtgcccaaaattacatacatgttcaggcctcgacagccacaatgaacaaaaacactggcattcacagtgccattacaaacggaactccggttccacctccgcaggtacgaacaaccccattcgatgggggaagcctgcggagcaacagaagaccgacgggcggctcgccgtcgcccgctccggcagcaacaacaacgacccccgctccgggtggccgaactgcagcagcgatggcctcaggggcggacgctgctgcagccttgccctcgcctacgccgacgctcgaggggcgaggacaagtacaaagagccagaggcccgaagcgcggatggtggcggtgatcccgtcggcaatggggacttctcgagctgcctccaccccggcaccgacgacaggggccgtcagccctccagcagatccccactcagatcctcccggacgagtggggcaccgacctccacgtggaggcgtcgtaccggtgcaaaggcaggaccgccccagaacacgaacgccgccctggcagcgcgcgacatcttgggcggtcctcccgtccgcacggcgcgacaaccgccttcgcggcaggagggggcaccgggagccaagccggc

SEQ ID NO: 43562 - DNA, 1364 bp, Zea Mays
agatagttgtttaaaagtcaaaatccttgctggtggccgagggctgggaactttcaaaaagcggactgcaaggtggtgtccatattgttaaggctgaggaagctgaattgattgcaagtaaaatgttaggccagattctgataacgaaacaaactggtccagagggaaagattgtgagcaaggtctacttgtgtgagaaactatctcttactaatgagatgtactttgccatcacccttgataggaaaactgctggtccgctcattattgcttgcagcaagggaggaaaacactatagttgacctcaatgttcaaaggatggccagaaagccaggaacagaacttaggcgttggcgattggcatctccctcccctaagccatggccaccgggcggcccgtacgactcgtgctggatgcctccctcctcctcgacccctcctccaccagggaggcggcggcggtggctctgcggcccggggtagaggagctgttgcggcggttgcgctactccaacctgaatgtgtatttgcttcctcttgccatacttacccatcatggcccatggggtgtctatcttatcatgccatcttcaaagaatggcatcatgttaacaaaaatgaatgagaaatcagtcatttctaatggaaagtcaggctttcttgaaaaggtcgcaagctcacacttgtttggctctatagcacttcttgcgaaaagtgggaatctttctctaactgaattaatgttagaatggagccaaacaagtttatgtttttatgcgacttcaagagttgacaaaggtttaagttctgagctccagaatcagaattggagagttctttctgtagctaatgaatgtagcatagaggttcctggtgttttaaatgttcaaaggcttcagcagttgcttctcaccttggctactctaataaaagggaactatgtgactcatctgttctggtgattggatatataatgaaaatattctgtgaggaagacttcgcaaggagatgtggttctgtcacttatgtgaccgttgtcgtgtatggagacgtgtatggagacgaggacaagccagcgcttataatgtttacagagatgtggttctgtgactgttgccgtgtactcaggctttatttcaacaagatttaaatatgagatgtagagtgattgatgtacatcacttcactaatcatgaaatctgtagaaggcgaaactactagccatatatgatatgcataatccgtgtggtaaacattatcaatatcacacaaattatttctaatgggttttgaattatcatagtgattgttgtcgttccgtttttatgtttcatacaaattttttactcccgtcgcaacgcacg

SEQ ID NO: 43563 - DNA, 928 bp, Zea Mays
tcgccattagttcgctttcgtctaaatcaccgctgcgggtgcctgggtctctggtcgcacgtttttctatctcgcgctcgtctcgtccgatgcctcagcaacaccgtagtcatccttcctcgcggtgttgttatttaccctgctagtgtaatcgtgcctcaggcgctgctcgtctgaaacacccaagtcaagtgagcatcatgtgcgactcaagctcggttcgtcaagatttttcagtcaaagaaagattccaagagtatacggagaaacaagccctagattgatgccccaagtgctcggcgaaaggccggaataaggatcatcgtcgtttggatggattgctagtcgaaatggtaatcatattttgaatcgctattctagcaaattgatttgataaatgaattagagggatacttattaggataattattctatttataacttaaacgtgtcgtgggtatattaatttgatgcatgataaaagtcgtaattatatgctgcttggttactatgggtatattaatttgatgcatgataaaagtcgtaattatatgctgcttggttactatcgtaattatgaagtagtcgcgaggtgtggtaaaatataggtttgaggtatacccactagagcgaacgattaaatatcgtatttgatgtgtaggctatacaagttaatccgatgtaatggcttagaaagctaattatagagtttctattcatattcgaatgtttagatgtccaaggttaatgagttaataaagagctaggaataaaaatagatgttctagtgttgttattcaatttggttaatggatgtagtcgatgccctgctagggatatccatgaagcttaatgcttggttttaagtgtttcatcctttttagtgtagattatctatattatactcgttatactcgtgctcatacat

SEQ ID NO: 43564 - DNA, 1527 bp, Zea Mays
aggccccttccatttgccactgtccatccacgcgaccacacccccgcaactgcagatccccaattcgtttatttcttcccaccgagccaagctgcgacgacggcggtcgcagcgtcgccttccctccctccgtaccgccgacgccgacgagcatattgggccgagcgcccgagcacctctcctgtcagcagcggcactcgccattccaagtacgaggtcgacgcgctgtggggcttgctgaaacgagtctacccccaagtgaaatcagggtcttcaagatagcttactgagatgtggggttttgcatcaaacgcttgggcagctgggctggagaagaggagttccccaaaccgcacttcctcgagtgctgcttattctgacgacgaagcatcctcgtgcacaagcagggaagaaggcctggagtgcccgatatgttgggagtctttcaacatagtggagaatgtgccttatgcgctatggtgcggacacaccatgtgcaagaactgcatcctagggcttcaatgggccgtcatcaaagtcccaaccgtgccgatccagctaccgttcttcatctgctgtccctggtgcaacctcctgtcgccccgcgtactttacaaggggaacctcacgttcccacgaaagaactatttcctcctctggatggtcgaggggatgaacggcgagcgggccagatcacgcccagctattcgcagcgagcagcatactccgtggctctcaagcagcagcagcgtggcaaatggaaatgcaggctgttcaaatcccactcgacgccacctcccgccaccatctgttgacacttcgcccaccaacgcaaatcatgccaactacggggggtcccctctgctgaacgcagggagggtacaagcttcgctgcgcaaatccctgtcgttcctggtccacctgactgccaagtttcccctggtgttcgtcttcctcctcatagtgctgtatgcgatcccagccagcgcagcagtcctgttactgtatatccttatcactgtgctgtttgcgcttccctcgttcctgatactgtattttgcatatccgagcctggactggcttgttagagagatctttgcctgagattttttgttcggaaaaaaaaatctcaatgctgttgttggggtctgtgtaactgaattctccctagattttgttgcaagtgttgaagttattgccaagttttggttttggacccatgccgacatgtgatagatatgtttacctcaagtctccatggtatggaaggtcctctgttgctgtgttgcattgcaacacatcagcgtgctctgtgctgctgacatctgttatgttggcttgtatcgcttgagtgcttggaatggcagggattgacgaagtgtgggggtatctgaaaagaaaagttctttttttttctggatttggtatggcttctcgaaatatatttgtgtcaagctgcctaaccactttgttatccttagaagtggggggtagtgacaactgttttctgaaacaaaactgtttaac

SEQ ID NO: 43565 - DNA, 4084 bp, Zea Mays
gtccaatactgctatagtagcttctccaagttatgacactgttaggaagatggttcaacttctctcgaaatgaagcttctgtcttcctatgtatagacaagttgttcagttaggaggtctagattctcttaaaatggtgctatctacgagttaggaggtctaggagcacactgaatgttttagaggttgatgaaatcgttgttttcctaaaaaagcattttttctgctttgtttgaaattgtttgggttttcctccccaactttcataattacctatttctattgtatgtttgatcatttggacttctactccatccacaattttggtttattcagtgaggaactatgtttttaaccactctatagtttgtatagacatgcaacattcatctcagggtcaagaaagaagctcaacttggcatgcttcctgtttaaagcaagaatatgtttgttccagttgagttccagtttgaaaactggaacaaccactagcagatgcaaagttcacaaagtagcttgtcaaataatgtgcatgaactggaacaagcaacttgtgcacgaatgagcattactggaacaagtagcttgtgcatgaacgagtaatactgtagatgattggacatgtatgtctattttagatttttaatatttaatgttatatattcagctcataccatacatgaatttgcatttctgtactatactcacttaatgtcctacctgttttgttagcttcaactatccgctttaaactgacaaaaccagaccaaacatatgcaaatctcatatacctgtgaaagcaacaactgatttgccagattggttaattaaacgtaacaataaatagccccgattaaatggcttataaatatacttggatctgttcatttttcacatatcagctattaatgaagccttcactgggttcattttgtactactccattacttatttacagttacaagtattctaagaaacttaatatttcatcatcaaagttgtattcagacagtttcatttacattgctctgattttttgtactaggagctactgacaatggaaagcaacgattagagtaacttgatgagtgaggactattcattcagttgcttcgatcaataagtgaactaatggatgcatgtttcttttgataagtgagctaactactttagtcacaaagttcgtgttgatttctaaacatggtatgatggttttgtcatcctattcgattgagtttgggaaaaagcctgcacattctgaaaacaaacagactgcacattgtgtggctgataaggttgagtgggtaaataagatcaaagctattatttagacatactgaaaatatagtgaaggaagcgtaagcaatttttctgctatatttatgcattgtatccttgtaaaattatcaatattgttctgacttgtggggaaaggtatgagagtattcatttttttgcctcttttctgtttgcattccttcttcagtataatgtttgttagaataaccaggtgaatttacaaatttcatatccatatactttcttcgatgacaaatataaatctacctaggtttgtcataactcataggtcaatcattctaacttcaattgacattttttataaaaagtatcataaggaaaataatatattatcataaaagtgacgtccatctatatcaaattttagatattgatggtggtcagagttaaaaaacagtttgccttaagacaaaccaagatgaacttgtatttacaatcgaaggaaatattgcacattgcctagacatttaatttattagataaattcttttgttagttgttcaactttgtacgtcttataagtcacaggaacaatgtttatctagaacttcggtctcaaattatacagtagtgttcagccatacctgccatgtcacaagaaagagagataaaaagtatttaatagtagacctaatgatgctcatttgtaattgtagatattcgtatatcctttttctgcaaccttgtgaaacatgtgatggtttgacttggaacaaactttgggtctgatatagtaaaatgcaatgtatgtggagggaagtagtagaacaagacagaacaagtgccaaataaggttatatagtagaatacaatgtgtggagggaaatagtagaacaacacaaaacaagtgccaaataaggttacaaggtttatagtagcgattgcttagctgctacaacgacactcatagattagcctggcatttgcaatgtcgctcttgtatttgccataacctcacttaaggtcacacattgcctctgggaccttgacctccgctactgttgtcgcctggccgcgtcgacttcaccaatgccggggtgtccaacctcatcagcttcaccgtcgtcgactgctcccacacaaccgagctgtgggtcctggtcacatatggaaagtgaagaacccaaatgatttcttcacaggaagactgctaaccttcacacatctaataagatgaagcaacaagctagaaaatgtggaatttgtcatatgtccggatgcaaaacgggtaacttcatgctttccacaatgtgtgtcgacatgatgcttgtagagatgcttggaccaatcttcaactcatggggcgcttcatcctcggcctcctacgcatgcacttctcctgcttctcctgctggtcatcgcccaaggatcgtgagggtgttattgcaataatagctgatggagaaatgagaatgattttcaaatgatgacaggattggcagaatgagagcgacaaaggaatgagctaaatcttttgaaatatgaagcaatatgatttctttccagtgttatatttttttatttcctatgcatttcttaaaagtgctattacatgttcacctactaatacccttgtttttcttgcatctcaaggatgaattgctgctcttgaccatagggattggagcagcatgtagtttatactttatcctggttttctctctcgagatgttgcatggtgtcagtgtgtcagatgtgccgtaacagatgactccaaaatggattgcatgctcttcaaatagctacagataactatcttcacataaaatggagagtacaatgtttataaaagaaggaatatggataaggatccagattctcctatagcatatgaagaggcaaaggaaatggcaagccaaagctgcacaatttctgatgatcactcgttgttactgttatccattatctcctcagaggcattgcttttaaattcaacagcagacatggcaggtgcaggtcctatcctatccattatctacccctgcatgtgtgccagctattctactctatgtttcaatagtttggaaataattcagagctaaggttttctgatacagcctttcaagatttggcacattgacataatgacatgggttggtcacggattggatgtcaattttgctccctgtaccttgtagattatcggttatgtcaattttcgaaatttctatcgtgatggataacatttgaataaaacatagttaaataaacatgactactgtttcagtctttcgaaattctgatgctatagtgtcagtatactatgtcattttagggaaaatatatgtcatgtttattttgataaaattatatgatttctcactcaattcttgtcggtggcttcaggatttgttattttgtatatcgatctgtgtcatttgacaaagtactttgacttggtataatatgagtgttacttcgaccaaaagagcttggtaaagtgtgagaaactccgcaaacttcttctgcagacgatgactagcaacagttatgacgagggtcaagatagccgccatacatgatacattgagtacaacatcaagataaacactccctccccacacacaacttttgccttccgttcactctgtatgttgtgtttattacggttgcatatgttgtgtttattatggcatcaacacgttccattagaaaatataactattgtttgtcaagtacaaaatcataatcacatcagcttgtaataatattgcatcactgttttgtaccaaattgtaagttgttgtagcaacgcacgggcacc

SEQ ID NO: 43566 - DNA, 2820 bp, Zea Mays
ggccactctctttctctctctgcgcctgcgcctttctcttctccttctccttctccctcctctcaaccccaacaatctctgtctccccatctcctctcaacaaggcggcctcaacaaagtcccaccgcacctttctttaatggagcgagggtgagcctaacaaacactcgacacacaggaggaggtgctgcccgcttctcccctccctcagtctcactcgctccgctctcctccccgagaccaggaggccaagccaagaaccgcaaaccctcaggccgtggccatggcgcaaggagcaggacgggacccggaggagctcttcgaggagctgtggcgcgcctgcgcggggccgctcgtggagttgccccagaccaacgaaagggtcttctacttcctccagggtcacctagaacagctgcaagagccgacggacccggcgctgctggctgagcagatcaagatgttccaggtgcccaacaagatcctctgcaaggccgagacagaaacggacgagatgtacgcccagatcactctgcagccggaaccagatgagacgtcaaggcccgtggtgcactccttctgcaagatcctcacaccatccgacaccagtactcatggcggtttctccgttcttcggcgtcatgcaaacgaatgcctcccagcactggatatgtcgatgccgaccccgacccaagagctcatcacaaaggacctacatggatctgaatggaggttcaagcacatatacaggggccaaccccgtcggcaccttctgactactggatggagcacgtttgtcacatcaaagaagctgattgctggtgacgcgtttgtctacctgaggagcgagaccggacagcagcgtgtgggagtgaggcgcctcgtgcagaagcaaagcacaatgccagcatctgttatatcaagccaaagcatgcatcttggggtgcttgcaagtgcatcacacgctattaggactcattccattttcctagtgtattatagaccaaggttaagccaaagccaatacatcgtcaggctgaacaagtacctggaatctagtaaaattggattcgatgtgggcatgaggtttaagatgagttttgaaggggatgacgtccctataaagaagttttctggaacagttgtcgataaaggagatctttctccacaatggcaaggttctgaatggaagacattgaaggtcaaatgggacgaagccacaaacttaaatggccctgagagggtttcctcctgggaaattgaaccattcgatgcatccgcacctgccatcaccatgcccgtgcaaccatcaatgaaaaacaaaaggcctagggagacagctgaaggcctggatattcatgcactggaacctgctcaagaattctggctctctggaaggcctgaacagcatgagaagacaagcgtaagctccagcgaacccaaacatcaagtcgcttggacaagtgaacgcgcaggatacagtgccatgagcagttcaatctgtcagaattctgcagtaactgggagctggttcaagggcttcaattcctccggctcacacccttccctgccagagatctcccagaaactgtttcaggtcaccagcaacgacgcgagggttcctccttggcctgggctctccgcttatcatgctgacgagccctcttccaagctgtcctgcaacactgctctgtgcagctaccagaccgaggaggtggctccaagattttccaatgccgtcgaagaggaaaagaaggagcccggcatgttccgtctgtttggcgtcaatttgattaaccatgctaggagtagtgctaccgctgacaagacgagtgtgggagcaggggaaacatcggcgcgagctgctggttcttttgaagactctgctcagctatcaagagtgacgaaggatcatacgcacatggtgaacggaagcccccgagaaatccaaagccaccagagttgcagtggaaggagtcgtatcaaggttcaaatgcatggaaatgacgtgtgcagagctgtggatttgggaaatctggatgggtacgagcagctgatgggtgaggttggagagatgtttgagatcaaagaccttggctccaaagagaaagaggaatggaaggttactttcattaacgacgagaatgagacaatggaagtcggagctgttccttggcaggagttttgccagatggtgaggaagatcgtgatccattccattggagacaggggccatatggaggcttgcccttgcctggggcaggatgggaagagggactattagaagaagggatttttttttttggctggggcagtcaggagatgggtgctgctgaaacatgatggcgtagcttgtcgatgacaaagaaggcaacagattggttgctggcgtcagttcttccttgagaaaaaaattcagtggaaggaagaagtgatgtaacataggatttgcagaaaagatttgataatgcgtcttttagaagtttggtttggtttaaagatgacaagttaatgtgtgtctagtgatctgcctaaagccttagcgacgggcaacaagcaataacaaggatggatgatgaccttaccttgggtatgttagctgtgtaaatattatgtatgtatgtatgggacattaaattggttggcatacttgactcctgatttatattgtacgtagtgtgttgcagtgctctggattcagttgtgatgtgctactattacaagtagtagaaggaatctggtttttagtccaagaatcaacatcaatatgtcaatcacaggcacactagtgtgtaattttagatctttttctgacatcca

SEQ ID NO: 43567 - DNA, 1009 bp, Zea Mays
acagccgcactctcctccctgcagctcgctccatcttcctccctcccatggtcgtgccctcggctccctctgttcaagcccccatcagccgctccagttcgccatgggccaccgtcgcacatggccatgccaagctggccgtccctgctccatccgatagcgctgctctctgcatctcccatggtcgagctcaccgcgtccctgtgtttgagtccgtcgacctccagctcgccagccgcgccctccctgctcgcccagcccctctgctcactggtttctccccacgccagcagcagcaagcagccatggcacctccttcccctgctcgccctccctctgtgcccagcctcctctctgttcttccgtggagcaatagccctcctctaattctgcagcagcagctctcccttttttcatttgttctccatgaatgaaagcccaagcgccagcccccctccctttcgtcaagtgagagttctagggaaatcgatggagaagaaaccgtgtttcagttcgacgcgctctaggtgtttgatggaatggatgaaccggagatccttgttgctcttgcgaaatccgagtctatttagtgttggtacgttaattgatcacgtgatgtgaaaggcaaggtttggattgatctcaagataatgctgatggacgaagctaaagtgggtgaatcaaacaaatgccaggatgagagatgctcaccaagtggtcttcatctaacaacactaacttagtgttatcccaggcaagccccggtgtatttgccacctccttgctgtttttaaacttttatcacttatatgatgcattaggtggtaggagttgaatgattaaacctttgcataacttccttgaactattgattaccatccttgatacctgttttaaaaagctagatgtgcttagtatgctcatagactaagaacaaaatgttttgatctatgaatcatgtttttacaaagaaaagaggctggagtgatgaaggtatcaaaggccttga

SEQ ID NO: 43568 - DNA, 729 bp, Zea Mays
taaaacctaaatttctgaaaacccgcgcggctgtattctcttcgctgttgagaccgcgcgcgtgcgcccgaacgaagctacccgcaacctcgccgagcgcgcccgccgccacaaccccgcgcggcgccggcaaatttgtagggtccgtgtccaaatagccagttcacccgttccttatcttccgtcgttcagccggcgtcctctctctctctctctcatggcgacgactgggtgacctccccgcccccgccgctctacaccaggtgcccaggtcttcctcgggcccttcaccgaagagcagccaacaggtatgcgcaccccttctcttcccttcccgctgtgtgaagctgaggacccaaaccctagctgacactgttttggctatttgcgtttggatcggatttaatttcaggtgtatacatgtagtattatgctttcaaacttgattttcttgcaaaataaaaacatgggtccgctcatctcccctactaggttcgcctggcatatgtaggaattttagctatcttttagccgattgaatcaacttctagaatcactacataaacttgtattcgttgagatttacttctttaggttggtgacatattttgccagattactgggtatattgtcagctatattagtttactaatggattttgccttttcttggtggtagctttaactgcgatttcggttgtttgtttcgtttctatcagatattaataat

SEQ ID NO: 43569 - DNA, 261 bp, Zea Mays
tgtgatgaggcacggatcctctactttatgatatttcacgtcgtcaaccaagcagttgtttcctcctttcatagagaaatacgtccttaggctatgtttggtttctttagtctagcgactaaagtttagttaggggactaaagtttagtccctaacatatttggttctggggctaaaaatagtaagaatatactaaatgactcataaaaagactaaaatagcatttaacattctcttgctattagtacaattaaactaaat

SEQ ID NO: 43570 - DNA, 2982 bp, Zea Mays
tttaatgcatataattctttagagcgaaaggaattgatcaactgaaggctgaacccgccctttctccgcaatcgacttgcgtttctgcacactttcgtgtgccgcgtgcgcctccagctccatgtgacgtcggataccgcgttccgttccacttcccacctgtattttacaaccccctagttcttgcctctccttttgttgtctgctactagtagagtactggtactggtcgcgatttttccgctaaagaaaagcaccggatccattttcctctcgggggagcggattgggtagttgcctgcttattgactagttcttggcgtggcggctaactattgtgaattttgttttagtctgtcctgttggcttcttccttccgcttctcctttctggccgccgaaggcaaaccacgcggcttgttcttattgaatccatcaaggacgcaggaaagataggatcttcggctccgattctcggagcaacagcgcgaccgcagcgggttttggtgcttcctttctttagggttgtgtccttgcagaagttgctctgtggaatggggacctgtgggaggagagttctgggggtatggtttttcttctggttcttgttgacacttgagcagtgcacatccctgaatcgtgaaggtgctgctctgctgagatttaaggcggcgatcgaggcagacccatatggtgctttgttggactggaatcaagagagtttgagcccctgtacttggtttggtgtggaatgctccgatgatggactagtcatgtctctgagcttagcaaatcttggtctaaagggcgttttgtctccagagcttggaaagcttatgcaaatgaaatctctaattttgcacaacaactcattctatggtaccatacctagagaaataggagacctgcaggatctaaaaatgttggatctgggatataataatttcagtggatcaattccatcagagctacaacacatattatcgctagaatttctatttcttgaaggtaacagactttctgggcgttcaccagttggagtacaccaactcactaggatatgtgaacatgaaaatcaagtacctaccactaccacaaggattgttacaatcaaaatcagaagactgttaatgagcaaacaaaaagattttaaaatggtcaatattacggggcatccaataagatttccattgaattctccggcagcaccatctccttctgatcccattccaccccctcccgcaccaccatctccttctgaacccattccacccccttctgcaccaccaagccaagagaacaagagcaaaagttctgcaacactatatgcatcgattggagcagttattgttttttttatggtggcctcgtcagcactatgtttcttttactactgccgcaagaagactagcactgttgtacctttgtctgcaaacagttcaagcaggcaattgcagaccactaccatggaagggataactttattcagacgatctgagcttgaaacagcctgtgaaggtttcagcaacataattgacacactacctggatttacactgtttaaaggaactctcccatgtggagcagaaatagctgtggcgtctacatcggtggcttatgcaggaggttggtccgctatagatgaagcacattacatgaataaggttggagctttgtcaaaggtaaaccataagaatcttttgaaccttgtgggttattgtgaagacgaaaaaccattcattcggatgatggtgttcgagtatgcttcaaatggatcactatttgagcgcttgcatgttaaagaagcggagcatctgaattggcagtcacgcctacggatagctatgggagtactgtactgcctgcagtatatgcaccagcagaacactcctgtaaccctaaagaatctaaacagttcatacatatacttgactgaggacgatgccgcaaaggtttcagacatcagcttcagcgttgacaagagagaagatgatgagtatgatgctcctgatgagtatagcacagtgtataagtttgctttgctactgcttgagaccatctccggaaggcgtccatattctgaagacgatggcctccttgttctatgggcacgcagatatctcacctgcgctagcccggtgatgggtatgattgatccaacgctaaattcagtccccgaggagcatgccagagcattatcagagctgattcggttgtgcctaagtgaggaccgaaggcagaggccgacaatggcagaggtcaccaagaggatgcaagagatcactgggatcactcaagatcaggcgattccgaggaacagcgcactttggtgggcagaacttgaaatcatgacatcatgaagcctgtcgactgtgcaactgacttgccccgactctacagctcagtccatcttctatgagaaccgtaggaaattgtacagtttacccttttttaatacaaagatacacagctcttctgtgtcgagaaaaaaaaatgtgtacagtttagtatttttaagcggggcataagttgtacagcagtacaggtatacccagggtcacaattcttccgttctttttttaaccaaatatttattttgttatttgttccggggtcaattctttcattctttttgtagccaaatatttatttcattatttgttctatggaaagcaaaacaatctgagaaagcctgcaaagtatttaggcagggcataagttgtacaggtatgcccgggcacacaattcttttgttttttaaccaagtatttacttcattatttgttcttggaaagcaaagaaatccaagaaagcctgtgaagtacaaggatatgccatttgtgctgtgaacagaaaacaactggaacctactgtagctattaactgaaacagtcgcagccacagcaagctcaaacgaccagcattgctggatccattttattgaaatggcaatcgctggtttgtcttttttttttcttatata

SEQ ID NO: 43571 - DNA, 389 bp, Zea Mays
atcctgagcgcgatgtcgcccgagacgcgtaggggtagagagaagaggacgacgctgctgctcgttactgttggaaagggctgctgcatatggataggagcatcatgaactaatggtgaacatcatttgcaaattttacttgaccaaggatcattctatacaacggaggaagatcacgagaagtaaaagtgttgtctaagatgtacattctttggctgtggagtctgtagactatacatatacacccattgttctggcgaggctgtgtacactgtacatcaaatgaattttacgatacttcttgttgcgttttacgctacaattatctcaaatcacttgttgtattgtacactacattttttgcctcgcatggaaacttaactactgga

SEQ ID NO: 43572 - DNA, 3485 bp, Zea Mays
aattttcgcgcacagcagccgggcgccggcggatcttcccagtttcacaccacacgctccacggctggggatcacgctgtcacgctcacgcgcccctccccccgccgccaacgcccacgctgcgagcgcgaatccatcttctctacctcctcgtccattcctagggttcctcctctgccgaatcgcggggaactctgcgggcccaatttggtagggtaatctcctaccaggaggtcaaattccagtcaacgccgcttggttttgtagccgaccggtcgatttgaatccaggggcaccgattggctgggtgagagggcaggctcgatttgaacccgcctctgcccttttcgtggaagttttgggtcttattaggcgcggattactggggtctagggatgtggtagttactagctgcttgggttaggcggcgcgccgaggtgcttccgtgcttggctgactagtgtcaatggcgggatctgtcggcaaggccagggcggcgctgcggtcgtccccgaagcggtacagcggcacggacccaccgttgtctctggcggggccgacgttggcggatctgcagaggacggccgagctggagaagttcttggttgaagcgggcctctatgagggtaaagaggagtccgcgaagcgggaagatgtgctatccgagattggtctgatagtcaaggaatgggtgaagcagttgactcgtaagaaaggatatgctgagcaattggttgaacaagcaaatgcaatcctttttacttttgggtcttacagattgggggttcatggacctggagctgatattgataccctttgtgttggaccttcatatgtgaaccgagaggaggatttctttgtcacactgcatggcatattagctgagaaggaagaagttgctgagttgcaacctgtacctgatgctcatgtacctgtattgaaatttaagttccgtgggatatcaattgaccttctctatgctagcatctctctttcagtgataccagcgcgcctccagcccttcactcaccctccagctgcctcccctcctctcctacccgccagcatccgccagcccctcctctccaactgccagccgccaccagcagatttcgatatttctcaaggatctgtactttgtgatgttgacgaagcaactgtgcgaagtcttaatggttgcagagtggcggatcagattcttcggcttgttccaaatgttgagaatttccggacaacactcagatgcttgaagtactgggcaaagagaaggggtgtttattctaacattactggtttccttgggggtgtgaactgggctctgctggttgctcgtgtatgccaactctatcctaatgctgtgccaagtatgctggtttctaggttcttcagagtttttactcagtggcaatggccaaatccagtgatgctatgtgcgattgagaataatgatcttggtttttctatatgggatccacgcaaaaatccacgtgacagaaaccatctcatgcccatcatcactccagcctacccatgcatgaactctagttacaatgtttcaaccagcacactgagggttataatggagcaatttcaatttggcaacaaagtttgtcaggtacttcctgaaaatttacagctgatagctaatgttcttggtatggtctcactgcgtatcttttatgcaggaaattgaacttaataaggccaattggaatgccttatttgagcctttccatttttttgaggcatacagaaagtttctagtggttgacatagttgcagaggatgacgatgatcttcgtctttggaagggatggatcgagtctcgtttgagacaacttactttaaagattgagcgggatactaaaggaattttgcagtgccatccgtacccatgcgagtattcagatcccacaatagagtgtgcacattgtgccttctacatgggcttatcaaggaaagaggggttgaaaaaacgtggtcaacagtttgatatccgtgggacagtagatgaatttatgcgtgaaattggcatgtattcattgtggaagcctgggatggatctggctgtcacccatgttcatagggagcaggtcccatcttatgtatttgagcaaggatacaagaaaccctgccctacaatgcatgcaaaccaacaagagcagtctgatggagatggaacatttagcccatatctggagagtcagcttaagagaaagtacatttccgatggagatggtcatgtggatctttgcaaatctgtaaaaagggcttcagtaagcccacctggtgtgggaaccccacctcatcttggaaatagtgtcagtaacgttgtttgtgacagtccagtcaaattcgtttcaagtgtcgtttgcagcggagcgcatgcttcctcatcacatgatgatataaatatagaacaagcacaattaactacttcaccatatggatctgaggatacctcagcatcaggtacaagctgtgcagcagtgggagcagttattttggctgatgaatccagcaagctcggtaacttgacatcagatcttgaagttgatacaattcagacaatgccactgcacacatctttagaatgcgtcgctcaaaagggtgaaacaaagcttgaggaaatcagaaggttggcgagcaacaattgtgctgagtttctagagagctaagttcttgctgacaaggtacacttagacttaggtgggcatgaagtgaattgaaacatcattccagacaaggtttttcttcctatacttcttgtcaaattaagattgtagtttgatatgatctgaactctatgcctgcctttctattcttttcattgattaactgtttggatccattaaaagtcaatgaaacatgtggttcgaagcggtttcgaaaggtgatgcaggggtgaagtttgcatagcatcgataggccggaaatcggatttgaggacccaatgatatgccgctgcatggaaagtttcatcatttcatgcctgtggtcggtttgctcgtgaagattgcttttgttcgctgtggaagcgggtgcaagtattacacagcagcaatatcgggactgttgtgaaggatgaagttgagagtcaacatctgagaaccatggagctcaccatacgccacaaaggaactaagctgctggtttaggcatggttaagagagtcagtgctggtcctttaggttaaataaaaactttgcggggctgcacggtgtgcagaaaaggttgagtctagggcactaggctgatggtctatgtatgtgatgtacgcagataggcagatacctatgcgttcaaagtagcgcatcaaattttggccccattattttcactgcagtatcatgatgtgatgttgatagtagagatagagcaagtatgatactccctccgtccaaaagtttgtcgttcttgctttttaaggagtcaaacatcttgaactttgaccatatttatataaaaatattattatttatagt

SEQ ID NO: 43573 - DNA, 372 bp, Zea Mays
tctaaaatgcaggatttacgaagagtgtgttagaggaagtataaattaagcgtgtataaattggctcgtcattcgcgaagaatggtcaagttaataatatgagaaaaaaatagatttagtatttcatatgatcaattaaatgctctagataaatatctagcactaccgaaatgagtgaaagcgaataatatcgataagtttgtttctgttaggattcaatccagctaagttaaaaataatgtagatgatgagtcgtgtctaggctaattatgtttaaagtgtatgatttgtttgcgatgtttgtgttaggtttgtttaatttagagaagcgtaattattgcgcttagtcgtatgtcgataactaatattatc

SEQ ID NO: 43574 - DNA, 1887 bp, Zea Mays
tttgacttcatgtgccttattttagaaacttgagctcacaaactttatcttatttggtctttatatggtggaatcatgttattttataatctctgttcattcagtcagtcgttatgaactctcatctaatcgctcacttcattggtcgtgttgtatcaagacatattgcatggagtaaacaataacctcagttagccaaatcaaaataatattatacagagagcggagacaatcaataaaaaatcttaaatttttttgatagataatttatgtgcgtattgttgtaagccgtcgtaatagacgggcaaccgactagttggccatctatacacgtgcgcctccagcgagtccacgctgcacgccagacgccacccttttcccatctcccgtggccagccagacaaacaaatctctcgcgcctcccactcctccccgccactcgccgccagcgaccaaccatcgcccgcccagcagcagcacggtcccacgccaggactcgacccacgcgcggctagctaagctcccgccgccatgatcacggccctgcaggtctccggcggcggcctgccgctcctgttcgcccggcgccggcgccgggcgttccggccgccccaagcggtggcgtccgacgccgccgccgccgccgagggcacggcgagggaggatggcgggaaggtggccctgggcgggtccggcgtagccgtcaccaagctcggcgtcggggcgtggtcctggggcgacaccacctactggaacgagttccggtgggacgatacgaagctgaaggcagccaaaggagcgtttgacgcgagcatcgactgcggaataaccttcttcgacaccgccgaagtgtacggagcaggggtatcgggagcgattaattcagagagtttactaggaaggtttatcaaggagaggcagcggaaggagcaggtggacgtggctgtcgcgaccaagttcgcagctcttccatggaggttcggtcgtgggagcgtcatctgcgcgctcaaggcctcgctggatcgccttggcgtctcttcggttgagctctaccaactccattggccagggatatggggcaacgaagactacctggacggccttggagacgctgtggagcaagggcttgtgaaggcagtcggggtctcaaactacagcgagaaacgtctccgagacgcgtacgagcgcctcaggaagaggggggtcccgctcgcctccaaccaggtgaactacagcctgatataccggaacccggaggagaacggggtgaaggcggcctgcgacgagctcggcgtcactctgatcgcgtactccccgatcgcccaaggtgctctgacgggaaagtacacgccggagagtcctcctaaaggccctcgaggacggatatacacgccggagttcctgacgaagctccagccacttatcaaccggatcaaggagatcggaggaagctacgggaggacttcaacccaggtggtgctgaactggctggtgtgccagggcaacgtggtgccgatcccgggcgccaagaacgccgagcaggcgcgggagttcgctggcgctctcgggtggagcctggcgcccgacgaggtggaggagctccggtccatggcgcgccaggtcaagcccgtcatcggcttcccagtggagaagctgtgaccacccccatggcactggtatatatcaggttgcatgtacacgagatagttcacgggcaacatactgatgaagtggttcctaaagagcttcgggctatatgacagtaacatactgatgaagtggttcttaatacaaggactgaagaagtggtgatgggagggctggggtgtctcatcacagattgctacgacagaagctggtagtactatttcagcaggagcaacatcg

SEQ ID NO: 43575 - DNA, 2159 bp, Zea Mays
cacgctttgatcgcttcttttttctctccatcatttctccccgtttcgtctcgcttcttttctgtcgcctcccgtttcgtctatctccggccggcctttctgctgcaaggaaaccaatattgtttgctggatctttcaaaaagggaaaccgaattcccgagagcgagcagcagggaatctctgctgaatccgtaggctccgaattggagctggaagtgtagtgatttcctgattggggacataaggtggggtttgtccctactccccagtgagctccacgcggtccctgctgttcttccagtcaaaattctgtacccttcggtgctggggtcaaggaactaggcgtgttgtcctgcgcaggaagaaggatattgtccctctccaaaactataaacatgggttggttgagtaaaatatttaaaggtccagtaaatagagtttcaagaggacactacaacgggaactcccatgaaggctattcagctcagcacactaaatcatatggtgtgcatggcaatgaggacgaagacatggatcatgctattgcattatccttatcagaggaagatcaaaggaagggaaagaccattgatattggtcataacctagctgaagacgaacagcttgcacgggctctgcaagaaagtatgaatgatggacctcctcgtcagcacattccagttgaagatgttaactcagaaagtactccagcaagcatcttgccctcaaatattttccgcacaagtggcttgagggtttgtgctggatgcagaagtccaattggccgcggtcggtttctcagttgtatggactctgtttggcatcccgagtgcttcaggtgttatgcttgtgatagaccaatatcagagtatgagtttgctgttcatgaaaaccatgcctaccacaggccctgctacaaggagcgtttccatcctaaatgtgatgtttgcagtagctttattcccacagataaaaatggcctcattgaataccgggcccatcctttttggatgcagaagtattgtccttcccatgaaaatgatggtacacctaggtgctgcagttgtgaacgaatggagccaaaggacagtcaatacataacattagatgatggccggagactctgcttggagtgtctgcatactgctattatggagaccaatgaatgccagccactgtacattgatattcaagaattttatgagggtatgaacatgaaagtagagcaacaagttcccttgcttttggttgagcgacaagctttaaatgaagccatggaagcagagaaatctgtgcaccaccttcctgaaacaagaggcctctgcctatctgaggagcagattgtcagaactatattgaaaggaccaattggaccaggcaacagaatcatagatatggtcacaggaccatacaaactcattagacggtgtgaagtgactgcaattcttatactgtacgggctgccaaggctgctaactggctcgattctggctcatgagatgatgcatgcttacctccgacttaaaggataccgaaccctgagtccagaggttgaagaaggcatctgtcaggttctagctcatctttggcttgagtcagaaatcacatcaggttctggtagcatgtcaaccacctcagatgcgtcatcgtcatcttcaacatcttcatcatcgaaaaagggcgcaaagacggaatttgaaaaaagactcggggagttcttcaagtaccaaattgaaacagattcttctgtcgcttatggagatgggtttcgagcaggcatgcgagccattgagcggtacggcttgagaagcacccttgatcatatcaagatgacggggtcttttccatgctgaagctggtttttttttacctcggcttggatatgggtatacatattttttttggagaacttttggttcaggttatacatacgaaaagccgaacttctgtgtcgagaagaggcataaggatttagctatactgtccattgcaggaaaaaaaactgtttcccttttcaattataaaatttcacagtgcagacatgaaggtatgtggtctttagcttggccaaccttgtggaatgctgtcacttgatgcaaaagaaatttcgaatacatatgctttgctgtgcttgaaatgcaatggttggatgctatgct

SEQ ID NO: 43576 - DNA, 709 bp, Zea Mays
tctaaccatttgcggcggctgccgcaacaggctcaacgctaacgcgcacacacaatccattgccgcctcccacatctcactctcgttctgagcttccggccatggcggtgacctccggagcccccaacgacaacggctgggacgttggcgccgctgcgactgacgatgagcatcgcgtggatctggaagtcaagcacaaggacaccggcactagggactcgccagcaccgatagcggcagctgcgcctccgtctgatctgcttccactacctgcgcctccgtcccaatcccgagtggctggaaagcttggcccctcagatccaaagcacctcatctatgcgggttccaaatcaaagcatattaaagctgcacctgctgcaccaggcaagaatcgccggccacctttgtctccaccagcacctgctgtcaatcgtggtcgtggatctgtgcgcacacctttgggatgtgcttttgggagcggtttgcacatctgctgatgtgcacctatgttgtaagcacattgtatgtgttgatttggaactttgaatgtttaatgtggtgaactagtggcgccatgctaggggtggtggacactaactggatattaatctagctgtgaacatctgatgtctgatgtgatcaatggtgttatgatttgtgaaacacttaacattgaccactctatcagtcttattgttgatgtttctta

SEQ ID NO: 43577 - DNA, 762 bp, Zea Mays
ccgatctcgtgatttcgagttcgatttaattatggtaagctcctccgctatccatgttaattaacttgtatggtaggatgaaatagacatattggtcgtgaagattaccttgtccgtagcatatgcgttgtggtatatttgatgtttgtagtttttgcctcctcgtttgtggtgatatgaatttaggttcatatttgtggagtagtcgtgccaagtgaagcttaggtttaagatacaaattatgctagcaatgtgaaagataagtttagcgttttaaatgtttagccgatagtgatagtagtattgttgatgggaattcttgtttatatagtgaggtcgatgatttactctgtgaatcattatattctgtgtttagtaatcgattatgtgtcatagatgaatgttgactgctacccccaagtatttagaagtaaatatcgttgataagtttgatttggttaaatcaaaataacttaaataatatacgtagtgttatgtcgacatctagtgtttgtgtatgactattatgacagctttctagcaaacgcttaattttctaccacgcggttttgggtgaaatttgatcatatgtaatgacgctctacttgttagaacaattagtgcaatgttttcttagctgatgtgctatgcataatggtttgtattgatagttctaaaagttaatcaaagaacttctattcattgtcttaagttataagtatctgaggttggtgagtccaagtatcatcttctaggaatgtc

SEQ ID NO: 43578 - DNA, 1954 bp, Zea Mays
tgttcacaaagcaatcgccaagaacatcgatgtccattcgaccattcctgacaacccatatcccaatcaatctaccacctctccggccgttccacactgatcggatggcggccttgaccttccacccggccgcctgcttcttcccacgaccacgagaggcagcagcgacaacgaagcagccgctccaccattactgctcgcctctccggaccctcgtccctagaactacaagaccgtgccttctcagggccaggtcctccaacgggctcccgcagaccggcggcgcctcgttcggcagcagcaacgaggtgctggatgggacgccgacgggagatggggcaccggggcaggggcagcggggagggagcaccgtcagcatcacggtcgtcggcgcctccggcgacctcgccaagaagaagatcttcccggctctcttcgccttgttctacgagggctggctcccggagcattttacagtgttcggctatgcccgtagcgagatgaacgaccaagagctcaggaacatgattagcatgaccctgacgtgccgaatcgacaaaagatggaacagttcctgaagaggtgcttctaccagtctgggcagtacaactcggaggaggggtttgcggagttagacagaaagctcaaagaaaaagaggcaggcaggctaccgaacaggctattttacctgtcgatcccgccaaacatattcgtggatgtggttagatccgctagccgcaccgcgtcgtcttcaagcgggtggacaagatttatagtggagaagccattcggccgtgactcggagtcctccggcgagctcactcggtccttgaagaagtacttggtcgaggagcaaatattcaggatcgaccattacctgggcaaggaactggttgagaatctctccgtcctccgcttctccaacctcgtcttcgagccgctgtggtcgaggaactacatccggaacgtgcagctcatattctctgaagatttcggcaccgagggtcgaggcggctacttcgacaactacggcatcatccgggacatcatgcagaaccacctgctgcagatcctggccctgttcgccatggagaccccggtgagcctggacgccgaggacatccgcaacgagaaggtgaaggtgctgaggtccatgaggcagctgaagctcgaggacgtggtggtgggccagtacaagggccactccaagggcggcaagtcgtacccgggctacgccgacgaccccaccgtgcccaagggcagcgtcacgcccaccttcgccgccgccgcgctcttcatcgacaacgcgcgctgggacggtgtgccgttcctgatgaaggcaggcaaggcgctgcacacacgacgcgcggagatccgggtgcagttccggcgcgtgccgggaaacctgtaccggcggaacatcggcgcggacctggacaaggcgaccaacgagctggtgctccgggtgcagcccgacgaggccatctacctcaaggtcaacaacaaggtgcccgggctgggcatgcgcctcgaccgcagcaacctcaacctgctctactccgagcgctaccgccgcgagatccccgacgcgtacgagcgccttctgctggacgccatggagggcgagcgccgcctcttcatccggagcgacgagctcgacgccgcctgggccatcttcacgcccgcgctcagggagctggaggacaggaaagtggcgccggagctctacccgtacggcagcaggggccccgtcggcgcgcactacctcgccgccaactacaacgtcaggtggggagacatcaccagcgatgacgacggcgccttctagctctagacagagacatgcatccatcgattcgtgacgctacgccttattgtggaagggacacgcagttgtatccaatccaatcaaatttaacaaaaatggcaagggggcttggcacagaataagaac

SEQ ID NO: 43579 - DNA, 1466 bp, Zea Mays
ttaactcacgctcatcatgctatgaaaaactggcttaaaaaatgagaagtgatgtcattatgagcatgttcatgaacgagctgtatggtttccaattggataaccaccgatggtacccgctagagctcaggaaagacaagcctgctaaaatcaaggcaaggaatatcaaaagaaaagaatcaacgaatgatgtagaagctaatattattgatgatgagggtgatgaggtcatggtggacgtagaagaagctattgaaggacaacctgaagtcaatggagtttccaatcagttgatcaaaactctgaatatcactaaagatggctcaagcagaagcattgatgttctctctgattcaacagcacaagaatcatttttggaggcggtgaagcccagtggtcgtatcaatgcatgcttggccgtagggaaagatatgctctacttgtatggaggaatgatggaagtgaaagatagagaaattactcttgatgatctatattcacttaaccttagcaaacttgatgagtggaagtgtatcatatccgcctcagaatctgaatggttagaaatttctgaggaagaggatgatgatgatgatgatgagactgatgatgatgaaaatgaagagggggatgctagccagacagatgaagatgaagaagagtctgatgaagatgctgcaaagaacgtgtccagtgctgtgtctctgctgaagggtgaaagtaagaccatgcgtagaaaagagaagcgtgctcggatagaacagatcagggtcatccttggcctttctgattctcaaaggactccagtgcctggagaatcactgagagatttctacaagaggacaaatatgtactggcaaatggctgcctatgagcacactcaacacactggaaaggagctccgcaaagacggttttgatcttgccgaaactcgattcaaggaactgaaaccgatacttgacgagctggctgtgctggaggccgagcagaaagctgaggaagaggccagtgcgtcgactagttccaagagggacaccaagaaacccaagcagaagagcgcacgaaggtagctttggttctgaacgagtgtgtaagcggaagccagctttagatgaagttgctccaggaagaggccagtgcgtcagctagtcccaactcccaaggtgtgaagaggggacaccaagaaaatccaagcagaagagtgcagggagatagttttggttctgaacgagtgtttaagcgtaagacggttttaaacgattgctcaaatgctcaagttcctttgaggggatttccattttctttttgaacccaagtagacaaaattgatatttgttgttttataatagtgtatgtatatactcgtacgttgaaatttgattcatgtgcaatcttgaccgtatattctcccactattcgactaaacgaacgatcttcctccacacagcatagaccatagagctcca

SEQ ID NO: 43580 - DNA, 1459 bp, Zea Mays
cgacgagggtgcgctgcttgctgggagcctgggagtgtgcaggagatggccttcgccgtcacgctcacgccgcttcgggcaactgctgtccttgccggatggaggcggcgcccaggggtgactcctccgcggttcgccgtagtcctggcgacgtctaccggagtcggcggcgaacggaccccgccgacgttcaggcgcctaagggaggagctcctccagctccacgccgaagccgacctcacccaatccaaagcaaatagcgagagggtaagacttgtgcggttgactgaggcggctgagaatcttaagaagcgagctgcaaccagtgtccgaatgggcaaagagagcgaggctgtggatttacttgtgcagaagaagaaattgaccaaagccctagagaacattaaagagcgcattgaggtgcttgacatgctttcggcaaagattagtgaggtaatttcgatgaagcaaaacatgttaattgagtatgccttgcgtccagagacatctaatggtgaagactctgatgacaagataagggttttctccagtacagtcaatgttggaaccaatggagctgggagtagcgattcacacccaaaatcagttgaaaaggaatcttttgagttgagaaatgaggcacatgcaattgcaagcatggctgacgacgctgagcaaaatgaaatcattggaatatgaaattgaacagttcatcaattcccaatcagttgaagaggtgggcagtgagaagcagagaagtgacaagtggcaaaggttatctgacatacagatgcttataaaggaaactagagaaaagattgcgaggattttgggtatgatagtagaagagactgaatctgggacttaagatgatagcaaactacaaaacagtgaattagtgtcatccatccaccatctttttcgtgggtaggtacccaagttgacaatggcttaccagtagttggatcttgcaagttggtcccagtgccatattccgcaggactactccgcctaacaactagagggaatgcgggtacaggtcgcacttactgaaagcttctgaagccgaaaaatcttgaccggatgagcttggttgccgaccatatccaggtcatccctctgcgtgcatttgcatagagaaggctgcaggcctgcagcctagatatttcacgagcacttcataattttcaatgccatccaatgcttcaagctttctgacatgagtgtgcagatgatgaaaaactccaagatgggtctctgtacctactatacaacaagaagaatccatgtactaaatgagaatgcgagattgttaatttgttattatatgctccttgataatttttttctggttctattttgtttcctgaaccttgcataccgcatgtattatgttactagaaatagaacgtctatcagcacagcagacagcagctccctttcactggatttgatgtcg

SEQ ID NO: 43581 - DNA, 1372 bp, Zea Mays
gaaagctacaggcaaattggcttctggatcattcgaatgctgaataccatgccaatatgccatgaatcaatctgctcaggcagctgcataactgttctgagagctttgggctgctataagtacagacagaacgagaagcaccggctctaacaccattcatctcagattcagaagccttcaacttcaaatccttgcattttgaagtttttgcagttttctgactcttgaggatggaggctattcttgaaagaccgaaatcttgatgacactctgtaccccttcagtgctggcatcaatctagcttgtcgcaaaaacatacaagattacatgcggcaccacctgcatattgaagaaaggcaggttgcagatatgtgcctggacctgtacaaggaatatggcaccacaatggctggccttaaggcattaggctacgaatttgacaacgatgagttccatgcaactgttcatggtaccttgccatatcacaacctgaggcctgaccctgttttgaggaccctcctactttcaattccacagagaaaaatagtgttcacaaattctgacaaagctcacgcggaggaagctctgtgcagacttggtttacagggttgcttcgatggcgtgatctgcttcgagacactgaatccctgcaatggtccgagcgcgttccgagacggcaacggcatgctgttcccagatgaaacgttccccgactcggctgatctgaatgaatccgatgggttcagacccatatcacccatcctctgcaagccctccattgaagccatggaagctgtaactcggattgcaaacgttgatcccaagaaaacaatattttttgacgacagcactcggaacatagcttcgggaaaggcagcaggcttccatactgtgattgttggcaggccgacacttgttccaggggctgaccatgctttggagagcattcacaacatgaaggaagctctacccgagatatgggacggccaggatcggtctgagtctgatgctcttctttctcccactgctgtcgagactccggtggctgcttgaatctgggggctatgtatccttcctgcgctaccatgagacctgctaccaatagttttgggtttggatagtggatgcagaaggtgtaccctagtagcttcattaatgagaaatagcattgcactcttatgttagttccaaatattaatggaactgtatcagttacattacagcagcgtgagctcaagtcgctgaacaagcaatatgcagtcagtattctgcagatgttcgcaccattctctatgtaccatgattgtacctcagaataaactgacagtactccaattctaccaagcttcaaaggcttacgattacattgccc

SEQ ID NO: 43582 - DNA, 2454 bp, Zea Mays
cgaatctcaatcttcatttatgccacccctttttcttctcctccattattccattctttctgcccatgtagcctcaagcatccatccccatctgcgaccatggctggcggctccaaagccatgtcaccaccattgactatcccttcttattttccgtgcgtgcatctgtcatgcatgtgtcccttcttcttcatcggcagtttccctcatctcttacactgactttgctacggatacaccatcgagatattatgaagagatcgacaacctattccagcctaatctggtgggggaggtgtcttcaggccgactccctatgtcgtcgcgcaccgccgcatcacaggcaaattaaaccgtagatccagacacatcactacaccagatgagtgagcacaagatgtacatgcatgtaccagcagtccagcacacagagaacgggcagctggtgcagcccagctgtgcacaacatttgctagctgcctcgcgcgcgccatgcatcctgcagcggcacacaaacacgccggaggcatgcactcacgttcttctccccctcctcgctctaccgtgtataccagtctagctacgtactgccagtgccagcagtctgtgccgtgccagctagctagtcgatgacgaatatggcaggaaggtaacagctagaggccgccaaaagatatcatgctgttggggaaacgccaacgatctcttgttgcccttctcgccaccacgtcggtcgtcgttgcttgcaccacaccaccagagcgacggccggggttcaccgtcgcgagctcttttggaaacgagggggcggcgctgctggtttcgtctaatccaccattccaccatgcttcttccttcccttcccggccggccgcaagcagggacttgatctcaagagacgcgcgcgtgtataaaatggccggccggcgcttgctggcctagatcctcacccatctatcgagctaggactgctagatcctcacctgcccgactctcgctcgtcggttcgatctttcccataggaacgcacggtgctagtttcgagtgtagcgcggcaatatggaggcaaagagcgcggccgcggaggtgctcaggaagaccgacgctggcggagacaatgagaggtataggcatggggagctggggcgcgaggctgtggaggaggaggaggtgaaaccgcgaagggtggcggatgcgccgctgccggcggagaggaagaggaagcgcgcggcggacccggaggacgacggcagcgtgagcgacagcggcagcggcagcgaagggcctccgcagcagcagcagcaggtgaagccgtgtctttccccggtgccgcctctccaacggctcctgagtgcgtgccgcgccctgctcactggctcctcctccccgccgacgccttccgctgtcgccttgatccgtggcattatggacaagattgggccagacgacgtcgggctcagggacgagatccgcttcttcaacaagatgaacgccgctggtcttcaaaaccctcctatcgtcacatgcaaacctatttacgagggcgccaactttacgatcgcggtgttcttcttgccactgggagcggtcatgcctctccacgaccacccgggcatgacggtcttcacgaaggtgctcatcgggtcagcgcgcctggaggcctacgactgggtccgtccccgtgtcttggccggctgctgctcgggctcccgtcgccggacgctcgcgaagaaggtgcgggacgaccacggcgtcaccgcagcggcgtccgcctgggtgctgttccccaacagcggcgggaacatgcaccgcttcgcggccgcggaggacgcccactgcgcgttcctcgacgtcctcacgccgccctacgcgcccacggaccgaaggcgctgcaccttttaccaggacctcccctacgaacaccatcgtcctcgtccctgtacctgtaggtcgacagccacaggcggtgccatctgtgacgacgacgtgcttgttgcggaggagcagacgtgtcggctggcatggttggaggaggtcccgcagcctaggaacctgagggttgtctgcttgccgttccgaggcccaacgatcttctagcctcatcaacagcccatccggcaggcagaccctgcttactatctctagctatgagggaggcatagttgatcaaaaaaaaatattgtctttttccttttggagaataggatcccgtgctgataaatgatgatgtttacagtatgtagtgttaagctactctactgcgtcactgagacaaaacgtattcagctcttcacaggtggacgacaaagccactggcttctgtacttctgtttctgcgatgaaccagatcaccgccatagtcaatataataggctctaagtctgcattctcccctttcacatatctgcagccatagtcaattttccctgagttgtacacctgactattctcttg

SEQ ID NO: 43583 - DNA, 2217 bp, Zea Mays
cttcctttcccaactcggtcgacgcgttcgccacggctgcgcagtcctcctcctcgcctccgatcccctcccttcgacgatgcgagcacacccgctcatcctcttcgtacctgcaccgccacctcatcctcttcctcgccgcgccgacacccaccgcgctctctccctcccgcggcgacgcccttcgccaacgagaaccgcacgccgtcgtctcccacgggcactgtcgcacgctgggccacgctgcagtcggtggcgccgccacaccttcttcctccatgtgccgtcgccgccctattcttcttcgagatgcagccgctagcgctgccctcctcccagctccccttcatggccgcgtgcaggtggaccgctccccaccccgtcgccttcctcctcgtactgcccccaagaacgccctagggactatgtgccagtgttagtttttggtaccagtctacaggtctttcatttctacattcaaagcggcgacggtgtagtggtgaggaggcagaggagtgccttcggcctcgacggaagaaggccgccgatggagaagaagaccagctgggagcgtggcgcggcgtcgcggtcgtgcacgaggaggaggagcctgcacttgccggagggagaagaagcatgtagcacggtgcggtgctgcagtcgtgcgtgagtaggttcttattattgttttctatcctgctggatatgtagtcatgacagttaaattatgtacaactatgattacaaacgggaatacaagctaggagttgagaccacaatccttatgaaaagttacactgtaagtatgtcgtcctgcttgcatttcttccatgttccttttctcactgtaagcttagtttttgtgatcagcttccagatagaagagttattaaagtagacactaaacgattccaacctcctgaatctctttttactcctgtaacacttccatttatatttatacataatggtattgtcaacagtacacatagtttccatcagtttgttaatagtgcacctttagattgaatgagcttcttgcagagcaccaaggattaggcattgaaatgtgtggataaaaatattagaggaccacacatcattattatgcaacattgtctatgcacatgaacataattgtatcggtagtaagccgccagcatgtttgaaagttaaaaatgtgaattaagaacgaattatcgtatcctgctatacttatgcaacctaccaagaattagggcattgtagaaaccatataaagtattgagatcaatttgaatttgtctgcctcatgattttttgatacctgacctttatgaaggtagaggacaacattaaggatgatcatagactaccaacattcttcttcagattaaatgttaaattcagtaatttaatttgtttcagtaatacaagattagaccatccctgcacatctgcctatctgcctggcaaaatattatcgtcgcttccaagattgagaatatggctgcgtttggaaagccttagattctagcattggtgatcggttgtgtgtacgtgtctcccgtctgtgaaaaatttatgatcccgaggatgagtataagcttttccatgctcatatggtcctcatcgacgaggaggctggcagtgctcatgctcaaatataccctccactcactgacgttttcaaacctctgataaaggagggcaatgtctacaatgtctcctacattcagatcaagaaagctaataggatgtacaagcatgttgacaacgatatcatgatcggtttcacaaaatggatcctatgctgcctcaacaaacccgcggtttgaacacgtgacagatgacggcttagcttctgtggatggacatcttggtcgcttttgtagatggaatgtttggttggcttttgtagacagaattaggctgcacttgtgattgtgtaacgcttatgagcatggttgtgtggactgtgtcggccaaagtatacctcccaatgccttgtatatatcacatgcttagctgtctatccccaactaggtcgcctgataatagacttcgatcatgtcatgctattctataacaattttcgctgtaacttgcctaatcgtcatactatggtacacgcttaaatttggtgctgcaactttattgtggattataaaagagagaaaaatacagcataaagttataatgtcaaattgccacagctcactgttaagacttatttga

SEQ ID NO: 43584 - DNA, 2081 bp, Zea Mays
tgagaaagcgaccggagagggagcagcagactgtgtatgatagatgctgctatttcacaaagatccaaaccaaaaggtacaccaaacaggaccattgatcttgcgtcgagtcgtcgcatttttttttcagtgcatggatatctctcatcgtttacgacaatatatatatataggttaatttgctgtctttcagaaatataaaaaagacccagcctcttatatatcactgtggacgatgtagcagtcccaactccttttttttagggctgaagattggatacgccttgaggaacctcgaccactttactaatcctgtcggtaacaaggaagagatgacattattcctgctatgtcatcataatcctgtagtgatatatatatgtatgtcgtcataatcctacagtggtgatatttccacacgtactaaacagaatagtataatgtgccatgcatactacaatgcatgattgctagctagggtgctgttctacccacttgtggaataataaaaaaaagatctgagagaacctcttttaatttaagcaacataatcgaccactattaacattttccatcatcgggtatatatagtctcgccagttttcacacacacacacacaaaaaaaacggttttagatttatatattttcatagatcgagctagctagcacgggaaatcaaaggagaggggaaggagaggatgactcaacagtacagtgcactatatagaacaaaaaaatgtgtgcatatgtaggatctatgcatgctgccactaaccctatatatctagcaacggtatatatatagggtcctcaatgaatgacgacaccatgaacacataaggctatcgccaatggatcaaatgcattcgacatgccttttgtcgagtgccacactcgacaaagagggtttggtgaaccaaccatcggcaactgtttctttgacgagtgcttttgtaaagctgctatgacagtggcaagtgacgatgacagagattttgtcgagtgttggctcagaggcactcgacaaataaagcttatgtgggccttccatacgtagtgtctttaccgagtgccatggttgtagcattcatcaaagtatgttccctagtgcccatgatgctttctttgccgaccacggcactcggcaaagacaccctttggcgagttcaacactcggcaaggtgaccataggcccccatttttatttacttttaatattacattgaaataaataaaagatatatatcatcaacatcacataaatcaaagataccacatatctcacaaacaacacaagttcttcacaaacatctcaaaagtcacatgtctgccaaaatagttcacaaaactcacaaatcgtcacacacataagttcagaaacatcaagtgtatgtcacaaacatatatttgaacaacattagcgaggtgaccaattactttggttcgacgaagggttggacgaagcatgagagtcatttaaggacgccgattgattctgcacagaaaatagattgcatgtgtgtgacaagataaataatatcgtacatgactcaaaatttcatacccacatgactataaaaccaatgaggtgcatttggagtgaacaacagaggtggcggagctacacccgctacagcgccaagagtctgcatgtactgaaacatctgctcggtcatcatcctcacctccaactccacacgttgcctcctctcttcttctagctgagattataatgtttctccccaatgttacgataatgcaaagaaaagatatataataattaatcaacgacgaataaagacgaaataacctagaattcttgtatccgatactatgatgtgtcctgtcgaggtcgtatggttgagcttgcacttgtgctccttactcgaacgtgagatagagtttgagtggaggacgtgtcgattgcgcggtcggccaatcagtaccacacatgcctcttgcctcctccaaccctcatgaggacttctccgttgatgccctcggtcctcgaatcatattttggctcatagacctcctttgccatcgtggtgtactcactcatgcagttgtgagcgatgg

SEQ ID NO: 43585 - DNA, 1694 bp, Zea Mays
cgccgactgcacggacggggaagcctcctggagagtggactccctttccttctataaatccggctcctcccaatccaggatcttcccagcctcgccgccccaccaccccagcattgccttaccttgccttgccttgccctgccctccattccacctccacctcgccgcccaaatccccccacccaacaatcccccatggggtcgcaggccatcgaggcgcacctcccgctgggcctgctgccgctggccgacatggaggaggtcggctacaaccgcgccacgggcttcgtgtggctgcgccagaggaagtcgctcacgcacacgttccgcccgatcgcgcgccaggtctcgtacgccgccgaggtcaccgccttcgtggaggaccggcggatgaggcgcatgaccggggtcaagaccaaggagctcctcatctgggtcaccctctccgacatgttcgtcgacagggacgacccctccaagatcaccttcaagacgcccaccgggctcggcaggacctaccccgtctccgccttcgctaaggaaggcgccggtgacgacggcgcggcggccaagcacaaggatgatgcccccgccccgaccgccgccggtaaggctgctgccagcaagtgagctaacctcacgccggcggactctagcaagagcacgaacgagggccaagcgctcgaaacccagcgacgtggaagcgcctgcgccgcgagcatccttccagagcgcggggccaaggccaagcagagaagcagtgcaagcatatggcgcgccgtgccagcctgctcctcgccgcggcgctgctcgtcgccgtcgctgccgcggcggtgccgccgacgtgcgagcgcatcgagtgcccggcgtacgaggtggtggacagcgccaacgggttcgagatccggcggtacacggacgccatgtggatcaccacggcgcccatcgaggacatctccttcgtcgccgccacgcgcaccggcttcctacagctgttcgactacatccagggcaagaacgcgtacaaccagacgatcgagatgacggcgccggtgctgacgcgggtgtcgcccagcgacgggcccttctgcgcctccgccttcgccgtgagcttctacgtgccggccaagaaccaggcggacccgccgccggccgagggcctgcgcgtggaccgctgggccggggccaggtacgcggccgtgcgccgcttcgggggcttcgtggcggacgccgacgtcggggagcaggcggcgcggctcgaggccagcctccagggcacccggtgggccgccgccgtcaacgacgcgcgcagggccgacccggcctcgccctacaccgtcgcgcagtacaactcgcccttcgagttcaccggcagggtcaacgagatctggatgctcttcgacgcggacgacgacgccagtatgtgatgcgattccaagcgtgctctcggggcactgaggcgtttagggaaggacgcgcatgcacctgtgcagtgcagctgtgctaccatgaagtatttcgtgctcttgtgcgctagcttcgtttactttcgacttttcgagtaaggaataaggtgcctcttgttgcaataatgataaagctaatcctgcttgtaattacatttcgtggcatggccattccggcaacatgtccagtaaaaaaaaactttttagtttcatctctcctggtttcat

SEQ ID NO: 43586 - DNA, 1730 bp, Zea Mays
atccatccttgcgttcgtccttcagcttcaccatgcggagtagcccgcgcttggggtcgacttgggtcgtcttccacatcacgcaattaattaacataccatttcaatatttgactcgaatccgtgaggttggtaatgattttccgatccagtcaatttgtcgagcgcttggcaggtactatacgaacttcacgcacatcttcatccgacgctcaacaagtttctccataacaggctaagatctttttgtctgtatctccccgtcatacaccacatgacgaactctcaacaccggtcaaaagtaatccgagtaacccggcgaaaccaaactcaactcacagccggcgtggtcaactgaaacgacaacgccggggttagagaaacccgcgcgacatgggtaggggcgagctggactgaatccgagctggagctcgcgacaacagggagcagggcgctggttccagccttccagggagcctattggtgttgccaagctgggctactactgctcctaagcatccatggccagagaagggacagaacagggaggaatgcgctgaacaggggagcacagccggaggagctcgacaacagagagcttagccgaggaacgacgtcgagctgggtgcgagcagaggcgcggttcggcgaggtcacgacctgggcgagcctggtcggagaaggacgtgaggaatggcgtagccgagagagagagagcagcgtggagagagaaatgccatggggacgagcgcggcagggaacagcgccggcagaggaggagctcggccggacgccatggggcgagcagagagctcggagcggagctgggacgacgcgcagaggagccggctgcgcgcggctgccaagacaagcgtagaggaaactccgaccgggcgccagaaagaagaggccgccggggcgaagctccatggtcaggagctgggggcgaactcgagcagaaggaagggagcaggcacggcgtaaaaattctgagcaggggaggtactgccgtgagctgagggagggagagataacgacggctggaaggatataagggagaagaacgatggagaaggcctgcttagcggtgagatattttctgtgaaatacttcaacgacacagaaaaatcccagcggctgtcctgcttgaggataaggaagaagagagaaacagggaacacgacggaagggataagtgcggccaggttcatggacacttgcgcgcggcagctgctgaaaaaaataatcccgcgatggatgaagacgacggcagaaaggataagcgaggaagagagaagtcgggcggtgggaaatatctccagccaaaagaattgcgtagagagcggtggctggacactaggagtacagggaagctaggcgtggagataaaagagaaatatgatttcgcttttcttttttttaagcgtaaaggcggtgatgcgcacattcatggagcgggtctgcgtcgagaaccgaaggccttcgccaaggagggtgtggtcgccggcagctacaaggtgcgtatctttcagagttgtaatgactgttgtacacagaagtttggcagtcacacaaggtctcagttgttcactaagatggagtgcttttccgatttggatgttaatgttcacttagttgaagtctatgctggactcctgagatattcaggatatgctggcctgataatgttgctctccctcgtgtatgcgaaaatcagatatgagaattga

SEQ ID NO: 43587 - DNA, 3273 bp, Zea Mays
ggattgcattatccgctcgctgtgcctgccctgcttcttccgccattctttccgtctctgctctactttcttggtcgcctgtccggaggctcctccccgcggcccctgagcaaactgtaccatagccgcgtgattgattggttcacgggagggacagggagcggcgtcaagctggttttgaagcggtgcttgcttcggcagatggttgttctcccgcacctgtcctaccgccgttgatcgcgagagtctcgtacgtagtcttcgggggcaagcatccatggcggagtcatcgtcaaggcaagcggccgagatggtggagaagtggatggcgttcccgtctggctccgacgccggcagcggcttcgcgttcccggcgccacgctcagtgtcgggcgcgggcaaggagatagtggagctggcgtcgccctccacagccacggccacggccacggccacgaccacggccagtgccggcaacaggcaggcctcgttccagcgcggccgcgacagtggcgtgggcagcaccaggtcgtccatggacggcgcgcgcgcgtcgggggactcgtcgatgccgcgggtgtcgcaggagctcaaggacgcgctgtccagcctgcagcagaccttcgtggtctccgacgccacccgcccggactgccccatcatctacgccagcgccggcttctacaccatgaccggctacacccccaaggaagtcaccggccgcaactgccgcttcctgcagggccccgacacggacatgaacgaggttgccaagatccgggacgccgttaaaaccggccgcagtttctgcggccgcttgctcaactaccgcaaggacggcacgcccttctggaacatgctcaccgtcacccccatccgcgacgacaacggcaaggtcatcaagttcatcgggatgcaagtcgaggtgagcaagtacacggaggggctcagcgaaaagcgcatgcggccaaacgagatgccagtgtccctcatccactacgacgaccggcagaaggagacggcaatgtcatcgatcacggaggtggtgcagacggtgaagcacccgcgcgctcgctccgagggtgaacaggagcccgtggagcctgcaccgcccgtcatggcgtcgccgttggtggcccctggcacgccgtcgggcggtgccagcctcaagtccccgctctgggacgtgaagaaggaggactcacggctgagccggaagtcgagccgccgctcttccctcatggggttcaagatggggaagaggagctcgataggaagcaaggatgcccttccagcggaggtggaggccccggcgccggcgccggcgccaccggagtcaacgacggagaagcagcgcaagaacagctgggagcaagaggggagggagagggacatcaggcaggggatcgatctagccacgacactagagcgtatcgagaagaacttcgtcatcacggatcccaggctccccgacaaccccatcatcttcgcgtcggatagcttcttggagctgacggagtacacgcgggaagagatcctcgggaggaattgcagatttcttcaagggccagagaccgacatgtccacagttgataagatccgggaagctatccgggaacagaaagaaatcactgtccagctaatcaactacaccaagagcgggaagaagttttggaacttgttccacctacagccaatgcgagaccagaaaggagagcttcaatacttcattggagttcaattggatggaagcgaccatgttgaaccccttaggaatcgtctctctgagaacactgaactacaaagtgctaaattggtcaaagctacggcagagaatgtggatgaagcagtcagagagcttcctgatcccaacctgagaccagaggatctatgggacatttactcacgatatgtttccccaaagcctcataaacgttacaactcttcttggattgcgatggaaaagattataaaatctggtgtgaagattggcttgaagcacttcaagcctataaaacctttgggttatggtgacactggcagtgtacatttggtggagttgcaaggaagcggtgaattatttgcaatgaaggcaatggacaaatcagtgatgttgaaccgcaacaaggttcatcgagcttgtatggaaagagaaatatactcactattggatcatccttttctcccaacattatatacttcattccagacaccaacacatgtttgtctcataacagacttttgtcctggaggagaattatttgcactactcgatatgcaaccaatgaaacttttcagagaagaatctgcaaggttttatgctgcagaggttgtaattggcctggagtatctccattgccttggaataatataccgtgacctaaagccagaaaacattttgctccaagaggatggccacatcgttctgactgattttgacctctcttttttgacttcctcaaaacctcatgtgataaagcattctacatcaaggcgaagaagatctaaggagtatctgcccccaagttttgtttcagatcctgccactccatcaaattcttttgttggaactgaagagtacatagctccagaggtcatcactggtgtaccacatacaagtgccattgattggtgggctcttggaattctcttgtatgaaatgttgtatggacgtacaccttttcgaggaaagaacaggaaaaggacatttcataatatcctgcacaaagaccttacatttccaagtagcattccgtcctgcggctaagcaattaatccatggattgctacagagagatccctcttctcgacttggttcaagtgctgctgcaaacgatatcaagcaacatcccttttttgaagatatacactggccactcatccgttgcatggagcccccagagcttgatgttccactgaaactaactcggaaggaacctgaacaaaaagtgaagcctgaggaggatatatactcatgttcagattattgagacattttaaggttgtacgatcccccctcccgaccccgtgcatgactttcagcctgaagagattttatattaccgagtggaaataacgttgctgagcatgtacatagtaataaaagaggtttataggcatgcaagatttccagcctgaattgcacaagaggtcgttgtaagtcattcttttggttaggttaagtgaataatccatcaacaggataaagttcttgtaaatgtacactttctttggcatatataataaaaatcttactaatttccgttggtcaaa

SEQ ID NO: 43588 - DNA, 2187 bp, Zea Mays
atggaggtgcatctgaggaaggtcatgcacagaagccggtttatgcggaagagctccatcatccctgctatcacgaaccgaatcaagagagatctgattcacaatccgctacatctaatcttttctgtggattttcttggagtaacaaaatcaactttatcatcacttagtaaaggatttgcagagctctctactgatgggcaatttcttcagctgagatcaaagcaggtttggtcaaggagaatcactggtgttggtgatgggctagttcaagggactgaagcatttgctcagggtttggctttcggggtttctggtgttttaagaaagccagttgagagtgccagacagtatggtgttataggtattgcacctggcattggccgtgcttttgtgggtttcattgtccaacctttaagtggggctctggattttttttcactgacggttgatggaatcagtgctagttttatgagatgtgttaacattttaagtaacaaatctgttccgcagaggataagagatcctcgtgctatacatcgtgatggtatagtaagagactatgacaaatttgaagctgctggccagatggccctttatctggcagaagctagcagatattttgcatgcacggatttatttcgagaaccttctaagtacgcatggtctgattactatgaagaccattttattttaccaagccagaggattgctttagtaactaataagcgggtgatgctgcttcagtgcttggatctagataaaatggacaagaaaccttctaaaatactttgggatgttccttgggaagaagtactttcattggagctagcaaaagctgggtatcagaggccttcacatgtaatcatacatctgaagaattttaggaggtcagagaactttgtaaggcttattaagtgcaacattgacaacgaacgggaacctcaggctctttcactttgctgttcaattcggaaaatgtggagatctcaccaagcagcaatgaaagttataccattgaaggttccatcaggccagcgtcatgtgtattttgtgtcagatgatgataaaaaggaatcccacagtttatctaggcctttgctaagctcgggaggaacctctactgatgttgagcaacagttcataaacaatacagttcactttcagaaaatgtggagcagtgaaccagaaattcagagccgatgcaaactagttgccaagcagattgcggatgacggaagggtgttcagcatatggaggcctctctgccctaatgggtttggagaaattgtgctgaggattacaagagccctgtatcaatatggcttccaaggccaccggggggatacgtagctcttgggtgtgttgctgtcccttcattcaaggagcccactcttgactgtgctttctgtgtggatgagagactcgcggaggatgccgcgtatgaggagcaaatcatatgggcctcatcggatgcttacccatggggatgctatatctaccaagttcagagcgcctcaatgcagttcatggcacttcgtgtcccaaaagaacaatctgagctaaggcccaagaagatattggagtcatttctgcagcaagcatcagagactcaaacgtcccgtgcatgaagaagctgcacatgatgcttgtgcgtgcaagagaactcggctgggacaaagggcaagtctcgtgcaagaaagctcgaagaatgccacttctttcggatcactccatttctccgttgtcaaagcatacacagaggacagagccttgcatgccaacactcgggttgacggaagtgttgtatactagaatagtaggttaaaggttgtaaatgtaaagttttgtaacgtttgatatagtttttgtccagctacatttgttaaggcccatgtggacgtgggccatattagttgtggctacatattctactaagaagttctcaggactaatcatactttctctaatttaaggttgttaaggcccatgtggacgtgggccatactagttgtggctatatattctactaagggcccgtttggtaaaacttcagctcctgcttctttagcttcagattctgatcctcgtgaggagctgatcctcctgattttcctagaaaatcagaatcatttttaaaaccgtttggcaagtaaactgattcttgtcttctgagggttggtggcc

SEQ ID NO: 43589 - DNA, 1956 bp, Zea Mays
cctctccttgattcccaaatgcagcatacccttgagagtcttttccttagtcgggtaagacttgctgagtaattccatactcagggttttattccctgttgtttttcaggttttaactttgtgctgctgttgatggtgttaagtgctggtgggctcgaccttcttataagtcttagtaactcttctatacttcttattgaggatggtcatttgagctagcatatatttcaaaactacaaacaatttataacaatttaaagttatttctttgaatcacttttgtaatcacttcgatcatgtacaaagtaaaatttttgtaacttgtaaaatttggtaataagatttccgctgcaaactgctggtgtgtgatttatgttacttaatcttgcgatcttggttgtaagtggtttatccgatgtccttggggcaatcagacggatcctgttaagttatttagtgtacatgcatagctgtctgaggtctttgagacaaggacaggtgcatgtgggcccaataacttgagaggttctgccacaagaagctgctgcagctgccgaagaaaccctggctacagtgcctggaaaagggaaagagatcgccgaagatatttcggaggaaaaagacttcaactttcaaaacataattggtcaagagttatctaagactgagaaagaagaggtacaagaatatgccatatactgtggctacaagccaggagcgttgctcttcggcgacattaacgaagaaagcttaggatgcatccgagaccgaactggagcgaaggttatcagcactctgtcgaagagtgttggtttcccgaagcttgaggctgacatcagccgctactaacgacagcatatcatcggtagtttattttattctaatttcaaggtaaaaaatttttcttcggcttttcattgtttttacgacgaagatgttttctgatgaaggttgctttgcacagagtatgctactaagtaaagccttgaggatgcaacaggacctcaaagataagaaaaatgaggttataattgaaggcttagagaacaaaaccaaagatcatgaagctgctcttgaaaagaaagattttgttctccaaacaatggagggttcactcgcagaagcccaggccaaaattgccagattaaacagtgaactcctcacgaagtccaaaaacttcgaacaagaaaagaagaattttgatgcgaagtttgaagctaaagtcgaaaagagttcgaatttgtagaaatcattgaaggagcttcaggataaatgtctagacttcggcaaccggtgcgtgcaacggctgaagcaggtcttcaactcagttggagctagttctgaaaaatttgaacctttggttgaagacctaccaggcaccttcgaacacattgagggcgaagttgacgcacttgacgaagttatagctgggcacggtgacttctgtgacctgctagcttctcggggcacaactgttgctttcatgaaaactggttgcacgcataggaagattgtgaacagacctaacttcagcctatcaccaacagatttaactgacatccccagcctggcccgaagcattggaaatagattcataacacaaatctggacgaagggtgggcgaaacttagctggtgacgaagctcgaagtcatcttaagctggtaataaactcgtacctgttgcttaccttctccttgggtcttgagtttaccttataatgctttgctatgtacaagatgacgaagttgaagagcaatgacccgaagcttgatgggtgatgatgaagtgatgacgttgctgcaaaaaactctagagaaacttttgaattaactttgtaaaagatgttgtaatttaggaatcaaacactgctctgtaaatttgtccatactttgtaatatatttttaccttctccgtgtatgaattgctttgatgtgggcgaaacttgtacttttt

SEQ ID NO: 43590 - DNA, 396 bp, Zea Mays
gcacagcaacgagcggacactagggcacgcgcccatagagcacagggagatgggcgagctgcagcagggacctcggcaagatgcggccatggaggagagagaaaaacaggggcgcgctggagcagtcgtccagggtgcatgagaagaaatccgagcgccgtccagggtgcatgagaagcggcagagctggggcagggaccgagcgccatggtcgagcagggaatagagagcaggacgccgagcgcatctgtgaagaactcggcgcggcacgtgcacatggagcaggagctcggcgcgaagacagctagaggccgagtagaggtgtgcgcgtaggagctccacggtgagggaaatgagcaccacggccatggagtcgaaggcgaggagcagggacca

SEQ ID NO: 43591 - DNA, 1343 bp, Zea Mays
gggaggagtcggcctcctcagggcggcgctgggctccggcaagctgcgcatcgaggggtcgctgagcttcaagcgggcgcaggccgcactgcaggtggagaccgagatctccatccgggccgccgccctgcccgcgccgggaccgagacccttgcccaggggagctcggttcgccggctcggcggccgcggacagccccaagcacgagggtgcggcgcttaggctgcagaaggtgtacaagagcttccgcacgcggcgccagctcgccgactacgccgtgctcgtggagcagagctggtggaagctgttggacttcgcgctgctgaattgcaacgaggcagcctcgccggggcgccgaagcagcagacgaagctcccatggagagcgctgccatggccttgctcctgcggggaacaagtctgggcgaggaggaagaggaagcaggcggcacggtactaccggaagtccccccagtggcagcccatatcaaacttctatgatatcatggtaacaaacatgtcaaataacttttaaccaaaatgagaatgtagccaggtgtaccgaatctttggcacaacgatcagggatctatttcgcaaatgaacggaaaggttggaaaggggttgctgaaggacgagaatgctcagaagcttgcgttgcagcactggctggaagcgattgacccacggcactggtacggccacaaccttcactgctactacaactgctggctccactccgaaagcaagcaacctttcttctactggccgcacttgaagaaatcttatatcagtttgaggaaaaactccaagctgaaagagaggaagctgctaggaagcaggaagagttgcaagcacaactacaagctcaacaggccgcacttgaagaaaaccaaagtttgctgcgccaggcccaagaggaagtgaaggggatgcataccaagtttgaagagaccaatgcactgctatgagctgtcctgaaacttcagaaagattgaggtagggatgcataccaagtttgaggatgatgcctttgcttaaggtttttctaccttgctagaacatatctgtggttagaactttgtcagaactaagtgcaatctgtttgaatgcttcaaacctttgtggtggaacctttgtatgtttgaacctctgttgtggaagaactagtgtgctggaattgtgtatgacttgtgatgagaatgttgtgtatgatggcttttctgtgtattatgattctgtgagctatcatgagagctcagtgtgtcatcactgtatggtcattgtatgtgggtgccataagtgacgatcccaactttagatgacgcgttgactgtaaaaaat

SEQ ID NO: 43592 - DNA, 579 bp, Zea Mays
ttaattcacagttaagcgtagatgttaggagatagcaagaaagaatttggaactagaatcatcatcttcaacctctggttcttgtgttcgcagcacctcatcgacgaatgaagggaggcgaggaacggcgtcgggcaggggaggcacaaccacgacgatggggacggagcaggggctctagcggcgaactccagctccggcggcaacgatggtcaacacgagcaggggaccggcggcgcgacgagcagcaaggaggagagcgcgagggcgaggcaaggtgactgggaactgaaaccatggttggtcaagcatgggctttatagagagatggaggagagagggcaccgaggagagggagaggtcggccatcagcttcaaatgccattaatggcatcggtttcgtgggagagacagtgggggagaaaagagggaaggtcggtggcggttttcggcatgaggagtcaagcggccacaacgtgggaggcgtggagccgagcgcggaagccgatgggacgggggcatggatgcccaggcagaagcgcggcgcgggatggcgcaggtgcgcgtctgcgcggctgg

SEQ ID NO: 43593 - DNA, 2439 bp, Zea Mays
tgttagtccatgttgtgctgtcaccttggaactcttcaccactaggctagctaaacctgaagatgtatgccttcctgccctttatttaagtgctggttcggtgaagatttccctctgccctggtgttctagccaaagctcgcagtggtgtgagggattcatgtgtattgcaagccaaagctcctctcccactgccaccaagttggcactgtccagagctgtgtgcgttgtcttcctgtgtttgtgatgaccacaaccaccaagttcaccacaccatagccagaacattctagggagttgctggcctgtatgaatcttgttccgtaatcatctcagaattcccagaagaagaagatgaaattcaagaaatggtttctgaagaggagtctgcttcagtgcctgctcatcaagtgatgggagccatctaactggggtttaatagagggatttagacctccgtctctgcaacaaaggttatgaggagctttctaggagttcctgtggctggagggcgcatccagttctggaggaggactagctaggtttatgtatgagctttggaagggttctaccttcctacttttgtaataagttatgcactttgagtatattaggacttgtaataattataaatctttctagcatgtaaaacttgagttttggaataaaaaatgttttataaatctccgaagtgtgtttgtatcgaatgttattactgaaatatacatgaatgtgggagatctctcggataatggtttcaagttgttgaacttgatagccttgttaagttatacggtacacgtgcatagccatctgagaccgttaatggcaaggattggtgcacgtggacctgataacttgggagggctgtcacagtataaatatttactatgcaataacaacatttattataccatgttccattattttatgattagatctttatttaacttacgttggttagtcttgttaatgtgctcatcattatctaccaaaatataatttatggtaaatatataaattagattaaagttgagataattatttatagaataatccctcatatgatttatactaaccaagtgataacatagtttaaatggttaaatcacaactccttaaccataactccgatcttagtagttctcgatcccacgatctcgtagcgacgcgtagatcattattattcagtttgtacttatgtttggtgtgatattaattttgtatataccatgtttatttgtattgctacgactagcagtgagatcacgaggatctgaagaatcaccctggtactggaatctcaagtgtcaggcaaattgtgcccatgaccacttttgttacccaataatgttctttattatcactattcatgcataggtttaattttgatgggacccaataggtcaccctagactgtttatctttttaccttgtttacccctgaatcattgggtagttatgctattgcttacacggtttttgggttaatatttcatttacatccatgttccaattattctgttatgttatttatgttcatgataagatcattatgttaattggaacatggagcgaccacccgggaaaacagtgctaccacaagggtagtatgggatgtccttggctaactaattaggaaagctagtgtatgactaccttacccgaaaggggcaagggcagtaggggagtggtcagtgtagggaggtccttgggttgattttgcttcgatggcggttaggcgagggatccctgcattggagcttcatataaactctagcgggttttctgaagctagtggaactttgtaaaggtctcgtagtgttaccctgcctcgcttccttggtagaggtgtatgggattcatgaccccttagcagatgggtaacatgacttgtgggtaaagatgtgcaaccactgcagagtgtaaaactggtatactagccgtgctcacggtcatgagcagctcggaccctcacatgattaatctatggaattaaaattcaatttgtcatttgcatcgcattgggattattttattattacttttacttattattgctaaggtttggtatttacttatacttagtaattgctaataaaattttgaccaaattataaaagaaatgctcaacttcaacctttattttgttgatcagccttacacttcacatgaactcccacctttggtgagttcatgtacattattctccacaacttgttgagcgatgaacatgtgtgagctcacccatgctgtctcacaccccccataggagaagaacaggtggttcaagtggagccacacatcgacgaattcgattcaatctaggtggcgtctcccagttgactttttggcaccaacgatggattttagatccttttatatttatctttttattttgtaagacttccgctatgtaataagtactctgattatattg

SEQ ID NO: 43594 - DNA, 335 bp, Zea Mays
gcactttcagcaccagttgccacatcttgagcagatggtcgttgatcgatggctgcttcccaaggatctgaggaacggccacgtctttgataggtggaggccgatgagtgggcggcagcaggctgcgtccttgtcaccgggggtccgacgcgtactcgagcgtgtcctcgtttcctggcagctagcgacgagcacccatgagttgattgctatctgagtgaaaaacgtccgttttcggggcgcacaggtggctacgatccaatcaatcaagtgcagccgcgtctgaattcgaaacatcattcgtgcatccgcagggacggcgacgcttatcctct

SEQ ID NO: 43595 - DNA, 2658 bp, Zea Mays
tcggccttttcggctttcggtttcgggctcaaaagggctttccaggagaggagccgcaccgcacgtccgcacgccgctcttcttcccctgcttgctctgggttcctccattcctctccagtctccatcacaggagcacgcgacgcgcgccacaggaaggaaggggaaaaacatggcggcggcgaacggggacgcgtgccgcagcgtcggcggggtgccgcgcccgacgaaccccatggtgacgccgctgctcaccgacctgtaccagttcaccatggcctacgcctactggaaggccggcaagcacctcgaccgcgcagtgttagccctgagccccagctcttccccactcttaactccccgcgcttcctttgtctcctcaatcctttccctcgatttggggtgtcaatttacacttaacctccactcgatttgtggtatcagtttacacttacctccaggctccagccctcgatttgtggtttgttaggccactgaggagggggtgataatctggtagacatgaccccgcctcgataaggcgtgactgggtagtgttctggaactattttgctacctgttttttttttgaaccgtgtgtgaggctgggctggctgtgacgattgagcacatttgaggctctgcttcgtagttttgtttcagtacgttataagattaggtttgcaatggggaaaccgtttttcgttaggccaagtgttttatctaggtcgtacttggtgtagcaagtgtgtaaaatcagcgtcacagttcttctaccggtcttcaagttacgctctactctctttcacctgtactaactgcgaactgaaatggtgttagctttgatctctacttccggaaaaatccatttggcggggagttcaccatcttcggtggcctcgaggaatgtataaggttcattgctaacttcaagttcacggaggaggaaatcaaatttcttcgatctgtcatgcctgcatgtgaggatgacttctttgagtacctccgttcgattgactgctcagacgtggaggtttatgccataccagagggttatgctgtgttccctaaagttccactgatgagaattgaaggacctgttgctgttgtccagcttcttgaaactccatttctaagtcttgtcaactatgcttctctggttaccacgaatgcggcacggcaccgacttgtagctgggaagtcaaagaatttacttgaatttggacttcgacgggctcaagggcctgatggaggaatcagtgcatcaagatattgttatatgggaggatttgatgcaacaagggtcttgatgaaattactgacaaaacacttactagttctgatggttcaaacacatgtgaagattttatctctctggtgcagaactggctgatcaggattcaggattctagttcattgcatggcacctttggagaaacgagccaaagtgagttggctgcattcacgtcatatgcactggcatttccaaattccttcctggccttggttgacacatatgatgtcatgagaagcggagtgccaaacttctgtgctgttgctttggccctcaatgatatggggtataaggcagtcggaattaggttggactctggtgatttagcatacctatccgttgaggcccgcaagttcttccatgcagttgaaaaagaatttgtagttgttggctttgggaaaacaagtatcacagcaagcaatgatcttaatgaagaaactatagatgctctgaacaagcagggccatgaggtagatgcatttggtattggcacctacctagttacatgctatgcacaagctgcacttggttgtgtattcaaattagttgagattaacaaacagcctcgtattaaactttctgaagatgtcatgaaggtatcgataccatgtaagaaaaaatgctacagattgtatggcaaagaagggtatccgttggttgatataatgaccggagaagatgagccaggtccaaagattggtgaaaggctcctatgtcgtcaccctttcaatgaatcaaagagagcgtacgttgttccacagcatgttgaggaattattgaagtgctactggcctggaaattcatcgaattcacgggaggagcttccatccatccatgagattaggactcggtgtattcaccatctggaccgaatgaggccagaccatatgaggcggctgaacccgacgccttacaaggtaagcgtgagtgctaagctgtatgacttcatccatttcttgtggctcaacgaagcgcctgtcggagaactgcaatgatgaaatgaagtggcggtagggtcggatcccaaacctaactctaataagctgctccgcttatgggtgccgtcggagcaaataacaaactgttgccgccggtgcaatttctgcagtagttttaccatcgcctgcgctctagtaaaatgtgagtatgtgctggtgcatctgtcaaaacagaccatagctgaagtgttacgtactgggaacaagaggatacccataccgagttagatctatatgactgaactaattgcaatgaggagcaatcactaaatttgagacaaatttacttgtcttgtcatttatcctaccattctcctctactgaattttatgctttttactgaagccaagttagattgttaaaaaga

SEQ ID NO: 43596 - DNA, 1894 bp, Zea Mays
tttcctctccccaccgcacgcatccagtggctgctgccgcctcgcccccgctcctcctcctctcccgccacccacgccgcgcaggcctcacctactggtcgtcgttgcctaggggccagaacgcagggcccacagccccgccgcccgccaccgcctccaagcctgctgcgccgctcactgtcaacctgcctcgccaagtcgcccggatctcgacgccccacctgcggccggcggcggccccgccaagctccgccactgccgccacctccctgctccaaccccgcacctccgcttcgccatgaacccttcgtcgtcatccacctcctcctctggcgggtaccactctagggccgctgcctttgcttccccgcagccgcgcggcggtggcggtggcggcggccgagatgggagcgaccgcatcgacgccctcggtcgcctcctgacgagggtgttgcgccacatggcggcggagctgcgcatagatatgaggaccgatggatacgtgcgcgtccgcgacctgttgaagctcaaccttcagaccttcgccaaggcccctctcaagtctcacactgttgacgagatcagggaggcagtcaggcaggacaacaagcagcggtttagtctgttggaggaagatggcgagctgttgatccgggcgaaccaggggcacacagtaacaactgtcacatcagagagcctgctgaagcccattttgtcccccgacgaagtgtcagaaaaaaccttgactcgattttgcaatttgggctaaagcgtatggcaaggttacacatacatttctcaagcggcttaccatcagatggagaagtaaccagtggtgtacggcagaatgtaaacatcttgatacatctggacgttagtaaagcacttaaaggtgggatgaagctttatatttcagacaacaaagtgatcttgacagaaggttttgatggcgtcgtcccggtgaaatactttgaaagagtcgaaacatggccaggacgagctccaataccgttccagagataacaggccatgttaccatttttcgacgagttagtttctctgtgcctgaggatgtcaagagggtttgccaaccatctatcctaattaatggagtacgagaagtttgcggagtatgagcagaagtactcagaggatgcagcaaccaaacattgaaaagtatcatggggagttgcctgcctgctgggctgatgcccttcctcagctcagtttggcaacttccagaagcatacgcctgaggtgcgcaacgtctgcttcggagcgagggagcatggcatgggcggcatttgcaacggtgggcacagcccagggctccgtttcatggccaacgactgctatgcaagcagtccttctttacaagcgtgcaagcaaacatccggtccattagattacgatccaaccacagatataactataatttgttatggttttttataaagattattgagttggtggtgaaaaggtttaagtattaaatgtgacctacggttgaatcacgatctaatggaccagatggtttgcttatggtttgcttgcacgcttgcaaagaaggactgcttgcatagcagtcgttgccccgttctatgttgttggtacctatcttgcttctctgatcgatcaataaaaggagacattatttgagggaccctttttgggtgccttgtatgctgtagctgttcaagtggctgaataaggctgcaagtcttgtgtaaggtgagactctgatgcataagctttgcaacttgcaagtgatgttggattttggaatgttatcaactttagtacacgttttctggccgtctgatcgaatcctggacaccaggggtagaattaattggtcgatcagagctgttaatcgtccaggccttgaaaaacg

SEQ ID NO: 43597 - DNA, 382 bp, Zea Mays
agtcaggtcagtatggaactatggatccccattccacatgtagtcatgtaccaagggcaggaggactgcggcgactaggcgagaaggatacaaggaagtggtgacctcggcgaagtagagactatcttcgtcttcgatggactaggagccgccggaaagagaaaggaggagcgacctggtgcatgggcctggaggttggagcagcggcggacctactaaaaggggaggtagtgaggtcctacctaacttcggccgctaagatcctccacccctcgattttctcggcgagatccggtcgccgccgcgttgttttctgtcgagcgccgcctgcactcgctgccggctgctcatccagcggaggaagaggaaaaggaaagtgaag

SEQ ID NO: 43598 - DNA, 3770 bp, Zea Mays
gtcagaatcatcttttcccactcctgccgtctattttcccgactactctacgtgcgctttctctctctgcgcaactaggtgaccgcgaccgcggccaccgccctacgtcacgtacgtgcttgctagagtctagcctcgtcggttccttcgcatggtctcgttcaggcggacccttcgccggcgaccaacacccaccagcttacacggtatacatgaatgttgatttgcagcaatttactggaagtgtggaaccacttctgatgctgtctttgtaaatattgatggagctagctgagtagaaatggactgcagtcaagatccccaagaagaaagccatcaaagaagggagaatggtgaagaagcagaaaagacggctgactatggaaatgctttgagtcgtaaggaggtaacagaagagcttcttggttgtgtggttcatagtgaggaagaggcgtacaggttgtactgtgattatgggcatcgaatcggttttagcgtgcggaagggcaaacagtcttactttattggtaccaagaatattcgaacaaaggattactactgctcaaaggaagggcttaaatacgatgagcctgttacagaagcaaattttaatcgaccagacacaagaactaattgcaaagcaatgatccgctttagagttgacgagaaggggcggtggacagttatacgctttgttcctgtacataatcaccagttggcaaaacctggagaaagacacatgctgagatcagccaaatcgcttgctgttggcaaatcaggtgttatagatccattagcatctacagaggcacatccaattaatggtttctctgatatgacaggtgatatagttgagaattcagggtatactataagggaatgttacaatcaagtgggcatgcagagtataacagtaattgaggcaggggatagccaaagtcttgtcagctatttcaagcataaaactaatgaggaaggcatgttctattgggacgtccaagttgatcaagaagggcgcatgacgaacttcttctacagggatggtaaaagtagaaatgattatggctgctttggagatgccattatatttgatacaacctaccgcacaaacaaatataacttgatatgcgccccatttgttggtgttgaccaccattggcaaaatgttgtttttggctgcgcgttcttgttagacgagtctgtaacttcctatgcctgggtatttaaatcattcttggagtcaatgggagggcgatcaccaaaatcaatattcactgatcaggatgaagctattatgcaggcagtcaaacaggttttccctaatacgcaacattgtttttcctactggcatattctgaagaatgctcaatctcatttaggctcactaaatacgtctcaagcatttcaaagtatgtttaccaagtgtatgcaaggatctgactcagaagaggattttaaggaatcatggactgcaatgatccaggaatacaagctacaggataataattggttgattgacctttatacattccatcataaatggtgctcggcgtttaacaaagatacatttgatggtggaattaattcttctcagtggggggaggtttcaagtaatattctcaatggaatttctgatgaaaatacctctcttacacgttttgcccttttgctagaaaaggttgtcaaggatctacgtagaaatgaatctgaagaggattttcgatgtagccaaactgctccagtccgtgcaattaagcatagtaccgttttgaagcaagctgcagaatcatatacacataggatctataaattatttgaagcagaatttctggatgggtgtggagcaacttcatgccatgaaacttcgagtggtggaaatttattgaggtttggaattacaatgcaggggaggggttcaaaagtatgggatgttgttcttgacacttccaccatggagatcagttgtggttgtagaaagtttgaaaggatgggtcttctttgttcgcatgccctcaaagtcttcaccctgcagaatgttgacacaattccagaaaagtatgttttgaaacgctggacaaaagatgccaggagaagcatgtatacacttgctcaggatgattcaacccaacaggaatgcacagaggctgaacttgcatatcgcaatcgggcaatgcagtatgcatataacctaattataaagagccaggaactggaagaatcacgaaaaatattctgggactcccttgaaactggagagaaggcactggaagtgttctttgaaatgagaaacatgcgcactcaagcagccaaggatgctgataagaatgtaaagaagaagaaaaaaacatcaaaaggaacaaacccaaaaaaagctaaacaagccccaggagtttcctcaactggtccagagctgatagtccatactaatgagcatcaatttcaatcttcacaagatgctcagggtaatgcaaccattggaagaccatattactatcaggcttttccaaatgcccctatacaaccaaaccagatgtacatgcatacaaatatgcacacaatgcccctttgcacaccgcaggagctgtctgcatatgctgcaatacgccccaattcaatgtttggtggtgccaagaacatctgaaggatattaaggtccagattcatgtggatgtcattggaaaaccttattgagactttcgctatcaactccgctttgatctctgtggacccatttatggaggcctggtggcacttcatgtttggttggttcaggggctcttcgttctgatctttagggaagcggttattctggctgttgcagtgcaggctgtgcagccccttatccatatagcagtggccagtggcttgctattaatatcactcacaggcaattttagggttgtaaactgtaaggcctcaatccgctgtgggcgtgagtttctccccttccaaggcagtttcctgcatgggttcagcttgagttgagctgctgagttgtgaacgaggaagcaaccaaagcaactgggagcctgggagagtgggagtggaggagctggctgccggcactggccgaggaactactcagtccaagacgtgtgtcgatctgaagtgacgctgacggctgacctatcacctatgttttgggaggggctcagggccggcaacagccatggccgggcaggtctccacacagtggccactggagctagaactggacctggaacggcgccccacctgccaaacggcaatgctgatgaccgcttgacagctgcttccgatgggctggccacctcccactgcccacatatgaaagggaacctggaactgtgtttgctcggcaaccagcactggtttggggaaacagaaagggtacataattgtagattgagagaaaaattagaggatgcagctgttgcttgggttcagtggtgaaggaagcagctagcagcttcttgggttcattcaagagagattggagaagggggaaggattggaaatgttgcttctgattcgcttgaactctgaatttctgattgtttccttgttcacagaatgtagtgtcatgcataacctgggttgccacgccttgtttctgaggcgtgacatgtgactgtcgtgatggtgtttttgaaatttcggttggtaagaaatgctgaaagaagaaatggcgtcattacgttcgttgcattgctttgcctattttgcgtgtttaatggaatatgattgttgtatggcacttcactctgaatgtgagttgttttatgctgagg

SEQ ID NO: 43599 - DNA, 1744 bp, Zea Mays
cccagcctcttatatatcactgtggacgatgtagcagtcccaactccttttttttagggctgaagattggatacgccttgaggaacctcgaccactttactaatcctgtcggtaacaaggaagagatgacattattcctgctatgtcatcataatcctgtagtgatatatatatgtatgtcgtcataatcctacagtggtgatatttccacacgtactaaacagaatagtataatgtgccatgcatactacaatgcatgattgctagctagggtgctgttctacccacttgtggaataataaaaaaaagatctgagagaacctcttttaatttaagcaacataatcgaccactattaacattttccatcatcgggtatatatagtctcgccagttttcacacacacacacacaaaaaaaacggttttagatttatatattttcatagatcgagctagctagcacgggaaatcaaaggagaggggaaggagaggatgactcaacagtacagtgcactatatagaacaaaaaaatgtgtgcatatgtaggatctatgcatgctgccactaaccctatatatctagcaacggtatatatatagggtcctcaatgaatgacgacaccatgaacacataagtggcaagtgacgatgacagagattttgtcgagtgttggctcagaggcactcgacaaataaagcttatgtgggccttccatacgtagtgtctttaccgagtgccatggttgtagcattcatcaaagtatgttccctagtgcccatgatgctttctttgccgaccacggcactcggcaaagacaccctttggcgagttcaacactcggcaaggtgaccataggcccccatttttatttacttttaatattacattgaaataaataaaagatatatatcatcaacatcacataaatcaaagataccacatatctcacaaacaacacaagttcttcacaaacatctcaaaagtcacatgtctgccaaaatagttcacaaaactcacaaatcgtcacacacataagttcagaaacatcaagtgtatgtcacaaacatatatttgaacaacattagcgaggtgaccaattactttggttcgacgaagggttggacgaagcatgagagtcatttaaggacgccgattgattctgcacagaaaatagattgcatgtgtgtgacaagataaataatatcgtacatgactcaaaatttcatacccacatgactataaaaccaatgaggtgcatttggagtgaacaacagaggtggcggagctacacccgctacagcgccaagagtctgcatgtactgaaacatctgctcggtcatcatcctcacctccaactccacacgttgcctcctctcttcttctagctgagattataatgtttctccccaatgttacgataatgcaaagaaaagatatataataattaatcaacgacgaataaagacgaaataacctagaattcttgtatccgatactatgatgtgtcctgtcgaggtcgtatggttgagcttgcacttgtgctccttactcgaacgtgagatagagtttgagtggaggacgtgtcgattgcgcggtcggccaatcagtaccacacatgcctcttgcctcctccaaccctcatgaggacttctccgttgatgccctcggtcctcgaatcatattttggctcatagacctcctttgccatcgtggtgtactcactcatgcagttgtgagcgatgg

SEQ ID NO: 43600 - DNA, 1818 bp, Zea Mays
  misc_feature (1818)..(1818): n is a, c, g, or t
gtacgttggtcgcgtggttttcactcgagttcctgcggattggtgcgcgcgctacccgtgtggccgtgtccccgactccacatgagcgagctttcccatgcgcgcgccaccaaaagctcggtgctggatttctgaatcttcaagcttgggctagctgcctagcttcaaaacggggcctctatttccgttggttggttgaattgcctgacgtgattcgtctcagcatcatcaaattgttgtaccgagtgacaagggtggtgactgcaagtcaccgagatgacgtccttgtcacgcacgctgtctcggggcgggccgatgcagtcgccaggggctcgccgcatccaaaggacgcagactgctgtgaattttggtgagcccatgtttgacagcgaggtggtgccgtcgtcgcttgttgagattgcgcccatcctccgtgttgccaatgaggttgagatggccaaccctcgtgtcgcttatctctgccggttctatgcattcgaaaaggctcacaggttagatccgacttcaagtggtcgtggtgtccgacagttcaagacagctcttctgcagcggcttgaaagggagaacgagcccaccttgatgggaaggggacaaaagagtgatgcacgggaaatacagaccttctatcatagctattacaagaaatatattcaagcactccagaatgcttctgaccaactggatcgtgctcaactaaccaaagcctaccagactgctgctattctgtttgaagttttaaaagcagttacacaacaacatgctgttgaagttgatcatgagatattggaagctgctgataaggttaaagagaaaacgaagatctatctcccttttaatattctccctcttgatccagacagtggcaatcaggcaatcatgaaatttcctgagacagatagtgtttcaaatcagagggaacatttgattttacttcttgctaacatacatatacgaagaaatccgaagactgatcaacaatccaagttggatgacaatgcactgaatgatgtgatgaaaagattgtttaagaattacaagaaatggtgcaaatatcttggtcgcaagagcagcctttggttgccaacaattcagcaggagatgcaacaacgaaaattactgtatatgggcttgtaccttctcatttggggtgaagctgcaaacttgcgttttatgccagagtgcatttgctacatatatcatcatatggcatttgaaatgtatggtatgttagctggaaatgtcagtgccttgacgggtgaatatgtgaagccggcctatggtggtgagaaagaagcctttctgaagaaagttgttacaccgatttaccataccatagcaaaggaagctgaaaggagcaaaagagagaaagggaatcattctgagtggagaaactatgatgatcttaatgagtacttctggtctgctgactgctttcggcttggttggcctatgcgagctgatgctgacttcttttgtcagcctgatgaaagaaatgaaagcacaaggatcagcaaacagaagggaaaggtcaacttcgttgagctacgctcattttggcacatattcagaagttttgacagactctggagcttctttattttagctcttcaggttatgataattctcgcttgggacggaggttcactagccagtatttttgattatgctgttttcaagaaggttttgagtatctttatcacttctgctatactaaatcttggacaagctacacttgatattatctttaattggaaggccagacgaacgatggaatttgcagttaagctgagatatgtn

SEQ ID NO: 43601 - DNA, 3438 bp, Zea Mays
aaaaactccgccgcaacaagggccaacatggcgaggcggcaaaccatttctttcccttaaaccctagccaaaaacccttctgctgctccccgcccgccgcccgccaccatgtcgatggcggtggcctccctccgctccctggcgcgccgccaaccccgcctgcgcttgccccctgcgccgctcgtcgtacccggcggccgggcagcattactttccggcgcggccgaggaggcggccccgttggctgccgcggaagcggcggcgccgccacctgttcccggtcggaaggtgctggagagtttccgcgaggagtttgagatcggggggcgctccatcgccttcgagacgggaaagatggcgcgcttcgccaacggttccgtggtgatctccatggaggacacccacgtcctctcaactgtcgccgccgccaagtcctctgagcccattcgagacttcctcccactaactgttgactatcaagagaaacaatatgctcaaggtgttatccccacaacatatatgcgcagggaaggtgctcctaaggaaagagaacttctatgtgggcgtataattgatcgaccaataagaccattgtttcctcctggcttttaccatgaagttcagatcatggtaaatgttctttcatcagatggaaagcaagatccagatgtaatggctgcaaatgcctcttcagctgcactaatgctatctgatataccttggaacgggccgattggagtaatacgtgtagggaggattgatggggcttttatattaaaccctacagtggatgagctaggtttgagtgacctcaatcttgtttatgcatgttctcgggataaaactttaatgattgatgtacaagctcgtgaaataagcgagagggatcttcaggcaggaatgaaacttgcacactctgaggcaattaaatgtatcgaccctcaaataagtttggctaagcgagctggcaaaaagaagaaagaatacaagatatcactgatttcagatacatcctatgagaaaattagaacattctcagaagcacccattgaggaagtcttcactgattcatcatatggcaagtttgaacgggggggagctttagaaaaaatcacacaatctgtgaaggcaaagcttgaagaagaaaatgatgaggacagcttgaagtttcttcacaaggcagttgacacagtgagaaaacaggttatacgtaaaagaataattgaagagggacttagagtagatggtagacaacttgatgaagtgagaccattgtattgtgaatccaacacatatccattattacatggttctgccctgttttcacgtggagacacacagttacccttggtgctcctggcgatgctcagcgactggattccattgttggtcctccaacaaagcgtttcatgcttcactatagctttccaccattttcaatagatgaagttgccaaacgtggaggccttaatcgacgagaagttggacatggcactcttgcggagaaagcattgcttgctgtgcttcctccagaaagtgattttccatacaccgttcgggtaaatgcagaagtcatggcatctgatggttcaacatcaatggcatcagtatgtggaggaagtatggctttaatggatgctgggatacctgtaagagaacatgttgccggtgtttcagtgggtcttgtaagtcaggtggatccagctactggagatatttctaattatcgcatattaacagatattctgggccttgaggatcacttgggtgacatggacttcaaaattgcagggacaaggaaaggtattactgctattcagctggatataaaacctgctggaataccattggacataatatgtgaaagtttagagcctgcacgtaaggctcgaaatcaaatccttgaccgcatggaccaggaaataagtaccgcacgtggtattaacgatggaagttcccctcgattagctacactgagcttcagcaacgagtctcttaggaaactgcttttccacaggaaaaaaatcgagcaagaaacaggtgcacgggtatcaatcagtgatggtacagtcactattgttgctaaaactcaagaaattatggataaagctattgagaaggttgagttcctcgtgggacgtgaaattgaagttggtcgtacatacaaaggaattgtttcttcgattaaggagtatggcgcttttgtggagttcaatggtggacaacaaggcttacttcatatttcggagttgtcacatcaaccggttacgaaagtctcggatgttgtaactcttgggcaatctctctctctgagatgcattggacaggacatgcggggtaacattaaactttcacttaaagcaaccttaccccaaccacgtatcaagaaggatttgaaaaataaggatcctttgccaagtgaagttactggttgggctgctgtggagaacatgagtagtgtggatgttgatgctcagctatcaagtaccgaacatgaaaatggcacaactgaggaggcagctgcattttcgactccttcagttataattcgaagtgctgctgactgtgatgctcaagatgatgcaaatggttctaagaagcgggcgaaggttgcaaagtcatctcctagaccaaataaaccagccagcgaatgccatgatgttaggaaagctaccgctaagaaagctacaggtgccactaccaagaaaactaagaaagtaaagattgaggaatctgtgagtaatggactagaaaccagtggttctgatgttccagaacagagtgctgacaacacttctgaccagaatcagagtcccacgaaattccaatctggggcaatgaagttgggtgatgtagttacagcaaaggtctaccagattcgagcctatggactagtacttgagttgagtgatggtgtgcgtggaatgcataaatttgaggcaaatggcctaaaggaatttgaagttggacaggaactagtagtgaaatgttctagtttcaatgcgaaggggattccgttattctcattgctggactagcaatgccaccatttgggaaccggatacaaatgacaccttagcagctaaccaatcaacttgtggaacacatggctagcgaagttttgttctttcgctgttgttgaagcgttggtcaagttctttattcgtacaaccatgaatagaatggaggtcaatcacatgaagtgtagagcgtacggactgagtacgaaccatcggaacctgctgtagccattatatataactaggattacgttacttatctatctattggttaaaataatagggacgatgaattctttgtaagacgtactgaagcagagtgtcccacttacaggaatccagttccagtttgtagtttctttacctaagattgttcagctgtacctttattttatttttagcagggctgtttacaaaa

SEQ ID NO: 43602 - DNA, 972 bp, Zea Mays
tttcattcctccagcgaaggtaacataggcaccgccgccatttcttcgtctcacatcttcatcttcctcgtagcgccggcgctccatctttcgttccctccctactcacgctcggcacgcaggcgacggtagcgacactcgggcttgggctctcagcgatggcatggacagcttcctctcccgcctcgcctcgcaccctcgcctccaaccctccatcgaccgaccggtgaccctgaatccagctatgtctgcaagcattagccttcctcccatagatgggaaatcaggatacggttattggcttggagtctagagaagatgatttgggacttcaccacgaaagctaaaagctttgattgctacatctggtctatgtaaagaaggaactcacatctggcctagataagggtgttgagttggatggtgtccttcgcgcaaagcctctagaaattggaatcgtaaatggcatggatgtttatgaatgggatccttcaacagataagtacatcagcgtgaaattggaatcgtaaatggcatgctgtaattctgcaaaataatgttgactgccttttctacatttatcctttttgtgctcatcgatcacattctcaataggtatgttggcaatatccatcttcaagtgacggacgcagtactgcaggaattcttccaaagcattggtccaatagaagggtgcaagctcatcagaaaagaaaagatccccacgtccagagttacaagaagatcaagcttggctgtggttgctgctgtgttgcctcctcttgttggaccgaagagagggaggggagaagcagctggcgtgcagacttctactcaggtggaagtactggctaggatgacaagatctcgctcaatagatatatgcattatcatttcaagtctatattgagtgacagggcacttcctaatttttgctaaaaattgtttgtcgtgcatgtatccacattcaga

SEQ ID NO: 43603 - DNA, 141 bp, Zea Mays
gggcaatgctcatggccgtgggcgcagccgtggtcgcggacgcggccaaaatgcaggaaggcgcggtggtggcaacaccggccgcggtggtcgctcgatcgccaacgatgagtgtcgctactgcgggattacgggccactg

SEQ ID NO: 43604 - DNA, 486 bp, Zea Mays
aaccacgtatataaagcattcaatgtttctatttggtaatgttcttctcaggagcgaccgacgaagaaggacgactcgaagaatccggagcagcattcacgtctgccattatgtcgttaggaacaaccacaccgggtctcctcatcaggattcgccccgcgcgaatggctttgtccatagctctgtcgcgtgagccctcagagtagcggaagtgtcttcagcagccttgacagccaaccgagcagcttctagctcctggacgactgatctcttgaaagcacgcaaatccttgatgatagtatccttgctcaacaccaattgcctaaggcaaatcatatcatctagggactcttgtagcttataacaatgattatccaagtcttccatggtgaaacgatggctcctctccaagatggtcaacgagttgctgacgtcgcggtataacttgtcaaggttgtcgcgagaagtggcaagagcacgtttttc

SEQ ID NO: 43605 - DNA, 1855 bp, Zea Mays
cacgggcagaaagggacgcgactcgtcagggcgattccgattacgagtagacgggcaggacaggacaagggaggaacggcggcggcggcgcagggcagggtaaaccatggcggcatcggccaagggacggctcgtgcccgtgctcgcggtggcggcggcgctcgcggccgtgctcctctaccgcgcgcccttctccaagagcttgggcggcgaagggtgcagcctcctcccgcacgaccacttctggatcgccagcgaccgcgtcgtcacgctcggacgcgtcggccccgccgcagtagaggtcaaaggagggctcatcaacgccatcgccgtcggggactaccggagcttcgtgctccgccgaccgctccttgactacggggacgccgtcatcatgcccggcctcatcgacgtgcatgcccatctggatgagcctggacgtgccgagtgggaaggcttctccaatggcacaagagcagctgcggcaggtgggataacgacgctggtggatatgccactcaacagcttcccgtcaacagtctctgaagaaactctcaaactgaagctggaagcagctcgggataagctatatgttgatgtggggttttggggaggccttgtgccagagaatgccttcaacccaagtgctttggagggcctcctaaaggcaggcgttttaggactcaagtcttttatgtgcccctcaggcatcaacgactttcccatgacaaattcaactcatatcgaagaaggattggttacactggcaaaatacaagagatctttacttatccatgcagaacgtatacctgaggctgaggatcatgatttgcaagaagatgaattagatcctcggtcctatatgacgtatctgaagtctagaccaccatcatgggaggaagcggctatcagagatctgcaacgtgcaatgaaggatacggagttggggggtcggtccgaaggagctcatattcacattgttcatctatcagatgcaaaaactagcttggaacttatgaaggatgctaaacgcagtggtgcaagtctgtctatagaaacatgccctcattacctggcattttcgtctgaagaagttccagatggagatactcgctttaaatgttctcctcccatacgtgatgacacaaacagagaaaatctttggaaagctctgcttgatggacacatagacatgctaagttcagaccactcaccatccactcctgacctcaaactaatggaggaaggcgactttttaagggcatggggaggcatatcatcattgcagtttgtcctcccggtgacatggtcatatgggcgaaagtatggcgttactctgaatcagctagcctcatggtggagcgaaaggccagccaagcttgcaggccaaaagaataagaatatttcagcgtatttaggaaagcaactttctggtaaggtcctgtcgacttttgtgagaggaaatcttgtgtttgctgaagacaagcatgcaaatgctgcttgtggtgttcctatcctcgctaagtaacatacaggtggatccagaactgccattgttgatccgtagtgtatacaatcgtatgcacgtgtcaatttgtaggttgctctcctgtatataattgaactcattcatgtcattgttatatagtagcaatctatttatattggcacacattttgccttgatccctaattagactatcattagtttttttttctattgatattgtcagcattcgggagaaggcatactctccagaatgctaacaaaatatccgctgagacttcatcagtagaagataaactcatagtctgatgaaatagataagatggtggtatgacacagtcccttcaac

SEQ ID NO: 43606 - DNA, 2088 bp, Zea Mays
cagctagtcagcatggcgggggagacggtgctggtcaccggcgccagcggcttcatcggctcgaccctcgtccgcctcctcctcggccgcggctacaacgtccacgccggcgtcctcaaccccgatgacggggcggagacggagcacctgctcgccatggccgctggcgctggcgctggcgagggccgcctccgcatcttccgtggcgacctccttgacgacgccgcgcggggctgctcgggcgtcttccacctcgcgtcgccctgcaccgtcgaccccgtcagcgacccccaggtttggtaccctgtttccaagacgctggcagagaaggcagcgtggaggtttgcagaggagaacgggctggacgtggttgtggttaatccaatgtctgtcctgggccagataatcccaccgaccatcaattctagcatgtccgtccttctacgcctccttcaaggctgcacagaggagtacaaggatatctggatgggggtagtccacgtggaagacgtcgccttggcccatctcctggtgttcgagaacccatcagcttccgggaggcacatctgcgccgagtccatcagtcacctgagtgacttcgcggccaaactcgccgagctctaccccaacaacaaagtgcccaagttccccaaggacacccagcctgggctggtaagagcggaggcgggagtggcgtcgaagaagctcgtcgagctagggctgcagttcagccctctggagaagatcatcagggatgccgtggagagcctcaagaccaaaggttttatccttagagggcagatgctgctgcagctcaagatagccacacacacagacagtgacacacttaagagctcgagatctcactctcctcacctcagctctcagagaggaaggacactgcggccgggcgatggcgagcgtggagggcaagagggagacggtgctggtcaccggcgccagcggcttcatcggatcgaccctcgtcggcctcctcctcgaccgcggctacaacgtccacgccagcgtcctcaaccccgatgacaaggcggagacggagcacctggtcgccctgggcgccggcgccggcgagggccggctgcgagtcttcccgggcgacctcctcgacggcgccgcgctcatggccgccgcgcggggctgctcgggcgtgttccacctcgccaccccctgcaccgtctaccccgtgagcgacccgcaggggcagatggtggtgccggcggtggagggcacgctcaacgtcctgcgcgccgccaaggaggcccgcaccgtgcggcgggtggtggtcacctcgtccagctccgccatcatacccagccccgcgtggcccgccggcgagccccgcgacgagcggtgctgggccgacgtcgactactgcaagaagaacgaggtctggtaccctgtttccaagacgctggcagagaaggcggcgtggaggtttgcggaggagaacggggtagacgtggttgtcgtcaacccggtgactgccatgggcccaatgattccgcccaccatcaactgcagcatgatcgtgctcctacgcctgctacaaggttgcacggaggagtacagggacatctggatgggggcggtgcatgtgcacgacgccgccatggcgcatatcctggtgttcgagagcccggcagcgtccgggaggcacatctgcgcccagtccatctcccactggagcgacttcgcggccaaggtcgccgagctgtaccctgagtacaaggtgcccaagttccccaaggatacccagcctgggctggtgcgacagggagccgaggaggggtccaagaagctcgtcgcgttggggctgcacttcagccctctggagaagatcatcagggacgctgtggaggccctcaagagcagaggctacatttcgtagctagccgaccgacggcagctatagtggagtagtatgcctgtcgaatttcgattcccaagtggcaaattctgcaaaacgagttcgccaatatgaacaataaataaagaacgttgtgataaaataaagcagattttctgttgcatttggcccttcaaagcatccgtggtggtaagatttcc

SEQ ID NO: 43607 - DNA, 1006 bp, Zea Mays
gtcagatttatgaagaagaagtggccaacacactgctcagattctttccgccctttcagagagaccatcccgtttggatggccaggatgcgtgcattggaaggtcagcagctgcttgaggatgaccccacaatcgtgtacctcactgcatacctgctcaccctggatgcacaatatgatttcttggctcggcacaaccgtcagatgatttcccgagcagaagaagcagagaagcgcaaccgtaagctccatgtggatctcaccacagctcaagcccgtgtagctgccttggaaagttgtgaagtcattgctgttgaagccctgaagcaagccaaggatgagcatgtccagaagttgatgaaggcctacttggtaacccataaccaacgtagagccctgcggatccaagagcctgcttcatccaacccagttcaacccatgaaagatgaggacccccagattcttgaaggtcacccgatctctatcagaggagagaagaaggcttgggaactcctggaaggagccatagtcttggaaggaattccagtcttccctcaggctatggataagcaagagtaccccaagtcctcctaggattccccgccagagttgtttgagcccctcaccatgaaaaagattccagcaccatcccttgaagtcaaggaagaagctgcaagcaccccactagcactgccgccctctgaggagctacaagagccagtccagactgaagaagagttcgaccctgtcttgccatctcagttgccgccagaagaagtcatcaacatcagctccctcttgacccatcaaggagatgtctcagattgaagttgtgcgccagccttgccagaagagaagctgtcagatttgaagttagttatgcccagtcctctgcatgcattgggtagtggagtttttcttcactttggctagagccctgcatgtatgagaggtaatcgtgtagacttgtgttttacaaaactctaattgtgtggccccctaggaca

SEQ ID NO: 43608 - DNA, 2790 bp, Zea Mays
cctagacgctcatgggccggttctgccttatctccctccctcctagtcctaccacttcctcattccccacgtactctctcggctgctcgcttatggcgatcgaagctgcgcgcctctcaccgtccatcgccgccgccgccttcctcgccagccgcccccctcttgccctccgcccgttctcccttcgtcgcaggtttcccctcctccgcgtcctcgccaactcatcgggaggggacggacgcgtcgtcgctctgtcctcgtctgagctccgaaagcgccgaggcctgtcttcctcctctggggctgcggactccgcatctgacggggatgagaagctacgctcgcttcgtcgactcttcgcgcggcccgacgttgctattgacgcctacatcgtcccttcacaggacgcccaccagagcgaattcattgcagaatgcttcacgaggcgtgcctatctgactgggttcactggcagtgctggtacagctgtggtcacaaaaaataaggctgctctctggactgatggccgttattttcttcaggcagagaaggaattgagccaccactggacactcatgcgcagtgggaatcatggtgttccaactactagtgagtggttgaatgatgttttaccatctggttgccgagttggtattgatccggatgcagtttcttttctcatttgatgctgctgaagaactgaaggattcaatcgccaataagaatcatgagttagttttggttcagggcatgaacctagttgatgagatatggggagatgcaaggccaaatcccccaaaagaaccaactagggtgcatgacatcaaatatgctggtattgatgtgccatcaaagttgtccttcattaggtcacaacttgctgaaaatgggtgtgatgctgtggtaatttcaatgctcgatgaagttgcttggttgttgaacatgagaggaagtgatgtcccacattcaccagtattttatagctacctcattgtggaggttagcactgctacactatttgtagacaacagcaaagtttctaaagatgttctggagcaccttgagcaagctggtgtgaaacttaagccatatgaagcaattatttctgaagtagaaagactggcagagaaaggtgcaaagctctggttggattcttcaagcgtgaatgcagccataattactgcatttaaatcaagttgtgacatgaaaaagaaaggaaaagcaggtgaagaagttggagaaaaagaagcatcttcaaacgaccggataactggagatcctagtgtccacaatggagtcataagtgctgtatacaatgtttcaccggttgcacttgccaagtcagttaaaaatgatgcagaaattgagggaatgaagaattcacacttaagagatgctgctgctttagcagaattctggtgctggctggaggaggaaatctgtaaaagtgtgccccttacagaggtgcaaattgctgaaaagcttcttgagtttcgtcaaaagcaagatggatttatcgagacaagcttcgacactataagtggttatggtgcaaatggtgctataatacactacagaccaaccccagagagctgcagctctgtaggaagtgacaatctgtttttgttagatagtggtgctcaatacattgatggaactactgacataaccagaacagtgcattttggtgaggcttccccaaggcaaaaggaatgcttcaccagagttttgcagggccatatagctctcgatcaagcagtgttccctgagagaactccaggctttgtgctagatgttctggcacggtcatctctgtggaagattggactggattatagacatggcacaggccatggagttggagctgcgctaaatgtccacgagggacctcagagcattagctatcgatatgggaatttgacagccttacagaagggcatgattgtcagcaacgagcctggttattatgaggacaactcatttggcattcgtatcgagaatttacttctggtaaaggagcttaatctggcaaattcgttcggtggaatttcataccttggttttgagaaactaacctttgttccaattcagagcaagcttattgagtcatccttgatgtcaccttcggagatcaattgggtcaatgattaccacgaagaagtctgggaaaaggtttcccctttgttgagtggccattctcgcgactggttatggaagaacactcgacctcttttagatgtgtaataataactcaacgcacagcacggcttgactgcgtaagtgaaagaaatgaacagacatgtttggctggagcatctcttgaagatctgatggccttcaatggaatgcaactatatggcagtaaacagaggcaagacaatagatgcgtaggctggccagggttcagcggatgataggttgaggctggtgtatttgacatccagccaatttggtgcaacacttgaaaaatgaattacatgcaagccttttctatttattacactatcgacgacaccgtccattgtttgatgaatttattatttattacatttggtacctttttttatacaaaaaaacatctttttagagtgatgaagccatttgagaccatggtttcgtatatggaatcagtcagattcttagggtgctcttggtagggctatggcgaaaacaatttgagctatgatttttgtggtgaattatgatggagctgaagctattttgaagaaaacgattgataaaatagtttggtgacttggcgttactattaaaaaagactgaaatatccat

SEQ ID NO: 43609 - DNA, 3351 bp, Zea Mays
ctagcagaggcgctgagctgagctctcagccatggaagtggtcgatctctcccccacgtcccgccccctctcaccgctcctctccaccgcacccgcccgccgcctccgcctcctccctccccgctgcgtcgtcggcctgcgcgcctctccccggacccgaggactcggctgcgttggaggtagtctcagcagaaggcattctttttgtaagaacggattcttcgcaacaagcagttcgtcagcctcagtagaacccgctacccaggaattgggaacagcggatgcagtggagtggagtggggatgccatacgtcggcgtttccttgaattttatgcagcccgtggccacaagatccttccgagctcgtcgcttgtgcctggcgacccaactgtgttccttaccatagcgggaatgcttcagttcaagcctatattcctcggcaaggaacctaggcgtgtgccacgcgccactacctctcagaagtgcatacggacaaacgacattgaaaacgtgggtcgcactgctcgacatcagaccttctttgaaatgcttgggaatttcagttttggtgattacttcaagaaggaagcaaccacatgggcatgggagctggcaaccaaggagtatggattgcctgcagaaaggttgtggattagtgtttttgaagatgacaatgaagcattcaacatctggcacaatgaggttggtgtgccaaaggagcggatacagaggatgggtgcagaagataacttttggactagtggcgcaactggaccttgtggaccttgctctgaaatttattatgatttctatcctgagagaggatcatcagatgtgttgtttgcaggatttgggcgatgatagccgattcattgaattctataatcttgtctttatgcaatataacaaaaaagacgatggatctctagaaccgttgaaacaaatgaacattgatacaggaatgggccttgagcgtatggcacgcattcttcaaaaggttccaaacaactatgagacagacttgattttcccaattatagaaaaggcagctagcatggcgatggtgtcctatgcaaaagctgatgatgccacaaagacaaatctcaagataattggagatcacatgagagcagttgtttatctcatatcagatggggtaattccctcaaatatcgggagaggatatgttgttcgaaggctaataagaagagtagttcggatgggtagattgataggaataagaggtgacgggcatggaaactctgaaggtgcatttttaccttcactagctgaggtagtgatcagccttagcactgagatagattcagatgttgaatcacgacggagatcgatccttggagaacttcaaagggaagagatgcgatttgttcagactttggaaagaggagaaaagttattagctgaacttctggatgaagctttattaaatgctggtaataatggaaacaagccttccttatctggaaaaaatgttttccttttgtacgatacatatggtttcccagtagagattacagctgaaatagccagtgaacaaggcgttactgttgatattgagggatttgatattgaaatggaaaaccagaggaaacaatctcaagctgctcataatgtagtcagactttctgtaggaaatgagaccgagatagtaaagaacatcccggatactgaatttttgggatatgattctctctctgcttctgctgtcattaaaggtctcctagttaatggaaacccagttaatgaagtttctcaaggttctgaagtagaaatattattagaccggacaccgttctatgctgaatcgggtggtcaagttggagataatggtttcttatatgtgaatggaggggaagatagaagacaaacaacagttatagaaatcaatgacgtccaaaagtctctgggaaatatatttgtgcacaaaggcatgattaagcaggggtctgtagaggttggcaaggaagtagatgcttctgttgatgcaaaattgaggcagggggctaaggctcatcacactgcaacacatctactacaatctgctcttaaaagcgtagttggttcagaaacttcacaggctggttcccttgtggcgtttgaccatctccgatttgacttcaatttccatcgcccactttctgaagaggaattaacaacaattgaagcacttataaaccaatggattggcaatgcagcacatgttgagacaaaagtcatggctttgcaagatgcaaaaaatgctggtgcgattgcaatgtttggagaaaaatacggtgaacagagtcgtagaggttcccgggatctcattggaactctgtggtgggactcacgtcagtaatactgctgagattcgtggtttcaagataatttcagaacaaggaatagcttctgggatcagaaggatagaagcagttgcaggtgacgcttttgttgactatgtgtgtgctcgggacaattacatgcggcgcttatgcttatcccttaaggttaaggctgaagatgtgaacagtagagtagaaacaattcttgaagagctaagagcaaccagaaacgtagcatcatctctacgcagcaaaattgcagtgctaaaagcagcttctcttgcaagtagagctacaactgtggagccccagaatgtcaggattgtggtcgagaacatgggtgatgtcgacgcagatgggctgaaaagcgccgcggagtatctcatagataccctcaaagaccctgctgcggtgattttaggatcaagcccaggggatggtaaagtcagcctggttgctgccttcagccctgcaatcgtcgaaatggggctgcaggccgggaagttcgtgagtggcatagccaaactctgcggcggaggcggtggaggcaagcccaatttcgcccaagctggggggcggaagccggagaacttgcccgacgcccttgagaaagcccgagctgaaattgtggcacgggtatcaggttcgagctgattctccgctgcctcacacctgatactggaagtatagggataggattcatatgaaatgtatatgtaattgtcattggcattctaagcgaaaacacttgtatttctccctaccttgccgtgtacgctttctgcagatgacggagcaaattttgtagcttgtaattgtaactagtggccgaacagaacggggaaaagatcaaatcttcacacagcaaaactactgctcatgtttaatctaatcttaaaaacataagaaattatttgtcacatgatcaactaatagtctaatacctagactagaccaaatacatctgatcaagtcagccagccacgtgcgtccaagcaaagattgagc

SEQ ID NO: 43610 - DNA, 1183 bp, Zea Mays
aatctgacaatctccatcctcagatagaacagcctcccaagcgacagaacagcctcaggaggcacccccgcggttagtctcgaagcttccgttcggaaccagggttagggtttcgcgtcctcccgtcgtcatcctcagccatgtccgggcgcgaggtccgcgagtacaccaatctcagcgaccccaaagacaggaagtttggtaaagggaaggataagatcgacgatgaggacatcaccttccagcgcatggttgcaaagggattttggttctctactcggtggttgataccaacagatgcaagaggttgctggtgataggggaggctaccttcacggacgaggagcgatgatttgctttacctgaaagagcaaatggaagctgaagaagatgcagagcgccttcttcgtcatactgagaagcgggcatttgctgcttttaagaaagcagcaattttagctgattctacacctgctgtccctgtggctcttcgtgttgaacctaaacctaaaagtgatataaggcaacaagatcttttgaagaacattgttgggatcaaaccaaagcgaccaaaagttagcagcccttcacagccaccagatagcaataagcctaaacatacggaagaagaccctgtcggcgagttgtcgccatcacggaatccgttgggaccatctcatgggactgtgaatcctgaccacacagcgccaaggttagatgaaccaacagaggtgaagcaacagaacagagctggaagtttgcttggtttagcttatgagagttcggatgaagaatagttgatcatgcgattccaatgggaactggactatttcttgtcagatgtctgcattccaaacgacaggcctggtgtattgatgagagctctcactgagtcatcctcaggttacgggtttgaaacagcgtgggtttggaacagtcagtcaccaggtcatgccaggagtttgaaacattgtgggtttaaaacggccttccttcatatttgcagaggaaggctgcctcattttatcctctttagtatttagctgtgtaattggttttataattagattatatttaatattcataataaacattcaaacatccgatatatatagactaaattttagtgctggaaccaaacatcccctatattacagtacatcagtttgagggtttgaagaaa

SEQ ID NO: 43611 - DNA, 488 bp, Zea Mays
ctcgaccacctgttcccatctcgtgcttgcttccatctcgacaccgtggaagcccttgcccttgttcgtcctcttgcctccctagcctctccttgctcccctcctcctgatctacttcgtgcctgagatggatccaacattgaagtgaattgcggtgggatggcaggataggaaaaaggaaagaacaagtcgaacatgaaagtagcgacgtcgggtgagggatggcggcaaatcactgaactgcagcagttgcaaactacacgcggtttaaggctcactggttggagtctaaccttcagttcggtcctaatcaaattgactgaagtagctaaattaaaatatagggcccaattatgaggcttctaattggagttgctctaaaggatagatatagaagacgttgctgaagactgttagctgtttcagtaacataaaactgtgggtaggacaagtctctaatgtatataaagcaccagcttttctttatt

SEQ ID NO: 43612 - DNA, 832 bp, Zea Mays
aatgctagtgttcgtgatcaatactgccaccctatatacgcacgacaaacttgttcactgctgtattaattgcatctcgttgtaatcgcttacggcagtctattaaaacatatattatcttcgctctcgaatatttgtgtccggtgataaatagaaaagaacagagagagtataaagcaacggtaatagatcactatgtgaatgaagtaattacaggactaaataaccgaaccaaacaacatcataattattacaaaaggactagaaataattcaacgaacccgacaaattattctccactgctaatgttcgtgatcaatactgccatcctatacatgaacggcaaacttattcaagctaaacacagtagttccgaggcggaggtccaagctccaaggttccaagttttatacagctagctagctttgctatggcgtgcgagttgagagcgaaggagggcatggagtgtttgggtcgtgcgttttgccgcaatgtggtatggacgaggccttggtaacggataccgacagctttggtgacggcggcgcagcgccgccgccggctccgaggaggcgccgcgctggtgcggtcgcggcgtcagcatgcactgatgctgccatgagcaccagcgcaaggaacaccgccgtcgctacggccacacctcttgctctccctcctccctgcatcttgatcaggacttgcgtgcactactgccgcaaaaaaaaagggtagctatagctccaccggtcgataaaagatctcgactcgaggtgcttgtgctgttgtgcaatgctatttagatcagtggtccagctgaggaaacaatggtttg

SEQ ID NO: 43613 - DNA, 2018 bp, Zea Mays
cacttacgccaccttatagatgctttttagaactgaaacagaaagtaaagacccagaaatagatacactttcatttactgagctgagggacaagctgcttgcccttgatcctctggatatagatcatgtggtgaaaatcaataaagcggaagctgagtattggaagaagtcagaagggtatcgcatgggctagagtgatgaaatactgggcttcgattgtggtgggcagcagtgggtttctgaaaactgcttccccaccagaaccctagcaaagccaagtatgaaggatcttgattatataagtaagctgttgtagttgattgaaaaggaggagatacccgcacctggacctatggagcagcgttggactgctcgcagcaagagcccgatgagcccgagatgaagctctaaagaagatgatgtattttcatgggttggtattataatgtatctgccaacatctgatgctcgccaaaggaaggaaatcacagaggagttcttcagttacaggagcctggcgcgaagtctctgggatgattattccgcctatgaacactgggccaagatcgaggtgtgggctagcttcaagattaattattcagacactgtttgtgttcttcctattttccctagggttcagaagtgaaaacagcataagtcttctcacttgcaccgttgcacggatatctgattgggttattttagtttcatggcttgtgattgttctgtctccactcttcaatcaagttgcacggatatctgattgggttattttagttccacatttatagtgcattggtcttgtatttgtttcgtacaacttaaatctggaggagaacaaaaacttttaaaatttagatcccagttcatcagttactccctttgtcccaaattataattcgtcataggaatttaatgggttctgcttctgtacagcgttgcagcccccgtgaccgtcatgttggaccaatgttcttatttcacacagtctccctacacaagattactgatactggactggagtttgtgctttattggcttatgctatcttgttcaatgctttctcttgctttggaattccttaaccgtaagcatggaaatgcaattataattctaaatccttctttagtaaggtgccttttgacttctcaaaattaaattgtaactaattttgaagctctacggaagcctaagcaaatgttccatcaaattctgaagaaacaaatgatgcattgactgacagtatatcagatggacatgcaattgcaggaatttattgaggaggttatggctctggtagagcttgatcagctgagatatgcattagtagggaagcagggttctactgggttatcaacagagcaaatgaagggccttactaatttttcaaattctattgcttattgtagcagattgctagagttaccttacttttttcttgtaaaagaactattttgtttgttactgaatctcaatttaggggggaatacttccgcaactatctgcccatgatatcattaaatgtttttctaagatacttgttctccacacaaggccctttttatctgatactaatattgtatcatccaatgcaggtaatttcaatcttttagaggatcgtgcttttcttttggattttgtcttcaactatccttgtaaaggttgtgttcaggttgagctatcctgaattatttggagctcatggttctctttttctcttctttttcagcattaacctttagatttgtgtaatggatttctgcaacatcaagattgatacttgcaactccattgataagactgcatgctcaaataaagcttggaccatgaagtgagatcaagctcatggacaagtagcgatcatcttttatccaatcttagtgtattcccaatagagcacacgtgaagaaaatattttgtttgactattgtaaatgtttaaggcaatgaaaattataaatatgaaatagttgtggtatatgcatgttattcaaaggagacttcgtctgcagtttacta

SEQ ID NO: 43614 - DNA, 6269 bp, Zea Mays
gaagtaccatgagggactcctcaagttgcaacaaaaagactatgcaaaagctcgtgaacttctcgaggatgttttaaaggacccactaatatcaaatgttcaggctgataacattggcagtgatcagcatttgctgcagctaaggtttttgacattgaaaaatcttgcatctgttttccttcaacaaggttttgagttctacgataatgctcttcactgttacctacaagctgtagagcttgattcaaatgattcagttgtctggaatcatctgggaacactttcttgttcaatgggtttgctgagcgtatcaagatgggcatttgagcaagggcttgtatgcagcccaaacaactggaactgcatggagaaattgttggaggtgcttatatcaattcgtgatgaagtcgcatgcctttctgtagcaaatttaatacttaatagttggccatcacatcatcgtgctttacatgtgaagaagaccattgaatgtgctgaaccggtaccttttgcacctcgtggtattgacatacttgaacccaagcatgcaaaactcatcttttcgaataaaagaaaatccgttgatgatgaaatctgtcaagaaatagggacaaagaagagtaaacacagtgctacattgcaattgaatgaagcaaaatggttggcccttttagatggtatcctaagcttaataagtgcaaacaccgagaaggctggtgaatataattgctcaaatactgttgataggtgttcaatcagtgagggtagtgccaaggggcttgcttataacattatagacgttgtcatatctacagatacattgaaaagtgtggaaactgctggtggaaatggaaatgattctcaccatggtgagattctgccatatgattgcaaagctacagttaaagagaaagatggtaattcagatagggaacatccccatgaaagacggagcacacgccttgagaggctgcgaagtcgcaaatctggaaaagatgaaaatggatctgatggtaaagatatatcccatgctatgacccagtttctagaatcatttattctaaaaggaccaagccctgtagaaaaggcttattgttctggaaatgccgatgcttcaaatcctgatactcataactatacatccaacgaggaggcaaatgatcttaagcaatttctatgcaagatatccaagaattttggccctcatcacattggttatatgttacttgaggagatggctcatctcaaagtgccattccaagattattttgtcaagttaattgaactggacaaacttactagaggctgggctgaagacagatctgcatcgtgcaatttatttctagctgaactgtactatgatcgggctttgtgttctggaagtccaccaacatcttctgagctgtctgattcatcttaccatctttgtaagatcattgaatcagtagctctggaactgccattcaacatatctgttagagaaatacattccaccaacttggatacggaaagtagcaggacaggtgaatcttcaagtgaattaatcgagagaagtcatgaaaatggtcacatcaacatgcttaatgaccaaaagtccaaacatgattcttcttcaaacatgaattgtgcattctggattcgcttcttctggctgagtggttgcctgtccctttcatcagactgcaaagagaaagcttataaggagttcaatattgccctgtcaatactaaaaaatagcaacaaaactaaaagctatggagaggtcattcttctacctcacaccaaacttgtaaaatcacttacaactgacaggattcttcgtgaaatcaacttgatcaggcttgaatctctactttggaataatgatgagaatatcaacaaaataactcatacagagttcatgcagttgctacctccacttttgctttccaccaaagatgcctacgttggaaatgcatatggtccacaaagagaaagcgagaatgttatttcacttgagttgtctgccttggatgtcttaatatctgcatgtgaaaaagcaaaaccaatgaacatccaggtatatcttgactcccatcgaagaaaaattcaagttctaactgtggcagccggcatggttggatctgtcacacccctgaaagcgaaaggttcaagcaatgtggaatttgtggaagcaatgaacaggaaccggctagaaaatgttgtggaagcagtcaaagatgtgtctcgaaatgccagtaaagcaaaagacataatcgatcaatgcgataattccgatgggcaagatggctggagcccactaatgtctatcgttggtgatattcaatcattgctcttgacaatcatgtgtgctgctgtcaagataatactatcgagaaaactctcatgctctggaacctcctatcaggttgaccacttggaatgttcctgtctcatagatgcagccattgcattttgcaagctccagcaccttgatcctacaatatccatcaaaactcaggttgacttaattgttgcagtccatgatttgcttgctgagtatgggctctgttgtgctggaagagatggtgaaggggaggaagggatgttcctaaagttcgcaatcaaacatctcatggctctagatgtgaaactaaaatctcaactcaattcaaatgggatggaagaagatgcagttccaaaagacgtcagagcagaagacagtgtggccgatgaaccatcggttagtgacaataagcagaactccgatgatgaggaagaatcggagttagatgagattcagtcatgtcttgatagtgccttggaccaggcttttttctgcctgtatggtttgaagatcaacccagattcttgcagtgaagatgatctcgctgtacataaaaatacaagccgcggtgattatcaaaccaaagaacagtgtgctgatgtgtttcaatatgtcctgccatatgcaaaagctctatctaaaactggcttggttaaattacggagagtgctgcgggctatacgtaaacactttccgcagccaccttatgacttatttgttaacaaccctattgataatttcttggatggacctgactcatgtgaaaaaatactctctgaaatttgtgaaagcaatgaatctagggaagctatcctgaatgtattgttcccaggtgaaagaggctatgaagcattcaaaaaactctccactgccagctctgagccttattcagatgtttatgagaacttatattatttcatagctcaagccgaagatattagtgccaccgacaagcatacaggttttgttttgaaaaaggaaggagaagaattcgttgaacagagtgccaatattttcaagtatgatttgttgtacaatccattgcggtttgaaagctggcagaagctttccaatctttatgatgaggtggaagttgatctgttgctcaatgatggtagtaaacatataagcatcttggattggcgaacaaacacggatttaatcagaagggttgagatgggccgtcgacatagtcgacgctgcctattgatgagttcactactggccaaaactgcccctgagcagagcgaggcacatgaactgttggctcttgtgtactacgatagccttcaaaatgtggtgcctttttatgatcaaagagctactttgccagtgaaggattcatcatgggagacattttgtaaaaattctatgaagcactttgagaaggcttttgaaatcaaggagcagtggcttcatgcgttttaccttgggaaactgtgtgagaaactggggcattctttttctaaggcattatcatactacaacaaagccatgatgctgaatccaactgcagtcgaccctgtttacaggattcatgcatcacgcttgaagttactttacactcaaggcaaacagaatcttgaagctatacaggttgttgctgactacacatataaccagtcaacaaaagaaaatgtcttgagcatgctggggtcaatgactaaggttttgcagtcatcttctgataaaacatctttagacactaaagaggaaaataagttttttgagtccgatatactggataaagtgtggcacatcctttatgatgattgtctgtatgctcttggtacttgtgtggaaggggaactcaagcatttccacaaggcgagatacaagcttgcgcaaggatattatagaagaggtgaagcaggggacctggaacgggctaaggaagagctctcgttctgtttcaaatcttctcggtcttcctttacagtaaacatgtgggagattgatggcactgttagaaaaggaaggaggaaaaatccaaatgtgggtggatccagaaagaatctggaggtcagtttgtcagaaagttcacggaaattcattacgtgcattagaaaatatatgatactctatttaaacctgctggagaagaacacggacctgtggactcttgagaaggcttatacttatctgcgaacagataagaggtttgcattgtgtttaggtgatattgttcctgttggtcttgggaagtatattctagttctaacggcagcaattcataatcctgagattcgtcgagcttctggtgatgcttctgttgagcaattacttgagaaaatgttcactgtattcatggatcatgcgaacatgtgggctgatataagcaatataccagaggtgaacagtccagaattatcagaaagcaatctttacagtacatccatttgctcgagagtgatgtacgactagatgttctagaaggactaaacgagaagataagaaagcgtttcaagacaccgaagttatcaaatagtaacttcgctaagatatgcaagcatgcttctctggcatggtgccggtgtattctcatcaaactggcctcaatcactccactgcctgaatccgcagatgcaaccaatcagcctgcaccattatccaatgggcttctactctatgttgacttgcaacctgatgagcttcttatctcatcccctgatgggcctgctcaattcaaagggcttgacatgaactggtttgagacacttaacagaattaaaaacatcccggtcaagcaaacatccgaagataacttggagactgctgttacgttaatgaagagcacttataacttttatcgggagagcccttgtggaacatttccttcaggtatcaatctctacacggttacaccatcacaagctcctattgaagggctaccgccaaccgctgctgtagttgagacgctcgacttaagtattccaagaaaactccttctgtgggtatacactctggttcatggtcgttactcaaatatatcctccgttgtaaagtattgcgacgagatgaagttaagaagtaaaagaggaaccccagctgcgtctgcttcgtcacaagttgtgcagccagtgtcgcatagtaccgtttcttcccaagttgtatctaaagaaaagagctcccaagttgaacccgctgaagcagcacaaaatccttctgatctagctgccacttgcgttcctgcataccaagaagttggtggtgctagtgcctcgcaaagtgccattgaggcccagaaagctactgctgcggcatctcagctcactcgcagtggttcatcaagggcaatggaaaatgcacaggacggcggggagaggaagtaacgagatagagttcgattttttttatcctctatgctacatcgtatggatgcatatgatcctgcctgacgattctcaggtctcagctctccgtggctccgtgtgcaaatctctgccacgggcgtgttttaacgcctgattggatggttgcccgctggcgcgcccggccagcctcgtacggccacttcggacgcatctgcatcttcggaggtacccgcagatgtagatgaatggccgtaaaatggtttggtctgcgtctctttacatataaccaaataaaaactcagataaagttaactcatgtggtggtctatgttgagatgatgcgggtaaccaatcgaacggttaacaaattcaggtcgtatgtatatcctggtttacagttagtgtttcctaagtgcatttgtagattatagagctgtcaagattgaacgatacatctgtaaggtgttacaaatgctaaatgctaatcctgattttgtggctgatgctaaaaacctgtggactcttaattaccacagactgaactttccctcattttggcccaacaaatacaatagcagaggaagagtttcagttggatttggtggaacggtaggagcgtaaaatatcac

SEQ ID NO: 43615 - DNA, 2056 bp, Zea Mays
ccccgccatggacgccgctcttccttcctacagatgttgacaattggaaatccatgtagcaaataaatgattttggaactgggggcaggtcagagtctagagcatgttcattccacacattggaggtggattttcctcaattggagatattgacaaattggaaaaaaatgtgacttgacctgtgctgcaacaaccttaagggcttctttggattacaggaattttgaaggaataatgctggaataggaaagtttcctatcctatagtttggctggcatgatgcaccaattatattccataggattttatctctttatgtgttgattccataggatttctaacatccactcagagctcttggaaaaattcctacacgcgaagcacgagaagtggaatgctaatgctagcaactaatggcccattatggcttgtcctacccaaatttaaatagagaaaaacacatataaagcacccatttgatattgtttttatccaagcttgacattcatgcaaaatgaacccttcgttttttccttgccccaaccaaacaaccttccactcaatattactacgttttacaatcctctgatttgcacatacaatcctacgtttttcctattcctatgtttttcaattcctacatttcaaaggagccctaaactaggaggggcttctaattcttcatctctaccaacagtcctctcctgttactttttaaaccaataactttttcaagtttgtgcagatgcacacatccttgagccaaaatagaaaaaaaatcatagaagagttctttgggatgtgcagtggtggtctcttaaaagaattttgtgttccagcgtagctatttccactgcaaactatcaaatcattacaaactgctgggaacatgctccatcttattatcgaagcctgtatctcgagaaagttgatcgatacatctgcttatttatggcctggttatgttgtaccatctgggactttaaaagatacagctttgccccaagaatccccttggttaaactttatgaaagggtctcgacattcaggaccccttattgatgctctggtcgcatctcctgcttcaaggtgtttcaagctctgcaagatgaggtctgttcagtttggccaaaaaggcatcccctacctgaacacctacgacggctgcaccatcctctaccccgacccgctcatcaaggccaacgacaccatcaagatcgatctagagaccaacaagatcatggacttcttcaagtttgacgtcagcaacgtggtcatggtgaccggcgggaggaacaccgggcgtgtaggagtgatcaagaactgggagaagcacaagggcagcttcgagcagctggctggccccgacgcagcgcagcacgcaagagctagcggcgccggcgcggccggtgaaactgaaatccagacgcaccgctcacgcagctttgccaggcaaggcccagcagcgcagccagcagaaccaccagaggaccttcagggcgaagaagagcctgtcgtcgcccgggaacaaggcaggaacggtacgcaactgaggaggcacattgacgccactctcggcagcggcaacctgcgagaggctgtccgtctacccgtcggggaggacctcaacgagtggctggctgtcaacactgttgacttcttcaaccacataaacgttctgtacagcacgctggcggagttctgcactccacatacctgcccggtacgagtacaggtgggccgacggagagccaaggtcaaggtgcccatcaaggtgtccgcgcccaagtacgtggactacctcatggactggatagagatccagctggacgacgaggccattttccctcaacagcttggggctcctttccctaccaacttccgcgacgtcgtcgtcaagacgatcttcaggcgcctcttcagggtgtacgcgcacatataccactcccacttccagatgatcgtcaagctcaaggaggaggcgcatctcaacacttgcttcaagcactttgcgctcttcacgctgtttttcaagcctgacaagcgccccggatga

SEQ ID NO: 43616 - DNA, 731 bp, Zea Mays
ggaaattcatttttttggttattttcggggctgaattttgctacatggttctccaagacattatctgaattttatgggctaattcagtccatgtttctccaagtgtttatctctaacatagacacctaatttgattgatgcatggtttgcgtgctgaatctcatttgaatgtatggtctgaatctgttgttcctcttcttcagggctcaaggtcaatcagtcgtggtcacacttttccatttttacgttcagctaaactgacccccctgtctcgtggtgtgccagcccccatgttcctcttctttggtttatccattgtttttgctttgatgagactaggagtagaattaccattttcagagatgaactcaaacatatcctagaagcaagtaaactaggagtagaattatccttatctaggattccatacatagaaatacattacctttttttattatagatgcattatgtattgctcctttacttattcaaggaataactccagcatgtacgtgttcatgcattggaagcagtgatgagttactgggagctacaataatctttacaaaacctatcagatctaaaactgaacatcccagcactgcacaagaagatgaagtacatgcggaggattgggtggagtggccgcaatgcaacgacccgaggggcgcgcggactgggccgcgctgcagtaggaccccgtcgagctgctgcgcaagctggacgagctg

SEQ ID NO: 43617 - DNA, 2975 bp, Zea Mays
tgttattagttgtctgtgagttattacagactttggtatcatcctgctactgtagccccgttccatccacccatcaaagtgatgaaagctaaatttcgatttgatgggttggaaaacaggcccagtcattactacgaagtttccgttttgaaaaagaagtaatctaaattccatacgtccagtccaagtgttcagtgttcttcatcgtcatctacacacacggtatttccttcacattgtgcttccattccaagcagcctcgaatggcaaccagcaagaaaggcctgatggctatggtgtatattcgttctgccttcatcctcatattcttgagttcaccctgtcaatccaacgaccagctgactcaaacaaagccactcttgctcgaagacacgctcatctcggagggcggggactttgctcttggcttcttttcccctaccaattccagcaagaagctatacataggaatttggtaccaccgcgtcacagaacgcacagtggtatgggtcgccaaccgtgacaatccaatcaccacaccttcagccatgctcgccatcaccgacaatttagagctagtgttatcagactcccaaggacacactctttggatggcaacaggaaacacaagtggagatgctggaggagctgcttctgcggtgctactcaactctgggaactttgtccttcggttgccgaacggcacggaggtatggcatagcttcgatcacccgaccgatacaattcttccaaccatgaggatcctcctaagcttcaagacacaaccggcaacacgtttgattgcttggaagggccctgacaatccgtcaactggggatatttcttctggcatggattcaacgaaccttcagatgttcatttggaaaggggcactgccatactaccgtttccctgttgttaatgatatggcagtcgccggtgctatgtaccagcagagcaatggaaacgccgccatcatgtatgaaacgagggtgaacgcaggggatgcgttgtattatacgtacacagtctcgtccggttcaccctacacacgcttttcacttgactacacaggcaaagggagattactgagctggaacagcaccacatcgtcatggacagtcattatcgagcatcctcatagctgtgatctctatgcttcttgtggtccattcagctactgtgaccaaatggggccactaccgacgacatgccagtgccctgatgggtttgagctcctcaacagtctaaatttctctagaggatgccggagaaaggaagagctgaaatgcggagtggggaactatttcatggccatgtctagtatgaagcttcctgacaagttcttgcacattaagaatagaacctttgaccagtgtgctgacgagtgcactagaaactgctcctgtatggcatacgcctatgccaacctaagcagcattggtgctgtgggtgacacatcaaggtgtttggtttggagcggggatctcatcgacatggagaagaacagcttttcagaggtcttgtacatccggcttggtggatctgtaggggcgcttcccctcctggtgcatgtataaaaaagttcgaaggaagagcagtttgctgaaaattttactcccaattatactgtgtgtgctgctactcatgcttggagcccttgtctggacatgtaaaagcagaggcaaacggcaaaagaagagagttcaaaagagaaggatgctagaatacttgagttctactgatgacgctggggacaagaacataaacttcccatttattagctttgaaaacattgtcacagcaacagataatttctctgaatctaatttgcttgggaaaggaggttttggcaaagtgtacaagggaatgttggaaggcacaaaggaagtagctgtcaagagacttagcacgggttccggccaaggcaaggaggagttcaaaaatgaagtagtcctaattgcaaagttgcagcacaagaacctagttaagcttctcggttgttgtattcatgaagatgagaagctgttagtttatgagtacttacccaacaaaagcttggattacttcctctttgcttctgcaagaaaatcaatgcttcagtggccaacaaggttcaagataatccagggggttgctagaggaattatgtatctccatcatgactcaagattaactgtaattcatcgagatctaaaagcaagcaacatcttgctagataaggagatgaacccaaagatatcagatttcggcatggctaggatattctctggtgatcagctccaagcaaatactaaccgagttgtagggacatatggctacatgtctcctgaatatgcaatgaaaggtgcattttcagttaagtctgacacctacagctttggtgttcttatattggagattgtaagtggattaaagataagctcaccatatcttatcatggatttttctaaccttataacatttgcatggaacatgtggaaagatgggaaaccagaagattttcttgactcatctgtaacggagagttgctccctcgatgaagtttcacgatgcatccatataggactcctgtgcgctcaagacaatccgagttgcaggccactcatgtcaacagttgtgtccatgctggagaacaaagcaacaccactgccaacaccgaagcaacctaaagattttgcacttcgggactacaatcctggaaacgaaggtgtccacagggaattgtccgtaaatgatacaagtctcactatggtggagggccgttagattattgtttttgatactacgatgggggagcacatagcccaccagaaatattcattgaagacagacgtttagtccctattttgtttatgggtatttctgtttagacaaatttagtatcaatttaatctataaaatttattatgcaagaacaatctattggaaaggtaaagtttattatgcaatttatcaatttaggtttagattca

SEQ ID NO: 43618 - DNA, 7220 bp, Zea Mays
agagctagaggcaaacatagcatgtgaaacaaaagcatcatgaacataactcctattataattggaatgactagcaactttcctattataaatgaaagcatgattcttttgattactactagccttaggggccttccctttctccttgttgggaatgggagtcctttggcttgttaagttcttggcttcctttcgataaccaagcccatccttaattgaggggtgtctaccaattgtgtaggcatccctagcaaattttagcttatcaaaatcatttttgcaagtcttaagttgagcattaagacttaccacttcatcactcaattttgtaatagcaataagatgttcattacatgcatcaatgtcaaagtccttacatctattacaaatactgacatgctctacacatgaactagatttattagcttcctctagcttagcatttaaatcatcattcaaaatctttaaactagagatagattcatggcaagcagataattcagaggataacatttcatttctcttagtttctagagcaagagatttttgaacactaacaaatttatcatgctcctcatataaaatatcctcttggttttctaacaatctatccttttcatttagagaatcaattaattcattgatcttttctaccttagctctatctaaacctttgaataagctagagtaatctacttcatcatcactagaatcatcatcgctagaagtagtatacttagaggtatatcgaatgcttaccttcttctccttggccatgaggcaagtgtggcgttcgttggggaagagggaagacttgttgaaggctgaggctgccagtccttcatcgtctgagtcggatgaagagcagtccaaatcccattcttttccaaggtgtgcctcacccttcgccttcttgtaaaccttcttcttctccctcttcccatacttttcttgttcctggtcattttcattatcggggcattgagctataaaatgaccagtcgtaccgcatttgaagcaggagcgctttccctttgctttattcttgggagggatattctttgcgtcctttgagcgcggtcttgaagtgcttgatgataagcgccatctcatcttcattgagtctggcagcctccacttgagctaccttgcttggtagcgcctccttgctgcttgttgctttgagagcaaccggctgtggctcgtagatgggtagtggaccattcaaggcttcatccacgtatcgtgcctcctttaccattatgcgcccgctcacgaattttccgagtatttcctcgggcgtcatcttggtgtacctggggttttcacgaatgagattgacaagatgggggtcaattaccgtgaatgatcttagcataagtcggacgacgtcatggtatgtccatcttgtgcttccatagcttctaatcttgttgatgagggtcttgagcctgttgtaggtttgtgttggctcctctcccctgatcatcgcaaatctccccagttcgccttccaccaactccattttgttgatcatggtggcgtcgtttccctcatgcgatatcttgagggtgtcccatatttgcttgacattttccaagccactcaccttgttgtattcatccttgcacaaggatgctagcaaaacagtagtagcttgtgcattcttatgaatttgctcatttatgaaaacggaattgttagtactatcaaaatgcattccgttttcaacaatctcccaaatactaggatggagagaaaataagtgactacgcattttgtgactccaaaaagagtactcttctccatcaaagtgtggaggctcccaagtggaattgatagcaaatgagcattagaattaaatggaatacgagaataatgaaatgaatagttttgattcactggtttcttctttgacgaggagtcatcatcgtcgtcgtgtggtgaagaagacgaggcatcactgtcgtagtagatgatcttctttatgtgcctcttcttcttcccgtccttcttcttatgactcgagctagagtcagtgggcttgtcgtcttgtcggcgtttcgaccccggggggtccctggaccgacgagtaaattgtcgctgcgtgtcccagcccagatgggtcggcgcgagatggaacacaaggggggaaaaagggaaccgcggctcgtgttatcctgcgcccagggtggatgcgcttgcagtagggggttacaagcgtccgcgagagagggagagagcctgttcgtcagcccgtcctcccgcgcggccacctcctcgtacgagggccctggaccttccttttatagatgtaaggagaaggcccaggtgtacaatgggggtgtagcaatgtgctaacgtgtctagcagagaggagccagagccctatgtacatgccgaagtggctgtcggagaggtgttggtgccctgttcatgtgatgtcgtggccgtcggaggagtgcttgagccctgtagaagcacagctgtcggggctgtcgggtccttgctgacgtctccttgcttccgtagggggctgagaaccgccgtcgtcatgggagcacgcggcgtgccatcattacttgtttaccggagcgagctagatgggacgccggtcttgttccccgtagcctgagctagctaggggtagccgggtagggtaatgatgtaccccctataacgtggtcggtccgagcccaaggtcgggagaggcggtgactcctccgaggtcgaggctgagttcgagccctggggtcgggcgaggcggagaccgtcctccgaggtcgtccgagccctggggtcgggcgaggcggagaccgtcctccgaggtcgaggctgagtccgagccctggggtcgggcgaggcggagaccgtcttccgaggtcgaggctgagtccgagccctggggtcgggcgagacggagaccgtcttccgaggtcgaggcgggggccgagccccggggtcgagcgaggtggagcttcctatggcacctgaggctagactcggcgtctgtcagcctcaccctggtgggtggcacagcagtcggagcagggcaggcgacgctgttttcctatcaggtcagtcagtggaagggcgaagtgactgcggtcagttcggccctgccgacttaggtacacgcgtcaggataaggtgtcagacgatacttgcattgaatgctcctgcgatacggtcggttggcgaggcgatctggccaaggttgcttcactgcgaagctcgcccgagctgggccttgggctagtcgaaggtgcacccgtcgcttgaggaggccctcgggcgaggcgtgaatccgcctgggtctactgttcctgtccaaggctgggctcgggcgaggcgagatcgtgtcccttgagtggacggagctttgacctgtattgcgcccatcaggcctttgcagcttgtgttgatggtggttactagccgagtttaggagtcttgggggtacccctaattatggtccccgacagtagcccccgagcctcaaagggagtgttcgtactcgcttggaggctttgtcgcactttttgcaaggggaccggcctttctcggttacattttgttccggtgggtgcgcgcgagcgcacccgccgggtgtagcccccaaggcctcggaggagtggtttgactcctccgaggtcttagtgcctttcgtgatgcctcggccggtctggtttttccctcatgcgatctgatcgtagcccgggtgcatggtcaggttctgagtccttgggctggtatgttgacgctgtcaacggtttggccggagccgagtttgcgagagagcccccgagcctctacacagagcgagaggacggtcaaggactgactcggcttttatcatacaccccttcatcgcctttccgcaaggaggagaggggaaagcgccatgttgccctcggagggcgccgaacatggtgtctccagtgagttgctaacgggtgatccgagtggacgcccgtgccccgttcgataagggttggctagtggcccagaggcgcactttaaaagtacctgcatgtgatttgccggacctggtcccgtttgatagggtccgagggctcgatgccccctctgatgggattccattacagaatcgctcctgctggtctcagaaatgtcctagggtacctcgggagcgtagcccgagcctcaggcatgtatcggacgtacccagagtcatccctcgctttgcgtgttctgaggcggctgtcgaacccttcggggggccagccttcgaacccctgatcagtagtgggcgtggagcccgagtggcctgaggcggctgtcgaacccttccgaggggccaaccttcgaacctctgaccagtagtgggcacggagcccaagtgctctgaggcggctgtcgaacccttccgaggggccagccttcgaacctctgatcagtaggagggctcgaggcccgcttccttcgcagagaaggatccctttcgaagtatcccctttcccggtccctgtagcaagagagagaaaggggaagaggaaaaggatacgaaattgaacgatgtggcgcaccttttttgacgcggtcatcatggcggaggtgaagcatcgcctgcttcgcctgccaaaggtgtcgcctgccctgccgcggagttaatgcgacgggacgagtggttcgcggggccgccgttgcgcgagccgttcgtggaacgggcgtttcgtcttcgaatctgaatttcgcagcgggttcaggcgaagcgttaaacgggtcttgcccgggcctttatatatccggaaggggggccggtggtggttctttactctgctgctcgcctcctgctttggtttccgcaacgcaagggaatagccagagaaagaaaaccacgcaccttgtccgctccgccgccacccccttcgcttggcgatggcagaccgggtaaccgtcgttccgccgcgcgacccgtggcctttctccaccgtaacggtggacgatctggaggcccttgtcgccgatggcttgctccgtcccctctctggtgacccgcagccggagtggatggtccctccgagcggggccgccccgaccccgccggcggggtatgtgctgagttttgtctccttccatgagtgggggttcggagtgccagcaagccgtttcatgcgggcgctcctgcattactacggggtggagctgcacaatctcaaccccaactccatcgcgcaagcggccatcttcgcggtggtttgcgaaggatttttggggattgacccccactgggatctgtggacccatctcttctctatggagccttttgccttgacgacggggaaaggagggtccgcatggcggtgcgggccggtggctgcatcctccagttgaggcaggcgcgcgcgcaatagtacatcctcgccatccttgtgtcttcgaacaaggggtggcagcgccggtggttttacctccagaatgacgatgggaggctcccgtcgttttctcaacgagtggtgactgccgctagcagcaactggcgctatggggctacgcacgagaaacagaagaatctccagccccttctagaggccctgcaaaagctacgagacgtggggcttaccgtcgcgggggtggtcgctgccatccatcgccggagggtgcttcccttgctagagcggcggttgctgctttcggagatgatgccgggggtcgacttggagggttcgcagatgtccttggtccccctctccgctgatgacctccacaggcgggtagctggcacggtagggaggctggacaccggcgcccttacccagcccttgatgcgtcccgagcgcgggtgcatatccctggtgagtgtccgctccttcttctttcttgtgtcagattgcccttggttctcacagtcgagatttccgtccgtctccaggagttggggtgtcacaagccttccctgccaccggtcctggaggacgcggtggaccgagccgcgcgaagggtcgctgcggagaagaagaaggagaagaaggacgcgaaaaaggctcgggctcgcgagcggatgcgggctcgggacgccttggagaggcaccgtcggaggcaggagagggacgggctcccgagggagccgtcgccggagacgcctgacgacgacgatgacgatgatgatgacaaagacgacgacatggcggcccgccttggcctcagcccggatctgaggctgggccaggggtcgtcgagccagcccccgagtgggctggtgccgtcggtatctggggctaggacatcagggtcccggtccgaagaacaggggcaggctgagggggtacttgaccccttggccgaggtagctgaggtgaccctagggagtcaggccgacccgcctgttccccaagagccgttgcccgtgccggccgcacaggaggttgatcctcaggttgtcgtgactgcgcctgggcggaccgtcccttcggtgccccgggcgcccgaggtggggatggtgccgaagccggcagcggggcaaacctcggcagtgcccgcggggactgaggcgcgaggggcctcctcgcaggcacaattggccttggtccggagtgggtaagtatctgaggatacctttgtcccgactccttcttcatgtgtcctaatcctgcttttccttttccttccagcaaacggaggcacggttcgaccagtctggctccccggaaggtccttaagatggcgccggcttctgcagccggtgtcgcaccgggccacgtcggccggctggcctccacacaagatgcccccaagcagagagctcaggtggcacgagttaccgtggggcgagctccctaggctgacccctccgtcgaggcggccgtcgtgccgagggagactactggcgcggccgcggccttgagcccacctgacgtgttgccggcaccggcaccagcttctgcccaggctgttgccgttctggccgtggagccacccgtcaccgccgatgctgagatggctgaggcaccgctactcgaggccggtgatcggaagcctgcccccttagccgaggaggtaccagatgcaccgactgcagggggtgccgatgccttggaggagaggggcgcagaaccgcgacccgtcccggggagcggcgacctcgtcctcgcgcggcgcgatctcaatgagcggcgtgggcaggcgctccggttctggacccgtggtgcctcgaaacccctcttcgttcttgacgatgagcgggaggagcagtctcg

SEQ ID NO: 43619 - DNA, 651 bp, Zea Mays
tgatcatgtctctttcatgtgctatgactaatgtgttttcaagcctatctcaaaccaagtcataggtatattgaaaggaaattggagtcttcggcgaagacaaaggcttccactccgtaactcatccttcgccgcctctccacgtttctctccatctttagggggaaaattccaagcaaaaagactttgtctttgggggagaaagtaagagcccaaagcaaaaggaccggacttcgtctttggtataatcttaactcatttatttatgaccaaaggggaagaaagcacttcaagggctctaatgattccgtttttggcgattcatgccaaaaagggggagaaatgagcccaaagcaaaaggaccgcaccacaccaccaatttcaaaaacttagtgttgaatatttttcaattggtatcctattgtgttcaaaagggggtgaggtagtatttcaaaaatggtatatcaaaaccctcttgaacactaagaggtggatctcatatagtcaaaagagaagcatttgaaacaaggggagaaaatttcaaatcttgaaaatgctttgcaaaatcttattcattcacctttgactatttgcaaaagaactttgaaaaggattttacaaaagagtttgcaaaaacaaaacatgtggtgc

SEQ ID NO: 43620 - DNA, 1604 bp, Zea Mays
gtatgcgttcggcgacgcgacgcgcacggcgcaccattccgcggccacgaagagcacaatcctgttcgccacgccatgcctctccacgcccgcgcaccgccgctccgccactcccaccttctactcaccgccgccaccgctcggctccgcccgtgcgcagcgccagcgaccaagccccgccgccgctccctcgtcctcgtccgcgcctccagctcggaccctccgcagcagcagctcaacctctccgtgctccgcttcaccctcgggattccggggctggacgaatcgtacctcccccggtggataggcctcggtttcggcgcgctcgtcgtgctcaaccacctcctctctgcgtccccgacgcccgcgcagctcgtcggtcctcggcgactcctcctcacccccctccgtcccctttcttcacccgtaaccgtcccgcgtaactggttgtgcccgcctactcgcagaggtccgaggctgtggggctgtgcctggccgcgttctcggcgacgctgccgttcctggggaggttccttgagggcgctgatgctgccagccgagtgccgttgcccgaggggagcatccaagtattcgtcatgtctgagaacctgtcagctgtgcagaaggaggacatggcgtgggcgtcgtacgtcctgctccggaacacaaacaccacgtctgtggtcatagcaattggggatctcttgtgcgtacgaggatactggaatccacctgcaaatacttcaaaatattccacgatcgagtggttcaaaagtcagatgcagcaactaggacttgttgatttgaggggtgctttatacttccctaattcgtcagatgggattctttctgtgctagcgcaacctattctgagtcctgatccagctaataatgaaacaaaaactgaaggtgtcatcctgttggcctgcaatgcaaattatgcatatagtgagaaagatagggcttggataagaacagttgcagacaaatttcaacgtgcttaatttagagaaatgttgacagtcaggcagtactggaaaatggaccgggaaagattggggagtgtaaagtagactgactggtccaagaaggatttggagtcttggcaacgtggactgagcagaataagagagttttgcagttgggaggaaatcagcattaagctactgtttattagggttggcgctagttgaagcaaaatagtccagcaatagtttgttcagttggctagagactatgtggtgatgtgtttggtttgtctctgtgcctcttgctttggtatgtatgtctgattggatttggcattgaagcagaaaggctgctccagagattagtgacatgtgcaaagtagcaatgctgtcataatttacgcatactccagcccaattgaggcagttgatcacctggctgcatttatataagcagtaaaagcatttttagttcaaagtgttgtcacatttaagattgcaaatactgctgatcaatcacattccttcatatatgtacctagattttctattgcaggcttgcagctagtgaccttttcagttgctattgctagtatacacaaacttaacagacaagggaaatgtttgaatcttctg

SEQ ID NO: 43621 - DNA, 2969 bp, Zea Mays
aaaacgtccacggtccacagggcacaagccaccaacactgacccaatccgaatatacagcccgaaaagcaactatttttttccgtgttcttctctcctcttccgctccccaccgaaagcataaacagcacaccggcaacgggaaaggaagggataccgacgcgagcacgcgccgagcaacgtctcgaaaaggccatgcaggacggcggcgaggtgctgttcctggacggcgtcggggaggtcgccgtcaccatcggccgcaacggcctctctgcacggcccctccacccgggctggatatttgttgctctgggtgctcgatcgaagagattggaagatgataggaaggcggtgagaagatgaccagatgagtatggttccccaaccaccgtcactatacttggtttataattgggagaggattcacgaaaaagtggatggaaactctgagtttgcataatgcacatgatcactgtcttgggcagtctaggtatctgtacaacctaccagaagaggctgctttaggtgcttgcgatatgagtgctttgttggctgaaagacatccttttgcaagagaagaaaacatgcaaatcctagttaagtactccaaactagaaacagaatcctcatctgtgtctgaaggttagcctgataaatggttttaagggagtgcccttggaatatgtgtggtcagcaccattgcatagatcaccaagtggaaagataacaccactgatatgatatgtgccaccgagccgcacatataatcatcacaccggattgatggggattaaatccctttctattcaaatttgactagcaatccctccaatccactcctaaccgacacaagcctgtaatgtgctcaaattgccttttttttacaggaactgatctcttcatgttggtcgtccattacactgcagcctaaattagacagcaaaatcaacttttcagatgtttatgccatagagatgcttgataagggtcgtatctgtgggccttggaatacaaagactgctattcaaggcaagaaaaatattgagatgcaccggtttgtcgtacatgggattaccagaagaaggaaacacccttctccgtgggtaccttgtgaatatatttttggtcacaaagacttgaagatctgcaaagattggtttcagcatctcatttcgtgcataaacaatgaaagtggtagaccaaagaacttaatggtatttgttcatccattgtgtggaaaaggtagaggggtcagtaactgggaaacagtgtatccgttatttgctagagcaaagataaaaacaaaggtgatagtgacagagagagcagggcatgcatatgacacactatcatcattatcagatatagaactgaaggcatttgatggtgttgttgcagtggaggaatagaattagtggaataggcaattgtattgctgagcctcgtgatctcccttagagataaggcaagtcagggtggcgacggtctatttaatgaaattctgaatgggatacttagttctaggcacaaggtttcatatcccccaactcctgaggggtttggatatgttggaagcagtgataactgtgaagaacagacaagaaattgggttaactttagtaaacccacaccagattctgggaatgccgtgtttctagggaatccaagtaaatgtgatgaccaagaacctcttctttcaacttcacatcctaccgagctagagataccatcaaattctactaaagaaccatgtattggagatcaggataacccagtttccttcccaaatgactggtttaggcttggcataattccttctggctcaactgatgctattgttctcagcacaactggggagagagatcctgtcacctctgctctgcttattattcttggcagaaaggtgtcacttgatatagctcaagtcgttagatggaaaactagcccaacagctgaggttttgcctactgtacgctatgctgcttcatttgcaggttatggcttttatggagaagttatcagggagagcgaaaagtaccggtggatgggtcctgcacgttatgacttttctggaacaatggtctttctgaagcacaggtcatatggggcaaaggttgcttttctcgatactccatacactcattcgcttacagcatcagcacaggatgatataactggagcacaaccactacaatctcgttggaagaaacctcgcaaaataatctgcagaacaaattgctttgtatgcaaagaggcttcaacatctggacaaaatccagaagatgttgcagacaactccagaacaatatgcgagaaccagaagtgggtctggtccgaaggacatttcctcagcgtcggtgcagctgtcatttcatgtcgtaacgaaagagcccctgatggcctggtagctgacgcacacctttcggatggttttcttcatctcttgctcataagagactgccctcttcccctttacttgtggcatctaacacaatttaccaagaagggttcagatcccctgtccttcaagttcgttgagcatcacaagacacaagcgtttacctttatctcatcacatgacgaaagtgtttggaacttggatggagagatgtttcaggcatgtgaggtatctgtccaagcgtgccgggggcttgtcaacttctttgcttcggggccagagctgtagtaatgatactcgtaagttcctctttgcatgaacgaaggatgccaggagttcatattttttatttagagagtcccttatttcgacatgttgtacactcttatttgtattttagtggagacctagaacactttgttgatagatatactgttaatatttgttgatagctatgtggcatggaaactacaacccatttgtgctatagaatagaggaacaaaaggttttgattgaattaatgaagtaaaagtttactttctgttttgcgagaaaaaataatgaattgaag

SEQ ID NO: 43622 - DNA, 2444 bp, Zea Mays
gtcattccgctcgtctctctcgctcacatcaactctccaggcaaaatatcctgggcgcgatggatgcaacgccagcgagcaagaaggccacgccggccgccgccgtcgccgacgcggtcccgctcgctgcgcagcaggcggcggagcagctgtcgtcgcccgaatccgtcgccggcgtgagggcgagcggcagcgaggacgacgacgagcaggtggagaggttctacgcgctgctggacaacatccgcgccatgaggggcatggtcagcaccggcggcgcggcaccggggaggaagcgggcgcgcgacgacgagcccccgtggcggccggcgttccggatggaggacttcgagcttgaggaattcgactccggctccgcggggtgcgacgggggaaagaagaagagggagagcagcatcgcgaagcggccggccgacgaggaggagcaggccgagtgtccacacatgcaatgcccccgcctcgcgttgctcgtccccctgccctgccgcgagtcgtctccgcccacgtcgtctcccgaaatctcgccccccgagacgcgcccgcgccacggctgccgctccttccgccccgcctgcccacctcgaccacccctcccccgcgggtgctgccagaactggtgggtggatgatctctccgtggtcaaggtcgaccactcccaggtgctcctcgcctccgtcaccttctccgcccccatgccgttgctccgcctccgcgtggcctctcctaggtcaggcctccccgccgcgatcgatgggtccgcggtctccgtccacttccgccggatgtccgtgttcgcctccacccgccccgtcgcggccgccctcggcgccgccgcgttcgaggaggccgtcgtcaagtacgagccccgcgccttagctgtctccgtcgccgcctccactctcgacctcggtaagcacgaggtcaacctcacccgccttctcccgctctcgttcgaggatctcgaggacgacggcgactccggcttcgagaagtggagcaccagcttccggctgtccggccccgtccgcggcgcgcggcttaacgtaaccttctcttgctcgctcctcgcgggcggcggcaccagcgagcagcacaggggcggggaagtggcggggctgcgacgcggctcgatggcacgggcagtgtcagtgcaagtgccgacgcctttgcccgcgcggagcaggggcgtgagggttctccacgaggtgctgcccagcttgaggtctgccaggccggtgccttcttctgttgctgacgggggtcctgatgcgaggaaggaggaggtggcagcaccggactgcacggaagaggggtctccggaggcaaagcactgcacatcggtagagccaagctgtgtactgacggaacgccttgagcgagagcgaggttgcgctccactccactccactccactagccagttcagttcttgcttcctgctcctgtcgtggtgccctgagtccctgactgcgaggagctagctatgcatccctgcggtggctgacgaactgcgtagcctgatcaaacagtactagtatattaaagacggaagaaacgcgggatccagatgcgtccacgtcatcgcatcgcatttcattgtagccacacgatcctggttcaatggtcagaaaggcatcatatgaagacgaacgacctccagataaatatgtcatgtgcttggccaagagaaccttccagacgagcagcaggaaaaaagatgcatcttcgtcgcccgcgggcaccttgtgcctctcgctcttgctccgtctgcggttcccccgtggcgacgagttgtccatcgcgttggaggtggtcatcctcggccccgcgcccatgatcgttgaccactcaaggatcgagttcacgggagcagaacgacgccgttatgcagtacctgccgtacctgtgtgccgtggacagaaacggggtgactgaggactattgtgagatgggcacgagctcgtgcggggataaatcatcggcgtcctcggacgacagcaccagccggaacgccactgcctcgacggttagcacggtcagcgagaataggtccgtctctcttcatccgccgagtctgctaggatctttgcctgagaaaattttcgggtatttcttcagtcgtcaggaggtcagcttctaggtcatttctccttttgctgcactaaacggaaacccaatagcaggcaaaagatataataaatataccaacgacgtctaacaattttttcctcccgtggtacacctcctgatgtttaatcagataaaatttgtgcttatttatctcagttgggcaccctgtaagatataaaatttgtgctcgtgtaaggtcgaaaacatgaaagatcagatcaggtttctcgttgggcaccgtgttaaaaattttagctgtgtatctaaaatagtcattttttagctgtttagacg

SEQ ID NO: 43623 - DNA, 2306 bp, Zea Mays
agactctccgcagttcggcctcgcgattccgcgggagactgttctacttctcgccggcgacgccgattcgatctgacgggcacacatcagaaggctggaggagggcactgggagccgagggggaggctaagggtcaggattcgggcgcgatgccgcgcccgggacgacttcagcggtcggggtccaagcgcgggctggaccccaccggtggtggcggcggcggcgacaacgacgaccatgcgcccaagcgcccgcgcatccctgccctcgctagtgtcattgtggaagctctcaagatggacagtttgcagaaactctgttcatcgctcgagcccattctccgaagagttgtaagtgaagaagtagagcgtgctttagccaaactgggtcctgctagaattcaaggaagatcctcccccaaaagaattgaagggcctgatggaagaaatcttcagctccagttcagaagtcagttggctcttccaatcttcactggtggaaaagttgaagacgaagatgaggattggacagaagaagagtttgaaagtaatattgtcaaggagcgtgaagggaagagacctcttttgacaggtgacctgcaagtgactcttaaagaaggtgttggaaccataggggagcttaccttcactgacaactccagctggataagaagcaggaaatttatacttgggctgaggattgctcctggcttttatgaaggcattcgtgtccgagaagccaagacagaagctttccccgttaaggatcacagaggagaattgtacaaaaaacactacccacccacgctgaaggatgatgtttggagattagaaaagattggcaaggatggcgcattccacaagaagttaaatgctagtgggatctatacagttgaagatttcctccagcttcttgttagggatcagcagagattacgtagcattctgggcagtggaatgtcaaataagatgtgggacagccttgttgatcatgcaaagacgtgtgtcttaagtggaaagcattatgtatactatgctagagactcaagaaacgtgggtgcaatattcaataacatctatgagttcactggtttgattgccgatgatcagttcatttcagctgaaaatcttacagacaatcaaaagggctatgctgatgcattggtaaagaaagcatatgaggactggatgcaagttgtagaatatgatggcaaggcactcttgagcttcaagcagaaaaagaaatctgtcatgacaagaagcgatgctgcagttgcctcgacaaaccaccctgcttcaaatggttcggccatttcacagaaacaattgtcccttccagcaaaagctggacaaacttcctccgcgggtattatgaatgaagatggaactagaaatgcttacaatgcaaatggaaaccagtcagcaagatatgcagccaccactcagaacattcctgcaaacgtcgccatgcaatatgacaggagtgcagtgtcgcctgaaagccagtttagtggttcatcccttcagagtcaagcttcaagagggtccaatacgctagcattgggccctccacagcaacatcaaagttttgcattcccagcactcggccagtccatgcggccaacaggcctgaatccttttgaagaatggccgcagcaacaggaaaactgtggcggtgttgatgactacctgatggaggagatcaggatgaggagccatgagattctcgaaaacgaagaaatgcagcagatgttgcggcttctgagcacgggtggtgcaggaaccaacctaactgaagatggcttcagtttcccttcgtacatgcctgcaccttcaccaaaattgagctacgaggatgaccgcacccgtgcacctgggaaagccgttgttgggtggctcaagatcaaggctgctatgcggtggggcatctttgtcaggaagaaggcagctgagagaagagctcagcttgttgagctagacgactagaaagtattgcagctggaagcatgtgcactccagatgttcatgtaccaaagtttcgttgatgtttgtggatccggatggactcagccttgttcgatgcatataagttgatttgtccaggctgttcttttaattactatggaaaaaaatccctttcttactttagatgcatataagttgattttttatcacattctggactgctgtcctcgaaattacaaaatctggagctaaaacagtttaggttttaaccttaacctgatagcaactcaatcgaaaactcgatctctctttctgccggcatatcgggtacacatcgatatc

SEQ ID NO: 43624 - DNA, 681 bp, Zea Mays
caggcagagacctttccctacgacgcccccctttttcttccaccttcagcagtagagatcgactcccatggcgccctctctgagctcctccatggctatggtgctccctgccttgccaatagtctagttgcaagcaccggccagccagcggaccatagccggacgagcctcgctcgctcgcgcctacgcctgcacctcctctctccaagcttcactgcgcgccgacgacgtcaaccctattcccacgcagccactgcaactccacacgcaggccaaaacctttgatgagttgttgctgctcgcgcacatcgagctggccgtggcgtacgttgagctccagcggtatggtaacagcggctacgtgcgagctctgttcggcctccacgagcatgtcatccttctcgatggccgaagcaagcaccaaccctcatcgtcgacttgcccacatggcgctcacgctagttgcaacctgggaagaagccccctacgtccaaagaagaagaccccctgcctatgacacgtgggcccagagtgaagtaccgagagatgatgatcctgcaagtgatgtggtgccaacaacaagatgcggttggtggacgacctaaggaaggatggacatgaccagtggatactcggcaagcgagtaccctctagcagacactatctagtgttgaattccag

SEQ ID NO: 43625 - DNA, 3436 bp, Zea Mays
tctgctcagcatttttctctcgtcatcgcgcgtggacatttgctgtgggcacagctcgccggttgccgccgctcagcttcagaaatatcccgctgccgttcggtggtatttatctccccagctcgctcgctccaggccttcccctgccgacgcgcctattccctggccgaagccacctggtcccaggtccggtcggccggctcagttttttttccagtaccgcgcgtcgtgcttccccttccagccgaccgaagctcccagctctagccatggcgcgtccggttccctctcccatggctccctgtccgaccggccgagatccctccatggccgcgagctcagcccctgctatgctctcgctgccgagttcctctgcgcgtcttctctccctgctggcgcgctcaaattcctgtgctcgccggagctctccctgccgtgcggctacaactcctgcgcccggccaagtttctctgcgcgccgtagttcgcccagcccctctgctcgccgagctctatccgctccccatggccgagcttcctgcgtgtgctgccggatccctacaccagcgccgtagctccctctgtccagcagcttctctctcctggagtttctttgtttctttgtgttctgctcagaccctgctccattccctcgccggccggttgtgcgccctggtcggattccctgcgcgccgcgtgagctcgccggcgtgctccccatccggccatggtgccctgcgccggtcgagtttctctctgccgcgcgcagctcgcccaatctttctgctcgatctcgtcgaaccctaaatcccggacattaaacaaaaataagcgaggttcctgtgcatcgcttatcaagtgctcggtcggagactgtaatcgaaggttgttgtcgatccatacgtcatccagaattccaagagtcgggtgaagacggaggccaacagcgtgatattctccaagtgctcgacaccaaagctgaattagaatccttgccgtgttcgtggataacgcgtcagatttagaatggtaagccgattcaaaatttccgttagcttgattattaaagtagttcgatgaatgtgatatgcttattttcatgattttgaagtagtcgcgtcgcggtaggattaaatatatgtgaagcacgatggagttaggaatgcgaaagatagattaaatagaattattggtctcaataaatgttagtaatttagcatgcgtatattgtgatgatcgatttagataaatcagtaaatcaagttaattaggatacatagtttatagagttaataaaaagttagaaataaaaatagatgttcttgtatcaatttggttaatggatgtagtcgatgccctactgtgatatccatgatgcttactgcttggttttaagtggttcgtcctttttagcgtagattatttatctcgtactatgtatactcgtgctcatacatgtgcatcgtgcatctcatgaggtacgataaataatcgcgtatgcagaagatgacccaagttgaccccaagtgcgggctactccgtatggtgatgctgatggacgaacctgtctgatcaagtgctcggacaagaatgattatcaagtggtcatcgtctaacaaacactaacctagtgttccttcaggtcaaagttttgtgctgctgatggtggtgttaagtgccggtgggctcggccttcttataagtctaagtaacccttctatacttcttattgaggatggtcacttgagctagcatatattttaaacttacaaaaagatttgcaatatttaaaagtgaaattcttttgtaaccactccaataaatacaatgtaaacttgttgtaacttgttaaatttggtaataagatttccgctgcaaaattgttggtgtgtgatttgtgtttacttaatcctgcggtcctggttgtaagtggtttattcgaggtccttggggcactcggacagatcctgttaagttatctagtgcacatgcatggtcgtctgaggtctttgagacaaggacaggtgcatgtgggcccgataccttgcgaggttctgccacagtgcaacactatatcagggatctgaagtgcccccgaggctccttgttgtatggtggcagtgacgaagatgacttcctttactgtctgccagacaacaaagagatacatgtctgccaggaaatgatggtcaatataggatatccgaagcttgaacttggcttatctgtaatttccaaggatgagtttgcagatagccttgcttacaatagtctgaagggattaattctaagcaaggctttaaaggcctagaaggaagcagaagatgagagctgccaaatagctcttgggaatcttcgctcagaagtcatcacactatggaacgaagctctcaaaaaggataaggtattactttccttagtggataggctgagatctaacgaagctaaaattgttgcacaagccgaagtggaagaactaaaaaggaaggttgttgaagcaaccgaaaaatttgaagttgaggcggtgaaacatgaaatttgcaagatcgaaaggtcaagagcacaaaagaacaccgatgagctacgtccttcgaaagacaaatgttatgaaatatccttagaatgagtcaagaaattaaaggacatatttgctagggttggggcatattcttctgagcaaaaattcatccacgacgaccctgatggagttgtccagtggatcagcggggaagccgaagcttttgacgaaatattaagcgaacgaggacatttctgcgcctttgctggtgcacggggggccacgtcgatcttagagaaagctggttgcgaacatgccaaggctgcagttcagccagaatttgtttttttggtggatgacattaaaaacctttgagccgaagcttctacactaggcaggaaattttactacgaggtgtggatgaagggcagccgtgagatagttgatgaagctattagaaagaatgaaaaagaatctcacgacgctcaagaagaagccaaacgagctgaagaagctgctgagcatgcgaggcttataagtacctttactgaggtatagcttcagaattcgtttttagcttcggaattaacaaacatattttatgatgtagctgaactttcaccgccaccggagccatacaacccagaagccaacccagccttgaaggaagcgctagatatgattataattgctaatgaagccgttgacaaagctgtcaacagattgcttaacgaagccgccaaggaagtgttgaaagaagattaaaactttgtatatttgagagcttagtttttgtacatatctttcgcttttgtaagaaccgagtatcaattatttgcatgtgtattaatgtaatatattcctttgtgatgcatgaaaccttcgtacataccatttttgagccgctggtgaaaaaaac

SEQ ID NO: 43626 - DNA, 2633 bp, Zea Mays
gtcgtctccccgttcgaggggatcaggggaattggacgggcttgcttcgactccacctcgcctccgtcggcgtctcatctcatgctgggactctggtggggtggggattgacttcgctatagcccaatccagtcagcagcagcttcccgccgccccatgcctcgtcgcggccggtggcgatgggcgacgtcccagtcccttctccagctccccctgtttccggcatcgatatgaccccacgccgccgccgtgagccctccgagccccgcagcgacagcgactgggacgctggatccagtcgcgagggctccccggacctcctccgccgcgcgcccgccgtccagatctcgcgcgcctcctcttcctcgtcctcctggctccgcgagatcgagcgcgaccgtgtgcgcctcgtcagggagtgggtccacatggctgcccgcgaccgtgacgacgacaccggacccccaccgtcccccgtccatgaacacgctcgcagggacgcccccaggatccgcggccgccaagcgcgcctcgagctcgtcatgcgcatggccgccgaccgccaagccgagctccaccgcctctcgcagcaccgcgccgtctctgactttccgcatcgcaacagaatccatgcgctgctccggggtcggtttctgcgcaacagcggtttaccagaggagaggaggcccccatctgtggccgcaagggagcttggccagctgcggcaaaggcatcctgtctctggtttgagattggagaatcttgtccgtggtcaagcagatagccaagtggatgcttcttcagttcacgatgttgagttatctacaaatgatcgttctgaattaaggcctcctgaaactactcaggagagacatgagcggacaagtgagattgtcagtcttcaacaaatcgacagtacggcaatgacatcaggatttgaaagtggcagccctaacattgctgaagtcttctgcgggtctcatagccaagcagaaagtcaggatgatttggaacatgagagaagagactggcaacgattttcccatgctgtgattggagaggaatctgaaagaacttggcgtgaaaatgcagacaacatgtcatctcatgaggggacagcagttgaagatgataataacgatcatcttccagaagcaaatgaagagtcaaccagtgttgatcaccttcctgaaggacttgaagggtctatcactgatggtagtcttcctgaagcgcaagaagatcagcatgacagtgatcatcttcctgcagtgcttgaagagctgcatggaaataatcactttcaggaatcacatggggaatggagaagagatgatcgtcctgttgaagtctatgatgagtggcagagtgatgatcatctccctgaagtaaatgaagagtggcataatgatgatgagtctaatgatactgcagacaattggcatgataataattctgaccaaccaattgatcatgatgctgctcttattagaagagctaatactttcatccctggagatgatgataatgtgtacagcacagaattgagggaacttctaagcagaaggagcgtttctaatcttcttcacagtgcttttcgtgaaaacttggatcgacttatccggtcatatgtggaacggcaaggtcgtggtcctctcccttgggatctggaaggaacaacccctgcccctccatcaccagttcaaattcaggaggagcaaagagatgatgaggaccaggaactgcagcgcactgtcaacaggcctcctttagtgataccacccccacctatgcctcctcgtcagccactttggcattcagagttgcatcgtactaattggatcagacaaaacattcatcgttcatcttctgatattgaatgggaggctatcaatgatttaagagctgatatggctagacttcagcaaggcatgagccatatgcaaaggatgttggaagcttgcatggatatgcagctagagttgcagcgttctgtaaggcaagaagtatcagcagccttgaatcgtttcattggggagcaaggtggtgaaagtaaagaaataatcgatgatggatcgaaatggataaatgtgagaaaagggacctgctgcatatgctgtgagactccgattgactcccttctgtacagatgtgggcacatgtgcacttgctcgaaatgcgcaaacgaattggttcgaggtggagggaaatgcccgttgtgccgcgcacccataatcgaggtcatccgagcatacttcatcatgtagatacaaaaggaagacagcaagaagatagaagaggcccaaattgtttttggacgggaaggtggtcttctctcattaggacttgggtcactgctaattatgttccacaacgactaatggggttggaggttgtcgaaacacgagatgaggaaacttttggtatctttttgttcgtgtagcaccagcaaagtgcggcttggtcgcttcagtgtttcgtgtgattttgttgttggtcttggctatgtggtcatgatattttaggcttctagtttgcagatggatgtaaaagtggtactttgttgtcatgggcgatgctatttcctggatgtttgctttttctttccacaatagtaaaacagatcattttta

SEQ ID NO: 43627 - DNA, 1347 bp, Zea Mays
ctccagttgctgaagtcgttcctgatcggcctccatctccagttcgcctctcttccctgagctccctcccaccgcgcgctctcctgctgccgctctttcccggcgtgtccctgctccagcgccgcggagctcccgcgcgcgcaagtccctctggtgggcgtcgcgctggtcgcatcccctccggtctcctccctcaagcgccgcttcttcgtgcccgtgattggagatcctcgcccatggctctgggctgccagctccgagctcctccctgcttctctgctccagcccgaccgccctcacctcatccccttcctgacgctcgtcctcggctccctctctcgtctggtggctggtgcgcgcaggcgtcaggctcagggagtccccgcgcgagctggcgctgtgtgggccggcggcggcgatggaggtgctggctgccgctcctcgtaggcgttgccttcctcggcctccttgacatggcgaagaacgtcgaggtggtcgagagctgcaccacctccttttaccgctgctcctcccatgggggtgaagccgtgggtcggggcgcggtcccgtggtcaggcgacgacggcgagggcgaagagacccggcggtgcgagcagcggtccgagagggaggacgccatgccctacgaccgcgacgttgacatggatgccgtgcttgtcggtggcgcagccaaggactggagtaaatgctacatagatccttctatagagggtatcctcagatcgatggagtcatctcaatattattcaaagaatagtattaatgtggctcgagggagagggtacaagattgtgattacaatcagcctttcttcagacttcccagttggcaactcttcatgggctgaatatgatgctgtggcacctgtgcctccaaagactgaagaagctcttgctgcagcctttatttctaactgttgtgcacggaactttcgtttgcaagccctcgagatgcttgaaaatttggatgtcaaaatagattcgtatggtggttgtcatcgcaaccgtgatggcaaagtggacaccttgaagcgatacaaattcagcttggcatttgagaattctaatgaggaggattacgtaacagaagagttttttcccaatcactggtacgataattgatcacgtgatgcgaaagaagagccaagtcgaccccaagatgacgtaacgagtggactaattcgcaaggtgatgcggatggacgaacctgaaggtggataaactgaacaagtgccaaaacaaaggatggtcgccaagtggacgtcacctaacaaacactaacgtagtgttaatccaggttacaagtcactttgtttgtgattgatgt

SEQ ID NO: 43628 - DNA, 951 bp, Zea Mays
ctgagctgatcacgagtctctcagcgagtgctggagagcccactatgtccgccgccggcggcgacctgccggagactgtggaggtgacgctgcgcgccgtcggcccgtcccgtccaaccaccctccgcctccctccgcttctctcggtcgccgagctgcgcggctgcatcgcgcgcgaacgccgtctagcaggcacggaagaagttcgactccgcttgatcctgcgggggaagacgctcccgcaccaagacgacagccatgtcactctccgcgatggggatactcttatagtcgccgtggcacctaagcctcctgttaatcatcttcttgatgatgacgttgaggacgaagaagaggatgaactgaagttcagaataccacaaacgacaaccttgtggaagaggaaattttttatgtttcttcgagacaaattgagattgcctgatatcattttgatggcgctgttttctctcagtatgaaagcatggattatcattgcaatgtggttcctattggcaccgattgctcagaagtacgacattggacctttatatataattggtactggtttcttgatcatacttattaatctcggaagacgacagcaagacatccgggcaggtcaattttaagcccttactgggcattgcagagatagggaccatggtatgctgagatttgtacagaagcgtactgggcattgcatttgtttgtgcatggaaagcagtgtggagataaaggctgtgcccctctaaggttaaggtcaaataaatttctgacctgtaagtgaaaatgttgcctggttacaattggaaattaccgtgatactttgcagatctgtacttgtgaaaccaaaagagcagagtagcttaagactggcaacaaagtgattttattcctctcttgcaagttcttgtgtccgctatgagccacaaagtcctatatagcaac

SEQ ID NO: 43629 - DNA, 1827 bp, Zea Mays
catcaaaccaacttaggaagatttgcagcgttaccagcctcaatatattatatcagtaccactggtctacgaaactctgtacagttcaattcataggcagatttcatccagttctgctgctcgaaaaattattgctctttcacttatcaagataagtttcctatatatggaggcaaagaagatctatgagggaacagttttatcaaacaatcttgtcaaaccatcagtcatcgcctatatgatgaagtggctgtgggcaagattggttgctgcatttctttggcctttacataatctggcgaagattctagtatacaagaaaattcattcagcaatcgggatttcaaaggctggtattagtggcggtggaagtcttccgatgcatgttgataagttttttgaggccattggcattaaagtacaaaacggctatggccttactgagacttctcctgttgttgctgctagacgaccattctgtaatgttcttgggacagttggtcacccaataaagcatactgaaatcaagatttttgacattgagactggtgaggtccttccagatggttcaaaggggattgtgaaaattaaaggaccacaagtaatgaagggatactataagaacccatcggctacaaatgaagcttttgatcaagagggttggttcagcactggagatgtaggttggatagtacctcatcatgccatggggccaagtcgccagtgtggagggatgattgttcttgaagggcgtgcaaaggatacaatagtcctatctacaggtgaaaatgttgaacctgctgagatcgaggaagcagccagcaggagtaccttgattaatcagatagttgtgatcgggcaggatcaacggcgtcttggtgccataattgttcccaacaatgatgaagttctggcagaagcaaaaaggaagtccatccttggtgaggatggcgagctagcgaaagataaggtcatgaacatgctatatgatgaattgagaacctggaggaagtgcttaattattttgttcacgcgtttcaggacagcgcactgctccttccgtgtcgggccaattctggttgtcgacgaaccattcacgattgacaatggtctgatgacacccaccatgaaaataaggagggacaaagtgacagacaagtacaggagggagatcgaagccttgttcaagtgacacgcggagcgcgtgcgcacccatcagagttcccttttccgagtacaagacggcaaccgtacggcgtacatacagacacctgcaagctgcaatgcgtccatgtaccatgtatacgtacgtacttgcgtacggtcggaagatgactgggttggaactggaagagatgatatggcggagcggccggtgggagaacaccatgagacttgttactagactcgaatgttcgtaggttgcatgagcaaaatgacatgtgttccacaattgcatcattcaataagcgattcactgagccagataaggtcttgttcggttagttctcaatccatatatatggattgagtgagtttaaatcccaaacaagtcaaacttcttcttaatttttttcaatctcatccaatccatatgtaatgacaataaccgaacaaggcatgaatcaataaaattctcccaaaccaccgcaggtaccatgcaattggtaaaaatatcatgcttctatcttatagatatctgaaaccaactttacagttttcttaataccataagaatatttgtctgatagaaacatggaaaaaatacagacagctatgtacaactcttgttacattgaaatcatcgagacgttcgataagaggagg

SEQ ID NO: 43630 - DNA, 2169 bp, Zea Mays
ctccataatataaatacacctatttaaatttgtactagcttcgccacctgtagccacgggtaaaaaaaaagttcacatccaacttgcactctatgtcgcggggaaaatgtgcacatcgtcctgcctacgcaccgcggggaagagagtgcagagaggagagcgaggacaaccaaacaaatcgagccggatgttgcgggaatatcttcctggttgatcgggcgggaacggggaatctgtccaagtgctctccagatctggagtcaaaggatactgccctatttggtctgtccatcccagcctccaagaatacaagcagctgtagaccacgaaactctgcttcgatagcaggagcagcagagagagagacgcacgccggctatcagttcagttcttctgggcatctctcaactcaaggaggagacacgacttggctcttcttcctctccggcgcggcgcggcgcgtgcgtcctattctctctcaggtgctccaggaacaagtgccgtccaccagatccaggctcggcatgttcgtgatcgaggacaagggcggcgccatcgcgctgatgctggcgtcgctcctgttcctgggcacctggccggccgtgctcaccctgctggagcgccggggccgcctgccgcagcacacgtacctggactactccatcaccaacctcctcgcggccgtgctcatcgcgctcaccttcggccagctcggggacagcaggcgcggcatgcccaacttcttcacgcagctcggccaggacaactggccctctgtgctgttcgccatggccgggggcgtcgtgctcagcgtcggcaacctctccacccagtacgcttgggcctatgtgggcctctccgtcactgaggtcatcagctccagcatggtggtggtcataggcaccacgctgaactacttcctggacaaccgcatcaacagggcagagattctgttccctggtgtggcgtgcttcctcgtcgccgtcatccttggctccgctgtccattcctccaatgcagctgacaatgagcagaaactcggtgcctccacgaatgcctacaaactcgggacaagtggaaatgtggaaccaagcaaacaagctgtagacagagatgctcccaaagacttggaggagagtggagcctctggaatccggcaacctgacaaagctgaggcaggcactgcagagtacctcattgagcttgaagaacggcgatcaattaaggtattcggttcaaacaccttcatcgggctggggatcgtcttcttcgcgggcgtgtgcttctcgctcttctccccggcgttcaacctggccactaacgaccagtggcacacgctcagggacggcgtgccgcacctggtggtgtacaccgccttcttctacttctccatctcctgcttcgtcgtcggcgtcggactcaacgtcctgttcctctaccgccccatggccggcgtgccccgctcctccctcggggcctacctcagggactgggacggccgccagtgggcgctcctcgccggcctgctctgcggcttcggcaacggcttccagttcatgggcggccaggccgcagggtacgccgccgctgacgctgtccaggccctgccgctcgtcagcaccttctggggcgtactgctcttcggggagtaccgcaagtcgtcgcggaagacctacgtcctgctcggcttcatgctcttcatgttcgtcgccgctgtcgccgtgctcatggcttcgtcaggtcacaggagcacagagtgaattgcaagtcttgttcgtcctctgcttgttgcaagcccttccacttgcgattgatccacggaaagatccatcgtcttcgtgaagcaggggaaatccattccttccagccattaatgagatcttcagaacaatggaatggagatgtacaaaaaaatggttgttgtatgattgatcaaatgtatagaactatttatattctttccaagacaattggctgataggataggaactgttccaggggtggaaaaaatctctatctttatgaacagggtaaaagcaatgttcagaaaaaagtagtttgtgcctagtatgacagattcagaatggtatcagtactcccgctgttttggaatgttcaagagaaaactagtggatgctctaaatcttataatcttgcaatgcttctcgg

SEQ ID NO: 43631 - DNA, 1225 bp, Zea Mays
tcttgactcaagggcctcctttcatgtgacatttgataagtcacagttagtctcttctacacttgtcacagaagatgcctttgttcatatcgcagatggatcatcgcacacgggctgtgattgggactggccgtcgtcgtgattgcaggaaaactcaataacataataagggaacaatgtcttcgggatgttggacagctagagcaagatcttgtgtttggcgatgctggaaccaaagaactaatcaactttttgagaacacaattggttgtaagtcgtgaaaataaattacgcttgctgatgatttatgcagcacttaacccagagaagtttgaaagcgacaagggtgcaaaattaatgcagttggcaggattatctgctgatgacatgattgctgtaaataatatgcgttgcttatgtgggcctgataccaaaaagtcttcagtagggggttttacactgaaatttgatgttcacaagaagaaacacacaaatcgaaaagagcgaacaggggaagaatcaacatgggcactctctcgattttaccctattttggagcaattgattgaaaatcttagcaaaggtgagctgccaaaagatgaatataactgtatgaatgaccctagtcctactgttcatggactgccaaccagtagctctgcccgaacaagccccgctcactcaatgcgatccagacgaacaggtggcacatgggcaagacctcgtggctctgatgatggatattcaagtgattctgtgttgaagcatgcctccagtgacttcaggaaacttggtcagcgtatatttgtttttgtaataggcggtgctactcgatcagagttacgtgctgcacacaagctttcatccaagctgaagcgagacatcatccttggttcatctagccttgatgatcctccccagttcatcacaaaattaaagttgatgtcagtagaagaattgacacttgatgaccttcagctgtaaatggtgtccgcccacacggagtgtaaccttttattttctctgttctgtcagctcttatttgtgggggcctgtcatattcattcggtgaaatgcattcttaataccacttttactggtgaatgtaagaaaaaaactgttatgcaattaatcttttcatgcaattattgtgcaaccaaaataccagaagtcatgagaagttctcaaaattttattgatgaattttatttactcaatcgatcta

SEQ ID NO: 43632 - DNA, 218 bp, Zea Mays
gagacgatcctttttatttagcatatgcgcgcttagtgattatggctagatccgttgttgtgttggtatgctgttccgtggtgatataattatttttgaaaactataaagtagtcgagtcaggggttaaggtctagaatgtttgataaaatgccttgttacatgtattgttgcaactatgttcgtgtttgacaaataattatgtcgcgtaaagcttag

SEQ ID NO: 43633 - DNA, 2977 bp, Zea Mays
gtagctgcctataggcctcggcccccattcatggccattaccacgatgtgtcaccccaccacaccgccctctccgatgctgcctccctcatgataaccctctccctggtggttgttctttgccttgttgccgtgcagcctccacccccaccctcctcattaatcacttgctagctccctgcctccctcccggctcccgctcccccttctcgtgcttcgcgcccccgcagcagccatggcggggatcgacctcaacgacaccgtggaggaggacgaggaggaggcggagcccggcaacgcctgctcccagcagagccggaccagctccgcggccacgttcccgccgccgccgccgaaccagccgaggccgagcgccgcggtgtgcctcgagctgtggcacgcctgcgccggccccgtcgcgccgctgccgaggaaagggagcgtcgtggtgtacctcccgcagggacacatcgagcacctcggcgacgccgcggccgccggcggaggcgcgccgccgcccgtcgccctgccgccccacgtcttctgccgcgtcgtcgacgtcactctccatgcggacgcgtccacggacgaggtgtacgcccagctcgccctcgtcgccgagaacgaggatgtcgcgaggcggctgcgcggacggtcggaggacggcagcgccgaggacggcgacgaaggggaaaccgtgaagcagcggttctcgcggatgccgcacatgttctgcaagacgctcacggcctccgacaccagcacgcacggcggcttctccgtgccacgccgcgccgccgaggactgcttcccgcctctggactacagccagcagcgaccgtcgcaggagcttgtggccaaggatttgcacggaaccgagtggaggttccgccacatttatcgagacaccttttaaccactggatggagtgcctttgtcaacaagaagaagcttgtctcaggggacgccgtactatttttgaggggtgataatggggagctaagacttggagtgcgccgtgcagctcagcttaaaaatggatctgcttttccagctctttataaccagtgcttaaatcttggttcactacctaatgttgcacatgctgtggccaccaaaagtgtgttccacatctactacaaccccagattaagccaatctgaattcattataccattttcgaagtttatcaagagcttcagtcaaccattttctgctggttcgaggttcaaagtgaaatatgagagtgatgatgcttctgaaagaagatgcacagggatcatagcaggaattggtgatgctgaccccatgtggcgtggttcgaaatggaaatgtttgatggttcgatgggatgacgatgtagattttcgtcaaccaaacaggatttctccttgggagattgagctgactagttcagtttcaggatctcacatgtctgcaccaaatgcaaagagactgaaaccatgtcttccccatgttaatccagactacctagttccaaatggaagcggtcgtcctgattttgcggaatctgcccaattccacaaggtcttgcaaggtcaagaattactgggttatagaactcatgacaatgctgctgttgcaacttctcagccatgcgaagcaacgaacatgcagtacattgatgaacgaagttgctccaacgatgcgagtaacattatcccgggggttccaagaattggtgtcagaacaccactcggaagccctaggttttcctaccgttgctcaggctttggggagtctccaagattccaaaaggtcttgcaaggtcaagaagtatttcatccctacagaggaactctggtcgatgcaagcttgagtaatagtggcttccatcagcaagatggttctcatgtgcctactcaggccagcaagtggcacgcacagctacatggatgtgcttttcgtggccaacaagcaccagctgttccatctcaatcctcatccccaccatctgtcctgatgtttcaacgaggtgatccaaagatgtccccatttgaatttgggcatttccacgtgaataagaaagaggatagacgcgcaatgtttgtccatgctggaggcatcggaggaactgagcaaacgacgatgctccaggctcatcatgtttctggaggaacgggaaacagagatgtgaccgttgagaaatctcatcccgctgttgccgctgcttcagacaacagggaagttagcaaaaacagttgcaaaatatttggcatatctttgaccgagaaggttccagcaatgaaagaaaagggctgtggtgacatcaacaccaactatccatcccccttcctgtctttgaagcaacaagtgccgaaatcgctgggcaacagctgtgccaccgttcatgagcagaggcctgttgttgctagggtgattgacgtttcaacagtggatatgatgatctgatgtattggaaaactgtcctggaggctgtgttgcgtagtgtggacagtgtcggtttgatggttcggtatcgtgaagacgggatttgattgaggatctggccagatttgtatcctagttgtagctgttagagcactttgtatgacaaccgtgagtgctccgtgttatcagcactagttgctgctcacaacttgcctctatgttcataatctgtatgccatgtcagacccatttatagagggtttgtttgcttggcatagttctagacttaaagcattattatgagaacaaatttgctctgcaccgtatctttcttactttcaagttggcaacggattaacggtggaggagatgatctgagaggttagttgtgcgacgtattaatggtgttacatatattatgcttaggagcattctgccagctcatttatcatatacatgtcagcacttgatttgttaagtgtagttagtagccttgcactttggattggagctatcctcttagggtgtgtttggttggagagttaaataaaatgaatgaagtggtt

SEQ ID NO: 43634 - DNA, 326 bp, Zea Mays
tgaagagtgacggcgaagggtaaataataccggtagagtggagtggaagccttgtcttcgccgagaactccatttccctttcaatctatgacttagcatgtagtacacttagaaacacattagtcatagcacatgaaagaggtacgatcaaaggtatataaatgagctatgtgtgcaaagtatcaatcaaaattcctagagtcaagaatgtttagctcattcctaagtttggtaaaggttttctcatctagtggtttggcaaagatatcggctaattgttctttggtgctaacataagcaatctcgatatgccccctttgttggtg

SEQ ID NO: 43635 - DNA, 2241 bp, Zea Mays
ctgaccggttcacattatggaggatctgtgggaacggttgacatatgcaagggttaagtgctacatatgtcatgtggttagggatccccatctgggtataatcggttcgaatcgtcgttgctcctcggtcatggagactctaccctccgaccactcatcgtagttgacaagtgaaatacgaattggctaaaagaaagctagaccaggacaagtgaatgctctagattaggaaaatctagattcgggaaaagtacttaacttgtgaagtaaaattttggcataaggatttactactagtaagctcttctgcaaacagagtctttgattcttgataagccatatcttgaatccctctagccagcatacccttgagggtcttttctttagtcgggtaagtcttactgagtaattccgtactcagggttttattccctattgtttttcaggtcaaagttttgtgctgctgatggtggtgttaagtgccggtgggctcggccttcttataagtctaagtaacccttctatacttcttattgaggatggtcacttgagctagcatatattttaaacttacaaaaagatttgcaatatttaaaagtgaaattcttttgtaaccactccaataaatacaatgtaaacttgttgtaacttgttaaatttggtaataagatttccgctgcaaaattgttggtgtgtgatttgtgtttacttaatcctgcggtcctggttgtaagtggtttattcgaggtccttggggcactcggacagatcctgttaagttatctagtgcacatgcatggtcgtctgaggtctttgagacaaggacaggtgcatgtgggcccgataccttgcgaggttctgccacagtgcaacactatatcagggatctgaagtgcccccgaggctccttgttgtatggtggcagtgacgaagatgacttcctttactgtctgccagacaacaaagagatacatgtctgccaggaaatgatggtcaatataggatatccgaagcttgaacttggcttatctgtaatttccaaggatgagtttgcagatagccttgcttacaatagtctgaagggattaattctaagcaaggctttaaaggcctagaaggaagcagaagatgagagctgccaaatagctcttgggaatcttcgctcagaagtcatcacactatggaacgaagctctcaaaaaggataaggtattactttccttagtggataggctgagatctaacgaagctaaaattgttgcacaagccgaagtggaagaactaaaaaggaaggttgttgaagcaaccgaaaaatttgaagttgaggcggtgaaacatgaaatttgcaagatcgaaaggtcaagagcacaaaagaacaccgatgagctacgtccttcgaaagacaaatgttatgaaatatccttagaatgagtcaagaaattaaaggacatatttgctagggttggggcatattcttctgagcaaaaattcatccacgacgaccctgatggagttgtccagtggatcagcggggaagccgaagcttttgacgaaatattaagcgaacgaggacatttctgcgcctttgctggtgcacggggggccacgtcgatcttagagaaagctggttgcgaacatgccaaggctgcagttcagccagaatttgtttttttggtggatgacattaaaaacctttgagccgaagcttctacactaggcaggaaattttactacgaggtgtggatgaagggcagccgtgagatagttgatgaagctattagaaagaatgaaaaagaatctcacgacgctcaagaagaagccaaacgagctgaagaagctgctgagcatgcgaggcttataagtacctttactgaggtatagcttcagaattcgtttttagcttcggaattaacaaacatattttatgatgtagctgaactttcaccgccaccggagccatacaacccagaagccaacccagccttgaaggaagcgctagatatgattataattgctaatgaagccgttgacaaagctgtcaacagattgcttaacgaagccgccaaggaagtgttgaaagaagattaaaactttgtatatttgagagcttagtttttgtacatatctttcgcttttgtaagaaccgagtatcaattatttgcatgtgtattaatgtaatatattcctttgtgatgcatgaaaccttcgtacataccatttttgagccgctggtgaaaaaaac

SEQ ID NO: 43636 - DNA, 1267 bp, Zea Mays
actatttgtattcttgatgtatagcttgcagtcttgcactaatgcactctaccacagtttttaagtaaattgctgctccatgttttcagatacaataaagggtggttttaccacaaagactaccgtgtctggctaacaagagcgcctaattccgcacctcttgtgaaaactccacttcactcaaaacatctaccactaatgtgaaggccattttttgaggtaatataatagaacctaatttgtgttgtcatttttgtgcatggctttatggaggtatcgacaacaacgcccaaaggaacccgtcgcaatttttattctaggctttagtacaattttttataattttattagtatatgcttccttgataaattatttcccaatttatctgtttgtgctaatatacatgggtgctctttttcttttgtttgtaagcatttttatggcctctcttttcatgatcttatttttccagacatacaagtacaaggattaacttttcagaacattctgcaggcactttcacatggatgtttaattaatttactactttaagaagcaatcccagatccacatccaattgtgcctccctgtattctgtatgatctatggagattatgttgtatcttcatggatccacaacagctcaacatgtagctaaaaatcagctgcatcagaaatattaagcaaatcagacatgcgggcctatcaacttatttctggtataaaaaactgagatccttaaaaaagaataaaatattttacttttgctgcagcctgctggactggaccccgttgtgttcttccgatgatcaatcagtcaatcacaaattcaaaccatacaaatcaactcaatatctagcgtgcttttggaagtctgttcaaggggtggagtgaggagaagatatattttgctcccacatacaagtactcttgcaattcagattcttatgctggagagactgccacatcaaagaaaaagaggagaaccccagcctggtgtgaaagaatactatggcatggagatggcactacagcagtctgtgtccttaagcaaatcacaaaacactgcactagaccagtgaaccatacttgcatagctacggcccatggctaactactattattgttatgacatcaccggtgctggggcggggcccaaatcatcgattaaagcctaggtttttgtgtgacttgggaacacaatacctcggaacctttctaaaggacgctaagttatctgttcctcgaggaaatttcctgtgacca

SEQ ID NO: 43637 - DNA, 438 bp, Zea Mays
gcaggaacaatctatgggttgcggatggcgaaaggataaatgaattaaggacagaaattcgccacctgcaagaccagctagcggatcgggatctagcgctcgactgggctgtgaactctcgttcacttgcttgggcaaaagaagctagagctcaagcccgagtggaagagcttagctcaaccatggatagcttgcaggtttattgtaataccttacatgaagaagttcatgtattgtattctcaactgcatcccaatgtacctgcggaacctatcgggacggaagctggaccttctgggacagcgggagaagccttcggtggtgaactggacttgttcaggcctcctccctctatgaggttggtggatgagaggtctcctactcccaacagcgaggctactaagagtgacaagaagcaagaatagtgtagtatagaag

SEQ ID NO: 43638 - DNA, 709 bp, Zea Mays
ctgccaccagcgcacggccatggctccctgatgtactccccattctggccatcgatccctggtgttggtgctccctttctcctgtgctcgctaggtattcgctgagacgcctgagccatgggattgacgtcgttcttgtgtattcagaattgattgatgttggtacgctagttgatcacgtgatatggaggactagaaccgagtcgaccacaagatgttgttaagcgcgggtttcttcgtaaggtgatgctgatggataaagttaaggatggatggcctgatcaactgccaggacaaggaagatcatcaagagatcgtcgtctaaccaacactgacttagtgttattccaggcaagccccgatgcatttgccacctccttgttgttataaaacttttatcacttatatgttgcattaggtgataggagttgagtgatgaaaaacaattgatgcattgccattccttggaatttgattactattccttgattcctgtttataaaagagaactaaagatgcttagccctgcttagataattaaaagttgtttcttttaaaaagatgatgtgttacacgggatatgggaaattgttgtgaaaaagaaattgggatggtgaatccatatggccatgatggattcaacatccagaaaaagtacctctgtcaggtaccaaggattgggaaatggtttaactaaaatgagaccaga

SEQ ID NO: 43639 - DNA, 1329 bp, Zea Mays
tttattgcattgtattttgatatattactgaaagtcgcctagagggggggtgagtaggcgaaacctaaaaattaaaaacttcgaacacacactatacccggggttagtgttagaaataatttggagtgcggaagatagttcctcttgctatgagttgctcaatcaaagcggataactttgggagcaaactcaaaaacaatatgagcaagagaactttgagagagagagagaggagagggaagaaacatatcaagtgatgaagataaaaacaaatgaacgcggtgatttgtttctcgagattcggttctaaggaacctactccccgttgaggaggccacaaaggccgagtctattccaaccctttccctctctcaaacggtcacttagaccggtcgagtgctttttcttaatcacacgggtcactaagaccctacaaggatcaccacacaattaggtgtctcttacatgctttacaaaacacttgagaagtttagagtgagaacaagaaagcaatccaagcaacaagagcaacaagagaaacacaaatgaccctctcttaagtcactaagccatcattaccctacccctagctagctcaggctacggggaacaagatcggcgtcccatctggctcgccccggtaaacaagtaatgatggcaccccgcgtgcgccatgacgacggtggctctcagccccttacggaagcaaggagacgtcagcaaggatccgacagccccgacagttgtacttccacaaggctcaagcactcctccgacggccacgacatcacatgaacagggcgccaaaacctctccggctgccacgacggcatgtacttagggccctagctcctctctgctagacacgttagcacactgctacaccccccattgtacatctgggccctctacttacgcctataaaaggaaggtccagggctctcgtacgagggggttggccgcgcgggagaacgggccggcggacggtctctctctctccctcgcggacgcttgtaacccccctactgcaagcgcacccgacctgggcgcggggcaacacgaaggccgcgggtttccccttttgccgtttctccccccttcgtgctccgtctcgcgccgacccatctgggctgggacacgcggcgtcaatttactcgtcggtccagggaccccctggggtcgaaacaccgacagaaggggttgcatgcaccggggcttgcctgggtaacactaggttagtgttgttagacgatgtccacttgacgatcctcttcaggtttgtccattagcatcatcctgtggattggcccatgcttggggtcgacatgg

SEQ ID NO: 43640 - DNA, 346 bp, Zea Mays
gttcagttatttttttcttgactacatcatgggcggctaattatagctattaataactttactcctcatttggtaaagtgtgccctgctaattgcaaccgtgtttcatttacccactaaatttgtaagcatctatgttcagcagcctcccgatgcatttgtgtcgcatccagcacctatttgttgccaaatttattccaataaatgtatggtctacgctttaatgagataaatagatttaaccaagatccaagatgggaatcatgataagaatatttgcaagccctttgactaaatcaatcaaatttgaggcgacttacgttaatagatccatcagtgaagttgat

SEQ ID NO: 43641 - DNA, 1767 bp, Zea Mays
ctcagatttccgctgaaattatattggttctaaacaattacaagtgagaaatatacttttgtatacttttcttggaccgcgtcccaccatccgatcttatggaccgcgtccaccgaaccgcgcagacaagtagtgtcaacaccgaagacacatcccgatacaccgcgtccatgcagcagaactcctttcccctccgcccttccctctccagctccctcccgccacgagccccttatcctccaacggccaacgatcaccccggcatcctcccgcccatgtccgccgcggccgatgaccgcgcgcgccgcgccgccgcgttccgccccgccccgctccctccgcctgcgcagaagcagcagctctccggcgtggccgccgccgtgctcgacgccgggggacgcctgggccgcgccgtgggcgacgtcttccgccgcctccgcatcgacgacaccttctactccggcggcggcggcggcggcggcggcgcgccgaatcggagctggcgcgacgccgggaacaatggcgggaggccggcggccgccggagccccggctgcggccagcagggaggaggccacaggcggcggcgcctcctccgggcggttcgcgcgggcgcaggggagcatgaacctgtcggcgacgtacgacagcaggacgcacgacgtggagagctcggtggtggccagaggcgacctgtggcgcgcggaggcgtcgcacagcagcagcagcagcgccggcgccggcggcaatggagccaataacaacctgttcctcgtgcagctcggtcctgtcctcttcgtccgcgacacgacgctactcttcccggtgcacctctccaagcggcacctcatctggtacggattcgagcgcaagaacggagtgcactcggtctgccccgcgtactggtcggcccacaagagatggttcttcatgtccatgctatgcctgaacccgttcgctttttcgttcatggacatgcaattcccaaacgggcaactgaggtacgtcgccggcgacggcttcacggcgcgtgctttcctgcccctccgtggcggggtcttgcaagcccacggaaagttcccgggggagaagaggctcagcttctctttcaaggaatggcggcagcgtcgtcccgatggttcagtggccggataagtcactctcggtgggggtcgtccaggcgttgtcttggaggagatccggcctgatgctgcagccagcaacacagatcagcatatgtcctacgatcggcgggcgccatcctggggtgtgcgtggagctgatccactcggcggacgacaacgtcggcgtagtctgcggctactcccacaccgcttcttcccctgcttccgcatacgcctccatatcgatcggaaggtcgaagctgaacggcggagcggcaaggtcagggttagcgttcagagtagacgctccactactccacggttttggccggccatggttctcggtccagatgaacagcggcatcgagttctgattccccactgtcttgccgttgccatgactgaacgaacgaacttactgtacagtagttgatgttgtgtataaagcttgacgacgactcactgatgccatgagtatacgcagtaaacgctacaacactatatgtttggtcgctggctaacttatcataatatgtctattttttattgagaaattagacattttctaaattaaatttcgaatataaattatagataacagtagcagactagtaagcagtacatagaacaacactgcgtcaaaa

SEQ ID NO: 43642 - DNA, 1643 bp, Zea Mays
gaaatctcacgcgatacaaatgaattaggcaagggtgacaatatacaaagagatgctccccctgtaatgatggttacagcagagagccaaatagatcatggcccgatgaaatggacaagacatggccataacctaaacttgatgaatggagtatgatgggagactgttagttcagccccaagcatatttctttgccaatcgtagagatcacaaggtcaaggatcagtatctgactagatacaggggaaaacaatcataagattaagttggtatgccttcgatagatatggggaaaccaaaggcatcaaattccagaaaaatggttggacatgtctttcctaggttgggttgataaagcgacaagataatccgcaaggagaggccaaacacaatagagacctcaacctgtatcaactaagcaagggcaggatctaggatggaaacacgaccactaagggagtgacaagttaattgccaagatccttatttggagtccgaatgcaacttatgtccaacaaagaaattatcaagcatttatttgtatgggcttggtcacagagtgataatggtaaattcaaattggggtctcggttcaccaactaagaacatggcctaattttgggtttaagcaaccaaactactaaccctctatcggcacatcaacaaaagagcacacataaagcactctaagaggtcacctaaagaatggaggacacctatttcatcgaagttcataatttagcattacaccatattatctacaatcaatggttactagaataaagatgagagaagcatcttgggtgtataggtgacaaacatgatgcaacaatcaggatgcatgctcgtcctacacgtcctcacgagttttgccaatatactgtggcaatagcgttctatatcggtggcatacttacgactctcacggtattttgctagtcgtcaactacacatacattttcgaggttagtgtacctgcagaaaaatccatcatagcccaattcccaatgatgcaattcacacatgatagtttatcacagtttatactccatatattgctatatggaggccagctcatcattaagcgccgagccatgcataggcgccgttgccacactttaaccatagggcaactcattatggtaactcaccttcttacctgagcgtaggtgcgtcgttacgagtacaatacacttctcagtattcccatgtctgtatacccatacacatccatggggtactgaattcccagaaaagtaaatactccacatcgcagccttcatatatacatatgtggaacatgtatataatcaagcgccacacttaagcactcccctagaccgacgtttgttcggtcatgctctcacatctcaccttaccttgagcgtcgatccattcaaaaccgaatggcctcaaaaataacaatacacatgtatgcaatacccacctggttgtgggttagtggttttgaactaagccacctgatagtccttaacttagggcttaatagaggatgtcactagcattatagttttttaaaactgtttttcaaaaccaaacaatgtgtttaggtgaaaataggttttctgaaaccaaaactttggttttgaaaatatgtatgtgactgtatatacttaatcttg

SEQ ID NO: 43643 - DNA, 1489 bp, Zea Mays
cagagagagactcgagtactagactagagtctcaactcttgagcagggaaaacgagagatccttggagtcagcaatggagtctaccgcgctaatgaccgcgagactaccactgctgacctctggctcccgttccaaacccctcccctttgcttccttcaccagggcggcttgccgtctcgcctccgcccccttctccggcagcggcagcgtcgtcctgctgtcgcgccggagccgcgactatgctggcgttggttccttggtctccgccgcggcggatcctggggatacggcggacgccggatccgagtccatcctgctcagcgtccaggggatgatgtgcgacgggtgcgccgcgagcgtgaagcggatcctggagagccaaggaagacctccctcatgacacagcagaaaactagcaacaccgacgggagcgggagtgcgcgcgggcgacgacgggagggcagttggacgcgatgaagggaaatggcgagccgtactccctcgtcaaagatacctagcaaaggggagcagacgacgagctggatagagaagatatatagaaagcgagcctgttggatacgattttaacatgcttttctattttttaccgattcttattagtttagcgaggttgttggagttgttctaaacaagacagagacataccatgttgcatgtatttgttttgcttagtatgcacgatacagttgaagatgatacaaaacttttgtggtgctcatataggagaactttttatttatctattcatggattgtttcctatatttgcatccacatcggtctgtactgatctgattaaataagtcaaggttttttttcatttcttttagtgttacttttaatttgctttcacttataaatggacgcttttgcagcccgaggttacttctgctaccgttgattttaaggaagcaagcgcagtcgtgtggacaacagatgaggccaaggggacacaaggttggcagaagcagtatggagagaagcttgctaagcaccttggcacttgcggatttgagtctcgcctacaagatgatcaacgaacgatcacgtgaagttacatgctagaagccaaagagtaaggtgaagccgaaccgatattgaagttcagatcagatgtcaccttaatggtcaatttataccaggatatatgttaaatattttgtctctatggattgcagttgtaggattagtctcggtgcttgtctggtggcataatactacatacctacctttcacatgatctttagctagattgtttcgaataggatgatgtcctaaaattgtaggtgtaggccactgttgcgaggaaggagtttgcggctgggctattgttaaatccggtcttcccgttgcttcgaagatataaagtgatactacctctataactcaaaataaatcgattttttaaactcactatgagtcagattgtcttaagcttaaccaactttataaaaacgtaacaacatat

SEQ ID NO: 43644 - DNA, 1922 bp, Zea Mays
cttactagccttccgagaagaggatgcagatgaaggcaacaacgaatcagcccaatggagccgcagtgcaacgtcggtatgttcacgcgcgccgagctgctggaggccagcgtggagcttcgtcatcacgccctcggctgcgtcaagtccacggccctccggtgcgctgtcaagctcggcgtcgccaacgccatccagcgccgtggcggcagggcctccgtcgaggacctgctcaccgagctctctctggacgcgagcagactccgctgcctgcacagcgtcatgcgcgcgctcgccgcgttgggcgtcttcaaggaggggagcgacggcgagtacggcctcactgccatttcctcgctgctcgtggacgacgacagcagcgtccgagattgggcccttgctggtgtcgatggtagcgacgacgacaacaactgcagtgctcgaggaacggcgttcaagatgacgcacggcgaggacgtctgggatgtcctcgcgcgcgacgcctttctgggcgacttcttcaacggcgcgctcgcgtcagagactcggttcctcatggacatagccatccgcggatccccccaggtgttcgagggaatagcatcgctagtggacgccggcggtggcaccggcgcagcagcccaagcggtggctgcagcattcccggacacccggtgcacggtgctggagcttccgcaggtggtagacgctgctccgattgatgggccggttcgctttgtcggaggtgacatgacgaagttcatccctcctgctgatgccgttcttctaaagaatgtgctgcatgactggagtgacaaggattgcgtgatcatcctaaagcgatgcaaggaggcgattgccgccagtggaaaagtgatcgtcatagatattgtacttgggtcatcttcccttgcaatttgcaacgagacccagctctggcttgatcttttcatgtccacggtaacgacgggcaaggagcggagggaggaagaatggtatcggctattcaaggaagctggattcagtgcgtacaagatcagcccagttctagggcttctctcgatcattgaggtttttctgtagccaccctgttcatctgggagactgggactggggctgctcatcacattttacggcattgtacgtctgttttgtaccaaaccttcttctaattagattccctcgcgtgtagcgctcctacggactacagtgtagtatgcttcgtccatgaaaccaatgtgtattgaaaacatcctacaaactacctttctaatagcaagtttaataatatagccaccagcaggcggtaagaaatccttgcaacctactttttagcttatatgcataatggttagttcttcattattaatgtatgacccacttatctctcttacaatattttcttggttcttctcatcttctctctcatccacatcagcatttagactgcttagagcaagtataataaaaggttatagtaagctaaatgctaaaatgaatgagagagcgagcaaaaatagaatgtaaatttaaaactggcttcgacacaagaaccaataaatattgtgacagaggtaagtgggtcattcattaatagtgaagagctaaccattatatacatgagttaaaaactaggttgtaaagaccgtcagctgttgactatattattaaacttgttcttataggctcttattatatttgctctaactgtgttgttatggtcatcatgtcaagggcgaacatgtgagggacaactatgtagcatgtgtgttataaactggacaaacatgtgttatatttattttcttttgtactcaaactttgcaaaagtttcttaaggtgttaagaggaattcaacccatagaatcaaccacgatcgtgaaatccatcacacatggagtaatagcccaaataagtagaag

SEQ ID NO: 43645 - DNA, 3181 bp, Zea Mays
gctgccagactgcaacagccaccggcggtcggcacgacagcacggtccttccattgttgctcccagctccaacgcagcattactcatctccattctccagtccgataatccactcattacctcatcatcgtttccaaaagcaaagctttccacgcagattccaccattaaattgggcgaacttttttgaattaaaaactcaaatcctggaaaacgagatgcggtaggctggtagtaggaggactaatcatgtgggcgacgctacataaacccgtcgcgcacgccaacttgcgtctcctcctcacagtctccgccttctccggaccactccacttaggcaccgccagcgctgtcgcggcggcggttacgacccgacgctcgagttctagcaggggcgtcgcggccaccgcgatgccttcgtcgtctccgcctccgctgccaccagccgaggagacgaccgcctctgctgccgctctcgcccctgagggtggattctccctcaccgagccctcgttcctcgagtccctcatgccgaagaaggagatcggcgtcgaccgcttcctcgccgctcaccctgagtatgacgggcgcagcgcactcatcgctatcttcgattctggagtcgatccagctgctgctgggttacagactacttcagatggaaagcctaaaatccttgatgtacttgattgcactggtagtggtgatgttgacacgtccaaagtggtgaaagctgatgctgatggtgctattgttggtgcttcaggtgcccgtttggttataaacccctcatggaaaaacccttctcaagagtggcatgttggctgtaaattaatatatgaactgtttactgacacacttacatctcgattgaagaaagaaagaaagaagaaatgggacgaggaaaaccaggaatcaatttccgatgctctgaagcagctgaatgaatttgaaaagaagcatcctaagcctgatgacaccatgctgaagaaggcacatgaagacatgcaaagcagacttgattacctgaggaaacaagctgaaggttatgacgataaggggcctgtaattgacattgttacatggaatgatggtgatgtgtggagggttgctgtcgatacccagacccttgagggtaacaatgatggtggaaaactagcagattttgttcctctgacaaactacaggcttgaacgcaaatatgcaattttcagcaaattggatgcttgctcttttgtagcaaatgtttataatgatgggaaccttgtcagtatagtaactgactgctctccccatgctactcatgtcgcgggcattgcagctgcatttcatccagatgaacctctgctgaatggagttgcacctggagcacaattgatttcctgtaagattggagacactcgcttaggatctatggagacagggacggggctggtgagggccttgatagctgcagtagagcacaaatgtgatctgattaacatgagctatggagagcctacccttcttcctgactatggcagattcattgatctttctaatgaggttgtggacaaacatcgcattatatttattagtagcgccggaaacaatggaccggctttgaacactgtgggtgctccaggtgggactagtacaagcattattggtgttggtgcttatgtttcaccagccatggctgctggagctcactgtgttgtacaaccacctgcaaagggaatggagtacacatggtctagccgcgggcctactgctgatggggatcttggcgtttccattagtgcacctggtggtgcagttgctcctgtaccaacttggacgcttcaatctcgcatgctcatgaatggcacttccatgtcatctccttctgcctgtggtggggtagctcttcttgttagtggcatgaaggctgaaggcattccattaagcccttattctgtaagaaaagcaatagagaatacagccgcatctataagtaatgcacctgaggagaaactgaccacaggaaatgggcttttgcaagttgatagggcttttgaatatgcacagcaggctaagaagttgccacttgtttcttatagaatctcaatcaatcaagtgggaaagtcagttccaaaactaagaggaatatacctccgcgggggcaatgcatgctgccaaacaagtgagtggactgtgcaacttgacccaaaatttcatgagggcgcgagtaacttggagcaactggttccttttgaggagtgcctgcaactgcattctactgatacctctgtggttcaaattcctgagtatatactggtgacaaacaatggacgcagtttcaacattgttgtcaatcctgctaatatcagcagtggccttcactattttgaagtttatggcatagattacaaagcaccatggcgtgggcctattttccgtgtgccaattactgtaataaagcctattgctctattgggagagccaccactattgtcaatttcaaaccttcgttttcaatctggtcatattgaaaggaggttcataaatgtaccttttggagcttcatgggcggaagttactatgcgaacatcagcttttgatactcctagaagattctttttggacactgttcagatctgtccactgaagcgacctgttaaatgggaggctgttgttactttctcttctccatcttcaaagaatttcagttttcctgtagaaggtggcttaactttggagttgtccatagcccagttctggtctagtggaattgctagccatgaacctacctgtgttgattttgagattgtgctgcatggaatatccattgatcagaaagtaagtacccttgatgatcaggataccttatcgacccgtggagtgtaatctttcttcacttcccactgaccgtgataaattgccctctggcaagcaaattattgccctgaccttaacttacaagttcaaattagaagacaatgctgaaataaagccccatgtgccactgcttaacaacagaatatatgacaataaatttgagtctcagttttatagaatatcagattcaaacaagcgtatttactcgtccggagacgtttaccctagttatgtcagactttccaaaggagaatacacgttgcaactgtacataagatccgtctacaaataaaatgctggcaggggggcatattatgagttca

SEQ ID NO: 43646 - DNA, 2310 bp, Zea Mays
gcggagcacaagagaatcgagaacgtcaccaaggccgtctgaaagcgaaaaggccctttgcctctcgctctaccccaaaccacagcagtcagcagcagaccctcgccatgggactgagatccccgctcgtgctcctgctgctcctcctcttcctcgccgctactttccgtcccagcgcggccgctttggcccctccaacaggcagcatcgtgaagcagctgtcgtcggtcgtcaggtggccgcgggccgccccctcgacgcacgggcccaaacagcccggccacccccagtacgccgatggccacgtgggggtagccctgcaatttgagagcggctactttgtagagacacttgttgagggtgacaagcttggtgtcacgccgcacaccgttagagtatctcctgttgagggcggggagctccttgcggtcgactcggcacatagcaacattgtgcggataaccccgccactttctgagtgggaagacttgttgctggttctttccagggccattctggtcatatagatggtaaaccaagtgatgcccgattcaagcgccccacaggcgttgccgtggatgatatgggcaatgtttatgttgctgatacagcaaacttggcgattcgaaagattggagaatcaggagtgaccaccatagcgggtggtaaatcgaatatcccaggatacagggatggccccagtgaagatgcaaagttctctacagattttgatgtggtgtatgtgaagaaaatgtgttctcttctggttattgaccgtggaaatgcagcccttaggaagatttctcttccacaagaagactgtacttaccaggattctgcactcctatcttcagatctcatattggtcattggtgctgttgtggctggatatatcttctctggtttccaacacgggtttggattctcaggctccgagaaggtagaggcacctgaaaacgagcagcacgagagcagcacaatcgggaagccacctctggtggtggagagcctgaaagaggaaccaggagctgggtggccatccctcgggacgctaattgccgatctcttgaaacttgccatcgagggagtggggaaactgctactcagcgtagtccctcaacgcatgcaacacgggaagaggaagacagatctcaccccgctcagggacaggctggtgatgcccgaggacagagaggagacggcagcggcggcgcagaagctcagcagcacaccaatgcggcccgagacagcccacgcccctaaccccgtaaccgagacggcagcacccaaggccccgaagagcacgaagccatccaagctcagggattcttcgaccctgtcaagcaagcacaggtcctccaagcggcaggaatacgcggacttctacggcacctccgagcccgctcccgtaggtgccgccgccaaggtccccaaggacaggctccgccaccgccaccaccaccgcgagaagagcggggaggtcgcctacggcgccgcccatcacgacctgaagcccgcggaagcgaagcctgccgattacagcgatccgagctacgatccgtacgtgaggagcaagtatgccgccgagagtgggtacaggtattgacgtgtcgctagctgtcctgtcctgtcctctcctgccgggggaaacagcggaatgaaaacctttcgccggcgtctgcctggcaatgttgtaagtgtgaagctatatagcctccacaagcgcaaagcgaggcgcaaacaaagctgctgctggtgcctggtgctgctcatggtttggtggtgcccatgagatgtggcaagtagtcatcctagttaggttaggtatggacggccaggacggggttggcatctggcccggtttcaggatatgctaagtgcgattttcgcagagggcgacatgtagagcctggcggcggttttgatttcgtatctgcagttcgatgtatccatccatggatcgatcccttgtgcctgcctgcctctgcctggcggcgcgtgtcggcacctgacagcaggtgatgcctcgtgacgggcagttaacccttttgccggtggctcactgatctgctgcctgcctgcctggcccggacgtctgttcgctgtccctgaatgcgatgcatcgtctccgtttcggtctgcacgtcaggtctagttgtgccgaagctgtagccatcacaggccgacctggcgtcgagagaagcgaggatggctgtgtgtagtcaatctctgtcgtactactactgtccactaccagctttggtggcgtcggtccgcatggcatgtgactggaataggctccagttagag

SEQ ID NO: 43647 - DNA, 326 bp, Zea Mays
ctttcttcttcttcgccaagaagaccgacgaccccaacttccagccggtatagacccgtgaccgccttcctctccactcctctttcttgccgcgcaagaacgagcgccggttttatctaccgcggccgccgcctgcaggccagtccgttcacgttcctgcttttcccctgtcctgcggttttggcctttttgcccccggcttcctggcggcaacgaaacaaccagtcggttcggtcgatgcttcgcgagttggaattggacgccggccgacccgctgctcaatccgtcgagttcgacatggagtctgacactgcatgcctttgtta

SEQ ID NO: 43648 - DNA, 384 bp, Zea Mays
tattccctacccaagcggataatgcatctcgcatgaagaaacggatgaacaacatgaccaaatggatttccacccaaatgcatgaccttttgcttgcaaatgtaaactctcaacccttgacataccaatggtactgagaggacctgctcaatgttaaaagtagttcaacaagttggttttactaacttgtaactgcccagttaacaaagattgagtttagagatcgttttatcgagttgtctaaactcactttggttcaacccatcctaaggaagtacttacaagaatcgagattaagtcgaccagaaaccacctagtcatcgctctagtcatgcctccatcgcctcgcgtgtgcttttccagcgtgtgtgatcatgtcgagtc

SEQ ID NO: 43649 - DNA, 1486 bp, Zea Mays
acgcttgcgcgtacatttcattttttccatcaattcagccgaaaccgccaccttaaattaggatatattattttcccccaaaacaaaccctaaccggtcggcccaattctcacgcgctcgccacagatctagccctgcctacagcgctctcgctgctgcacgtcccgttcacgtcgtcgtccgcccctggcccttgcctcaccgactcgtggccgtcggcagctccacgtgggacacggccacgcctgacgcctccacctccacgactcagctgacggctcctctccatgggacggtgcatgacgacgccatggcggttcaccggctccaaccttccccctccggcctacagtcctccaccgtccggtcgccagtggtcctccatgggccatggctgacgggtgcacgcaccgaatgcatatggcctgaaaatggagaattgaggatctagttccttgaatcttactgtcttttgagtttgagcatatactgatgtggagaggaagtgattggaaatcatctcttcctccattagaaaatagttatgaagtgacaaaggtgcaagaaagttttagtggcaaagaatctaatgaaaagaactggaacttggatgaaggtcaagaaaaatttaaagattccactgacagtgatatggtactgaattctgcaaaggatgttcctgcattgttccattctacaggtatatctagaactgaaccctcagcagacattgcattggaatattccccattaaatccagtatgtgatattatggatccatccctgaactgccgaagtatcccaacaaacaaatgtgaaagtagagctctggtagagaagtcagaacattgtccgaatgattataatttggaaatgaaggggaaaagaaacgatggtacaaaatgtacagttgttctaaatagcggttctaaagtagagggattgttatgtcttttggagcaagccattcacagtggcagggcacttgttctgagtgaagatgaacttgctgattcagatctggtctatgaaaagtctgttgcttttagaaagtcaattctgcgaagactggtttttgagaatactcgaaggaagtccagtgccaggagaaatgtgccagacaatcatgcaagaactaaaacacatattatagcaaataaaatgttgagcagtcctgttgaaaataaatttatcgttaatggaggatctgcaatgcagacaattgaccatggacaagagtgtctttctggtgttgttcatcaaggtaccttaagagtagatgaactagcaaagttactagcttgagaggtgattgctcttttatcaaccacatagaccagtatcaacatcctttgaaacatatgcaagatttgcatgaactctgaatttggttaaaacaagtctcaggtctgttgcgtcgtggcgagtcctttttaaccttgaaatattgaactataatcatgtgcgatgtacaaacaaccttccg

SEQ ID NO: 43650 - DNA, 746 bp, Zea Mays
gttttaaattcgaaccaaatcaaacatgtgcaacaattcaaagaatatttggaactcaacatgatgcaacatttcatgactcatatggtttggacaaaataaaataaataatccctccctaattaaactaattctacaaaaagaaaagaagagagagaaactagagagagaagagtaacatctgaatttggttggtaatttagaaaggaattttatacccccaaatttagggtgttacaatcgaggactatattaactagccacatgtcctggtatgggacatggtaagcctaatctcagcttgaccaataccagaaaggctaccacgcaatgggagtggagagatggcgagagtagcatgtaccctctgtggcaagagactggacggtggagtaactgtgctctcggttggcgtgaacccggtctgttcttgagatagcaggggggttggcatatgcaagggttaagtgctacatatgccgtgtggttagggatcaccagctaggtaaatcgattcggatcaccgttatatcctcggacaatggagacttgatcactgccctgcaatctaagtcatggatagaagcataatgagcaaaaatcatgttgtattgattaatgtgatgatgaaattagactagatgcaaacaagatctattagtacttaatctagcattaaaatgttgaaagtaaggactcgttttagtatgtttttctgcaaactattaaagttgattcttgctaaa

SEQ ID NO: 43651 - DNA, 2573 bp, Zea Mays
cgagccagaagcgcgtcgccagctgataactaacccaacccaacccaaataagctcgatcctgctctctgccgacgcggccggattcgaatccgaggacgatcgatgacggtgggcgccggcatcgccgtccaggacggcagcctcctggcgctgggcgccaaggtcctgcgggaggtgcgcggcaacgtgctcgtgacgccggccgccggcgggggcctaaccaacggcgcgttcctcggcgtccggtccgcgcccgccgccagccgcagcatcttccccgtcgggaagctccgggaccagcggttcgtgtgcacgttccggttcaagatgtggtggatgacgcagaggatgggctccgcaggccgcgacatcccctccgagacgcagttcctgctcgtggaagtgtccggcggcggcgagcagcccgccgtcgtgtacaccgtcttcctccccgtgctggagggctcattccgtgccgttcttcaggggaacgccgacgacgagctggagatctgcctggagagcggcgacccggacgtggaatctttccaaggctcccatctggtcttcgttggcgccggatcggacccgttcgaggtcatcacaagttcagtcaaggctgtcgagaggcacttgcagacgttctctcacagggagaagaaaaagatgccagacattctgaactggtttggctggtgcacgtgggacgcgttctacaccaatgtcaccgcccagggagtgaagcaaggattgcagagcttggagaaaggcggggtttctcctaggttcgtcataatcgacgacggatggcagtccgtcgccatggaccctgtgggaatcgcttgcctatctgacaactcagccaacttcgcaaacaggctgactcacatcagggagaaccacaagtttcagaaaaatggcagggagggtcacagggaagatgacccagcgaagggcctagcacacgtcgtcaatgagattaaggggaagcatcagctcaagtatgtgtacgtatggcatgccatcaccggatactggggcggagtgaggccgggtgcagctggaatggagcactacggatcaaagatgcagcggcccgtgccatcgccgggggttcagaagaacgagcgctgcgaagccctggacagcatgacggccaacgggctgggcctcgtgaaccttgacagggcgttcagtttctacgacgagctccactcgtacctcgcgtctgccgggatcgacggggtgaaggtggacgtgcagaacgtcctcgagacgctgggcgccggccatggcgggagggtgatgctggcgaggaagtaccagcaggctctggaagcgtccgtcgccaggaacttccccgacaatggcatcatatcgtgcatgagccacagcacggacaacttgtacaggtaacaacgattgcttgtgctgagctgagatgtccggtcgtggctattccattcattcgcaaatcgcaatgctcttgcttctctgcagctcgaaacggagcgcggtgattagagcctctgacgatttctggccgagagaccctgcttcccataccatacacgtcgcgtccgtcgcttataacaccgtctttcttggggagttcatgcagccagactgggacatgttccatagtgttcatcccatggctgagtaccatgctgcggctcgagcggttggtggctgtgccatatatgtcagcgacaagcctgggagccatgacttcaatctgctcaagaagctcgtgcttcccgacggatcgatcctgcgcgcaaagctccccgggaggccaaccagagactgcctcttctctgaccccgcaagggacggcaaaagcgttctcaagatatggaacctgaacgaacactccggcgtcgttggcgccttcaactgccaaggcgccggctggtgccgggtagccaagaagaacctcatccatgaccagcagcccggaacggtgagcggcgtcatccgggcgcaggacgtggagcaccttgcaagggtggctgatcacggctggaacggcgacgtggtcgtgtactcgcacgtgggaggggaggtggtgtacctgccaaagaacgccttgctgcctgtgacactgagatcgcgcgagtacgaggtgttcaccgtcgtccctctcaagcacctgccaaacgatgcctcctttgcggcgatcggccttctcggcatgttcaactccggtggcgcggtgagggagctgagattcagtggtgaggatgccgacgtcgagctcagagtgcggggctcgggcacggtcggagcttattcctcgaccaagccaacatgtgtcgccgtcgattccaaggcggttggtttctcctacgatggcaccagtggcctcatcagcttcgagctcggcatccccgaccaagaaatgtacttgtggacggttacagtagggtactgaagttacaactgagaattgagatagattttctaatgcgtcagagaacgccggtggtgtaggtattctgatttattcagtgttgtactttctactgtagttatatatattctgtacacatcccgggattttatgac

SEQ ID NO: 43652 - DNA, 1369 bp, Zea Mays
tgggagctgacacctgccattcctttcttatatgatggctgggtatatgtcaagagggccccaaaatggttctgtgtatgtctgcaatctacctcctggaactgacgagaatatgttggctgaatattttggcaccatagggttgctaaagaaggacaaaaggaatgggcgcccaaaaatttggatctatagggacaaagtttccaatgaaccaaagggtgatgctacagtcacttatgaggatccacatgctgcttcagctgctgtggaatggttcaataacaaggatttccacgggagcactattcaggttcacatagctgagtcaaaaagcaaagatgctttcgataaccccacaaatttgaacaccattgctggtgtcagtgaacaagatgaagtggataacggagcaggcagaggtagagggcgtggtgatggtcccggcaaggcttggcagcaagatggggactggatgtgtccaaatacaagttgtggcaatgtaaattttgccttccgtggtgtttgtaatcgctgtggagctgcacgccctgccggtgctggtggaactggtggtggaggtggcggtaggggtagaggccgtggtaactctgatgcaagaggaagcagtcgtgcgggtgctggtgctgctactggtggtggtccacctggattatttggcccaaatgattggccatgtccaatgtgcggcaacatcaactgggctaagcgtaccaaatgtaatatatgtaacacctccaagcctggtaccaatgaaggtgaaactggctcaaaggaggtgcagtgccactttggcccattgccaattgttgtttgcattgccatttttcttcattttaggggtggccgtggtggtgggtacaaagagctcgatgaagaagaactagaggaagttaaaaaacgccggaaagaggctgaggaggatgatggagagatctatgatgaatttggcaacctgaaaaagaaatttcgctctaaagctctgcatactggaagtgcgcagacacttcctgggtctggacgtgctggatgggaagttgagcatcgtggttctagtgaaagggaaggcagggagaggagcagggatcgtggtagggacgactatgatgaaaaggaaaccaggagcatagatagaggtgatcatggaagggaccagcgccggagccaagaccgcgaaagggaaaaggggagggagagaagagaccatgagtatgagagaagtagggagcgtgaccggcgccacaggtggtatgaaaattttgcttggaccaggcttgcactccagccgtccgatttcctatgctgccatatccaggccagggcagcaaccaaacaggccttaaggaaataa

SEQ ID NO: 43653 - DNA, 546 bp, Zea Mays
taaatcaaagtttaggactatgcaatggaaccagaattattataactcaactaggagacacaattatataaggaacaataataacaggtacacacgttggcgaaaaaatacatataccccgcattaatctgacaactaagggcaataaatggccttttacattatgtcgacgccaatttccaatcaaggtttgctactctatgactataaataaaagtcaaggacaaacactaccaaatgtagggttatatttaaagaaaaaggtgtttacacacggtcaactatatgtagctgtgtcacgagttacaaaaaagaaagggctcaaaatattgatagaaaatgatgacggttcatgtggaataataacagaaaatattgtgtataaagaagtactacaatctattgagagccatggcaacatacattgatactattttgaacaaattgtatttgcatatggacgttactgagagcacctagagggggggtgaataggtgatcctgtaaaacttaaaaacttaagccacaaaactttgattaagcgtt

SEQ ID NO: 43654 - DNA, 986 bp, Zea Mays
cctatgtccatatccagtgaactggttggatattttgggggtgagcttgactaaattcagtattctaagtgtggctgtgcacctgtgagtaatttgagcatggcagtcacgtagatgtgtccaggtattgctggcaccatgggaatacgaccttgctgcatgttgaacaggttttaggggcatctgtccattccagttgcttaaaaggcaaaattaattgaaggtcgccctccctgccttgagttccacctacagaccactgcaaagtgtggagctacttgtattctattttgtgtagcctctccccagtccctaggtttgcctgaccctgaaccgagcacagcaatccctgagtggtgaccacaaccagcagttcacctatatcaccgtggccagaacggagtcaagtcatcgtggaactagtgctgcgggcagcctcaccgtggaccgatcgactggagtcatccctggtcaatctcacgcacgcaccgagactttggaaggtcagtgaagctctctacgccattaatttgaactcgaccacgagattaggatcgtcagagcaactgtccgtcaccgctgacagtagagtggttccaaagtctctgcgggtaaattgagtgcacggccgagtttgccgtagcctggagagttggttggtaccatcgtcgtcgtctgcgatgtgtgatcatggcggatccggtgccggttcaccggagaactgtgcggcggtgtcggggccgaggcgttgtgaaagaaggaaagccgaggggcttaggtgcatctgtcagtgacccgagaattcaatcggagtgcggggtcctttttacaaaacctcaggcatgggctcctcagcgtgggccggctgtgcctgggatttaggacgtgtcaacggtttggctccgggactgtttaggattttgccttttcttttataagagatcttggaaattataccaaaaatcatagaaaaatccaaaaatcac

SEQ ID NO: 43655 - DNA, 860 bp, Zea Mays
ggtgtcctcatcaacgaccctagggtcctcgatgtaaataagaaaattctctcctggaaagttagtgctaaaagaacactagatgggtgagagacgctgaagatcaccatcaagtccttcagcgctgggggcaggcacaaacaggcacaaacagacagcaggcccaagtcccctattctttgtattgctaacagtccggccctgctgattccggcgcgcgccatctatcagtatgtctaatcagtacgcatcatctaatttggctttttatttcagttcttctgatttagtcatgatttatattcggaatttaatctagaatttgtctaattattcaacaccgccttgtgcagggagtccaggagacgtaggttctcgtatcaccacgcgtgccgtcgtcgccatcgccggaacggaatgagcttgtccgccgctgccttgtctcgtcgcgccggggcgccttttcggggaagcagcgcctctgctcgcggcccggagccgctgggacgccaccgcatccactccccgcggcgcacttggcatggcgatgaatggagatgggcggttgagggcggcgattagctgggacggtacgtaccgcagctgctgccgcgggagcgggctagtcgttggcgcagacggcgacaacggcatggctgtgcgacctggtgctggtgatcggcttcgagtggagcaagctaggcggatcaaggtgtccgtggtcaatctctctctccggtcccttgcgctggcgatgcgatgtctgccgctgctgatgaaaactgaaagcaccgctctactttatactagtaaaatgtaaacccatcgacgagcgcgagaatgaagcaggcagaacgagg

SEQ ID NO: 43656 - DNA, 297 bp, Zea Mays
gaagggcttgtagagcagccagcagctatctcaccgtgctggcctagaagccaactctgttttattcttcggagggaagagaaatctccactgctaaatactccctctagtgatctagtcacaggaacttgtttagaataaaaactggtcgagcctttaaatctacaaatgatagtagctattttattttttgtatttctaaaatatgtaaattatatgtatagatttatattcaggatacctataaatattttgtatccgaaagtttgtacgaacatattctaagataaaatcttt

SEQ ID NO: 43657 - DNA, 2346 bp, Zea Mays
ccttcgccagttcaccccccacagaccacaactgtcgcgtcgccggctcgccgctcgccctatcccccaccgccaccggccacgcttccgtactgagccgctgagggggccagtcaggcgcgccgaccgccgaaactgccatgaagctgacctgcttgtccgccgccgccggcggcggcggcggctaccactcgccagcgagccatctcctggagctggagggggtccgcttcctcctcgactgccccatcgacctctccgctctcgcggccttcgcgccggtgcccctcgccggtgacgcaggaggtctcatccgcgcggtgccgcgctactggttgccagcggccgtgaaagaaggcggcgtggacgccgtgctcgtgtcttccgctacggggatgctcggactccccttcctcaccgggctccccggattcaccaacacgaaggtatatgtgacagaggtagcagcaaggatcggaaagccaatgatggaggagctggtggagatgcatcgtgagtttgtgaggtactatgggccagatacggatgcatcacccaagtggatggaaggggaggaactcaatgaactcatgtcaatgtcgcaaaaggcagtgattgaaggcagggaaaatgatttgacttctctggtgcctttatacaggaaacgttgaagaatgcatgcacaaagtacagtctgttaaatatggagaggaggtttgcttcaatggcatatttatgctgaaagcttctagttcaggccttgaacttggcaattctacctggacaatacaaagtccaagagctagcattacctacctaccaagttcagtatttgtgtcggctcatgcattagattttgattacagctctctgaaggaaaatgatgtgattttgttttcggatttctcatccttgaatgacacggacgaggataatgagaaactgaatgagcattcaatggatgaaacggactcttctctatgtcgctactcagtgtttagggatgacggcgctgatgcagatgaaagggtgccattcgtgtgcaacaatgatgatatcacagaggagattgagagaatcagctttatatgctcatgtatttttggtgcagtaaaatctggaggctctgttctaataccaattggccgccttggtgttattcttttacttttggagcttatatcagaaatgctacattcttccagcctgaaggtgcccatatttgtgatttctgaaacagcagaagaaatatttgcttttaccaataccttgcctgaatggctatgcaagtcacgtcaagaaaagttattcgctggtgaagcattgtttggccatgtcgagcttttgaaggagggcaaattatttttgttcccgcatctacattcaaagggtttgctggcagcatggaaggagccttgtattgtgctatgtccacactggagccttagactcggcccagctgttcatttgcttcgtcgctggcatgcagacaaacggtgccttcttgttgtggagcaaggaaatggtgctgagttgagtcttaagcctttcatgcccttggcaattcaagtccttgagtgttctttcctttcgggcgtaagggcggggaaaattgatccattactgggagtgctcaaaccgaagtttgttatgcttccagaaggtcttaagtcgcggtgttcaataaagggggtgccatggtcattcttgtattactccaaggcctagacaactgaacgaaaccactgcagtggcgagattgagaacaaagctgcttgtaagcaatggacggtaccagctggcctctgcagaaaagcaaccagatcaatcaaagcgtcacttgctacactgtagcactattgaccctggtcgcttgctgtcagctttgcgagagaaggggatggtatgttcatttgctgcagatgatagccccactgctagtgaatcctcagttctggtcactagtcctggagatgctttggtgaggataacgcccgacacgactgttatatactgcgacgacgagagaacatccaatcaaatttatgatgcgcttagcagtgtttgtaaagggatctgactgcatcatgtgtaattgttgttcgttatggggtgtttggtttttagggactaatttttagtactccattttaatctataaattgctaaatgcggaaaataaaacttttatttttcgtacttggtaatttatgaactaaaataaaataggggactaaaaattagcctctagaaaccaaacattcccgaagttgtgcgtgtgcgttaaattgtgaattgccatgtggtggtttagtggttgaaaaaaggttaagttttttcttccag

SEQ ID NO: 43658 - DNA, 4137 bp, Zea Mays
gtacgaggcccatctcccatgacaaatgaaaaccctaatctccagcaccccggcggcctccagcgctcccgctccttgctcgcctccacccgcggccaccaccgccctgcggcccccgccgcttgccagcctccaccgcgccgcgagtcgcgccgttcctgcaccggctggtcctggagcacgggaggacgagcatgtactggttcggccccagccccaaggtgaccatcgtcgactcggacctggccgaggacgtgttgtccaacaagttcggccacttcgagaagctcaaggtcctggcgctgtccaagatgctgggctccggcgtggccagccacgagggcgagaagtgggtcaagcaccggaggatcctcaaccctgcgttccatcttgagaagctcaagcgcatgtgccggcgttttctacgtgctgcgaggagctggtgagcaggtgggcggcggagtcccttggctccgacagctcgtgcgagctggacgtctggccggagctgcagaacctgacgggagacgtcatttctcgcaccgcgttcagcagcagctacagcgaagggagaaggatcttccagctacaggccgagcaagcttcgcttgtcatgaccaacattcggaagatcatgatcctcggctacatgtacttgcctaccgcgaacaataggaagatgcgcaggaacaacagggaggtggagtcaatcctgcgagagataatcgggaagaggatccaggcaaggtgggtctactgctggagacaaacatgagagacgacatggggatgacgatcgaagacgtgatcgaggagtgcaaggtgttctacttcgccgggatggagaccacgtcggtgctgctcacgtggacgatggtggtgctcagcatggacccggagtggcaggaccgcgcgagggaggaggtgacggctctgttcggcagggacggcaagcccgagtacgacggcctaagccgcctcaaagtcgtgaccatggtgctctacgaggtgctccggctgtacccgccggccacctccgtcgtccggcaaacgtacaaggagatggagctgcctgtgctgctcatccaccacgacccggacatctggggaggcgacgcgcgcgagttcaggcccgacaggttctccgagggcgtgtccagggcctccaaggaccccggcgcgttcctcccgttcggctggggcccgcgcatctgcatcggccagaacttcgcgctgctggaggccaagatggcgctctgcatgatcctccagcggttcgagttcgggctcgcgccatcctacgctcatgcgccgcataccgtgataaccttgcatcctatgcacgattgcaagaatgggattgctaagcaagctaagatttcaatggcatattccttcatacataggccattgagcgacgaggcacaccgcgtcagcactcccgtggtggtcacttgcaatgaccagagacgggaggtcttcgttgcccagaacatcgctaacaagaaaattgaccgcaccgttgcattcgacaaggtgctaggtccaaagtctcaacagcaggacgtcttcaaccatgctgttgtgccacttgtcagcgaggttgacggttataattgcacaatatttgcatatggccagactggaactggcaaaacgtacacaatggaaggaggaggggacaaagcactgaatgctgacctcccgactgatgccggtgtcattccaagtgttgttaagcgcatatttgacatcctcgaggcacagagtgcagagtacaacatgaaggtttcttttcttgagttgtacaatgcggagctcactgatcttctagctctacaatgagattgcaagaacgggactgctaagcaagataagatttcaatggcctattccttcatacataggccattgaaccggaaaattttgtcggtattcggtaactataggatcatgtggttgttggtcgagttggaccaattatgctggctcatttgttggatgttttgacaagtcgattctagcttccttatgatctatgttagatttgatcaatgaataaaaggattattcatatcaatgtccatgcaccttctcagaaaatccttttgtgatgttggtgttggattcctggacctgtactggtacatatgctaagtcatccacaaatctgacccagaattgtaccgttctttttatagccatgtttggtacttgtttgagtgctccatagttcgcaagtttgttttgttatgatgtattttgacatttgaatctcagacatgcttaggaactactgatttgaatttatgggctaacagttccagtatttcaaatagaaagtatgctatatcaaataagttgatgatacttttggtactggagaatgaagttagactgcatttgatattagaagtctgtttgtctgattgcagttgattataaagaagctagagctgatattagaagtctgatattagaagtctgtttgtctgattgcagttgattataaagaagctagagcttccagtcaagtttgatattagaagtcttcttttgcttttacattttgttttttatgatcttgatcttagaagcagggttttggtaccagcttaactaattttctgaagttttatgttcttactttaattataactagatgattgcaataagatatcatgaggcgcgccgaggagaacaggggcctcctctccgcctcctccttcgacaggcagctgctgcggaaggaggtggtgaggagggtcaaggccgcggtggcgggacgtgagtgaagtgagctttgtcgagcctatatgtggaggtcggtcgtgaagctgggactaggacaagggcgagctgaaggctagaagctgtaaatgcacccttcaagagtcttcataggccaagtctctacataggtgttgacaaaaagggaaattcatgacaatgcgtttatatgagattgtccaatatcgaaaccaagaatacatggggggcaactgtattcgatttttgtttctctttcgtggagtattactgaaatatatgcttccagtgttgaagtttccaaattaaatgttatctctgtacaaagtgtgcaggctcggttataggaattttataaagaaaatgacaaatatacatgtacgaacttcaaatatttcctggtactaacctctctgctctgagatgacatgttcttttgctgttatgaaatcaaatatttcttcatgatctcttataatctgtcaaatgatgtttgcccagtggcaatagaaaacccttatattaaagagataatcgatgatgatgcggacagacctaaagatgtttgctcaacttttgctatgaatttattagtaggatgtcttggatatagagtaagcaagttatgtgttgtttattttcatgctaaatgatctttctggaacttacagtgcatggaaggaaacagtgggcgatgaaagcagggaatttgggaggtacatgcgacagagagaagagcaagagaagcaggaagcggagttgttcactcgggctcctgtaaccaaacatgataagcagatcgagaagcgcataaggagacaacttcatgggctaggaggcttaactgacgattttggccttgggatgaacatgctgttgggaggagacaaggaagatgatggcggttcaagaaagtcgcatggcaaaagcggaaaccgaaagaagcacctgaagaacagcaagaagaggatgaggcattagccctagacccacactgttgtagcacttcaatatactgatagagcctagaagacggttcaagcaagccacacgaaaagtgaagccggagaaaataccaagaagccaagtagagaaaaaaagctttggttcctgtcgtattatttctgaaacacaaaacttgatctgagcgactgatcgtgagctaatgtaacagtatgaattatatggcttgaacatggtaggtgtaaaatgttttgttcatcggtagagtattccagatgtgatcggcttaacagtatgaattatatagaactatgtgagccaatgtaacagtatgaattatataagttatcaagatattacatgccctcattgcaatgcacgggcactgacttgttatgataatat

SEQ ID NO: 43659 - DNA, 1999 bp, Zea Mays
atatacgaggggcagggccccccctcctctcccttcgtccattccgatcactcgctgctcccctctctcgccggagcgagccccgggccggatggcggcggcagcagcagctcctcccgcctccgcgatcgcgtgatggacgccgacgccgacgccgccgcgatccgccgatggacgacgccggaagggcaccaccacccgcgccagcggcggtgaccgtctccgccaccgccgcacccgcgcctaccccgccctccgccacggccgccgccgacaagtcctccctcgaccccgacgcgctttatgaagaggggatgtggcaacagatggccatgaacagcggtgccacaatgcaacctgggtcatatcctgagcgaccaggtgaaccggactgcacttactacctcaggactggattgtgtcgatttggcatgagctgcaggttcaatcatcctccggataggaatctggctattgcctctgccagaatgaagggagaatatcctgagagagtgggacagccagagtgtcagtattatctgaagaccggaacatgcaagtttggtcctacatgcaaatttcaccatcccagggaaaaggccggaattgcagggagggtgcagctaaacacattaggatatccacttctcccgaatgaaaaggagtgtgcgtattatttaaaaacaggacaatgtaaatatgcaaatacttgtaaattccaccacccagaacttttcaatgtggtgccttcgtcacgtggttcacctatttatacttctgtacattcctctgcaagcgctggtccacagtcatatactggaactatgtcaagctggacttttccacgagcttcttttataccaagccctaggtggcaaagtccttcaaattatgcaccaatggttgtacctcatggccttgtccaagtgccgagctggaattcatatcctggtcagctgcagtcacctggggctcaacaaacttatggaagttcacaacaaggcgaagctagtgcaggaaatcagggaatgctatcaccctatagatccagttcatttcctgtgcctcaatatgcgttgcagagagataatgtatttcctgagagacccgatgaaccagaatgccaatattacatgaagacaggagattgtaaatttggtgcagtgtgcaagttccatcatccccgtggtgaagaactttgcaaattctattctcgttatggcatctgcaagttcggcgccaactgtaaatttgatcatcctacaatggctgctccaatgggagtttatgcatatggtttctctgggtctgcttctgtcgcacccgcttcaactaatgcacctatgacgcgacatcttcttggatctccatcaggttctggatatatgtcttaggtgtcttttttttcagttgacctactttgatgtataaaatccacggcatcgcctcaggcgctgtgaatgtttctcctaacttcccgccgggatgaagttctgtaaattgagttgctgctggagatgtacagcccccccccccccccccccctccccaattaatccagaactttgggaataactgttggaacctaataaacttcagatacagaaacgctggttttcaggtgtttgcactattttgacactgctgcacctatggtccctaacagttgaggtaggaattcttctgaaggagctgaaacctgtagctgcaggtgtgcagtcgaaattatattattgcgtcaatttatttggaacctgtattcagctggtgttggggcagatattggcattcctcttatctgtgaatgctggttttctgatttgaacagtgtatcccagcctacggcttctgccaagacagtaaactcaggacctgtttgggactgttccactattcaaaaaatgaatttgaatctgggattcattattaaagtttcgccgacgaatctgagatcctttttagatagcagcttattcacgtaaggatattctgtctgaaa

SEQ ID NO: 43660 - DNA, 892 bp, Zea Mays
actctttccctctctcaaacggtcacttagaccgagtgaggcttcttccttaatctcacgggtcacttagacctcgcaaggatcaccacacaattggtgtctcttgccttgcttacaaagcaccttgagagtaagaagtgagaaagaaaagaaagccaagccaagcaaacaagagcaacaaagaaacacaaatgatcctctcacaagtcctaatgcgctagagttgaattggggactttgagtggatcgatcacttgaattgtgtctttggagtggagtctattgctcttgtattgaatgcaatgtgttgaatgcttggatggttcgagtggaggtggttggggggtatttatagccctcaactaccaaaacagccgttgggggtggctgctgtcgatgggcacacccagacagtccggtgcgccaccggacgctgtccggtgcgtcagccacgtcacccaaccgttagggttcgaccgttggagctttgtcttctagtggcaccggacagtccggtgctgaatcggaccggtactgttcactctccggtgcgcctctggcggctgctctaacttctgcgcgaactatccgcgcactgtagcattcgcaggtgtctgttgcagtcgaccgttgcgctggtagccgttgctcctcttggtgcaccggacagtctggtggcacaccggacagtccggtgaattatagcggagcgcgacctcagaaacccgaaggtggcgagttcgtagttgtacggtcctggtgcaccgcacacagtccggtgcgccagaccagggcacccttcgacttcttttgctcctttctttttgaaccctaactttgatcttttattggtttgtgttgaacctttatgcacctgtagaatatataatct

SEQ ID NO: 43661 - DNA, 2428 bp, Zea Mays
cccagcccgcgtgcgctctctccctccgccgctagccgctaggtgccgaggccttcatcggtcttccgctggcgacggttcgcctcgcgcgtgcgacgcctgggtggacaaccgccgcggcggcctcaggtgccgaggcattcgtcggtgtcttagctggcgacgaacaccaccagttatcgagtgtgcatgtgtacatccatgcccctttattggctccgccccaggtggccgacgaatttgcaacgtctttataagacggctgtaaatctgtgacagttaatattttgcagttgaagctctgtgattttgctgtgggcacattctgtttattgtcttatgatatggcagaatcacggactgtttcgaattctgagaataagcgcactctcccagcatggatgttgaaagcaacctcaggtaatcaaacagcaaagaccgcagatcagaataagcaggcactggaatctgctgacattggggctcttgatcagagcaaacccatcaaaaggaacaacagacggccgctaaaaaacttggattcagtagctgctggtgaactgggagttttgcagcgatgtgagggtagaggaaaggccagaaggaagagcaaggatgctgtcaaagatgaagttgaagaaattgtggaattaaagagtaagaatgcaagaaaaacgagtggaagaggtgctgcaaagaatagcaagaaacggaagttggataatgtcgaatcaggaccatcatcgccagtatcaactgatgatgacatagagcttactgttgaggatcttgtgagcatagctgaagagtttgttaatgctgataaacagaagcaatgtgaactacaaactgtggaggttaccaggcataaagagcatcatctgtgccctaaaatttccactgaggtagatagagggcagtcagtagtaaatgctcaatcagtgaaaggatcgatgcagtgcgcaacagccacaagtaatacaggtgcaatcaagtatacagaagatgagagcactagccatcaagaagtgcaattttcaagtttcaaaacgacagaagatgttgctcaggatatgataaacctgttattcggtcacctattgagtaaacctgttgccaacacagagaagtctgatcctgtagaatcaacgactagaactgtaaatcaggtgccagaggggagaggctggcacagcgaagtaccaaggcaggaggaacctgtgaagaaaccagagcctgtagtagaatcaatgcctacgactataaatcatgtgccagagaagaaagactggcgtagcgagttaacaaagctgggcgaacctgtggcaaagaagaagagcagcctcagggacaaggtggccttgtttctttgactgcatcagatgagatttgggcagtagattgtgattcgtatgggaccgtgtctgctggttctgagcgtgtcccagtcccacggcattgtttttgcatatagttatacctttggttaataagctgtcctctttaaatctagcaagccagccctcactgttgctagatggtattcctgtgtataaaggatgcatggtgcattttctgttggttgaagtacgactgtatgaagtatcggtgttcctcaacgcgacaactacactagagggaagcggtttaaacatcgtagagttattaggcatggaggagcccagctatctccttactcgccatggagcctttgcagaagttgctggagactgacacagctgagagtgtcctgttcccaatcatttacagtgctgcaaaactatggatcagtatgggcgctgatgatgcagccatcttcgtaaaagtggtaatggatcgttgtctatctttgggaggatcagaagaggtttcctttggacaagctctggcgatcggcagatgcaaaaatttgggggcattgagtgtcagacctggatgtgcacagattgccactcccggtaatgctgttgacaggcagttcatcaaggccaacaccatcctcactcttggggatgaggaataccaatggacatgggtgtcgaacttctacgccgcatgcaacaagaacagaacggtcagggacgttttgcacggagtatgtttcttgaatacgaaaacagtgacagagatggcagaattgttatgctatgggactttctcagtaacagaaagacctgacgagaatgaaaccggttagctctggcaccacaaccggaagagccgcgacaaaagccgtgggcggggcttgtgccttgtggggaggagtcctgtcaaacgagtttggctccggagcggggctcctgtctttatgtactcccctgttccaaaatagttgttttagccttttaacaaattcattcaataattaatatatttgttttgtatatgtgtctagatttattatcatattttaaatatagacataaaa

SEQ ID NO: 43662 - DNA, 1359 bp, Zea Mays
cctgtagattttttagttagctatactctgtcagtaaaaaaaatcttagagtgagagttagcaaaaactatgttcatataggtctgagaaggcctgcttttatttacctgtggctttgtgaggagcaactttacgtttgccctcctctgaaggaggtagagtagtttttttatcgcgtagacgagctatctgaattctagtttttgaacaaattatctgcagtaccatctactagttttaaagtacaaggttggacttcctgacttttaaattttctaaattattgtagcttgtttgtaagactcaatcgatttgctttttctagaactgaaattcgttgaatttcgacccgaacaatgcataaattacttagctcagtttttttattctttatatattgatgacatgatgtctaagatccagtgtcgcttctttctatgaagttgaaaattcaatagttagcggcactaaaggttccctttctggttcaaatttgtgtttatgtacaataacaatttaaattatctagctgcaaaatccgtttgttgcactttgcacataagaactgaacactttgcactttacacgtgagataagaactgaacactttgcactttacacatgagaactgagcactaaaattttgccctttgtctatgtacagtaaccatgatttttatgttttctactacagcatgtacacttgaaaattagcagcaatgtctgttatattacatgtccatccatttgttattatctcataatcttttctaatgtagtttgctttgttttattgtgtatattcattcatttgcctcatggtgttctagggtccaaggataaagatattatcagcatcgttagagaaagagaaagtcaacacgttgtaccaagttcagtcagttgacgcatcttcaggcttgatcttggtagcatttgaaggcaacgtgttcccgttctaaatatatctaatcattggatgttgatttgtgtttttatctgatctgaataaaaaatgtgttcatttgaacaaagaaaaaagatatgtattgagaatcatatgacatgcatacttaaatttctagagatacaatgatatgttctatgaacctttgttggtttttattggttttttgttggttttcatgtttgggatttaatccacatggaataaacgaacaaacatacttgattgggttttgggatatgatccatatggaataaacaaacaaatattaattgattcggtttagggatttaatcccacaagggattgggtgaaagacttggattcacccaatccatgtgaggtaaaaagccagcctgggaaaaaatcctaaattgccgaacaagggctaa

SEQ ID NO: 43663 - DNA, 2750 bp, Zea Mays
ctcggaggatcgggaactcagcggaggacacggacacggcacacgagtcacggaacccgcactgcaatactggcgagcccccttcgatcgaccaacccccgtcccatcccttctccgtgtcagcctggaaaaagatcgcgcggcgcgagccacgagggtggtcactggtcaggactcagggtcatccccgtttctctcctcgagtccccacccccaggtacggacactctcctactccgcccggcgcccatccccgcgcacgcccagcagtccagccggaggccagatcaaagcgccaccgccacgccgcacttagctaatcccgccgctgccccggggtcgctaggaggagatgaagcccaaaagcctcccgttcatcgccttcgagcacaagcgggatgcgtacggctttgctgtgcggccacaacacctgcaacgttacaaggagtacgctggcatctacaaggaggaagaggaggagagatccgatagatggaagaattttctggagaggcagcctgagtcatctggacaggatgctggtgataatgctacgggtgatggttctgaatcactgcatgagaagaccgtagcagggccacagaagattcaaatatggacgccaattagatcgtccctgagcaacattgagcagataatgagcctgcgcatcgggaagaagcaatcttctgctggcaagcagcaagcaaaggacggaacccatcacgtgaaaggtgaagagagcaagttgtcggaggattcagatgacgaattctatgatgtagataaggttgatctgagccaagaagcgcaatcgagtgatactaggaatgctgatgttggaagcaggaaccaagaagaaaattacatttcaagggaagagttggagtgcctggtccatggtggactgccgatggttttgaggggagagctatggcaagcttttgttggtactggagctcgtaggatagaagggtattatgatagtcttgcagcagagggtgaattagataacaaaagttctccaacttctgaaggtgttcaagaaaagtggattgggcaaatagataaggacttgcccagaacttttcctggtcatcctgctttagatgaggatggaagaaatgctttgagacgcttgcttatagcttatgcgaaacacaatccatcagttggttactgccaggcaatgaacttctttgctggtctcttgcttctattgatgccagaggagaatgcattttggacattggttgggattatggaggactattttgatggctacttttctgaagaaatgattgagtcacagttctccgtgtctgggatgtgcttttgttcgatggaaacagagtaatgctgttccggaccgctcttgcgctactggagttctatggtcctgcacttgttactacaaaagatgccggtgatgcagttacccttttgcaatctttagctggttccacatttgacagcagccagcttgtcttgacagctcgtatgggatatcaatccgtaaatgaaacaatattgcaagagctaagtaataaacaccgcccatctgttatgtctgccatggaagaaagagcgaaaggtctaggcgtttggacagatactaatggtcttgcatcaaaactgtataactttaaacgtgatcctgaaccactggtttctttaagcaactcagcagaccagttgagtgatgtgggagatggggatgccaatcaagaaagtgatcctgtaaacatggatgacgagtatgttggtgtgacagtgaaatctgagattgattctttgcctgatccaaaggaccaggttgcctggctgaagttggagttgtgccaactcctagaggagagaagatcagcagttctcagagctgatgaactagaaacagcactcatggaaatggttaagcaagacaatagacgccaattaagtgcaaaggttgagcagtttgaacaagaaatatctgaattcagagaggctttgtcagataagcaggagcaggagcaagcaatgtttcaggtcctgatgcgtgtcgaacaagaactgaaaattgcagaggaagctcgcatctcagccgagcaggatgctgctgctcagagatacgcagcaaatgttctacaggaaaagtacgaggaagctatggcttcacttgcccaaatggagaaccgagctgtaatggcagaaacaatgttagaggctacactgcagtaccaatctagccagcagaaagcactgtccccttgcccttctccaaggccatcaatgctcgatgcatcccctagtcaggcaagtcagaattcatcgcaggtgtttcagccaagaaggaaaaacttgcttggcccattttcgctgagttggcgtgataagaacaaggaaaagccgaacaatgttgaagactctgcgaacacaaagtttaccaatagtgatgaaatggtagatgagaagcagatggaaaccctggatctagataacgaacagagagcagaatcaactaaagaagatggcaagatgagagcagaaacccctcagaaagacgacgatctggtaagggtccaattaaccacggaccatttgaatggacaccatgaacagatgcaagaaataaaactggattggtaagcacaatggcacccagtccaagtaccttcggcaacacttctcagtgtatttgtgacctgatcacggtgccagttggtgcagcattgagggtggcctaatgttctttatatcccccccccccc

SEQ ID NO: 43664 - DNA, 551 bp, Zea Mays
ataatttgctcaccctttttgcaaacctaaacatgcaacaaaaggaaaacttgaatgaattaattagtgctattcatgagaaggatgaactcttggacacccaagaagactttctaattaaggaaaataagaagcatgttaaggttaaaaatgcttatgctctagaaatagaaaaaatgtgaaaaaatatctagtgagctaagcacttgccatgatgttattaccaaccttagaaatgagaatgctagattaattgctaaggttgactcaaatgtatgtgatgattcaatttccaatcttagagatgacaatgctagtttgcttgctaagattgaaaaattgaatgcttctcttgacagccttaggattgaaaatgaaaaaaattgattactaaggctaaaaacttagatatttgcaatgcttccatgtccaatcttagaagtgaaaatgacattttacatgctaaggttgttgaactaaaatcttgcaaactctcttcatctaccgttgagcatgttacaattttcactagatgtagagatgttaacatt

SEQ ID NO: 43665 - DNA, 1668 bp, Zea Mays
attgttgaaggcccaacagagaatgaggagccctaatatcattgacccagatataattggagacatcagatgcttcactccagggttcaccagaatctcccaaatctgttgtactggtcacaggggagggggaatataacatggtatccctgcgtaaaaccatcagagcctaccttttggaaatgggctccccattcttgccatgtagagctcggtcaggtcgctttgtggtaaaggattactctcttaagatgtggctgaaagattctcctttctgcatggaccttgagttaaaagatgctccagctcatcctaagttaaactcaatgaagctgatcgaaggatatttcatgagagctggttttgtatcagcatttaaagatatacatgagagacttggggaagtatggccaaaaaagttttccaggttagctctgttgtcagaagaatgtagggatgaggttatcaaggctgatatacaaggaaggaaagaaaaactggagagaatgaagaagaagggtattgtcacagcaagaaaatctaaaacaagagcacgacgaggaaaatttgttaggcagcagaaataaaacacgaaagtagtgttggagtagtcgtggcctgttattttttgcttcaacacatgacattttctcaaacagcacctggcatctacatgaaaattttctgataggggtggggatggaggtgtggaaacaaagaatgaattatgattgctgctattttagcattggttacggttggttctgtaaacttcttactggaacaaacgatgtggttcatgttctccaagatttactgagcagcgggcacagctgggtaaccagctcatactgagatgaacaagctttggatattattcggcagtgtgcacctatgcagtgcgccttgggctgcgctgatgctttcatggggagcgcactagtgtggcagtaagatcggtgattgctgcagtgtggccttgccatggaagctgcgagcttctacaaacaaatgttgagggccggtgagaaggaaaatggccttgtgagtctcgagcatggcaagatggttcattgtcgcagcatgaagtctaggttttgttttgaaatgatgcacttcaagtgtggcaggctggcagctcagttaatactcaaattgtcttctaatgggaaaataggtctagtggagtggtgagagttttctccctaagtcatcaggtcatgagttcgacatagcctcttcgtatttacggctgaatgttgccttggtttatccctttccaagagccaactcatgtgggagccttcagcactaagtctgttctttcacttagcttatctttatgctgctttgaatccgataatttcatttgcggcttatgacaaggaaaaacttattgaacctgcaaaatttcatcctcaatatttgacaactataaatttggtccaactttgttcccaacttaatatgttcatttaatgtagtttgaaaacgcaggagagctacattcattgtattagagagagagaaagcagccatacaacaccagcttctcctatggggacatatatataagaggttgttacagactcaagagactagccttataaaaagaaatgacaagacctgactgagaagaacctaaccaaattagtcttaaacccccaa

SEQ ID NO: 43666 - DNA, 2358 bp, Zea Mays
atggcgtccccgtgccacgaggaatctgggagagggagaggacccatcgccatggccatggccagaggtcgcatcgccatgggtggcagtggcctccactgtgcatctgcaatccactgcggaaagagaagaggaacttgttgctctacgcaatttgcggatactttagggaatcgtgattcgaacaatatttcattagagaatgccaaatcatacaagatagaagcattcaaggctcaaatgcagctaccattcccgaaacttttgtgtctaatgacgatgcaagctgccaaagatccgcgcgtcgacgagaggggcggagtcggcgacgagcagatggccggaggcggccccgccgcgtcggcgctttcaagcccctggagggctctgctccagcgagcgctggacgccaacgcccacctcaggcactccacctacttccaactcgctacggtgggcgccgccggcaggccggcgaaccgcaccgtcgtgttcaggggttttcaggaactctgtgataagattcagattaacacggacgcccgaaccaacaagattggtgagatcaagagctgcccctttggtgagatttgttggtacttcacagatagctgggagcaattccgtatcagtggcagcatagatgtgattgatgcttctactacagaccctgccaagctccagcacaaggagaaagcatggttttcaagttcagtgaagtcgagatcgcagtacttaggaccacagccaggcattccggttctagatgatgagcatgttaaggacgttcatctcgatcctttagctggcccagtagatgccttttgccttctggttcttgatccggaaaaggttgattatttgaatctgaaaagcaatcaaaggttgatctttacaagaagacaaaaggatgatggatccaatgattggatggcagtaaaagttagtccttaagctgctgcaaaaactttatttggatttgttattttttgttaccctcaaatatagaagataaagactgtaaggtatttaggaaggagtcaaagcaggctgtggctattcatgtttgtcaaagccgttggtcttgagatttgtttgaagatgagcgtggctcgtgtttgccactcgtgcttgtttttgtgcataagttatctgtgtgagcagaatgcagagacagcatgtgttggctttaataaactaccagcatattccatgggaagtattaaagctgtgtctacacttgcaattgcaacgatgtgctgagaacaagccgttggatggttggagaacttcaggtccgctgcgcaagtcatgaatgtggtcttggaaatcaaagctgattgctgttatcctgcaaaaaccgtcaggcagacacaccacatgatctgccctttttatctaacagtgcagactgccgagcaataaacacatattgattaccgaaagaaccctttggctgtagtgggcagtgggctcctgattatgaacagttccagatgaaagcgtgctaatggcattatgtcgttgcaaaagtaaatggtagtgaactgtcgcagccatgttttgtctgaggccccacccagttgcaaagcgtaagtgttgatgccaaatctagaacttgtcacgggggaccgaatgactattggttcatcttgactactaccgcgtctcaatcatctggcactcgagaggaatagataatcatggtcacctttgaaggccagtcaaaatgctactccattgcggctgattggagaggtcaaaggtggctgttaaattggatattcggcttttgcatcgaggacttttggcagccttttcttcctccatctctctactccatctggtattgtggcggtgccaaacataagtcatggctcatcacttttgcaaagcatgcaagggacatgtttgggcataaagcagatgtttgaggtcaacagcaagtctgagctgcaagttgttaatggtgggttcgttaaaaaacgactgtgaaggccttctctggtttcgtctttggacagtggtccctttttgcctattgggcctttactggtctaaaggcctggaagatgtgggccatgcacagcttggcatactcacctagtggataactctcggtctccactctgcagaaggtgttctgaaggcctggaagatgtgggccatgcacagcttggcatactcacctagtgggtaacactcgttctccactctgcagaagatagggtgtggttatcatgcacaaacacaacaagaggaaggaagaattgcagatagcggcggcacgctctccatccgtcccggtgtcccacaaagccaagcagcgagttcctggagacacgggcacccatccaa

SEQ ID NO: 43667 - DNA, 703 bp, Zea Mays
agacgaacaaactttggctttgggtgtgcggcgggcggcggcaccgtggcagttggcattgtggtctgtagactgcagcagccggtaggactctgcgtctcctcccgtccttcggttctgcctgcggcggacagatctgctgctcgacttctccggttgtccctgtggcggatggcacatcggcaagccaggcagccagctcgtcagctctaaatcagttaggaaatattgattatgatccgtgacgatgtcaaacagtggaggcaagggatgtcgtccccgtgccaaatccatgccacccaagaagcaactaggtatttctagtttcttgcctgaacctccatcgctgccatcttcttggaaagatagcaccagtggtgccaatttcatttcagggacaaagaggacattatgtgcaagagacagtcaggggattccagggtcttcgtctgtaggagcaaagagtgttactgctggtgatgctactgctcgtttaccacttgaaccagggattgatggtactagcacacagattcagtaactattcattctattttgactgatctaaaaccttcggaaacaattcatatcactcctaatcctcagccctgcatggattttgaggaacaagatgctgatagtgatcccgatgtcatgaatgattatggtgagctttaactgcgagtctaccactagttatggt

SEQ ID NO: 43668 - DNA, 2087 bp, Zea Mays
attttttttagagcggcaacgaggagacccattttgacaaattctctcctcgccctcgcctccacttttgagccacagacccgagcgatcgtgccccggcccccgatcctgattcccacaaatttccgccatggcgatccgcccggactgatgcccgattctccatctgacgatcctcgaaggaaaaaggtgatggctgagtggagcaattctgttcgtccaattcagtggagatgccactggttagagttgcgtatgagggagctttcatctcaaatatcgaagtatgacaaggagcttgctctaatcaagaaacagaatgaattacaacaggcagcaagcaaagcaaatggtactatgtcagaatcgatgcagattcataaaggccatggaaacagtatcatgaagaggagaaagaggaagaggcatgaggacagtgtggatgcgtccttgtacatcaacaagcaccagatattgtcatactaccatgataaacaaaataagggagttcaaaccggtgatctcttagttgatgacgattgtggcacagttgatggtagtatcagtggtggacttgatactactacattgcttgattccgaggattatgatatgatttgtgagcaacacgctttacaggatattctcctgacaattgatgggcttcagtctcgagtccatctgctgcaagatcgtctcagcaaagctcattctgaaggagaaaatttggcattttctggggccgatactgatgtcagagtggctgggaagagacagcgtactcaaaagcactcattctctaatacaaagtctcgacatactaaaccacagaaaaggaagaatctaaatatcttgctgaaggatgatgatgatggacaagctcttgcaggcggacctgctttggctgatggggaaactgatgtgcatatgataggtgctagtaggagtactgaagaaagaagtggagagtgcaatcactcgagggacaaagccatcacagtggacctactgttgggtactggcaattccataacaaatagtgatattggggatttatacaatgtaaacactgatgatgtcctcatagccaatcaagcagccgttgaagcttgtcagcagtttcatgaggcaaagcatctgccttctggaagtccttccaaagacaagatcatttctgctccagcagaaatgaagaataattctccaccagtggaggtgaagaacacttgcggtccagtaaaaattgagagcttgtgttctccagttgaaggagaaaacacttctgatccagcattggagcaagaatcgttccttgaaaagtcaccctcgaggcagcctgtatccccggggaacaagcaggagctgaaacctaagaaaagacggaagaagaaaggctctttatttactaagaagcagcggaaggtggactccagaacacctgatgcaaaggaaaaaactgagggcacgccctctgatgtagcagaggaaactgagagcccactctctggtgcaacaggaccaggaaccatgaggtcttgctgtgctggaaagaagcgcaaatctggaaatgaacctgcagatgcaaataaaactgggaagccatcctcagcagtgaagaagcagaaaactgaaaacccgactgcagctgcaaatgcgacaaagaagcgggccacggagaagaagctagagagcgcgagtgcctcccagaagctgcaggttgagaaagctgtgcttgtcgctgtaaatagcaggaggagccaaagggtccgtaagcccaaagtttttgctgactgaagaagcaggtagaaagtcttaggctctctattgtgtatgtatcttgtagccccgtcatcaaaatcggtggccatagcaacataggaagtgcctggatcgcctcataagttagtgtacatatatcagctatgtctcacccaaattgtagatttgttagtttgttgttcttaacccttctcttctgggctgccagattaacaatgtcatgctgtgttagcgttatatcaaaaagaagaaaaaaaaaggagaaaaatatgccatgcaactgcaacttggcccgtcgcatctttgtg

SEQ ID NO: 43669 - DNA, 249 bp, Zea Mays
ggaaaaagcagctgtaggctgtaagctgttaaaaagctaaaaatcgtttggtggaaaccactaaaagtcgtaaaaaattcttcgatatatgttttcacagttccatccgaaaagtcactaaaagcaggtctaggggtgctttcagatttgcactacgagaaagtcgacttttagaaaaagctgctttctggatccacccctttggttgacttttggcttttaggggagcaaaagccaaagccaaaagtc

SEQ ID NO: 43670 - DNA, 1795 bp, Zea Mays
cgccgctgctagtcagctttctgcatgatggtgattgctgatattttgatccttaaataaacaccttttatttgcttctctgcagagaacgaacgagggagcgagcgagatggatatggcaggccgcagcaggtgcaggtgcagcagccatggacgactcctctggctgcttctcgcgtgctcgtgggtggcagccgcgagaggccagcaaacagcacggactgatccagccgaagcggcggcactgagcacgatcctggggcgatgggggctgaaggcgtcgccggggtggaacatcagcggcgagctctgcagcggcgtcgccgtcgacgacaccgacgtcgacaacagccccaccatcaacccgagcatcaagtgcgactgctcctacgacgacaacaccgtttgtcacatcaccaaactgagagtgtatggcttgaatgttgtcggccagataccagccgagctggagaacctcacctatctcagtaacctgaacctgatgcagaattatttgacaggtcccgtgccttcattcatcgggaaatttcccatgcagtatttatctctggctatcaatccgctatctggaacacttccaaaggaacttgggaaccttactgatcttatctcactgggcattagcttgaacaactttactggtgaacttccgcctgaactgggcaacttgtccaaactggagcaaatatattttgacagctctggcttcagtggtccattcccttcaacattctcgaagcttaagaacttgaagatcctctgggcatcggacaacgacttcacaggaaaaatacctgatttcattgggaacctgactcagttggaagttctgagatttcaaggaaattcttttgaaggcccaatcccaaaaagtctgtccaatctaaccaaattgacaaccttacggatcggtgatgttgtgaatgggagctcttcattgtcctttatcagtaacttgacatctttggatgtcctgatattaagaaattgcaggatatctgatactcttgcaacagtaaatttttctaatctagctggattgaccttattggacttgagctttaacaatctcacaggccaaattccacagtccatactgaacttggacaaccttggattcttgtttctcggaaataacagcctttctggaagcctgcctgatattaaaagcccttcactaaacaatttagatttttcttacaaccagctctctggtagctttccttcttgggctacccagaataatttgcaattgaacttggtggccaacaacttcattcttggtagcagcaacaacagcattctgccttcaggcctaaactgtctccaacaagatattccttgtttccgtggctctccggaatattcctccattgccgtagactgtggaagtaacaaatcatttaggggcttagataatactttttatgaaatggatcctacaaatattggagctgcatcatattatgttactggtcaaacaagatggggtgttagcaatgttggaaaatttaatgaggccccaaatggaagttatacaatagatagttccgagcagtttcagaatgcactggattcacaactgttccaaacagcaaggatgtcaccatcatcgctacggtactatggcattggacttgagaatggaaattatactgttgagcttcagtttgcagagtttgcttatccagaatcacccacctggcaaagcactggaaggagagtttttgacatatacatccaggtggtctgaaagaaaagaatttcgacataa

SEQ ID NO: 43671 - DNA, 367 bp, Zea Mays
attcaaagcgacggaagagaagaaggagtctacaccaagtaggcttccaattaatgcctccaagctcgacaacgaggagatggcactcatcatcaagagcttccgccaaatcctcaaacaaagaaggggaaagattacaagtccctctccaagagggtgtgctactggtgtggtaagtccggtcactttattgctaaatgttcaatttctagtgatagtgacagtgacagtgacgaagacaagaagggaaagaataaggagaaaaagaggtactacaagaagaagggcggcgatgtgcacatgtgtcgggaatgggactccgatgagagctccaccaactcctcctccgacgaggacgccgccaaca

SEQ ID NO: 43672 - DNA, 542 bp, Zea Mays
ctaggcagtaagtacatcatgttctacaatgttaactattttggtttattagcccctgaatgtttacatttggactgttgatgcattactatgcattacataattgtttaggcaccgattttgagtaagagctgcttatattttggttgtacattttgtcattgcttcctcacttctgatgtactactttcattacctttgtcgtttacatagccattcagtattaactccatatccccccctcttggcagtttcagtggtttccttttgtcattcctgagattttatcattgttgttcatgatgtcaactgccttgtcgcaatcaccatgattttttatgccagctagattactattaccaatgtagtgctctaaaatttgtgtggaaagtgatgccatcatatagtctcgtgccaagataatttctttctgctgggtctttctaaaaattcaattgtgtaaaattttgtgttacttattagtatcaagaagtttaatgcacttcagttaaaagaggaattgacaaaaacatgctgctcta

SEQ ID NO: 43673 - DNA, 678 bp, Zea Mays
cagcagtgatgcatgatgctaggttagaagcatacccatttggaaatttcacacttctcaaaaaatcataaaatgctaccttttgatttttatccattatatagggggcatgaggaaccacataggtacctccatcacacttcaagtgtaaatcttttcttatgcccatgtcctcaaaatcaagccttgcattaatactgtcctttgactttcctggaagagcaagaaatgtacctagcaagtactcacatatatttttttcaatgtgcattacatcaagattatgacgcaacttcaaacctgtccaatatggcaaatcccacaggcacgaccttctcttccaacattgaccaccatttgcatctcgcttcctcttattgctatttggatgcttccctggtttaacttccttcactctttccaattgttgcatcaactcagtggtactaaattgttgtggtttgtcacggttctcaatttggccatcataatccttctttttcctccatggatggtcatgtggtagccaacgtcgatgaccaatatagcatattttattccttattcttctggagcaatgatctttgtcacaatggacacaagcgtagtatcctctggtaactgttggggacttgctctcaaatgctataaattgagaacaaggcaacacaaaaacag

SEQ ID NO: 43674 - DNA, 1864 bp, Zea Mays
ctcgtgtgagctttacaggtagtcatctcatcctttgatattctatcggatattatcaacctgtgcttagcctctctctctctcatttgcagtcgtcaggtcaggatgccgcgcacgaagaatgtgtcggcgccaaggggaggcgatgatgaggatcctcgtcgccccttcaggcaggtcaagggcaagacagtacacttggagcaacaggaaggccgcaagaagcggcgtatggacagagcagcccgtgcagcggcagcagcagcgtcagccgctgcgcaggccgagcttggagatcagcctcagacaccttcagatcagattgtgtaccatgttcgtcgtctcgcctcccgacctcgctcctcctctaccaccactgcttcagcttccactccacctcccactttgcctgctcctgtcacccctgttgcaccatccaccacctccactacaccagcttccactgctcctcctcccgctcctgtttccgctcctcctattccacctgctcgtttccgggagcgcgatgagactgaggtgggacctctggctgctgatccctggttgtttgaccttcagcgtgctacagcggcacggggtacgtaggttcagatacgtacccgtggagtcttggttaccggctcagagggaccttgctgcagttgaccttttcagcaccaagattcaggaatcttcttcagggcacagatgtctgcacagattgctctgcgagtgcaccggcttttggatcttccagcttttctgctagccgccggtgctgactctgaggtgcacctcacatatctgcctggccttctgactcttttgactaccagcggcaggtatgttgaggattgggtccgagttttctacgtatctgtatggatagacccagatcatcactggatgaggtttcgttttgagcgagaggatgtcactattactgccacccagattcgccagctctttggttttcacgagtcgtcgactcgacttcacagcttatgctacggcacctctgaccctcctcgtcgccctcacggcggtgtggctccgggcacagctcacgtcgcggctttgttccgcccgcccttctcagatgggtcgcgacgctcactggtagattttactacagcagccaagttcctatttcagcttatgatacaaacacttctgccgcggatgggatatagggaggctaccacacatatccagctctggctccttggtgccctggtctctcactctgagtttgacgttgttgatttccttatttgtgagattgaggacaccgtattggatggtatgtgtgctcgtcgtcagctgccatatgcacactacttgtgccacatttttgctcagctgattcggcctccacagttccagggcacacttgaggcctcacgccttgtttttggatcctaccatcctgcgcctgaggctcctgtgccagcttctgctccagttttttacactcaggtcgaggatgctgctcttcatcagttcgaagctcaggatgcagcaattgatgatgatgatgatgatgatgattttgggattccacccccgcctctgcctcctatgcctccacgctcacatgatcatgaggctgggagttctagtgctacccctgctgcccctcctgcgattgaccctgctcttgcttcgattctccagacactcactcagcagcaggctcacttggcagccgagcagacccgccaggcagcagcccatcagcagttatccgagaggatgctctcgatgtttcagaccatacaggacaggcatgattcccttcagcagcagctccttcaggatcgggctaagagcagggccttcatgactcttatgctacagcgtt

SEQ ID NO: 43675 - DNA, 983 bp, Zea Mays
ttatgagcctgtgtggtatgcgtgcatggaagccacgtaaaataggtcatacagtgctggcattcccatggttctcctacatcaggtttgagttgaggtccatgccctgcatacacgttcagtggtacttgtccatatccagtgctcttcggttgggttcaataaagcttccccttgccctcagaaacttgcacgccatcttcctgtctgaggtgaccacgcccacccgttcttcacctcaccatggtcagggatcctcgacgggtttttggccgcgttgtgctggttccataatctccagaggcggagcgcggcgagcgggtggaggacttcggggcgctgaacagcgcgttgcctgacccggagacgacccctgcggaggccgcgactggagtcgccccgggaccgaccccggagactgcggaaaacgcaccaggcgcccttacatctgctgcggccggcgaagacctgcccccaaaggtggccgaaggcgcgcccgatgcccccgcagctgctgtgccgagcactgaagatcccgtggcggtgggggcggagggagcggcggaggccgcggcggaggctgcggcggaggctcccgtggcggcagggccttcgcaggtggcgtagtgggtgattagggttggggaatttttggatgttgtactgaattttggttgctgcgcaggttcaagattttgggcctgcgcacgcaaccgctactactgagtttttggcggcttcgaccgcggaagatggaaatgaatatggtgggtctgtatctgagttttttgattttactgactctgggagctcggttgagtggactgaggagtcgtcggaggaggacttggattattttgcggccttggacgtggctgcggcggaggctgcggcggaggctgtgccaaacgccgcggacgcgccagacgtgccaggccctagcaccgggctccgacgacgaagggcggttgcaaagcgtaggg

SEQ ID NO: 43676 - DNA, 1882 bp, Zea Mays
ctactgcaatagttttcttctcacttgtatatttcaagctttcgagtttcgacaactaaatgccaccaaaatgtacttactgcagtagtgcttttgcattcccttttggtttctgtcttacacaggtactccgtctgttccaaattataagacgttttagctttctagatacattgctttaactatgtatgaacatagtgtatatctaagtgcatagcaaaagttatgcatataaaaaagccaaaatgccttatagtttggaatggagggagtattgtgttaatccattctggttgcaagtcttatttctgatgtaccattattttgctgcttctgagatatacaatgcaatccgtgtgttcattgcttgctatgtctggatgactggatttgggaatttctcatattactatatcaagaaagattttagtattgcaagatttgctcagatgatgtggagattaaatttctttgtggcattctgttgcattgtccttgacaatgatctcatgctctattatatatgcccaatgcacacactatttactcttatggtatatggatcacttggtctgtttaacaaatacaatgaggctataaagatccatcgccatccaaggcacacttacccctgctacatgagtggcatttccgatctggcctcgatcgatacatatggattattggaatgatttatgcttacttccatcctaatgttgaaagatggatggagaagctggaagaatctgagactaaggttagattatcaatcaagggaaccattgtcactctttcattgacggttggctttctgtggtatgaatatatatacaagctagacaaagttacatacaacaagtaccatccctacacatcatggatccctataactgtttatatctgcctgcgcaattgcacccagcagttgaggaatgcctctttagctcttttcgcatggcttggcaagattacactcgagacttatatttctcagatccatatttggcttaggtctagcatgccaaatggacaaccaaagtggcttctttgtttcataccagattatcctatgcttaacttcatgcttactacagcgatctatcttcttctatcataccgtgtgtttgagatcacaaacgtcttgaagtcggcttttatccccagtagggataatagccgcctataccaaaatttgattgctgggatcgccatctcagtgtgcttgtatctctgctcgcttattcttctgaagattcctggtgtatagggatgaagatcttgatagaaggtttcttgtaaaatgtttgcttgataggatgtttcagctcgggcctcgatccccttttgctgttgtggagatagttgggatgcgcggagaagcggctaaagttggacatacggggaattgaattgccagaggctgcagatacagaagtccgaatcttgatctttttgttcattcaaaacacggatggatacaacaagtaggcaatccttccattcttttggaagttgtagcaactgttcgctagactatgttgatgcaacctcgttgtatgagttatcctgtagaactgcaccgtgttgtgccataggtattctgaagctgtaaaaaaaacgacgggcatttcttcttccttgaaaagaagaaatataaaggcagaggcgcagagccctttcttctcctaattgtaatgtcgtgtttgctttggagtttgaaccatccagtctatatcctgcttcttcaagtgttcgtgctcgtgctgtacgtgcgtacccgcgggctcagtcgaccggtggacggtggtagactgtatgcacggctcaaacttggtgtatgtgtgaaaaattacccgccactgttgttggttacattgaaata

SEQ ID NO: 43677 - DNA, 545 bp, Zea Mays
ctcaaaggcacatttccctttcaactactggatagtgtcgggcagtagtggaggcattaactatgcatgcagttaagtggttaagagggaatgatatctgagcattagctttattggaattagttcctaatactgttccatcaattccagaagtggatttgcaacaactgctggaggaatctggagatgcgtttactgttccatttgtattgcctcctgccaggccatttgatcaccataaaccctttgtgccaggtttagttctagttaactctagaccctccaagtattctccctttcatatgacagatagaaaaacaagttgcagaactgctcaagtcaggtctcatagtgcatagtgagtccctttgcttccccggtgtggttggtccaaaagaaagatggaacttggcgcttttatgttgattacagaaagctaaatgacatgactatcaaaaataggttttatatgcctgttgttgaagagattttggatgaactatcgggtgcccatttcttttctagtctggatatgactttgggtt

SEQ ID NO: 43678 - DNA, 951 bp, Zea Mays
ttagattaagctcaaacctactacatcgattaatgtatactactttggacttttcatcgatcacacgttaaatatcgcaatctattccactaatccatttattaaaataaaataaaataacagaagcagagaatcaacttaccatactaaaatctgatttgaaaccacgaaatcaatggcgctatccggtccgcgcacaacaccaacacctgacaaacgttgcattggcggtttcctttcgtcttctggcacaataacgacaaagaaaaactgtgtcacgaggagaagctcattagtattccattgacaaatagatagcgcgcgagtcacaacaggaaagagctcgacgcgtcaaagcatgcggaggcacggtcagtgatgttgctgtacatgacgcggagacgtacgacggctacatggatagtgttgggcatggtcgagtccgcgtagagctctaaatcaacggccaccaggacgagctgggacaatcggacttgacgatattggctagctggagcgctaggaagctcggcagacgcggccaagaaaattggcgagcatacgcggggcgagctccatggccagcaaggccgacacgaccaaccagaaagagcttctggaatgcggtcaagactagagacggacgcgtggctagagacctaagcatctaagaccgacaaacggcaacgcgaggagcaaggcaagctatacatcatcagcaacgatacagcatcgataagaacaccgtgcgcagccatgggggacttgggcgagttgggcgacagcgcgcgaccatgggcaagcacgggcatgggagggacaccgagggagctcgacatgggcgagctcggactaaagcacgcgcggcaaggacagtcgacggcaagctgaaaccaccggaggcgagggcacttgagaccatccaaggagaatcgacggcggccatggttg

SEQ ID NO: 43679 - DNA, 2153 bp, Zea Mays
ttgccttccttcctgctgcgcgaaaccgagcatccaaaccctaacttacaatttgtattcggatctgacctaattaaaaatgaatatatgcatatactacgcctactaacttcgattgttttgcaaaaaatattggatgtacatatgaacacccgtgtcctttactggttccgcctatgagttggaaggaatgataaggtggatgtaaatggtctgttgttacttctctggtgatggaccggaattcagatcaaaactgaaagattggaggagcatataccagtttgagtgtaaatagaggatcttccttatgtttgatgattagctcattgagcaacatacagcaacagatagctacaaatcgtggcatatgactccaaaatggagtgcatgctcttcaaatagctacagagaactaccttcacatgaaaatggagagtgcaaatcaaccttaacagagtcagtcccttcacctacaagctgttttggcttgcacactgcaaacacaatgtgctccttatcttcacaaaagaaggatggtaatgtttataaaagaaggaagatggataaggattcaaattctcctataacatttgaagatgctaaagaaatggcaacccaaagttgcacaatttctgatgaccactcatcattactgctacccattatctcctcagaggcattgcttttaaattcaacagcaggcatggcaggtcctatcctagattgtgaggagcctgctgatgttccattggagccaaattctggtacagatgatagatgcttcatttcaaacatgtctccaacttccatgactccagacaaaaagaatgctgctgaatgttcctcatcgaatattggccctacagaatcaattaccgagcatatttcaccaagggatctttgcattgccatactgatgaaagatggactaataaatgaatcaagaacaagaatggcacataaagaggaattcactgacaatgatgctaaccctttgttggcatgcaataattgtggctgcttggaacattcattgaagatgctgatatgcgattcttgtgaagcaggatttcatttgtcttgctgcattccttgtattaaggagctacctactgatgaatggtattgtgctccatgcttgtgtaagaaacccaagagtctttatggcaaactctcagagggcaggataaatccttccaggaatactaacacaaggcctcatgggatgagtcacatagagtacatgctgaaggatgctgaaccatatgtaactggggttcgacttggtagagattttcaggcagaggtgccagaatggtctggtccatcatccagcagcgatgtttactttgacgagccctgtgcaattgattctgcagaactaactacatttaatttgtgcaaaatgagtaatcaaagtcattcttccattggtaattggatccaatgccgtgagaccttgaatccaggagattctgacaagcaagttgtctgtggaaaatggagaagggcacccttatatgttgtacagtcagataattgggattgtttttgttgtcttctttgggatccagtccatgctgattgtgctgttccacaggagttgaagactagtgaagttctaaagcagctgaagtttgtaaacatgctaaagaatcagctggtggaccaaaaccagaagcctgcttaaataaatgccagtaccagagtgggcgattcctcaagagaaggatacccattatgatggtatgaatgagttgccgtatgtggcgttctcttgtagtaactagccgtctgtgaacatgtgagaactatgttgttctagcctgttaaacgaaatgatctgtactgtcttctatagggtcttggtacacaagagttatacaacatagatctgtctgtgcagtccagggagcagcgtgtcgctactgctgtgatcgccgccaaacgatcctgtgatcctgcgccaagttttgtttcttggtaacttctggtattgcgcgtgccactgcatggcgtggatgacgttttctggtagactgccgagcgtttgtgtatctgttgataggcgtttggcctgctatgcatttcatgacgagaggcatattgcattgtgtgcctgcattcttgccagaactaaaatgctgggc

SEQ ID NO: 43680 - DNA, 1472 bp, Zea Mays
cggctctccccgcctcgttcgcccctaccgcgccatcaacgtgcctccccgccgcccctgtcctccccatgcccgccgctcccacccgagatggttagcgcccctcctccttccggtcccttcccctgcctcggccggccagccatggattcaccaagcgggctctggtggcggccggcgccgtcgtcgtgtcctccattcccgtcaaccccctcgatgtcgccaagatatagtattgataaaaaaaacttggaacggaaattaagacaatacccccacaaattgacctgtttgtatactgccaatgatgatagcgacagcttcatgagcgtcaggcacattttatttattttgacctgtttgtatactaacttaacacaagcttttttgtcaataacgtgggattcggaattttctgagctttgtgtagtggaggaggaggagaggcccatgtcggtggagctggaacccatcgccagcgagcagcagcttaactaggtccttggagaggcgtagcagctccagctcctcatcgtcctgctctggctgttgttgaaaaagctgtatattatgctcttgtatggatcaataggctgttggctgtcggtcatgacatcgccatcaagacagataggaaagttatattttttcctaactatatatgctcttacctattcctgttctccatagtacaaaagatgatattgattttgtggctggtttcatttgttggaatgctcttcaactttcttacgctcatttacattgcttttctctgcggtaaattgctggcttaaatgcatgctgcttgaaccctataatcagatagaccatcccgaatgcaagtcaaggcctgatagtggtctttctgcaattacagagctggaccctggttatataacaggtcctctctcttcagtatggaaagaatgggtcaaatggtgtgtagagtttggcattgaagctaatgcaattatcgctgttccgtatgattggagactgcccccatcaatgcttgaggagagagatctgtactttcacaaattaaagtttgtaacacttgcctcaacttgttatgaagcaaccaaatgctatacatctgttagcaggatcagtaagagttaatggcccagtgacggattcaaggtatcctgctcaccaacagatcccacaagcatacggttaccgccaaatgcctgcaaggttggacagtaccaacccatcacaggccatgggaggttacacgctgcagtcacagaaggaaacattatttgaagagttgccattttgaagagttactcgaatccaatattttgctcttttgaattccttggtgtacactggcaaatattagcatatttgaagagttgccatttcgatcatcatcttcatttgtactttttgggtcagatctaataaagcatcagcattaaatttacaatgatcacctaaatccatggtttttattgcct

SEQ ID NO: 43681 - DNA, 393 bp, Zea Mays
ttcttttgtaaataataataaaataatctcattacattcttttgattacaaatgcgccctattctacatgctatacaaaaggaaaaacaataaccgtactatatgtacaatttgtcaactaaactttatgttgtgtgcagtgtaaaaatgcttagcagctgcaaccattccggccgctgggtcatactcagcactaacggtatggccggagtcatgagccgcttttggagagccaaagcaagagatccacgaagccacggccgcccatacaccatagccgggtttgatcttgtttcttcccataagcaaccctgcaatcagatgatgagtctatcaacgagactagctttcagtcctgtgatcaagagttagctgttttactcgctgttgtag

SEQ ID NO: 43682 - DNA, 1533 bp, Zea Mays
gctccaaggcttcacctttacacaaaggacgtaaagggaacttgtatgagtagtcactatcaaagtcaagaaaccacacatgaaagtggtatgcctttttgatccaacagatatgatagatgttgcttgatcacttcgcaaacaacataaattatttcaaggaagtagggtacagaagataacatatcagtgtagttccataatggatcatgactagagaccttgataccagcatccgacaagtcgcacaatcatgtgtgcgcattcacaggaggctctcaatttcgctgcggcaccatgagttcttaatcatgacaccattaccgaacagtaccaataatggatctcacatgttaaaactagattgtgccaagataacacattgatgtagtctcataatggattacaactactaaccgtgatatcagcgcgtgccaagtagcacaaccatgtgtgcgcacacatagaaggccctcggtttcgtcgcggcaccgtcagttttagtcatgacgccattatcagacgtaaccaataagaaatctcacaagacacaaatggactgagtcaggatgacaatatacaaagagatactccacctgtaaaaataattacaagtagagagataaatagagcatggcccgatgaaataaacaaggtatggccataacctaaacttgatgaaagaagtacgatggcagactgttatttcagcccaagcatatttctatgcccatcgcaaaaattacaaggtcaaggattaatatctattagatacggagggaaaacaatcataagattaagttggtatgcctttgatagatatggggaaaccaaaggcatcaaactaaggaaaacaatgaggcataactttcctaggttgggttgataaaacaacattgcgatcttcaagaacaggcaaactggaatggagacatcagcttgcgctaatcaaacaggggcatggagtgataatgaaaaattcaaatttgggtcatggttcactaattaagaacatggcctagatttggttttaggcaaataggtcaccaaccttctatcggcacatcgagtaccagagcaagcacatataacacctaaacatattacctaaagaacggaggacaactatttaatcaaagttcataattcaacattacactacattatctacaatcaatggttactggaataaagagaagagaagcattttggatgtataggtgacaaacaagatgcaacaatcaggatgcatgctcgtcttatacgtcctcacgagtttgccaacttactgtggcaataacgttctatatcggtggcatacttacgactctcacggtattttgctagtcgtcagctacacatacgttttcgaggttagtgtacctgcagaaaaatccatcacagcccaatttcccaatgatgcaattcacatatgacagttttatcacagtgtatactccatatattgctatatggaggccagctcatcattaagcgccgagccacgcataggcgtcgttgccacactttaac

SEQ ID NO: 43683 - DNA, 748 bp, Zea Mays
ccccctccaagccggctcccaaatttgaggcccaaagccccgtcggcccccatcgccacgccgccggccacgccccagacgaccccgcccgccgccgccgcctcccgctccctccgcgcgcagccctcgtccggccgcccgggtccgagcgcgctcgctcctcctccccacgtcggacagtttaagtgtggcttcattgcatgagtagttgcagttagcgtggcttttctccgtgcttgctcctggtcgtgctttgccttgcaaaggaaggaatcatgacatctgttgttcacagtgtttcaggtgaccacagggctgaggatcaaaatcaacagaagaagcaagctgaacctggggaccagcaagaagccccagttactagttcagatagccaaccaacagtaggcacaccatcaacagattatgtggcaccctatgcccctcatgacatgagccatgcaatgggtcaatacgcttatccaaatattgacccatactatggaagcctttatgcagcagcttacggtggacagccattgatgcatccaccgttagttggaatgcatccggctggcttacctttgcctaccgatgcaattgaagagcctgtgtatgtaaatgcaaagcaatacaatgccatattaagacggcgtcaatctcgggctaaagctgaatcagaacgaaagcttatcaaggggcgtaagattcgtgaaaggaagacaagggatgtcaaccaagtcaaatgcat

SEQ ID NO: 43684 - DNA, 539 bp, Zea Mays
gcgtaaggtcaccggcggcgatattccctaaacctgttgatatttgtgtggcactgtaccattggaggcctattcagagcgcctgatagaccgacttgcagggcgattagctccaaatttcatacaatgacatgaccatctctctggatcaaagttgtagtcctataatccaactacaaactgactatagagacctgactcatttacccactcctttgagcttgaatcgagtccaaagttgatcaaatctcactgtcaataaaaattcaggctataggggtgactgacagcagtacttggagtccatttaactccatcttttgtacagaacttatgtctgatgacttaaccaaagttatacccctttagtagctctataattttgatgtattgaccctggacaaattccttgtagatttagaaatatagagctctaaagttagccctattcaactgattttggacttaggcatatgagaggtatagggtgtctttttgcaaataagcccaaatctcataatttggtttgcaaatcctca

SEQ ID NO: 43685 - DNA, 2821 bp, Zea Mays
acgactcacgaattccgtcccattcccatccgcgcggacgtctcctcacgcaacctgtagccgagaccctctcacacgcttgcgatctccacctccgcggttgccggccgacctcttccccgccgcctccgccgcgcctcggggcaccggacccgtctccaacccctagatctcgcgccccctccgccccgccggccggtggtcacgccccgcctctcccgccgccggacgagctcgccgtggggcggagaggtcgccgccggcgacaggagccacgcgatgtccagggaatcctgccctttctcctcgcctcagtccttggggatccatccgtgctaatttccaccgttgccttttgtatcgagcatgtgctaaattgggcacgcagaaatatcatcaagtatgctgatattaccgttccgaaacatcccaacttgccagcattggtcggggtaaatttgtcaagttatcaattgaagtgtgcttggttattgatttccattaaattgcagcatagcttgctcttcatctgaaagttttcgagggtagatgtttatcgtgcaccatggtcgttggtaatgacatagttgacatggttgggtgctaaaaggacgagaagggtttgaataaacggtccgatgaacattctacttgagcttaagcatctcaagctctttagcatgcccgcaagacctgtcatctgtaaaggccttctgatagtgattgcccttattttgttgagagcaattgtatctccttttcttgctatagattcatctgagaagaaagaattttacgagtccacagcccctgacttgcttcctagaattagacgagacaagtttcttgaggtcccacagatcatatgggggttgaacaatcagaagattgcattcgccagagcatgcttgactgcaagattcctgaacagatcccttctcatgccaagcttgagtgcttctctcttctacaaagaggttgacttgctgcagcctgtcagttttgacaaagtgtttgactttaacaagttcaatgcgcgttgccatggcttcgtaaggttagctcagtattcagaagtttcaaatcggacagagcccttcaaactccaaaaggggaccggtagaaggtggacggcagacagagatttggatcaactacagcaatccataggcagcaatgtggatgactctgaagtcattgaaatcgttgggaaaaatccatttctgtggcctgaccactggccagtcaaagactatgccaaaatcttcgattgccttgtcttagttcctgagatagaaaccgaagtggtcaaggtgatatccaagattagagaggcaggccaaagagcaagacatgaagctgggggttctcatagtaagcagaggagagatagctcaacgaatccgcctgtaccgtatgttgctgttcacatgagaatagaaaaagattggatgatacattgcaagaagtgggagcagcggtccaagtcacatgaaatctgcagtagtaaagaagagatcattcataaggtctcacagatcactgacctacgtcggccggttgttgtttatcttgcggtagctgacagccttcttgaagacgattcaataaccagtgggtggagagtgggtatggttgcttacgagaagaagaagcttggtgttactgacatctacgatcgtcagccatatcttataaagtctgccatcgacttcgaggtgtgctcgagagcagacgtgtttgtcggcaacagcttctcaacattctccaacctcgtagtgctgtccaggacagaaaggctgtacaacctgggaaaggcgagctcgtgtggcgagaacatcgggctttcgtcgtatgcgtacaatgtcatgggcgacgatggtggaccacagagatggatgacagatatgtcggacacaagcctgcagaggttaagttacggaacaaataacgtctcatgccactgactttgacgcatagcaaacttgactgaacatgatgtatacctgaggaagagtccttgcccgacttcgctttttatcggcaaaggaagcaagtatgtgcagctaatttgacgtgcttctgtgttcgaagctagagcccacatgtcgcacttgtgaaggactatggccaagagtttagatgtgcttaaaagtgttgacagtgttgggcagtttgtagtttgtataacgctgaatgctgcgcgatggcttttacctgggacccttttgtttttttatggtttcagaatcagacctacacattcaagtgtattttgttcacatgcagcgtgtgtgtttttaagatggtttgctgtgttctgactttttttatttcaatcgccctcaatgcagtaaacctccttgcaaaaaggaccagatgcttgctatttctccaggtttggaactgtgtgagaaataggggttggtgggaagattatttggcgatttttttttctcttccatccgatttttatataatatgaggatagcctgtgtagcagtgagagctatctttattgagtaaccagatcatgcagtcttttcgtatttgcgggatgaagacaatgcggggtgaacacaatgcaaagtgaagattttgtttgctttatgaccattagagtttatattagagcctctggcacttctgtttttctttaaaactagaatcttgataaatgtaactgaatttctatctcctggttcaaatgtaaatgcaatgggcatcttgccctgtttaatcatttttgaagtgcgtgtagatttagctaaagtttttgacagaattgaatggaacttaattatgtctgctatcaccaatt

SEQ ID NO: 43686 - DNA, 1048 bp, Zea Mays
cagcattagaggtgatcaaaatggatcaaactcacttggaccaatggtcgatgctaaggaacgtaagaggaaaaggaataaggaaagttatgccaagatatccattgaacaaaagaatgagaacaataggaagcgtcgtgaagcacgtcaacgaaataaaggactaccgataaagcccgagtcatccagaggtcctgttaaaaacacttcatcggctggtaattctatcgaacgaaagaggcaaagggatagagaaaggcgtgcaacaatgtcggttcaacaaaggaacgagttcaataagaagcgtcgtgaagagcgtcaacgaaagaagggacaaaatgtgatgcccaatgtgtcaggaggcagtgtgcatgaatctgttggtgtcattggggaaccgggtataggcgtgagggagtctaggcgtgaacgccttaggttgtataatcagacaccaagacggaaagatgcaaagatagagtacatgagaaaacgtagagcactgcaggctgacactttgaatcatgcgtccatcgccatggaggacccaacatatacccctgaggttgtacaccctacagcggatgcaacggaacctgatggatcctcagttaccgcctgcgactgggttatccctgaattcgtcaggacacctttcctgccagcttcaacatagaccgaggatgtcggttcattcgatatgtctactgaaccacgaagacgtaaacatcatgtgccgcgtggggaagacaagctatcttagcccgtcgaaactagcaatttgaagcatccattgcaaggaacgtggctacttcgactggggatactatcggtgacgctgagatcaacaacaatgtacaatgtagggttccatgccaaggcgctaccttgccaacaaatgggagtgcaagcataaccgaacaaggaagtggggtggagcatacacaagcgaagccaagggtcatttctaatggtgatgatgatgatgaggttgtcatattcagagaagataatgacgacgacgacgagggatacatattcgctgacc

SEQ ID NO: 43687 - DNA, 1648 bp, Zea Mays
tcatcatcacctagctagcttagcacagcagtacgtccacagacgacgacgatgttgccagcgccgttcgggcactagctaggtagtataaattggcgagcttgacacggggtcgcctgtcccgtcacacgcaacgcaacggcagcagctcagctcagctcgctcgctcgctatagctccacagtggccggccggccggtgtcctgccgtgtgccgtgcgcgtgcgtctactctagtactctactacatggcggcctcgctaggactcgcccacgagacgagctacgccgcctaccacccgccgtccgcgcccgcctcctcgtacttcccaccactaccaccacccgacctcctcgtggcggacctcccgccgcccgccgccgccaccatggccgatgactacttccagttcggattcgacggccaggagatggtgggcgctcccgctcccgcctgcggcggctacgactgctcggcgccggtgttcgccaacagttcttcagacgccgccgccgccgtcggcaatggcatgagcctgctgagctatggcgtcgacggcgacggcgacgggaggaggccgatgagcggaccaccatatggcaccggtgggaacggcggcggccggccgccgtcgtcgtcacggattgggttccggacgcggtcggaggtggacgtgctggacgatggcttcaagtggcgcaagtacggcaaaaagacggtcaagagcagccccaacccgaggaactactaccggtgctcggcggagggctgcggcgttaagaagcgcgtggagcgggacagcgacgacccgcgctacgtcgtcaccacctacgacggcgtccacaaccacgccgcgctgggcccgggcgccgcctcctacctgtgccaaccaccgcctccgcgcggcgcaaccgcaaccgcaaccgtaacgcccttctcgcctccacgctcggcctcggcgccggcgcccctggctgcagcgcccagctggagcgccgcctgtgacgcgtgggaggcgcagctgcacgccgcggcggcggctgctcactcgtcggagtcgtcgtactgatccgatccatcatcgatcagttattagacgcacgtacggatcacgtagctagaatgttcacgtttttttttgctcacggagtatataagagtaccatagtactaccatacatacttgtcgttacagtactcagacacacacacatctctgattagctgagcgttcccttcgattttaataatacaggttcacgcatatatctcggtgcactgtactgaatactgactaagctagctgccagactttgcttaggaaaacaatacctatatatgtccaataagaacatacagactttctaaaaaaaatggtagatattgttgtcaccatcatcctgataagttcccggccaaagtttgcacacaggctgcgactgcttaatgcttatctcccatgttagggcccgttccttttctgtacaatccacgtggacgagaagggattggtgtgtttcaatccatagcaagtcaaagtttctattaattttttccagtcacattcaatttatgtgatattaggaataacatagtaaaacagagttgtattttgcgacgtgtataatgcaaaaacattagttaaaac

SEQ ID NO: 43688 - DNA, 1350 bp, Zea Mays
aagaggaaccctagtccctagcaacgcctacagcgtcacggaacaccggcgaaccaaacctcggagaaaccctagcaaggccgcttgcccctctcaggcgcgacacagcatcggcgactagcgatgacaggatatcgcagccgcagtccgagccgaagctacagcccacggaggcggtacagccggagccctcctaggcgcaagcgctacgacgatccacgcgaccgctaccgctgggccggggccggcggaggcggggaccgacgtggttacggtcggccgttggcgcagtccggtctcctcatccgtaatatctccctcacagccaggccagaagatattcgagctacatttgagcaattcggccctatcaaggatgtttacctgccaaggaatttccacacgagggaacttcgtggttttggatttgtcaaattccgctaccctgaggatgctgcagttgccaagcgtgagatgcatcatcaagtcattggtgggcgagaaatttcaatagtttatgctgaggagaatcgaaaaacgccacaagaaatgcgcatgagaacaagaactagtggtaggtacatggatgaaagatacacaagactgtcaagatctccaaggtctcgttcccactttaggcgtgacttcagtcaacaaagaatatagagtatctaaaagaccaaaagacaaccataatgtttggagattaaaagccaaagtgaaagtaccatggcttccagggttgagcatgtgaaaggcattattgttaaagataaagtggtgctgtcagtcaagagtttaatgataatcttggctaagatacctgacggaaagagtatgttgaagttgagccagcgccttaatgcattgcacaattgcatgtttggatcaaagtgggtagcttttattgatatggggcaggggcagggagcgcccggatagttattcccctcagtactcgcactctccacgccctcgggacagcaggcaccacaggtcagatggtcgctctccaactccaagcctagatgaccacaaacctaaggcgacaccagtcaatggtggacatggtccagcagttgcatccagatagtatgatgccattatggatgccttgaattgtgttcggaggctggagactgcagactatcttttcaccaatcttctctaagagatgagtagggttgtagtaaacagatacttggtagttgtattacaggtgatggtttcggttatgagtccaatggccaaaatatcgtccgaggaaaaaatggtgaaatcagggtttatatgatctcgaggatggggacaaacgcatcccggcgcgcctcgatggtaacacccagtttg

SEQ ID NO: 43689 - DNA, 3129 bp, Zea Mays
gtttcgtcgacaagccagcagcccagcacgcaaagggcactgtgccgttacggcgcggcggagccggaaactcccgagtcgcgtgacagtaaacgaaggcacgaacgcgactcttccatccaactgtcgaagcaaccgaatcggggacaaccgagggcgagggcggccggcatggggatcgtggaggcgtggatgcgggagaagcccatccgcacattcctagcccgcctcgcccagcgccgggcggcggctgccgccgccttcctcgcttccccctctgccaccacggtcatcgatggcgagggcggcagcgacgggagcatcccgcagctttcctccgttgccaactccgtcgtgtcccgctgctcaaggattcttgctctttcaattgagaacttacagcgaagctttgagactgattttccacacagttgtaatgaggctaatacatatgcaagagaccttttagagtattgctgccataaagctcttcatgaagttacaacacgtccagattatttggccgataagaatcttcgccgcttgatgtttgatatgatgcttgcatgggaaactccagggttctattgtgcgtgattcccttgagattgaagatgaggatgaggggtcaattttttatgcaaattccacaagattggctgctcaagttgatgacaagaagacagtcgggttaagtgcttttgcacgaatagcaccttcatgcccaataatagctgacctggttactgtacgcaatctgtttgacgcacttacaagttcatctggaggccgattgcattttcttgtttatgacaagtatctcaagagtttagacagggaattgaggtctgtgaaaggtatcatgcaatcatcacttgcctcaagttttcatcttgatgctggagaatgcatattagctattgatggagacaagcccattcaaccggtactgcaacatattggaatatcagcatggccaggaagattggtcctcacaacacatgctctttattttcagagtattagagtgggatatggtgataagattgttaaatacgacctatcaacagattcaaatcaagtgattaagcgtgatttgactggaccactgggtgtccgcctctttgataaagctgtgatgtacaaatcaagcactttgacagaaccaatttatttcgatttctttgaattaggaggcccttcacgaagagactattggttagcaatcacccgtgaagtattgcaggtgaacagatttattaggaagttcaatcttggagatgttcagaaagcagaagcactctcaaaagctatcctaggcattttgagatactctgctgtcaaagaagcttttcatattgctccttctcactttaagacaacacttacttttagcttagcagaaaagcttccgaaaggagatatggtcttagaagcactgtataacaattatttccaactcttggactcttcattgagacatttggcaattgattctgcagtcgatagaatgtcggagaaccattctataccattttctttgtatgctctctctagaatgggttttcttctgctgaagacaaacgataaatctgaaaaggaaatgagcttttgtgctgtttgctttggtgtaacaaaatctttggaggctgccctagaagagtcaatttgttactctgagagaatagagtcagcacgtgctacagttgatcaagtaaaggtagaaggcgttgatgcaaatcttgccctcatgcaggagttactcttccctttaattcaagcaggcaagattgtttactctctcagccaatgggaagatcctttgaaatcacttctattcttagcttttatgttgtatgctattcaaaggggtctcatcagttacatcgcaccctttgttttcttaacttttgctattatcatgctttggcataagtatattggagacggaaaattgttggaagtgcttgaagtgaaacctcctccaagtaaaaatgccgttgagcagattttgacattgcaggaggctatatccaagttagaaaattttctacagtctgcaaatattactcttctgaagttcagatctgtcttgtttgcctgtgttcctaaggccactgaagtagttgcagctgtacttattgtcgcagctgcatttcttgtcttcctaccttccaggcctctgatacagatgttagtcctggaaatgtacacaagggagatgcccctaaggaaacagaacactgaaaaattccgcaggcgaattagagagtggtgggctcgcattccagctgcacctgtgcagatgatcagacctaatgaaagcaagaaaaagagatgatcatgggcttttagggttgatttggtgacaaggggatcccgagaggattggaggggattaaggggaaagtaaattaatttccccctcaatcccctccgatcctcccatgatcccgggtcaccaaatcaacccttaggcttttggcagacctagtgccggaggcacccacaccgagaagggacaaactgaggaattctttccttcacaaatgcggagacactgctttgaacccgtgacctagcacctgccactgcactaggccagaatttaagatctcaaagagagaaaaaatagcccacatattctgttccctagtttgaacctaatcagctaacttaggcttcttcggttcgctctcaatccatgtggattaagtgtgattaggtgtgattaaattccaagcaagtcaaacttcttatttttttccagtcatatccaattcatatgtaatgggaataaccgaacaaggccttatgtagattttgacctactaagaaaaactagccccggtaaccagtgtatagcatcatgtcgctatgagtgtaaaatgatgactgcagaagaattattcatttttcttgcaagccatttcttagaagtttctagagctctgatgtgttctagaagaatttatcagatgtttgaactgatggttggaatgtaaggtggtttcatatggattctttgaacttatttgctctagtaaaattgatgtatccccacagcacattggagaagcagctgaaagtgtgtcgtgtagtccagtttagcactttatcttcaaaatt

SEQ ID NO: 43690 - DNA, 4822 bp, Zea Mays
ctctgaaccaatgatttttcagcttgcgtttctcctgctccctatccgacgtagtgaatcccttcccaggcaccactcgccgacggaacgcctcccttcctaggcaccactcgccggagcgcatcccttcccagccactgatggccctgacccgccagcgcgcttccctccccaccgttgacggccccgacccgccggtggactgcgctcctcatcgaccagcgtggccatattttgcatttgttcctgtttcagcttgtgagcaactgatactactgtcccggcccatcgttactggaccaagaactttgagatgtgaatcaatcatttttggctctttcatgcaccacatatttcagcagcacagaaagtttatgggtgaaaatggtcatttggggaactctatttacaggaggctggaaactagtctgtacaagaacgaagcagttaatctattcttctctgataccagcgcttggggtacgagcaaggaagggacttcaagaaatacgggtgggatggaagttgccttggtatcaactgtattgaaggttttggggacgaagttagctcctcttgcactcaaagagttgagctctaaagcaggtgtggccaaagatcttcaggaactccaggacctagttgaggagatcaacaattggttgcaaacagttggtgataaagaccgatcatctaaatggctcaaaaaattgaaagaagttgcttatgatgctgaagatttagtccatgagttccacatcgaggctgaaaaacaagacagagaaattactggtggcaagaataccttggtcaaatacttcatcacaaaacctaaagcaactgtgactgaatttaagatagctcacaagatcaagaaaataaaaaacagatttgatgcaattgtgaaaggaaggagtgactatagcacaatagcaaatagcatgccagtggattatcctgttgagcatacaagaaagacaattggagaggtgccattgtatactattgtggatgagacatcaatatttggcagggatcaagcaaagaatcagataatatctaagctgatagagactgatagccaacaaagaataaagatagtttcagtaattgggctaggtggctctggtaaaactactctcgcgaaacaagtatttaatgatggtaacattataaagcattttgaagttatattgtgggttcatgtgtcaagagaatttgctgttgaaaagcttgtggcgaagttgtttgaagccattgctggtgacatgtctgaccacctcctattgcagcatgtgagcagaactatctcagacaagttagttggaaagaggttcctagctgtcttggatgacgtttggacagaggatcgtgttgagtgggagcgattcatggtacatttaaagtgcggtgcacctggaagtagtattttactcactactcgtagtagaaaagttgcagaagcagtggattctagttatgcatacgacctaccactcttgtctatggaagatagctggaaagtgttccaacaatgttttggaattgccatgaaagctctagaccctgaattcctacagtccgggatagagattgtggagaaatgcggaggtgtgccccttgcaattaaagttattgcaggcatcctccatggaatgaaaggaattgaagaatggcagtccatatgcaatagtaatttattagatgtccaggatgacgaacatagagtatttgcatgcttgtggttgagttttgttcatttaccggaccatctaaagccttgttttctacactgctctatatttccaagaggctatgtaatcaacaggtgtcatttgatttctcaatggatagctcatggcttcgtcccgacaaaccaagctcgacaagcagaagatgttggaattggctactttgattcccttcttaaagtggggttccttcaagaccatgatcgagaccaaatttggtccacaaggggtgaagtaacatgcaaaatgcatgacctggttcatgatctcgctagacaaattctacgggatgaatttgagtctgagatagaaacaaacaagcaaataaagagatgcagatacctatctttgacttcatgcactgggaagcttgataacaaattatgtggcaaggtccgtgcactctatgtttgtggccgtgcactcgaatttgacaagacaatgagcaagcagtgttgtgtccgtaccattatattgaagtatataactgctgactcattgcctctgtttgtgtcaaaatttgaatacctggggtatcttgaaatatccgatgttaactgtgaagcactaccagaagctctctcgcgttgttggaacttgcaggcccttcatatattaaattgctcaagacttgcagttgtacctgaaagtatcggcaagcttaagaagcttagaactctggaactgaatggtgtttctagtatcaagagtttaccacagtctattggcgattgtgataatcttcgaagattatacctagaaggttgtcatagattcgaagatataccaaattccttgggaaaattggaaaatttaaggatacttagtattgttcattgctttagttttgaaaaactttcgccatcagcatcatttgggaagcttttgaacttacaaactatcacctttaactgttgcttcaatctccgaaacctacctcagtgcatgacttctttgagtcatctagagatggtggatcttggatattgttacgagcttgttgaattgcctgaaggcatagggaatttaagaaaccttaaagttttgaatctgaagcaatgcacacaattgcgtggactaccagctggttgtgggcagctaactcgtttacaacagttgagcttgtttgttattggagacagtgccaaacacgcaaggatctctgagcttggtaatcttgataagttggatggtgagctgcagattaaaaacattagatatgtgaaagatccaagtgacacagacaaagttcgtttgaagaaaaagattggcatccggaaattgtcgttggattggtattcaagattggaggttcagcctgatgatgtggaagaagagttatcattaaatatggagaaggaattgcatttgctcgacagtcttgaaccaccatcaaaaattgagaagctgagaattcgtggctaccggggttcacaattgccacgttggatggcaaagcaaagtgactcttgtggtccagcggatgatacacacatagtaatgcaaagaaatccatctgaattctcccatctgactgaattagtactggacaacttaccaaacttggagcaccttggggaacttgtggaactgccactggtaaagatccttaagctcaaaagactgccaaagttggtagagctgcttacgaccacaacgggggaggaaggagtggaagtgctatgtcgtttccatcacgtttccactctagtaataattgattgccggaaacttgttgtgaagccgtactttcctccgtccttgcagagattgacactagaaggaaacaatatgcagttggtttcttcaggatgcttcttccatccacgtcatcatcatgcatctcatgctcatggtgacgagtcttcatcttcctcctattttgcggatgagacgggtactcacctcgagagacttgaacttcgtcggttgacaggatcatcatctggttgggaggtgctgcagcatctcactgggcttcataccctagaaatatacatgtgcacagaccttacacatttacctgagagcatccactgccccaccactctctgtagactgatgataagaagttgtgataatcttcgtgtgctgcctgactggcttgtggaactgaaatctctacagagtctggacatagactcatgtgatgctctccagcagcttcctgaacaaataggagaactctgctcactccagcacctccaaataatttctatgcctttcctgacttgccttcccgagagcatgcagcacctcacctcgcttcgaattctcaacttgtgtgaatgtaacgcgctgacccatcttccggagtggctaggcgaactctctgcgcttaaaaaactcttgatccagagctgccgtggccttacatctttgccccgctccatacaatgccttactgctctcgaggaattatatataagcggcaaccccaaactgcttcagatcagtgcatcatattctaaggaagacaaggatggccaggctccgacgacattcagatcacatggcttgacaggcctgacgaccagcattgcagtgaggcccaagagttcgatctggtccggaacatgctcatcgtcgcagtagaagaacgctacaaggatgctgctcaatacagaggccaacattccatgttgcggtcaaagaaaaagaacgcgatatagcaggcccaggccgttattatgtacatccacatgtgtgccaagttcaacttgttaggtaaacgtctaagaaaacaccatgtaaatatggaggccttttttttgctgaagcgcatgaagcttcggcaaacatctaaagaacaccatgcaaatggctgtggtgtcctgcgattggtctacgcgatgtacatgtgcgcaagctgctttgaagagaatttaaccaccttgaattttaggtacccatacagttcgctcatgtattgatctggcgcaagcttcgatgaacattttttggtttcatgtggttgatatgttgcttgagccttgtcagcttgacgattttttggtttaatgtggttgatatactgctagctacatcaccgctgtttgtcttcaaatcgg

SEQ ID NO: 43691 - DNA, 555 bp, Zea Mays
aggaaacccttgcccctgcgccaggtcgcagaccgtccggccctaggccgcggaccgtctgcgcctgaccagagagcaccgccgccggttcttcttgagtatttggcgctccgaaaaagcgtcaacagggagtaagcagctggcgcgacatccatggaagcaggggcgcgcgccatagctagagcaggagcacgccggcgagctcgcgcggccaacgagcagagcaggacggagctccgcgagctgggcgagcatggacggacgagcgcgccaaggagctcggctgcgcgctaggaacttgaggagcgcgtgacgggtggagccgagctgcgtgcggggagagaggagcggctgggtgctcagcaaggaggagcgccagagagcaggcactccagcagagagaacgcgcaggggaggacgaagatgagcaggggctggggcgccacaaatccaaggaacgcaagaaccgagggtcatgcacgcgctgcgtgcaggggaagggagaggagcgtgctggctggggaaggagcccaggggccaaactcggccaggaag

SEQ ID NO: 43692 - DNA, 1184 bp, Zea Mays
atcagatagcgcgctcccagtcccagtccatcatcggacacacctgctctcggctcgtggttcgcggcttcgcgcacgcgcagcaatggcgctccggccgcagctgcttcgcctcctcctcccatcgcctccccaccggaaccctccgcctccgccctcctccccgtccgtcgcacccattggccgccgcaccgccgcagcagccgtcctcctgctcgccgcgggcgtctccgccccgcccccgcgcgccgcccgcgccgagcccgacggcgaggacgtcgacgaggcccgcatcgtccgcctattccaggaggcgtcgccgtcggtcgtgttcatcaaggacctcgtcgtcgcggggccgcaggggcggagagttggtgaggatgaggacggggacgaggagggcggcggtgctaaggtggagggcacaggctcgggattcgtgtgggactccacgggccacattgtcacgaattaccacgtggttgcgaagttagctggagacggatctgcatctcatcgctgcaaggtgtttttggagggttctggtggcaaaagttactcaaaggaagcgaggctaatagggtgtgatccagcatatgatcttgcggttctgaagatagatgctgacagggaccagctgaggcctgctctgattggcacatcacggagtttgcgagttgggcaaagctgctttgccattgggaacccttatggatatgaacacactctaactactggggttattagtggattggggagggaaataccatctcccaatgggagagcgatccgtggggctatacagacagatactgctataaatgctggtaactcaggaggcccacttattgactcttatggccatgtaattggtgtcaatactgctacattcacacgtaaaggatctgggatctcgtccggggtgaacttcgccatccccatcgacacggtggtgcagtcggtccccaacctgatagtgtacgggacctccgtgagcaacaggttttattaactgtgttgtacatcatcatgatccgttccaatgagccaggtctccgctctctttcatcacagagacggtccaagaagaaaggaacggcacgaggaagaaacggagggcaaggggaacctcgactgccatcatggggagctccggcgctgacccggccgtgtccggtccg

SEQ ID NO: 43693 - DNA, 1315 bp, Zea Mays
caatcacagctctcgtcacgacagataaggccatgtgcatccttcgccactcaccagcgctctccagtccacttcacttcatccctgatcggcgatcgcgtcgagcgagcagcgctataacgcacgatgaacttggcgtccgtcgttccctgcgcgcaggcattcctcgcgttaatgactcccgccgctggctcccaccgtcgggtccacacgcatgcggcggcctccaagagcggattggcctgccgcgtcgcgcgcagcgggggcacccggtggctgccggtctcctgtgcagccgggggcggtgcagttggtgacacttttgttactgaggacactacaaatgtgatgtttcctcgggaagtaacagttccaggctatacacacccattggttgcagttggcacaggttcgtcatgatggctatggtgatatatttagctatggcggttgagcttccaccttgggcacttaaggcttggataaggttacagagaaaagttttttgtcaaagtatatgctgccgcgttctatgtagattactcacttcgccttgatactgagcaatggaaagcaaagactggtattgagagctttgacagttcctctgttttcgactccatttttaaggcaccggttgtgaaatcattgagtataattcttgttagagccgttgatggcaagacctttgtgaatgctctaaatgatgtcattgcccgccaaataaaaaacccaaacgccgaggaagaatcttccctgtcaaccttgcagaatacctttcttgggcgcaatctcaaacagggaacaagcatatacttaacttggcttgaacccaaaagaatgctgatctccatttcggaagatgaagatccacgtcaagttgatgcagagatcaaatctgctactgttaattatgctctatatgatggcttctttggtaaatccacagtgtgcccttctttaagatcatctacagcccagttgctggacgcgcttctgcttgcgaagtgacaaaccagtcgtggttccatatcaatggttacgagtggttattcccttctcccttgttttcccgagggaacacaggacgggctaggtgtccataatcataagtcccataaaggaaattaatttaattattatagagttcatatgtaacatttttgtcgtccctgatgaaatatggtgaatttgtcacgcccctatgctgatattatgattggcagattgctttaggtagtgtttggttgaggagccaaatagaacggagccattccatcctgattctaggaacggagccgctctgttctgtgtt

SEQ ID NO: 43694 - DNA, 254 bp, Zea Mays
tttatttcctaattactcctacaaggcagggggtgtgaccccatcaaaagacaacttatacaaacctacggtttccaagacactaggaactcaggaatatacttttccaaatacttctctgactactacgtgactttatcttccgggtgttagttccattgtatctcgtaaaactcaataacttttcttcgagtgacctgatccttttgatctaacacatttatgggatattccgaggaggttaaacctggttt

SEQ ID NO: 43695 - DNA, 2910 bp, Zea Mays
tcgttctcgtctcccagccccgtcgccgctgacgtggcgcccaccgcgcggaaaaaaatattgcagatattttcctcaccgctccttcccccctctctgctcgtccttgcctcccaccgcaccgccggctcttgctctgctcggttcctcctggcagcaaccgaatgtctcccgacgccgacgccgccgccgggggaggaggaggtggagaggcgagcgccggcgccggcgccggcgcgtcgtcgcctcccgcgtccgcgtccgcggcggcgaacggccgggcgctggtgcggtgggaccagatcctgccgcgccgctccctgcgggtgcttctcgtcgagcacgacgactccacgcgccagatcgtcaccgcgctcctccgcaagtgcggctaccgcgtggccgcggtcgcggacgggatgaaggcgtgggaggtcatgcgggagcgtgcctacgacttcgacctcgtcctcaccgaggtcgccatgccctccctctccggcatccagctgctctccaggatcgccgccgccgccgagtgcaagaacatccccgtcatcaacttcactattattagccaagctgtaacttcaagcaagcgactgtgatgtcatcccaagattctattggcacggtgctcaagtgtatgcagaagggtgcggtggacttccttgtgaaaccagtaagaaagaatgagctgggtaacctgtggcaacatgtgtggaggaggcatgcaatgaattgccagacaaatggatcagaaaataatgcagccagcaatcatgtaagtaccaatgttgctaatgggtcaaagacaggagaaaacaatgatgaggaaagtgatgcccaaagctttggtaacaaaagggagactgaaattaagagtgctgagacgttaccagatattcgtagagatgaaatggctggctcatccaaaaaaattgaactacaaaataagtctaatgatggagtaaacacaaaagtggatgcgtcaaaagatagcgatggtgctccaagtgaaagtgagaagaatgtgcgttccaaatgccttaatggtattacttctgcaaaggtggctgagcaaataatggataatgccttgaggatcacggatgcaagttcacgtcgtccaaccaatcttggcaaagatttggctatgactgaaccagcagctgatagaaaatgccaatctttagtgatggaaaataatgctgtcaaagaaaagaaccctggtgaaaagtcgaagagtgctgtaataggtcatgctgattcttacccctcccaatttctcgagaccaacttgggaaaacaacagtatcgtaatggttacaagaatcaagaattcagggaaaaagatatctttaatcactcgaattcttctgccttctcgagatatggcaatagaaggatagaatcatcaggtgagatacagtttcttccttctcgttgcattgttgggcaagagcagcatgttcatggcaaggacccagttttccaacccaatggggtcttgctgcctcccaatgaccataatacaggtgagagtacaaggcaagctcgaattactctggacagtagcatggagggtgctgacatcatttgctccagtagtgctagggaagatgctggtgcaagtagttcttcccatagaaaggacagtatgagccatccctcatatgggtttgtacctgttccaattcctgtcggtgccatgatgccctatcattgtggtgcaattctgcagccagtatactacccacagggtccacttatgcactgtaattcatctgcaatcaacaaggcaacaattcatcaaacctctggccaatctaactaccgtgaagattgtggtagtggtagaccatctcaggttgatgaacacaaacagtcagaggaaaagcaccagttgcatcattcaagacaaattcatcgggaatcaggacaaccagttgacatggttagagctcacatggatcatgctaaccagagtgcaagctgcagccgggatatctgtaaaggaagcggatgcacgggtagcggtgaagccgataccaatgcgaacacgacggttgccctagagagtggcaacgagagtggcatccaaaatagtgacaggtctcaccgagaagctgctttgatgaagttccgcatgaaaaggaaagacagatgcttcgataaaaaggtcaggtatcatagcaggaagaagcttgcggagcagaggccaagagttaaggggcagtttgtaagccagaagctgaaagcagctatggcaacggaagccgaaactgactcgtgacgggcgctagtccagaactgtaattttggttcttcccttcgcgccaggtgtgggcgattggactggtaagtctgaaggctggcaaaagtttttttttcttccttccatggttagcctttctgtacaaaggtgaactccacgtcgggtgtttgttggcatccaagccttattttttgcgaggtacatcaagttgacaaaatgttcggagggatagggtgaaaacggtgcaagcgccatatttcgtccatacgcttaggtgtttgtggagtgtgaaagcagagcctgtacagcatattcaccacccattctgttgccattacaattgtagtaacttgtaattactactatgacaaaagtagacactgttgtagaacttacagccagcaggtcttttccatatgggacagtagcattttatttattaattggttgatcatatgaggacagtcccgaatgcaggacagttaagatttgtttgatccaatccaatcatccagcattttgcttgccttaaactggacaaggaatcagcagggtgcacaccttgtccttgtcagctattggtacacagcagcatatatcctttgcctgtgtttgctgtactactactctgg

SEQ ID NO: 43696 - DNA, 4029 bp, Zea Mays
cacggcccctcccctgccccttccgctcccgcaacgggtgtgcctccgttccggccccgcccgaccttctctcacctctccagcgctcgcctcccgatcctcctgcagtcccacctccttcgccgccttctcatcgcttccaaaatcgcaaagccggatcgcggggacatggacccggacgacgagtccgcggcgcagcggaaagccgccgacttgcacctgccgcgcgtcacggagcctgcctccgcgcccgcacgcaccttctgcgccgcgcagcgcgtgctcagctacggtgacggccctgtcgcctccgcctcggcgcagcgctgcgcgtcgttcccgcagcgccacgggcacgggcacggccacggcgaggcggcgctcgcccctgctgcgtccttcgccgcctgggtcgacggcggcccgacgccgccttcggcggtggcagcggcactggagcgggccatgtcgcagtacgacggcgcgggcgacgcgctgccggagttcgtcggcgccggcgggggcgagggcatcttccgcgtgccgctccgcgcggcggtgcacccggcccgcccgccgccgctcgaggtgcgtccccacccgctgcgggagacgcaggtgggcgccttcctgcggacgctggtgtgcgacccgcggcggcggaagctgtgggccggcgccgagtccggggtccgggtgtggtgcctcgacgaggtgttccgcgggtggtggccaggcgccgggccgcggcgccgcggcgacgaggaggccgcgcccttcagggactccgtgccggtcccgcccgcgctctgcgccgcggtcgacagcgccaacgggctggtgtggacgggacacagggagggcaggatcagggcgtggcgcgtggaccacgccgcgcccgccggaggagaccccaccggcagcgcggccatgttcaaggaggccttcgcgtggcaggcgttcagccgcacgccggtgctcgccatcgtcgtcacgccgtacggtgaaatttggtcaggatcggaaggaggtgcgataaaggcatggccttgggaagcccttgctaagtgcctctcatctacaccagaagaaattcatgaggctgcctcgttggttgaaaaatcctatatcgaccttaggaaccatgctacagttggtaacatgtgctctttgcctactgctgatgtgaaacacatgctcgcagaccactgccgattgaaagtttggagtgtaactagcatgacatttgctctttgggatgctaagactagggagcttttaaaagtatttggcatcgatggccaagtcgacttagctcgtcctgaggccccagtaatgccggaacaattcatagaggaagagattaaagcaaaacccacaaaaaaggagaaactgcaaggttctttaagtttctttcggaaatctaggaatgccttgatgggcgcagctgatgctgtacgcagagttgcaacaaaagggacatttgtggaagataatcggcgaaccgaagcggtggctcaagcaatgaatgggactatttggtctggttgtacagatggttcaattattgtgtgggatggaaatgggaatagactgcaagaatttcattaccatagctcttctgttcaatgcatagaggcactcggagagaggatctgggtgggctatgcaagtggtactattcaagttatggatgttgaaggtaaccttcaggcaggatggattggtcatagctgcccagtcataagcatggcagtcggcgattcttacattttttctttggcacatcatggtggcattcgaggatggtctctaagttcccctagccctcttgatgatattctacgctatgaattggctagcagggagctgtcatacacaaggctagagaaccttaaaatactggttgggacttggaatgttgcacaagagaaagcttgtcctgaagcgctaaagtcatggttgggtggtgcatttttcgatgttgggttggtggtggttggtttgcaagaggtcgagatgggtgctggagttcttgccatggcagcagccaaagaaagtgtaggacttgagggcagtaccaatgggcaatggtggatagacagtattggcaaaacacttgatgaggggatatccttccacagggttggttcaaggcagttggcaggattacttattgctgcatgggcaaggaatgaccttaagccacatgttggtgatgttgatgctgctgcagtgccatgtggctttggacgtgctattggcaacaagggtggtgtaggattaagaataagagtctttgatcgcaggatatgttttgtaaacaatcattttgctgcacaccaagaaaatgttagccgccgtaatgctgattttgaccatatttatcggacaatgactttcaacaaaccccatggatctacaggctaatgaaaaccaagccgatgaagataggcctgagctggcagaagctgacatggttgtctttcttggtgatttcaactaccgacttgatggcatcacctatgatgaagcaagggatatggtctctcagaggagctttgactggcttagagaaagggaccaacttcgagcggaaatggaggcaggaaatgtgtttcaaggaatgcgtgaaggtcgaatcaaatttcctccgacctacaaattccaacgacaccagatgggtctctcagggtacgattcaggcgagaagaagagaatacctgcttggtgcgatagaatactatatcgtgatagccgttctgtatcaatgcctgaatgctcattagagtgtcctgttgtcgctgcaattacagcgtacgaagcttgcatggatgtcacagatagtgatcataaaccagtgagatgtacatttagcgttgatattgcgagagtagacgagctgataagaaggcaagagtatggaaaaatagtcgagtctaacaaaagggtacactctttgcttcgggagttgcattttgttccggacactatcgtcagcacaaacaacattatattggaaaaccaagaagatgtcatcctccgaataactaataactgcgaaactagtaaggctgcatttgaaatcctgtgtgaaggccaatcaatcagaaagcaagatggaactaaatctgagccagtcataagggcatcctttggctttccactttggcttgaggtccagccatcatccggcctcatcggaccaggagacacaacggaagtcgccgtgcaccacgaagacttcttcacgcaagaagagttcgtcgacggggtgcagcagagctggtggtgcgagaccaccagagacatagaggtcgtcctgtcggtgaacgtcacgggcgtcgcctcgaccgaggccgccacgcacaggatcaccgtccggcactgctgcccggcgcctccagccccgccgtccgctaacccacgcggccccattaccgactcacctagcgacgctgtgccaggtcccaagagtagccagtcgaatcacttgctgcgttctgacttcgcaaacttcggcagctccgaggtgcgcgacctgtgcggcgtgcggaagcggaacctgtagagacgagcagctcagttttgttttgcctggtgctgtggtttttttgctttctgtccgagtgtttagccggtggagtcttggatttcttgcctaagcttgggggtgggggtggggagagaagaagtggttctgctcttcatcttgttctgtacatatgcgtccctgacctctcacgtctcaccgtcctttgcatatcagatcaaaaagggaaaagaaaaaagtgtgtgtgtgcagttgttgcaaacatttttctttttacattcttacgttctagatgtggcattgaaattatgtggttagaaggtggagtacataattgtgtgtgtacttataatagaggtttacttcattgaatcaagctagtgtgaattatacacagaggcagtacatttaacttacagggcaattctcttggattaatgaggcagtgatcttttgtgcagaagaacctataccca

SEQ ID NO: 43697 - DNA, 1707 bp, Zea Mays
gtgaatgagctttgtaggagggggaatgagaaagacacgtgatagccgggaatggaaatgtgaatgagctttgcagggagggggaatgagaaagacatttgatagtcgggaatggaaatgtgaatgagctttgcagggagggggaatgagaaagacagacaactgagtctaccccttaccgtcttaataggtagtacagattatttttgataatatagagtgtcatgaaaatcaactagtttctataaattagagtcgcatatttctattcaacttttttttaccacaatcgggtgaggggcgtccattgcgagttgcgactgcgtcgccgattcccctgccggcatgtccagtccgcgccctcccctcggccggatcctccgcctcgccgtcgccgtcgcggcctgcgcctgctttcctagccccgtctccggcatccgcagttgaaggttccttgtacataacgccgagtacttgcaccactgaggattcacttggtcacgggttgggacctcatgcttgattctagtattgacgtgtgctgtgagggcagaaggaagggcattgactttattcaaccaattgtgtgcagaagcactgttcaggggcggcatctgatctctgatgataatggttatgtatgttctgcactttcaatcaatccatggtctcactgctgcccaacaacaggggaccgcttttcctgccagggctgcgaacttgatttacagtgctgcaattcatatgaatattgtgtttcttgctgtttgaatccttctaagatcaagaaagaagacgtgctgaagctgaaggtagctaagccagttactgctggaacatacacaaatgttttcgatttctgcatgggacgatgccgccatagctctgcaagtgtggttcatgaaaatgcctatgccagtgatttccatcactgtttttcagtgcaacaaaattcatcaggatcaactgagtctagttctgtatcaaagttgttgggcattaacgttgtagtaggaaggcccagggaatcttgcagcttggtgtgcaaagtaagaggacagtcctgtgttccaagcaggctctctgtgttgaacaaatgtgagattttgcagaaatatatgagatgcaagagtggctgctttcccagccttggaccagatcaacctgctgaagttgttgacgaagctccaaccagcttgaatccaggagcatgcttatacatgcagatggatgagcggctcacatgtgatggttcgcaccatcatacccggcggctctgtccatgcgcctgagaaggggaaatgaatgtgacactcataagacagcagaggggaaacaagtggaggcgataagctgataaccgatggttctccatcacacccccatgacgaacaacctctccacgcaccggttgcgggtttcctcaacaagaacgccctactctcctcctgtttctgggaaggattatggatgcaaaatgaaatggagtgcctgcaaagatctgctccggttcttgagaagcgtcgtggatgcagaaggagatgcaatacctttcaaatccttgcatggtatctgatataagacatgtggcgtgagaagtgataaaatggttttttatggagatatatactcgaacgtgtcttgtaaggacggcaggacgcaccgtctctcctgagttataggtacctaattatgactgtggtaaac

SEQ ID NO: 43698 - DNA, 1243 bp, Zea Mays
tctccaatagagttcgtgagttcttttctgttatctgttcggatacatacttagtgatcaagaacaatttgaagagattgatgatacttctttgtttgtatagaaatatcataaaagactcggatggatctagattcttgtcatgttctagaccaagtatactgaattttattatcttttcctttcttatgtttttagattcattcgctatgagaaatttttcataaatatatttcaacttatcgattaagatatgcctctaattgccatattgatcttagatgggttaggttgtcatctgttttagaaatattagctaacatagaaaaaaggaatacaaatataattgtcagccaaaaaatgtttcaagtaggtgcaagaggaggtgaacagataatgaagacttcaagtaaatggcgagttgaatccattgaacagataataagaacagttttaagtgtcattaacggtgcaatctactacactaggattttaaacatggtgaacagatcggccgacagacgctatgtagatgtgtccagccaagggaacttctatttgatgtgggagcttggataggtctggtagaaccaccaattacctggtccttagtctacatgcctttgttgttctgtttgtatggacctttgtctctatgtgtagccattttggcaaccccacatcagggtggtggcatgtagattctgaacatggggtggagagcggacattggactttggttgttgttgcgcggtggtgggctcttccttagtataggaacagtcatataactgaagactttgaggaggtgcaggtgcagagccgatggtttggaatccttgacgtgggctaccgctcataggaggaggcttgggctgcttgtggcagcaacatgttgcacaagaccacaaacaagggaacagctaggtgcacgacaaggttgtcgccgccaacctctactctgtcaagttccttgatggcaacaaagaatttgtgctaggcaaagacggcgtgttgcttcggggtcttggctgaacgatcaaacatcctatgtatatatgtgtacaacaaactacatctgttgctactactaccataaaagactgccgactgtgcttgtgttctctcttctgtaacacaaatgagtgtaaagagacatgtgctacttccttggaacttgaaaaccttgtaaactcatgtcttcatacgtcgtgcttcatgtgcgaaaacacttaggtctctt

SEQ ID NO: 43699 - DNA, 1024 bp, Zea Mays
ttgtgtgctgacagctgcagatccattattttctacatttcatgctgagagagagttgttctagaagccaccttggcaacatctagttcctaacaccagatctgagatacagttgttaatggagtacatgattgtacagatcagcggttggattgagttacccaggttgggtaaattgcagttgagtactaattgttggtgcacagatgattctgaatgtgagtcacattgccattttagtgcacacttgcatggttgtccagttatccctggagttttcaggggtaaattggttgtccagttatccctggcttttgaccatagcttgcagggaaggtttgcagccaggaataggggagcagaaagaagcctttgtgcactattcagttctacatatgttcagatgtctctattgcttgcatttttgcattggatggcctgcaatttatttcagtctcaaccctacaatcttaacaatatgagagagagcatgttcatggagaggcaaccagggccatcattgcaattaacgcgacagaagtgtggtgacactatccattgcttattcagtcaggaagtacatgaacagctttggatttattcaccactgccagcgattactttgcaaacatatcagagggcacgattttggcacccagtatatattcttgagtttgggttctactttgctgcaccgaaatcataccgatattggtcatctcttgtgtgccttgcgcaagtggagcagttgtctgagagcatttttcttcttgtggcgagttcattagctcatggacttttcaaccaacttagtttgacttcagaaaatggagaagccattgattcattaggtctcacagggatgtttgcatgtgcgtgccaattggaggttatgagtcatggaactaagctgcggccaacaccttggccctcttttagtttgagctgctatcaagatgaagatggagagcagttcttataccaattaacacatgacttatacaattcatgttgggccaaacaa

SEQ ID NO: 43700 - DNA, 1785 bp, Zea Mays
gtgtcaccgagcgccaaaaacagaaaaaacccctgaactccgaagacgggcagggcaggcaccattggcatcagccatgccgccggcgccgccaccgcaacaacctaagaatcgcagccgtgttcccacgccgaccggagagaaccgtcggcctcagcgtcggatggagagccggaacgcgtcggagcgggccgcgttcttcgcgcggcgagaggcagcggcggtgctccggcgcgtgcttcgcggggacgccaccaggcgcgccgccggctccataaaatcccttgtatactccccaaccgtccgcaacaagcgcgccaccttcgctctcgtctgccagaccctcaagtacctaccaattcttaaagaggttttagcatcgagtgaaatactgagcagcaaatggaagaaacaagaggaattggtttatgtgactacctatgacattctctttgggaattgcggtttctgggtcagtcgagcaattaattatgctacaaaaggattctcttaggactactcttgataaagtttgtgcgagaaagagagtccgctgcgttgaagacctattgagcaataaatcagccgtcaaaccaaagccccgatttcttcgtgttaacacactcaaggtcactacagagtctgtcattgaagaattgaacaaaatgcacatggttgacaaagatgaaatggttccagatatgttggtactcccacctggaactgatttgcataaccatccgttggttacagatgggaaagtgtttttacaggggagagctagttgtatggtagcagttgcattgtgccctaagccaggctggaaggttattgatgcatgtgcggctccagggaacaaaacagtccaccttgctgcactcatgaatggagaggggagtattatagcttgtgaacttaacaaagagagggccaagacattgcaacatactgtcagaagatctggagcaaacaatattcgaatagttaatggcgactttctggaagtagatagaaatgatccatcatatgctgaggtccatgctattctattggacccctcgtgctctggttctggaatatctacagagagacttgattatttgcttccctcacattctagagatagtcaggatgatgcgggtacaagctcaagggtcatgaaactctccgcttttcagaagaaagctctctcccatgctctatcatttccgtcagtggagagggtggtctacagtacttgctcaatccaccaggcagagaacgaggatgtcataaactctgtcttgcccttagctacatccctcggatttgagctcgctacaccgttccctcagtggcaccgccgtggccttccagttttccaaggatctgaacatttgcttcggacggatcctgaagatggcctggagggcttcttcattgcattgtttgtcaggaaagcaggccctacttcagaagagcctagcgaagatgccacggtagaagtaagaaccaaacaagtgcgcgggaggcgaaatggggtcagggcgttcagctccttgaggctgtccaggatgatcctctggtgaccaaaggcgttctggatttaatttgatgtatcattgctatttttggtagtcaatgtggtaacaggtaggtttgaatctgttctgaattttggactcatttttttcttctactccagataatatgttgccatactccatgtccatttcagattataagacattttagctaatatatatatatatatatatatatatatttgtcatcgaaggtgatgta

SEQ ID NO: 43701 - DNA, 2775 bp, Zea Mays
cctagacgctcatgggccggttctgccttatctccctccctcctagtcctaccacttcctcattccccacgtactctctcggctgctcgcttatggcgatcgaagctgcgcgcctctcaccgtccatcgccgccgccgccttcctcgccagccgcccccctcttgccctccgcccgttctcccttcgtcgcaggtttcccctcctccgcgtcctcgccaactcatcgggaggggacggacgcgtcgtcgctctgtcctcgtctgagctccgaaagcgccgaggcctgtcttcctcctctggggctgcggactccgcatctgacggggatgagaagctacgctcgcttcgtcgactcttcgcgcggcccgacgttgctattgacgcctacatcgtcccttcacaggacgcccaccagagcgaattcattgcagaatgcttcacgaggcgtgcctatctgactgggttcactggcagtgctggtacagctgtggtcacaaaaaataaggctgctctctggactgatggccgttattttcttcaggcagagaaggaattgagccaccactggacactcatgcgcagtgggaatcatggtgttccaactactagtgagtggttgaatgatgttttaccatctggttgccgagttggtattgatccgtttcttttctcatttgatgctgctgaagaactgaaggattcaatcgccaataagaatcatgagttagttttggttcagggcatgaacctagttgatgagatatggggagatgcaaggccaaatcccccaaaagaaccaactagggtgcatgacatcaaatatgctggtattgatgtgccatcaaagttgtccttcattaggtcacaacttgctgaaaatgggtgtgatgctgtggtaatttcaatgctcgatgaagttgcttggttgttgaacatgagaggaagtgatgtcccacattcaccagtattttatagctacctcattgtggaggttagcactgctacactatttgtagacaacagcaaagtttctaaagatgttctggagcaccttgagcaagctggtgtgaaacttaagccatatgaagcaattatttctgaagtagaaagagaaaggtgcaaagctctggttggattcttcaagcgtgaatgcagccataattactgcatttaaatcaagttgtgacatgaaaaagaaaggaaaagcaggtgaagaagttggagaaaaagaagcatcttcaaacgaccggataactggagatcctagtgtccacaatggagtcataagtgctgtatacaatgtttcaccggttgcacttgccaagtcagttaaaaatgatgcagaaattgagggaatgaagaattcacacttaagagatgctgctgctttagcagaattctggtgctggctggaggaggaaatctgtaaaagtgtgccccttacagaggtgcaaattgctgaaaagcttcttgagtttcgtcaaaagcaagatggatttatcgagacaagcttcgacactataagtggttatggtgcaaatggtgctataatacactacagaccaaccccagagagctgcagctctgtaggaagtgacaatctgtttttgttagatagtggtgctcaatacattgatggaactactgacataaccagaacagtgcattttggtgaggcttccccaaggcaaaaggaatgcttcaccagagttttgcagggccatatagctctcgatcaagcagtgttccctgagagaactccaggctttgtgctagatgttctggcacggtcatctctgtggaagattggactggattatagacatggcacaggccatggagttggagctgcgctaaatgtccacgagggacctcagagcattagctatcgatatgggaatttgacagccttacagaagggcatgattgtcagcaacgagcctggttattatgaggacaactcatttggcattcgtatcgagaatttacttctggtaaaggagcttaatctggcaaattcgttcggtggaatttcataccttggttttgagaaactaacctttgttccaattcagagcaagcttattgagtcatccttgatgtcaccttcggagatcaattgggtcaatgattaccacgaagaagtctgggaaaaggtttcccctttgttgagtggccattctcgcgactggttatggaagaacactcgacctcttttagatgtgtaataataactcaacgcacagcacggcttgactgcgtaagtgaaagaaatgaacagacatgtttggctggagcatctcttgaagatctgatggccttcaatggaatgcaactatatggcagtaaacagaggcaagacaatagatgcgtaggctggccagggttcagcggatgataggttgaggctggtgtatttgacatccagccaatttggtgcaacacttgaaaaatgaattacatgcaagccttttctatttattacactatcgacgacaccgtccattgtttgatgaatttattatttattacatttggtacctttttttatacaaaaaaacatctttttagagtgatgaagccatttgagaccatggtttcgtatatggaatcagtcagattcttagggtgctcttggtagggctatggcgaaaacaatttgagctatgatttttgtggtgaattatgatggagctgaagctattttgaagaaaacgattgataaaatagtttggtgacttggcgttactattaaaaaagactgaaatatccat

SEQ ID NO: 43702 - DNA, 1605 bp, Zea Mays
ccgcaggcccattgaggacaccagagtgtatggatcgctgccgcgtgctcccgtcgcggctcccgcacgcggacgctgtcgaccaactactcgttgtccttttcccgaacgccgagccctagcgtcaacgcggccaggcggcggtcagggccgggcgtcaggcggcagcagtggagcacgcagcccagcagctctaagttctattcagattggtgttttgctggtaccatgtccagtccgtggagccctctgagtattgaggaagacgaagagatacaagagcttggtgccgaggagcagcaggttggtgagcagctgcggcagggtgatgggcagcagcaggagttgacagctgatgcaagagcacaagagaccggaatgaaacgtgcaagatcagtgtccagttcatctactaatccatcaaattctcgtaaatctgagggaaagataaaggttgaggaaaatgcaccaggagctgcaacaggagtgattttgtctcttcgtgaaagtttacaggactgtaaacaaagccttgcatcttgccaggtggaactggaagctgcaaaatcagaaatcgagaagtggcattcagcatttcagagcattccagctgtaccttctggtaccattccagatcctgtttcagtggtgtcttacctcagtaccctgaagtcatcagaggaatcattgaaggagcagctggagaaagcaaagaaaagggaggcagcttttatagtaacatttgcaaaacgagagcaggagattgcagaactgaagacaaggagattattgcttgatccagcaattcatgaggaatttacacgtttaaagaatcttgtggaggagaaagagaaaaaaataaaggagctacaggacaatgttgctgctgtcaattttactccatccagcaaactggggaaaatgctaatggctaaatgtagaacattgcaagaggaaaatgaagagattgggacgatggcatcagaaggaaaaatccatgagcttggaatgaaaattgcagttctgaagtctcagaacaatgagctcaggaatcaatttgatgttttgtacaaacacatggatggtgtaacaaatgatgtggagagatcaaacgaactggtgtccatcctgcaagaggagttagaagctaaggatctagagctgactagattgaaggaggtgcttgcccagaaaggagctactcaggacgcaccggtggagaccagtgacgacgctggaaacggtcaggaggcagattcagatacactgcaagtgaaggcggaaagctaagggagtttaggctttgaagtgtgtttgttgggacttgtgggaaaagtaatatcatgttatgcggtctcatagcatgtctaggttattatatagtaggggaatcactgcacaaaaacatcggcaaacttttatctatgatcgtacatatggctttacaaaagattattttgcattgtagacaacactattatagtgtggattttgaaattagatatataataataatatagatgagtaagctgtgagtaagaaagcctcaaactgattcgctacagatttgcgctggctgaaccagtaatgatctccaacaattca

SEQ ID NO: 43703 - DNA, 537 bp, Zea Mays
aatcctctctcaaaacgactcctgcagtttcattcagaagccgattgacgacttcgtccataatatcttcggccatctttttaatttcgtcgtccctcttcggctgagggcccgaaggcgctttagtcggatctgaagcaggacacgactacattactattacaaatcgcaaacagatcttaaaagcctaaagattacaacacggtaaaaactattatttagtacctaattgaccttcggactctgcgctcttttcagcagccttagccacttctctagcattatggatgcccttttcacttctctgaataatttctcttgccatttctcggccaccgttgtcccagatgtcggtgaaaaattttcccccaaccgcgctagcttcggctgaaggatcttttatatcttcagtcgacaaagtggcttcggactgtgctaaaatttttacatgctcacagccctttttctctaaaatggtggcaatccctctggcgccagagaaggcacatatatctcctcggctatttaaaatttctt

SEQ ID NO: 43704 - DNA, 414 bp, Zea Mays
gccaacaagcattagttgaaggttggctgcttgaacggactgggtgtggaaggagctttgaccaggctagttgaaacatgatgtagcagatcctgctggcttgctgaggtttgaccccttggaaggaaacccaaaagatcgaaccctctagtgcctgtcctgctgttgagctcagagaacttgaaactttctcttgaggtgacctttttcctcttcttgggctctttccacctggatggccttgtttgagaggtgcgagaagccgaggaagtcttggctggcaaggatagtcttgagttctggtcttaaccctttcaagaaacgggccatcttcttgactttggtgctaacatcatctggtgcataacgagcaagttccgtgaatttatggatgtactcgctaatagatcgccc

SEQ ID NO: 43705 - DNA, 517 bp, Zea Mays
cgcgcctgcttggagacttcagcctcgctctcgacgtcctcctcctccctcccatgtcgacgaggcgacagtgggcgaagccttgccctccctcggctaccggcagttgagcggcccctgggcgccatcccgtcgagcttcctcagttcctcttcgtggtcgctagtagaagaaatacgacagaccaaggtctatccgctagaaaaaacaaggctctttggttagttccctcatcagaataattttgggtgctgaaacataaggttccaggtccagtattgatgtttgcagtgatcggcaagtccaactggtcttggaggtgtgattggacatcataagtttgatgttttctctagaagaaggaacaaatggttttgtacttaaggaaatatggttccagctagtagaagtatcaatgtcagttgtttactaaattcatcgttggaattatggttggaattatggtatactggttcacattggtgtgtttagttgcaagccgaggtagtactttctc

SEQ ID NO: 43706 - DNA, 464 bp, Zea Mays
ataaaattaattgaggggaaacacttgttagggcttgaattaggtctaagccgaagtagagcaccggtcgttgcgtgaatcggccggtgtaggctcgccggagctcggttctccgtcgctgcccgtcgtggactttcccttgtgaagattagaacttcaagggtcttagtgcaaacgtcagtgaaacaaacaaatagtcctctgggttattgttgcttattcaaaatgctggggtcgtctgtgtaaaaccgccactacgggcgcgcgcgcgggtgcgtccccatattcagttttgagttgggccgattgggtcagttttggcccaacattgtagaacctttttctttttccttttctgccagagctagagaatttccagaaaattataaaaaaatgctaaaaataccagaccaattttactaggctcctaattttctatagtatttaataaaaatagtttcatg

SEQ ID NO: 43707 - DNA, 3094 bp, Zea Mays
cccatgtgtaagcttttctcgcactcgtactccctcctccgctccggctaggaggctgctccctccgccgctccgccttcgtcgcgcggccatcgtttccggctctgtccccggatatctcttcgccaccgcttcctgcgccgcggcgccgccacaaccgaaggcgacccagtcgccttcaacactatggtgactcctcccactgtcgagcaggaggacgaggagatgctcgtgccccgccaggaggcggtcgacaccgacgcagcgcagcccatggaagtggtggcacagactgaggtggtgagcacggcggagagccagcctgtggaagatccgcagacatcacggttcacttggacaattgagaacttcaccaggttcagtgagaagaagcactatttagaggtttttgttgttggcggattcaaatggagtgtgctgattttcccccctgttttgcaactccagctgaagcgctttgagtatgattatatgagagatagcatggttaagattaatgatcgctatgagttccctctgcaacttgatctggatagagatggtggcaaatacattgctccaaatgcagatcgaagtacacgaaacctttacactcttcacagtgttcttgttcatagtggtggggtacatggtggtcactactatgcattcatacggccaactttatctgagcaatggtataaatttgatgatgaacgtgtaacaaaagaagatgctaagaaggctcttgaagaacaatatgggggtgatgaagagttaccccaaataaaccctggtttcaacaacgctccatttaaattcacgaagtattcaaacgcgtatatgcttgtttatattcgtgaaagtgccaaggagaaaattatgtgtactgttgatgaaaaagacattgctgagcatttaagggtaaggttgaaaaaagaacaagaagagaaagaacacaaaaagaaagaaaaagctgaagctcatctttataccataattaaggtagctcgagatgaggatttgaaggaacaaattggaaagggtatatattttgatttggtggaccatgaaaaggtccataatttccgtatacagaaacaaatgccttttagttgtttcaaggaggaagtagccaaggaatatggcatccctgttcagtttcagcgcttctggttgtgggcaaagaggcaaaaccatacataccgccctaatcgtccattgaccgttcatgaggaaacacaatctgtggggcaactgagagaaatatcaaataaggcacacaatgttgagttgaagctgtttttggaagtagaacttgggctggatttgcggcctctccctcctcctgagaagggcaaggaagatattcttcttttcttcaaattctacaacccagaaaaggaagaactctgtttcatggggaggctctttgtgaaggccttgggaaaaccttcagaaatcctggcaaaactaaacgaaatggctggatttccccctgatcaagaaattgagctttttgaggaaattaagtttgagccaaacgtgatgtgtgaaactatagacaagaaactcacttttcattatagtcagcttgaagatggggacattatttgtttccaaaaatcaccaggagcagaatatgatgcacccgtgcgatatccggatgttccttcatttttggagtatgtccataataggcaggttgtacatttccggtctttggagaaaccaaaggatgatgatttttctttggaattgtcaaagcttcatacctatgatgatgttgttgagagagttgctcgccaacttgaattggacgatccagcgaaaattcggcttacaccccacaattgctactctcagcaacctaaaccacagcccgtcaaatatcgaggagtggtgcatctgtcggacatgctcatccactacaatcagacgtctgacatcttgtattatgaagtgttggatataccactgccagaattgcagttcctaaaaaccctgaaagttgcatttcaccatcctacgaaggatgaggttgttattcatagcatcaggcttccaaaaaatagcaccattgctgatgtaatatatgacttgaaaactaaggttgaactgtccagtcctaatgctgaactacgtgtactagaagtcttctaccacaagatctataagatctttccactacatgagaagatagagaatataaacgaccaatattggacactacgtgctgaggagattccagaagaggaaaaaaatataggcccaaatgatcggctaattcatgtttatcacttcaagaaagatattaatcagactcagattcagaactttggagaccctttcgttttggtcgttcatgaaggtgagactttagcagaagtcaagaagcgcatacagagtaaactgcaagtctctgctgatgaattttccaagtggaaatttgcatttatatcaatgaatcggccagactacctccaggattcagatgttgtacctactggctttcagaggagagaggtctacggagcttgggagcaatatcttgggatagagcacgctgatactgcaccaaaaagggtctatacagtgaatcagaaccgtcacgcatacgaaaagccggtcaaaatttacaattgagatttctaactaacatggccgcacggtgaaggcctccatacgagaggagcggccagaaaagggaggacagggaatttatactgtcagggggaaaacctcatagttagcgagccattcggtgtggcacggccatgtattccagcgctagaggccagccactgttatttcatctgtagcagccagcagctcctatagcaatgattttctttttgtacaagattttccttctttgccttagggtgatggcgcgagcgcattggtgtccgtttcggttgggcaattgcttcattcttagagcaaagctgggtacataagattttggtaggaagcgtgtatacaggcaggctgtatagttgtggctctctcggcttgatccctcgtatcttgtcttgtgctattgttaatgcagtgacaggggctgactgtaaatcgtggttccaattttcag

SEQ ID NO: 43708 - DNA, 499 bp, Zea Mays
tcgccgctcccgcaaatcagcctcgcggccgcttcgcccccacacttctcgccaccaaagaccgcgaatggaaggccgcgcccgcaaatcgtgaatccgccgcgccatcaaagcccactgacgttcaaatcaatctcggcagtggatgctcccgcggatggaaggtcccagatctcttctcgccattaccgcgcccgccccctcaattcccatatctcctctccattctctctgaacgtccactgccgattccattctctcggttcttaaaaacccctaatcgatccatacgccagtgaagccacacgtcgccagtggacacggtgctgaaggttctggcagaaagaagacccacgacatcttcaacacagataaataacctgtaaccctgataacgtaccgaaagaactcccaagtgatcttgaagaactataccttcaacggcaaaatccaagtagtttgttgtttcatctagcgaggtgtctgtaagaaggaaggg

SEQ ID NO: 43709 - DNA, 565 bp, Zea Mays
gatgaaatgctttttttttgaccgggaatgtgatgaaatgttggataggagtctttcgttgcttgatcatgaacagtctatctaggagcttacaatgagaaagaggctgctgcaagggcctatgaccttgctgctctcaagtaccggggcccaccacctacacaaaattcccagtataaccttggaacatcttcactgtcgtgtaaaacaagggactagtgagagattgacccagtctgcaagcatcagtgaaccacgctgactcgtgaagtttggcatttcgatatggttgtgctagcgacttagttgagtttgtatgtctcaggtcatggactgtgagaaagagttgaaaataatggagaacctcacaaaggaagagtaccttgcatcactgaggaagtgcatatggtcaaaattggaattggtgaatggcatggcaatagacgagtaataacactataacagatatttccacttacatttgattttttaagttgcttttcacatccacagtcacattggtgtgcttttcaactggctctggatttcattaaagatagcttca

SEQ ID NO: 43710 - DNA, 1984 bp, Zea Mays
atggagtcggccaatgaagagcggaaggaggagagggtcaacgggggctcaatagctggttggtgtagatgttgctggtttgagaatagtggcggcaagatctcatggagagaagctatgcggactcccagaaaaggcgaaatcatcgtgcgattgtggagattgtcgatgggaggctccaccagcgctagggtgcggccaacaagacgctgctcgccaccgcttgagtcggtagtgagatcttagggggagaagccctgcagcccccatgctcccactccctcctgcaccccacgcttaccggcgagccgctcgacctcattggagcttgccaagccgtcatgtgccccagtgcggtggtcgacatcatccacggcgtcgaccgcgtgctggtcctgcgctcaatgcaggagtccttcaactggcggcggtggagcaaccgtactaccacagcgcgtacacaggacgcagagaacaactccagaaggcgagccccaacccctagatctgcgatgcagtcttctcaactgaaaaaagagggcagagaacaactccagaaggcgagccccaaccccagatctgcgttgtagtcttctcgactgaaaaaagagggcatctctaccgccaccaaccactagcaggcggcagacgttgctggcaataggcaatggcatgcatcaggaaatgccaggcgatggtgcatgcatgatgaagctgttgtccattatattgacatgattgatcagaccacgcttggtcaccggatgatcaagaaacaattcaacaagactccaagagctggctggcaaatcgatccttttggacattctgcagttcaagcttatttgcttggagcagaggtaactactattaacatcatatttgggatgaagccatttttttaccaaaaccagtatgataagctcctacatttttctaaacagaaaatacaattctcataattatcatttttcagtctggcattgtaggcacatgatatactaattaaagttactaaatgaatattatatttgtacggtggatgcaaatgttaagccttagtgattttcctgtgtttaattctcaatacattttttttcttgacaatcaacatgcgactgtgcaaaacatatgaatataacattttttattgcaaactgtagcttggcttcgattctttgcattttgcaagaatcgattaccaagataagaaaaagtgtaaagctggcaaaggcttagaggttatatagtgtggctcaagaacttttggttcatcttcacaggttcttattcttcttacaccacaattagttctgtctattccattcattagcacaatggatcgaattttgatttttttgaagggaatttgactctgtggtggttaaattgcatatatttacaaatgtatttcctgtcgattatagccctccagatggctttggctttgaagttttagatgaaaatatcttgcatgtctaggtacatgtacgcaaccatttccatgctcctcgaaccttacatgcatcttagattgaaatttgtaggatgacatactgatgtttgactataatgttgaagaacgagttaatgattttgttgttgtagccatagaacaggatggccaagtgcatgcactgtattctaccccatccatttacacagatgcaaaacatttgtcaaatgtatcttggccagtaaaatatgatgagtatttcccctatgctgattcaaaaaattcatattggactgggtactatacaagccgtccaactttcaagcgatatgttcgagtgttgagtggttattacctggctgcacgtcaaatagaatttttagtaggtaggaggagttccttagggttgttcacgaccagcttggaagacccaatggcaattgcccagcatcatgatgcagtctcaggtacaacaaacaacacacgacagatgactacttgaaacaccttgctcttggagcatctaag

SEQ ID NO: 43711 - DNA, 211 bp, Zea Mays
tgtaatgcccaaaattagtgcaagaggaagataataagataaataaataaataaatatacttatatgctagagttttggggatttcttgattcttttttttcgtgcatattcaactaaaggaattaaagtagtcaaatgacaaataaatacataaatgtgcattccatgctggattcttgtatgtttgcatttgtattcaaatttgtgaga

SEQ ID NO: 43712 - DNA, 456 bp, Zea Mays
attaaattccaaggaatggtaatgcatcaattgtttattcactcaactcctatcacctaatgcagcagataagtgataaaagtttttttaaaacagcaaggaggtggcaaatgcatcggggcttgcctaggataacactacgttaatgtttgttagacgatgaccacttggcgatcggcttttgttctgatacttgctcagtctatccatcttcaggttgatccaccagcattatcttgtggagtagcccacctgttacatcatcttggggtcgacttggctgtctttcgcaccacgtgatcaactagcgtacctaatgaaatgcataatacacatgtataaatataagaagtaatagcaatactaaataatcggtcacagaagtgaattgaacacttaatgacaaggcattacaacacttcatcagcaaacgctagttatcgacatatggctaaa

SEQ ID NO: 43713 - DNA, 2698 bp, Zea Mays
ctcctttccaaatccgccgcaacgcgaagcaaacgacgcctgaacggtcccaaaacccacaccgccacacggccacgcccagttctcccctctctcgctgcgcatcgacgacggcgagggcgccatgatcgtgcgcacgtacaggcgtagatcccgttccatctccgaaggcgggggcggggtctcgtcctcgcaggaggcgttcgacttcgatgccgacgtcgacgtgctgggatcgtcggcctcgcagccgctcccgccatcgcaggaatcctcctcgatgtgggatttcgacgaggacccgcctccgtccccgccgcggcccgggaaggaggggaggcgaagcgggcggggcggagccagaagaggaggagggttggagctcgcggaagctcccgcgatggcgccgacggtgacgctgatggaggcggaggagtacggagagatgatggagagcgtggacgacgtcacgttcgcgctcgacgggctccgccccgccgcgcagaagcggacgcggcgggccagcctgctcgcgctgctcgggatctgcgactccgccgagcgccgccgcgtgcttcggtcccaaggattggtacagcaaattatcgatgctattttggttctggacattgatgatcctccctgcgctattgctgcaggagctcttttatttgttttggcaagtgatgtccaagacaataatttgctgtcttcagaaacttgtgtccatttcctcctcaaattattaaaccctccggtgaatgttgttgatgccaaagcaccatcaataggttccaaacttcttggaatcagtaaatttcagatgcttaacggttccaataaggatgtggactcttgttcagaggacatacttttaaaagttgaagaaatcctcttaagctgcaaagagatcaaaccagcagacagggattataagagaacaacaaggccggaactatgttcaaagtggcttgctttgttgacaatggaaaaggcgtgcttgtctgctgttgcattagaggatacatctgacatggtcttagaactcggaggaaatttcaaagaaacattaaggcagttgggtggccttgatgatatttttaatgtcatggtgaattgccattcagaattggagaaacttgtaaaggatgcctccactacggttgtggagggaaaagaaggtgctcctctacaaagcaccacactcctcttgaaatgtttgaaaattttggagaatgccacatttctaagtgacaacaacaagacccatttgctcagcatgagtcgaaaattgagccctaaatgccgctcactttcttttgttggtgtcattctcaacattgttgagttactatcagctctctctctccttcagaaaccttccactgtttcaagaaaagcagatccaaaaaatactaaagtttgcaacggggcctgctctgcagacagtagaggtttgagcttattgaatcatcattgcaagtgcaataactcaaagaaaaagagcattttactgaaccgaaggtgccagtattgttcatccaccaaatcagaagcttctcatgttaccctctcttctagtagtgatgtcagtcagtcagaaaggatactcaattgctcatctttttcaagcaatgggacatcaagtggttcatttggagtgaaacatattaatggtgctagtttgaagctcaatgtaagaatggatcgttctaaagcttatccagtcagaggctcaactggttggatttctatgaaagcacaaacttctgattggaactccagagaaatggcaaaaaagcggcgcctatctgaaaatgtacgcactgatttgagtaatggtggtgatgatccatttgcatttgatgatattgatcaagaaccttcaaattgggatctatttggtccaaaaaggaaatcaccacagaagcgagcgaaaagaactaatggagaagtgttggatgattgtggaactgcattaatgggaagtcctaaattatgtcaacctgaagatatttatcagtcagttgcaacttctggttctaaggttgtagatgagtccaatcttttggaggattgccttttggcgtcagttaaggattatgcttgagcagtgggtgagctttatgcaaaattaaaactctacaagttttaaacttacttgctacttctactttgctaatcattgtgaaagttttgatcagctagctttaccaaacaaacatcttttgcagcaggttcttatgaacttggcaaatgacaacccgtctggttgcgaacagatcgcgtcatgtggcggacttaataacatggcctccttgatcattaaacatttcccctcatttgatttctccatgaacagtaacaatcaaatgaatgaaagtgtgtcctctggtgatccgttgtcttcccagaacagcaagtcaccccaaatcaaaactaagcagttgcgggactatgaacttgattttctagttgccatattgggattgcttgtgaaccttgtggagaaggatagccttaatagggtacgacttgcgaatgctcgtgtttctgttaatctatctcaaaatccagatagcaaagaggtacagagggatgtcatacccctgctctgttcaatattcttagcgagtcaaggtaccggggaaactgctgaagctatatcaccggggaggttgatgcgaacagatttcta

SEQ ID NO: 43714 - DNA, 2661 bp, Zea Mays
gcccacagtccccgccgcacacgccgcgatgatcctggaaagcggcatgtacgagcaggccggggagctccagatcctgttggagtacatggaccaggggtcgctcgagagccaccgcatcgcgtggcgcgccaggtgctgtcgggcatcgcctacctccaccgccgccgcatcgtctacctccaccgcgacatcaagccctccaacctgctcatcgactccgggcgtcgcgtcaagatcgccgacttcagcgtcagccacatcctgaactagaccatggacccctgcaactcctccgtgggcaccatcgcgtacatgagccccgagcgcatcaacaccgacctcaacgacgggtacgccggcgacatctggagcttcggcctcagcatcctcgagttctacctgggccgcttcctgctgtgcgagaacctggggaagcagggcgactggccgcgctcatgttcgccatctgctactccgactcgtcgcaggcgccgtgcaacgcctcggtgggcttcaagaacttcatcagcctctgcctacagaagaacccagtgaaccgttcgtccgcgatgcggctgctgcagcacccgttcatggcccagccgcagccgcaacccctggccgccccgccgtcatgatggctcgccgtaccctacaaatctacaattcatgcccgatttgattgattgattgcttcccgtcatgatacagctgaagacggcggacagattgatctttggggtggatggatggttggttgcatgattgattagctctgcacttgcgcttttcaatataatgtgggaagtactgaattgcatagaacaattgctccaaaaaactatatttttatggtttataataaagtatcaggacttacctttctttgccattgggaaccttgtgcttccctgggcaagtgctcgcattggtacttaagattctatctatgcatcactttcagcttgaataccttaacaatggtacttctctgagatcattaaatcagtttatgtacttttacatagtaataagccatctgctcaagtgagaatagatgttgtggttggaaaggatcgtctattagacgtttccatgcataagataagtgttgcagctatacaaactggttttggttttgaggtcaagctggacaagggaaacgaagctcaaaatgaatcaatttattagtcaaaacaacatctctattcattgaagattggttctttttaaaattttagatgtcattggttggattgcgatctcctttgcaaaagtatggttcttttttaaatttcagcatactgcttcaatcttgaactacaatttttcatggtctgaaattgcatatggagacttggattttaatgcttaagctgaaattgcatatggggaactttggttttaatgcatttcttgcttcaaccttgagatagcagctgttgtttcccccacttattgttcattctagaattagtagatgactgccttgcaaggatttgaacatatgatagggtgctaaaatgtttgaatgatgctttatggtatgcttgcatttagagaatatagtagaagacctgaagtgggtttacaggactaagaatgttcattgtatctcaatcatgaaatagtaaatatttttcttgtttgcagagatttcaggctatgtcttattcagcagttatgaaagataccgatctactggacatcatcaactcagagatcaagtacgcccgaggactcaggactgcgatgaccacgacacgaaagtatactaccattctggcggacttcggctgaacccgaacctgtacgagagcgggaaagtgtgcctgagccttctgaacacctggtggggcaaggggtgcgagaagtggggcaagtcgagctccaccatgctgcaggttctggtctccatccagggcctcgtgctgaatgacaggccatacttcaatgagccaggatacaagaactcggctgaaacgacaggtggtgagaggtgttccttggcttacaatcagacgaccttcgtcagatcatgcaagacgacgctgtattcactccggaagcctccaatgcattttgagacccttgtgttgtggcacttccacgagcatgagcgtgccatcctcgacgcttgcagggcttacatgtctgggacagtcgttgggtcgtctgctgggactgggagcaaccgcagatacgtccatgacaagtgctttgcagaattccacaagtcgctgacgctctacactgaacatctcagggctgagtttgctacaaacagaagacgagtgatggagctagaaacagaagacgagatcgtgcctagcatagcagctagcatgaaatcgtgttgaaggcaaatgccccacagtgttgctctcatcatcagatatttgctgccttagctatttctagcttcattcatgtcaagtgaataatctaattcatgacaattgtacctgtctctatatctaatgaatctgtcctctcttttgaaagtactaagtgtatgcccgtgcgttgctacagaataaacatgttatgatgagatgcagaaacattagttatcgttctatgcttttgttagcatcttctaaaggttaagaatatttacataccttaaaaaatgtatactccgccataaaagcaaac

SEQ ID NO: 43715 - DNA, 185 bp, Zea Mays
cttttgtttaaaacttatcgagaggggtttttgcctcccttggtgtgtaataatattactctgcactcataggttatattctggtctgtaaatattctactctatcttacttttaaataaaggtaagttaatgtaattgcttccgcattctcgtaactccgatgcttgtaatgtctgcgtgacgg

SEQ ID NO: 43716 - DNA, 1036 bp, Zea Mays
ttttcttactatcgttatgttctcacatatatttttttgtttttagggattaattctaagtaaagatttaagggctcaaaaggaggcagacgacgagagctgccagatagcccttgggaatcttcgatcagaggtcatcacactaaggaacaaagcttttgaaaaagataagatacttttttccttagtggacaagctgaaaacttgcgaagccaagcttagtactcaagacgaagcccataaagctgaagttgaagatttgaagaaaaaacttgcagaaatgaatgaaaatttcgaggttgcaaaggctaagcaagaaatatgtgaaatggagaggtccagggtgcaaaagattattgaagagcttctggattcgaaggagaaatgctacgaaacatccatagaatgcgcgaagaaactgaaagatagctttgcaaaggtgggagtgtactctttggaacaaagatttatccgtggtgatcccgaaggagttatccagtggattggcgaagaagccgaagattttgatgaaatactcggcgatcgcggggatttctgcacattcgctggtgcacgaggggttgcggcaattttggaaaaggctggttgtgaacatgtcaaggtcgtagcctagccagaatatactttctcagctcatgacacgaaggacccttcggccgaagcttctttgctaggcgggaggttctatcctgatgtctggatgaagggcggtcgtgagatggctggtgaagccattaaaaagaatgaaaaagaatctcacgacgtccgagagaaggcaaaacaagctaaagaagccgctgaacgcgccatgattatagctgggctttcaccaccaccagagccgtacaaccctgaggccgacccagttatgaaagaggctttggatgtaatgaagattgccaacgaagtcgttgacgaagtagtcgacagactattacatgaagctgctgagaaaatactaaaagaagattaaattcttgtatgttggaaaatgtaatgcttgtgtatggctact

SEQ ID NO: 43717 - DNA, 1900 bp, Zea Mays
gtgccgcacatcacggatgagatacaggactggatcgaacgcgtcgcggtggtcccagtggacggcaaggaagggcctcctgacgtctgcgtcatcgagctcgggggcactataggggatatcgagtcaatgcctttcattgaagcgttaggtcaattctcgtaccgtgttggacctggaaacttctgtctcgttcatgtcagtcttgttccggttctaaatgtagtcggtgaacagccattggaggaacatgtgaaggccaagctttcacagttttgccatgtcccggtctcaaatatagtgaacctccatgacgtgacaaacatctggcacatccccttgctgctaagggaccagaaggcccatgaagcgattctgaaggttttagacctccagtatgatggaaaggtgcctcgggaacctgagctaacaaagtggactaaaagagccaccaagtttgacaagttgaagactccggtcaagattgccatggttggaaaatacactggcctgtcggattcctacctgtctgtcataaaggctcttttgcatgcatcggttgctatggaaagaaaacttgtagtcgagtgggttccttcctgcgacctggaagattcttcagctaaagagacccctgaagcccataaaaaagcatggaaattgctgaagggcgcagatggcgtactcgtccctggagggtttggggacaggggagtccagggcaaaatcctcgccgcgaaatacgcacgcgagaacaacgttccttatcttggcatctgcctgggaatgcaaatcgcggtgatcgagtttgcccgctcggtgatgaagctacgaggtgccaatagcacggagttcgatccagctacgacgtcaccctgtgtcatcttcatgccagagggctcaaaaacccaaatgggagccacgatgaggcttgggtcgaggaggacctatttccatgtcagtggctgcaaatctgcgaagctgtacggcaacgccagctctgtagatgaaagacatcgccacagatacgaggtgaaccctgacatggtcccagactttgagaaggccgggcttcagttcgtgggcaaagatgagagtgggaaacgcatggggatcgttgagcttccctctcacaagttcttcatcggtgcacagttccatcctgaattcaagtcgagaccagggaagccatctccgcttttcttagggctgatagccgcggcgtctgggcagctagaaccattgcttcagcgcagcaatccgacaacgaaagcatgttcgatcagtaaagtcccgaaactgaaactgtaccccactgggcctgtgaataatccactgaacagcttggtgaacgggtactacccaaatggcactgggatccacacctagaagcgtagcgcttagcgatggtttggttggtatttgctgctatggtttttttgcttgtacccctcctttttcatgtgttcctttttttcagtttgttatttgtctctgatcaactgagagaagagaaggctaagattcagcaagcccccagctccagcgacacatggttccgacatttttaacgaggaacgccttccagtccgttgaagcgagctagccatagggtggtgaggtctagtgtgatgttgttgttgtttttttctctttcctttttttttggcctggaactaaggcgcgaagtgttttgagtagcgctagtagagcctggaagaagttatctaaactatttgtacattatggaagaacttatctaaggactgaatacacaaatgcttggccatgattgctttgttgccacaatatgaacaaccacgctcagatgaagagtattggtgttgttaaaaaatgccagtgaaattgttgttgttaatgtttgtgcctgtgttgccct

SEQ ID NO: 43718 - DNA, 408 bp, Zea Mays
gtatctttttaatagttttaaattatgtggcacaacccatttgttgtctaagttgtgttgttctcttctgatgaaaatcccattgttcctccttcgatatattgtaaaaccattttcagagaatgtagtgttttcttcaaaatctttagggtaaaattaggagcatttgccttttttcatgcatggacaattccagtttttatctctgcacggtccatgcatcgtatgttcagcaacaagagcatatcccaaaggatctaactcaggatctggtatttcagcagatatccacgaatctattgtttatgtagttatttcacaacctttcttgtctaaccaaattaatatgtgcacatgtggtagacctcgtttttggaattctatagaatatagtagtgctagtacaag

SEQ ID NO: 43719 - DNA, 2074 bp, Zea Mays
ccacgtcccaacaacttgccaattcgcaccgcgggaccggcgccgtcttgttgctccgctccggccgtgacacgagcgcaccagccaccgccagcccctcccccgtcgactcgagccacaggacaaggcatcccaaccgccgcccatctcctatcgtcatctgccgatccctcctcggttcctcacagtcacagagcctcacgtcacgtgtacctcccccaacccaacccagcccaacccagcccaaaacctagcgggcgaggggccggggaaccgaccgccggacgcggagatggaccacgcggcggaggcgcagcggacggacctgatgacgatcacgcggcacgtgctcaacgagcagagccgccacccggagtcccgcggcgacttcaccatcctcctctcccacatcgtcctcggctgcaagttcgtcgccgccgcggtcaacaaggccggcctcgccaagctcatcggcctcgccggagagaccaacgtccaggcaagcacggcaccaccacacacacactgactcgcccgccccgacgatcaccatccactccgcgcctttcgtgcgtactctgctgaattactgagcccccccctgacggtgggcccggggcttatcacagatggacctcttcctagctgcatgctgcatctttttagctgaacggaacctactaccatgcatcgaatccatcgatcactatgctctctaacgcaagaatagactgctcttgctcttcaatcaacagttcaacacacgcacgcacgatccaaacgatattcgtctatctggcacagtttttttctctcttcagtttacctgctctagctgctcgtcgttgacattcaggagccaccccaaaaaaaaaatacagggcgaggagcaaaagaagctggatgtactgtccaacgaggtcttcgtgaaggcgctcgtcagcagcggcctgtgtcctcgtgtctgaagagaacgaggaggccatcttcgtcgacccggccctccgcgggaagtactgcgtctgtttcgacccgctggatggctcctccaacatcgactgtggtgtctcaatcggaacgatctttgggatttacatggtcaaagacaaggacaacgtgaccttggaggatgtgctgcagcctggaacaaacatgcttgctgctggctactgcatgtacgggagttcatgcacgcttgtgctgagcactgggaacggagtcaatggcttcactctcgatccttcccttggagagttcattttgactcatccaaatatcaagataccaaggaaagggaagatctattcagtcaacgaagggaacgccaaaaactgggatgggcctacagccaaattcgtggagaaatgcaagtatcctgaggatggttcaccgcctagatccttgagatatatcggaagtatggttgctgatgtccatcgcaccttactatacgggggcatatttttgtacccagcagaccagaagagtccaaacgggaaactacgcgttctgtatgaagtcttcccgatgtcattcctgatggaacaagctggaggccaggctttcacaggcaaacaacgggcgcttgaacttgctcccgctaaacttcacgacagatccccagtgttcctcgggagctacgatgacgttgaggagatcaaagcactgtacgcttcaatgtcaaacagcggttgacctttctgcctgaggaaacgagcgagatcaaaagcaccgtacgcttcagagtcaactgcttgatctttatagattgtaataaaataataaaagagtttgtaaaaaaaaacaacaacactgcttgatctttctgcatgaggataaaaagcgcatagtttccccggttggatatatccatcagatatttattatgttgttgccttctacacaaatttaacgtgctttcgtgattccttaatgcaactttggattcatgtacggagggagtttatgtgaagacatattacttggtgcagtttatctccaacaaaatacaaaaaaaagaaccttgtgcagttatacttcagtcttaatgtcgtgttcatcggatttgtgacgc

SEQ ID NO: 43720 - DNA, 852 bp, Zea Mays
aaggtacaaaaaattgttatatgggacaccgtagattcttgggcccaaaccatccatatagatttgatctagattcgtttgatggtaaagttgaggataggccagcgcctagaccactttctggagaggaaattttattgcaaacagagaatatgcacacagtgcatgggaaaggttgccaacataaaaagaaagcaaaaaagaaggaaggggagcctactatcatatggaaaaggaggtctattttttttaggcttccatattggaaggatttaatgttacgacataatttagatgtcatgcatatcgagaagaatgtgtgtgataacattgtcaacaccctcctaggcattcaacggaagtccaaggacaacttgaaatatcgtttggatcttcagtccctaggcattcgaactgagcttcatcctattccagtgggtgacaagttatatttaccaccagcatcatatacaatgagtgcgtccgagaagacattattttgtgaggtattgaaaggagtaaaatttccagatggatatgcatcagatataaggaacaatgtggatgtgaaggagaagaagcttgttgggctaaagagccatgataaccatgttctgttacagtatttactcccacttgctctaagaaggattttaccagaaatagttagtgctgcgttgattcgtgtgagcaattttttcaagcaaatctattcgccagttattcgtataagcgatatgcataagctagagtcagaaatagctgagactctaagcattcttgagactatattcttgccatccttttttgatattatggtacacttaatggttcatctccctactcaagtta

SEQ ID NO: 43721 - DNA, 2007 bp, Zea Mays
ccatcgccaccgcccacagcgcttcctgctggtctcttgttggtcgtagaactagcagtggccatggtgcaaggcgaggagagttcttggaggatggagagggcagcgctgcctctcaaccaggcgctcgcgtacggagtccaagcccacgccgccgccgccgctgcaccgccgacctgcttcctggacttccagcctgcggccgcatccgctgcctacttcgggttcggtgagctggaggaggccctcatccacggtggtggcgccgccagcgccggcggcggcgtcgatccgggcgtgatcatcaagaacgacgtcgcgcaggcaaagtcggcaggatatctcgcgggcgctggcaccggcaggccccccacgctggagatcttcccttcgtggccaatgaggcaccaacagcagctgcacagtgggaattcgcagtcagtagggagcaccggcactgactcgagctcagctcagaacacaatgtctcagatggagttggtgtccccagcctcctctgcgccgcggcaggaggtcatgatggtgaccactgatgattacagctacaagccaggcctcgccgctgcgcccgctgctgccgccccgccgagctttcagcagcaccacccgctcccgctgcagctgcacggaggagagggagggggagaccatgacaagaggaagcatggatccacaagaaaagatggcaagttggtagatgccaagacggaacggcggctggcgcagaacagagaggctgcgaggaagagcaggctgaggaagaaggcttacgtgcagcagctcgagactagcaggatcaggcttcagcaggtcgagcatgagctccagagagcacggtcacagggcctgttcgttggagggtgcagcgccgccggggacatgagctctggcgccgccatgttcgacatggagtacgcgcggtggcttgacgacgacaccaagcggctggcggagctccgaggcgggctgcaggcgcacctgctggacggcaacctgggactcatcgtggaggagtgcatgcagcactacgacgagctgttccagctcaaggcggcgctcgcgcgctccgacgtcttccacctcctcaccggctcctgggccacccccgccgagcgctgcttcttctggatgggcggcttccgcccgtccgagctgctcaagatcctgataccgcagctggacccgctgacggagcagcagctgctggggatctgcaatctgcagcagtcgtcggagcaagcggaggaagctctcgcccagggcctgcaccagctgcaccagtccctggccgacacagtcgccgcgggcacgctcaacgacggcgccgccgcccccaactacatgaacatcatggccgtcgcacttgagaagctcgccagcctcgaaaatttctatcaacaggccgacaatctaaggcaccagacgttgcatcagatgcgccggatcctgaccactcggcaggctgcgcggtgcttcctctccattggggagtactacagccgcctcagagctctcagcaacctctgggcttcccgtccccgcgacaacttcatcgggacagagagcctcagccccacagcaacggaactgcaagccctgcaccaccagcagcagaaccagttcgccggattttgaggcctcacctggtgagggagggtgtaaaactttggccgcgagggtggtgttacaaagattagaggttttgagagggagatgcattgtaatgttctatcattaaagtactgagaaagcaacatcactaggcgaaaagggcggggagaaggaattgctgtagtgcgatgttgggtggctcacctgttcatatggctcttgaactgattgaagggttagcaccgcagaatttttgtgcgtgtcaggagagaacaaatcagttacacaagattctggctgctcacttgccagagaggactaactgcaattagagtgacagattaaccattaaatacctttccaaatcaagtattt

SEQ ID NO: 43722 - DNA, 5119 bp, Zea Mays
gcccgctacagtgccctccatgcaaaatacagcgctcaagacaacagcagcgaatgccaatgccaattaataactagctactgtctcgtccgtccaggaaataggccggagaaggagacgcctcggcctctcattgctgggtgcgctccatgttagcggccgtaatggctgatagcggcgatgcggccatggccgttgttcttggctggtcgtcatcttggatctgcggggaagaggacggcgggcggctcaccctcaccgtcgcgtccaagtgcgtgcagaggacactcatagactgcgtcaatgtggtcctgttcatcgcgtacgtctgcacgctggctgccgcctgcgtcaggcggcggcagcgctctgcagatgcgagcagcgggaggagcggcgctcctagtaggtgggtgctgctcgtcgtctccacgtgctgcgtggcagctgccgtggcctactgtgtcacggctctccaagacgcctacgacatcaagacggcggttccttacttcgtcaggggcctggtctggatcgcgctggcggcctcgctgcacgcccagccgacgaggccggcgagggtcgtggccgtgctctggtgggtgctcttgtcgctgctggccaccgcgtacaattcggagatccttgccggggggcacagcctggacctcgcggagatgattgcgtggccggtgagcctcctcctgctgctctgcgccctcggctccctgctgccgcggggcgacgggcaccactaccgggacgcctccaacggcagcagcggcttgtcggagcctctgatcggcaatgacagaaccgtgccaacctcggagttgtaccgcgctggcctgttcggccagcttgccttctcgtggttgaaccctctgctccgtgtcggccgctccaaggcgctggacctcggcgacatcccgctcatcgccaccgacgacaccgcgcaccacacgtcgcagcagttcacggaggcctggagccgccacgtgagcgacaaagccaggagccgccggggcgtgggcagcaacagcctcgccctcgtcttgggcaagtgcttcctcagcgagatcctgctcaccggcttctacgccttcctgagaatgctgtccatagcagttgcccccctgctgctcttcgggttcgtgtggtacagcaaccaggaggaacgagacctccgggtcggcctgtcccttgtcggctgcctgctgctcgccaagctcgtggagtcgctgtcgcagcggcattggttcttcagctcgaggaggaccgggatgcgtatccggtcagcgctgatggcggtcatcttccagaagcagctcaggctgtccattcaggggaggaacaaccactccactggcgagattgtcaactacattgcggttgatgcgtaccggcttggcgacgccatcagctggctgcacatggggtggacctcgccacttcagctcgtctttgcagttgccacgctcttctgggcactcaagcttggggctcttcctggtctagtcccgctagtcatctttggtttcctcaacgtgccattcgcgaaaatgctgcaggggtaccaggccaagttcatggttgcacaggacgagaggctccggtccacgtcggagatactcaacagcatgaagatcatcaagctgcagtcgtgggaagacaagttccgcagcacgatcgagtcgctcagggacggcgagttcaaatggctgaggcagacccagatgaagaaggcctatggtgcagtcatgtactggatgtccccgacggtcgtctctgctgtcatgtacacagcaacggccatcatggggagtgctcccctgaatgctagcacgctcttcacggtcttggccaccctgagggtaatgtctgagccagtgaggatgcttccggaggtcctcacaatgatgatccagtacaaggtggcattagatcgaattgagaagttccttctcgaagacgagatcagagaggacgatgtgaaaagggtaccttcagatgactctggtgtcagagttcgagtccaagccggaaatttcagctggaaggcaagcggagctgatctgtcactgaggaatgttaaccttcgcgtgaaccgaggagagaaggtggccgtatgcggcccagttggctcagggaaatcttcactcctgtatgcattacttggggagataccaagattatcaggatcagttgaagtttttggttcagtagcatacgtttcacagagctcgtggatacagagtgggactgttcgtgacaacatactctttgggaagcctttcaacaaggaactgtatgataaggcgatcaaatcttgtgctctggacaaggatatcgaaaattttgaccatggagacctcacagagatcggtcagagaggactgaacatgagtggaggccagaagcaaaggattcagctggctcgagccgtctacagtgatgcagatgtttatctactggatgacccattcagtgcagttgatgcgcataccgctgcagtccttttctatgaatgtgtgatgacagcacttgcagagaagactgtcgtccttgtgacccaccaggttgaatttctgactgaaaccgataggattctggtaatggaaggtggtcaagttagtcaacaagggaaatattcagaactcctgggatctgggacagcatttgagaaactggtgtctgctcaccagtcttcgatcacagcattggataccagtgctagccaacagaaccaagttcaagggcaacaagagtctgatgaatacatagtgccaagtgcgcttcaggttataaggcaggccagcgacatcgacgtgaccgcaaagggcccttcagcagcaatacagcttacagaagaggaagagaagggcattggcgacctgggatggaagccatacaaagaatatataaatgtatccaagggggctttccaattctctggcatgtgtattgctcaagtgctcttcacgtgcttccagatcgcatccacatattggttggcagtggctgttcagatgggtaacgtcagtgctgcacttcttgttggggcatattctggactctctatcttcagctgcttctttgcctactttagaagctgttttgcggctattctgggtctcaaggcctccaaagcattctttggcgggctaatggactccgtattcaaggctcccatgtcattttttgactcaacaccagtgggaagaattttaacgagggcatcttcagatttgagcattctagacttcgacataccttactccatggcttttgtggcgacgggcggcattgaggttgttaccacagtactggtcatgggtactgtaacttggcaagtcctggttgtagcgatcccagttgctgtcaccatgatatatgttcagctagggagctagtaagactcaacggaacaacaaaggcacctgtaatgaactatgcatcagaatcaattctcggtgtggtgacgatcagggcatttgcagcaactgagaggtttatctacagcaacatgcagctcatcgacactgatgccacactgttcttccataccattgccgcacaagagtgggtactcataagagtagaggcactgcagtccttgacaataatcacagcagcattgttccttgttctggttcctccaggagcaatttctccgggctttgcaggactttgtctctcctatgctttgactttaacttcagcacaaatattcttgacaaggttctattcgtacttggaaaactacatcatctcggttgaacgaatcaagcagtatatgcacctcccagtggagccacctgccattataccagatagtagacctccaacttcgtggccgcaggagggaaggatagacctgcaagatttgaagataagataccgtccaaatgcgccgcttgtcctcaaaggaatcacttgcacttttgctgctgggaacaagattggggttgtagggaggacaggaagtggaaaatcaacacttatcagctcattgttccgtctcgttgatccggcgggtgggaggatacttattgacaagttggatatttgctccattggccttaaggatctaagaactaaactaagtattatccctcaagaacctacacttttcaggggaaccgtgcgcaacaatttggatccccttggccagcattctgatgaagagatatgggaggccttggagaagtgtcaactgaagacagcaatcagcaccacctctgctcttctggatacagttgtgagtgatgatggcgataactggagtgctggacagcgtcagctcttctgtcttggcagagttctcctacgcaggaacaaaattctagttctagacgaggcaacagcatccatcgactctgcaacagatgcaatcctgcagaaagtaatcaggcagcagttctcaagttgcacggttataaccatagctcacagggtaccaactgtgacagacagtgacaaggtcatggtcctgtcctacgcttctagaatatgaaacaccagccaagctgttggaagacaaacaatcagcatttgctaaacttgtggctgagtattgggctaataccaagagaaattcaacatgatctaccattattgcaggacatgataaaagatatgatcattttaatcaagatatcgaaagattcaagggttctcaaattgaatctttaacaagacaaggaatgccatcatgattatttgattgatgtggttactgggagtgaataagatatcaacagaaattcaattttggtaatggaagcaatttttggagtgagggctgatgttcgagagaactccagctggttgattgaacatgtggtattcaatgcaaaatgaaatggaggatccacttctagcatgatcaatggcatttttcatacataagcctttttgaataagagaagcgaagtaccaagtcgtgaattgcaatgaagaatgagtaaagtgcagtgctgagaagaataattttcatgtatcttgtgtactcaataatgataaactttatatgactgagaaggaaactgtcgcaaattgtcaaagtgattattcaatagattagggctaacccaacaggttagctatatagtgtttt

SEQ ID NO: 43723 - DNA, 2282 bp, Zea Mays
caggaaacctattctttatcgtcatgtcgttaagcttcctgtaatccacacaaaaccgccaggagccatcctttttttgtaccaacaaaaccggggaagcaaatgggctgacactcggagtaatcaaaccggccttcaacaactcaatcacttgcttttcaatttctgttttgtgatgaggagaatacctataaggacgagagttcaccgggatagccccgggaactaggggaatatgatggtcaaaaggcctagatggtggtaactctgtgggagtatcgaagagatctctgaactcttccagcaaaccctgcaaatctccactgatctcctgcctatcgccctctgtcacctgttccagtaaagcgaatgcccatatatcattccccttcaaccacctttccacttgcgcagttgacacttccaccactgcttctgtctgatcaacatttccccttaactgaacccaaactcctctatccacaaaactaataacctttttctcccaatcacagtgcatgggactgtgacccttcaaccagtcgtaccctaaaatggcatcatacgcccccaactccaacaccctcatattactcacatatgtatgtccattggcccaccactccatcgccttaaccatagtgttacttcttaaaatattcccattggccacccggacccgagcggacacacatggaaccaccttcagacccactctctcaacaaaccggctactgacaaaactagatgagctgcccgagtcgaccaagattaacataatctgattttgcaacaaggctctaactcccatacactcctcattagtggtaccactaatggcattcagtgacaataagtaagtctcctcttcctgcttttcctcctgctctatgtgtgtcaacacctcctctgttaacatcatctccaaatcttccttcgatagggcatttaactgcatttgcaccttcttcgggcatcgagtctgatgaccgggttcgaatttctccccgcaagtgtagcacaatccattctgccttctgaactcctttaccagccgctccttggacatctctggcacaacagatgttcccttatggtctgtcttagctggctgcccaccaagccggccttggtttactgttttcagggatcgttgcctttgtttgtctagaataccttgctgaacttgagctagaaaagctgctcgctccaccgactccggaacatgagattgcaccggcccctgcagctctggcttcagccctttcacaaactgagacacataaagtgtttcatccagtgtgtggttgtgtaccgaggtagtataccgtgcctcatcaaacgacttctgatattcctccacggatccaacctgacgcaagttcaacaaggattgcatagcctgcgaatactcttgagccccaaacttttggatcacagccccacagaactcctcccatgaacccagtccatgctgaattttgaaaatctgaaaccaccttttggcatttccttccatattcagtgaagctgacaccacccatgccggttcaggaacccgatacagcgtgaagtaatctacacattgcgcaatccaaatcctgggttccccccctccaaactttgggaatggcattctaggtattggtaaattggtgaactccaattcttccaccctacgccccccatatctcgatttcgatctggcagaggaccttcataccttcggtttggtccaggtggtgccggttgtggtgcaggttgttggacacctcctctcatccttccgctgtctcctgattctgacgactccaaatccctcgccatctgcaccagcctcaactctgccacctccctccccgtcttctccaacagctgcgccaactgcaccctctcctccgctgcctgttgcgccacacttgccgccaaccccgcttgcgccagcagttgttgctgaacctcatccatccccatgaccttctccgtcaaccgatccaccttctgcatcatcctctcccaccgatccgtgtcctccttctccttgctgttcatggcctccaggatgaagcgggtttgggcggacggcttcggaacgggcgccgtcgctgtcgatggtgatgccgcactgctgtagacgaaccgcgccgaggaagatcggctttgataccagatgtaacggcccttggccaccgacgagggttcgccgggacgtgagctagttgtcgccgccaaggaactggacagaacgacaggtttgtggcaattttctttctatttctttt

SEQ ID NO: 43724 - DNA, 621 bp, Zea Mays
ggttcttcgtctttgctcgctcgtttctaacttagcctgtcgccaccaagtcgatcgtcgcgccaccgtgcacagcgctgccagcacgcctgtcgttctcctccttgtgtcgtactcctcccttcactcgtttctaatccataccaccggtgccaagcatgtcgggagcgccaccgtgcatagcgctgccagcacgcctgttgttctcctccctgtgtcgtactcctcccttcactcatttctaattcataccatcggcaccaagcatgtcgggagcgccaccgtgctccacccagtgccgctgtggtcctttgcaggcttctcgagatggtgtcagccttcggttgttaaagtttgtatcaagaggcataaaggttcaaatccatatcaccaggagattctgtgcggcgagaatgcggcagaaaagttgctggtgaaggtgtgccacatgggaggtatgattacctaaggtcgaagcatcggtggaggaccccattacaaaagtgacaccagtggcgatattttggaacacatggaaagtgatgtttatcgtgatatgttgcaatgcatccaacgaacaaaatagattaaacgtcattagttatgctaaaagctaaaaat

SEQ ID NO: 43725 - DNA, 765 bp, Zea Mays
taagaatttagcatccgttttatccactgatattacgtgcttaaatccatactcgttgtcgagcggaatataaacaccaggggtgttacagccctccccccttaaaagaatctcgtcccgagattcggagcgaaagactttcaagagtagagaagaatgtaaatcatgtccatatcagtgatattcatgagacaattctaagcaaaggcgagtgtcttaggatgtggtttctctagtggacataacaagtatcgccgtaggctaatttaaaaatgcccaccaatagagacgacatctgctagcagaacacataaaggttccatgtgtgcagtttgcttttttctaatgacactgtactatctgagtctgttgagcgagtggcaaatacgcgatcttactcaaacagaatcagatgcaacctcttgggtaaaacacacagaaagaggtttaccaacaagtggttataggaaatttataacacaggggaccggtgtggatgtcgaatactgtcgcggttaacatgtggttaacccgagaattcaagtccacgaaagatggtatagatttgagaaaatcacctacggagggatctgtagatgcggactttgtaaccagtccattttatccagcactagtaacggctcgacttgatcacatatgttggaaaagcacacgcgaggcgatcgaggcatgactagagcgatgactagggggttattggtcgacttaatctcgattcttgtaagtactttctttaggatgggt

SEQ ID NO: 43726 - DNA, 606 bp, Zea Mays
ccgccgtcgtggctagaacgcttcaaagcgtgcttgtgacatcgcggcgcggcgctgtgaaccacctctctattgaccgtcaactggtgctttccccggctgtcttcgcgcgagcaccgaagtgttggtgagttcctattgctctcttgatgcttggttggagctctaccgtgcggtgttcgcgggatcggacttgtcgagctgtgtttgccaccgccatcgatagctcagttttaggatctccataggtcgatttagcccctagccgtggtcgccattgttcgaggattttgtaaaggtcctcgccatcagcgaagttgcaccatggcggccgttcagtcgccggctcaccggaattgggcacggtggagtcagggatctgggagtgggaatggaaagaaatcgaagggtttaaatgagtatgtcagtgaaacagcgcgtcagtgacttcgactcgagtcggattgttcaaagcgtgggggtcctttgcacaaaagcgccagcgcagacgtgggctcccggctgcagaccgactctgcccgatgctaggccgcagtgggccagtagcccataaagaaatggtttttccttatttatttagccgag

SEQ ID NO: 43727 - DNA, 1287 bp, Zea Mays
aaaataacaattttttcttcgcctgctaaatagttaaagggttcctctctacgcacgtctccgagtccgagaggacttctcgagcgagttcgcgaatccaattctcccagcgagggaagtcatggtagtgatcgagctggagcccgaggaggcgacgcgcccctcgtcaccggcatcggaggagaaggcggctgccgcggccggtggggaggcggcgcgcccatcgtcttcagcggcgcccgaggaggcgcccaccgccgccgccgccgctgttggcggggaggcgtcgagggcggccggagaagaggaggaagccttcgaggacgcgctcaccgacgagcagctgcgagagaaatctagaagccaagcaaatgatgcaaaagcagaaggaaacaagttttttgggtccggacaatatgaggaagcattatctaagtatgaaatggcattgcaaattgctgctgagctggaatcttctgaggatatacgtgcagcatgccattcaaatcgtgctgtgtgcttcctgaaattgcatgatgagacggttaaagaatgcacaaaagcacttgagctcaatccatcgtacctgaaagccctgcttcggagggcagaagcgcacgaaaagctcgaacactatgatgaagctattgccgatatgaaaaaggttattgaaatggatccttcaaatcaacaagccacaaggtctcttttccggcttgagcccctggcagctgagaagagggaaaagatgaaggaagaaatgattggaaagctaaaagatctgggtaactccgtgctggggcgcttcggaatgagcgttgacaatttcaaagccgtcaaagatccaaacactggttcttacagcatccagttccagaagtgacacaacgtgaagaaagacatagatgaatggctgggccgctgggcggcatatttaagttgcaattgttcgaggcacttgtgcttcacatacctggaccatatccaaatagatacctgcaaatcgatccaaatagaagaggaactggattattgcgttgtgtttgcacttgacgttagagatgctttccgaagtgcaaagttgcacgaccattttgaactgtggtattttcttcaatatagttgttttctctatgttgcaaacgatgccttttcgtttagagcccgcctagtcaaatttattatacttgctctaaggaacccgtagactgcagaagaatggcagcaacaaaccaaatgtgagatctatactgttgtgtgagtgcctccaactgttctgttatgtcc

SEQ ID NO: 43728 - DNA, 2401 bp, Zea Mays
caaaaatccaacgcgcccggctgtctctctcaccccctgtctcatcctgcccacacacacgtgctcctctcacctagcgccaggccgagccgccgccgcgccaccgccgcgccgccgccacgccaccgtgagccgcgctgccaccgcgaccgggtcacgtctccgccacgccaccgcaaccgggtcgcaccgccgccgcgctgccgcttgcaaaagatccctccagacttctgcaagcacatcccctaggcggcgttgagcaaaagacctgctgctccgcgccgcggctggcagagcaacaagcggcggcgctatcggcgcgcgagaggaccgggccctcgcgtgatgatgacgccagtctgaagcgtgcggacaaggattattccgttgggaaggagctggtgcggtaccgtgtgcgctaggtgagcacgcagaaggtctcatgctccaatcgaacgccgccagaatcggacggtaagctgcgtaaccgcccaatgtatgtgctcgcatcgcagactcgcagtgaagaccgagatcaaggacatcgacgaggccagcccaaaagacacctgctgacaactggctggagtgtgtttgtcagtgctaagagacttgttgctggagattatgtgctatttatatggtttgttacattgtttcaatgctgtaaccactaaaaattttctgacgagtaggacttactctttcctcactaatttaggaatgataaaaaccagcttttgcttggaatcagacacgctagccggccacagactgtgatgccctcttctgttctttcgagtgacagcatgcacatcggactccttgcagcagcagctcatgctgctgcaacaaatagccgcttcacaattttctttaatcctaagtaatttgaactgcttgatgagcaaatggcaattatatgtttcctatgttccacttgattcgaaaaatgtgcttgcagggcaagtaaaacagaatttgttatacccctttcgaaatacatcaaggctgtttttcacacgcggatatcagttgggatgcgattcaggatgttgtttgagactgaggaatcaagtgtccgcaggtacatggggacaataacacaagtgagtgatgctgacccagtgcgttggcctagttcctattggagatcagggaagtcatgttgacgagggtgatcagggggtaaatgccacacaattgctgcataacgaacctgtacttgttactgtaagtggtgatggcagtgttggaatgtgggacgttactttaggtcaaccttgtgtcagacatatcgttgcccatactcgacgtgctaatgcggttgttgtggcccttaatgacaaatacctctgcacaggaggaagcgaccagaaagttgttttatatcataacagaagtgggcgtacacatcttaattggcatctttcacatcctctccaaggaaatgattgatatgctgccagaaatcatagaattgttccgctaacatggtaaatcacatttcctttctgtgactttgattcggtgatctctgttagtacttcagcactgtaacaactaaaaatagaatcatacatcaataaatatatgaatatggtataaactgcatgcgaacatacttctcttcacttttctaatagcttaaggggttgttgcaacttcacgtcaggcagacttctgttttatcctcattggagattgaacagcttctgttatttcccaacacgccctgcatacctctgttcctaactctttttgtgtgcatatctttttcagcagggaagttctctaaggcaggcagttgaactttggcagaaacttggttatcatttcttccatgccttgttgtctgcaaaatatacttctacttagcatcagcctagaagcttgcctaagggagatccatgcttctatcctaaggaagcatttacatcgattggaacatcctggtgctgttgaaccggatgtggaatctgagaaagaagttgataataaactggaggatgagatgcacgaggatgaagacagataaccaatttcaagaggaagatggatccttttctccacatctaatgcatggcaacaaagatgaagatgcaattgatcctgaagaagacaaagctgagctggtagagttctatgtttctattttctaattattagtttagaaacatgattggaagttcagaactgtaatagttattcgttcaagtgcagttaactgagtagtttaattgtcaagtacagattgttagaaagtggattccaaattatgcaacaaaaaggcttaaccaacaatattagggcaaaaagttctactgagattttctttcattcggacaaactttcaagcttctgcagacctccatgtgtgtcttaccctaagagaggacat

SEQ ID NO: 43729 - DNA, 1006 bp, Zea Mays
tcatgattgacttgctaatccgacgacgacgacgagcgagcgcattaacaacgggaatagattccctgcctccggatatgattatcgccgtgtccccagcggtcgacaacaagcgagcatagattattagtaatcgcgattaggaggagctaaaaactaaacaacttcccacaggcgcggcagacgcagagggcagagcacactcgccgtcgccgtcgccgtcgccatgcctgcccctatcagcgtctattcctcctcgtcctcctgctctttaactaccctggtacgacgggtcgggatgcggagcggataacgcgcgtcggccgtgcaggcaggcaggcagccaaggaggcgaagcggccgccgtgccgaggaaacagacgcccagccacccagacggccgcgccggttctgagatgctggagcgatgtcagattccaagggcggcgccggcggcatgggcatgaacatggtgaccacggtgatggccttctcggtcagcgccttcttcgtgctcttcgtcttcaccaggctgctctgcgcgcgcctccacctgtccagggccgccgccgccgcccagggctacaacgtgcaccgtgtgcctggaggagtacgaggccaaggacgtggtgcgcgtgctgcccgcctgcggccacgccttccacgcgacctgcatcgacgcctggctgaggcagcaccccacctgccccgtctgccgcgcctccctgcgcgccaggaacggctgccgcgccacgccggtcgactacagcctcctcgtcgccggcgccgacgccgcagccaccgtccagcatgttcccgcgtcctcgtccggcgcgtcaccgcaggcagtcggacgccagcgacagaccgacgacactgggcgggcggatggcttgctggagatcgtctccgaagagcccgcctcctcgcgagatccgagccctgctgttgctgctgctggttggtaaccattctcttctgcgcccgctgacgcggagaggcagag

SEQ ID NO: 43730 - DNA, 1107 bp, Zea Mays
tgtttggttggagtaatgaattaatccggtagcacagaacttgtattgtgctagatagacagcaaggcaactcggcaaagcaaactaggagcagtatattttctccactaccgtcccggccctccctggccttgccattatctatctacccttgtctatgtctacaacaaaaaagtccacttatatgatattacattgcaaataagacccgccatctctgttgattttggtgagtcactaatcaaggcagctgttgctgatccaaatgggcatgatgtctatgttggcacaggaataggggacctttgcttccttcgacatgagaatagatggaccctaaacccttacatgagtggagctgttgatcctacgctggtgctggtacaaattgaggctcacattgccacagtgaaagaggaagcttttagcaggaaggatattctcgagaaggttgaaagatggttgaatgcatgtgaggaggatgcttggctggaagattacaacaaagtagcaatgctggatgacaatcgttataatgccgggaggggggcccacttgacactcaaaagggctgagaaagctcgtattttggttaacaagatcctaggactggtagatgttttaaccacaaaaattgtagcctgggaggcagaaagaggaaaggaattcacatacgacggtaatcaagtacagtcaggaagcagttctttaggatcttctggaatgctatacgaaggaagctcgggtgacaatgctccatttgatattaatgactttcctcagttaactggacgacctaattctgctggaggtggtcaaggacaatatggtaatactgcaatgctaccaaatattccgatgatatctagactatatataacttctgactactcttatttgaaggatcactgagaaagcatggagtaagcgtcaatgccattgtacaacaaaaccaggaattcagcattcagaatgaagattttccagctttaccaggcattcacaatatatgctataattcagcactacaggataatatacccaataaagccagcacaatgatcttgtttcatgggaagaaggtggttacaagatttctgattatcc

SEQ ID NO: 43731 - DNA, 345 bp, Zea Mays
cttgtagaacacccagaagaagtggtgtctgaagaaggagttcacttcagtgcctgctgatccagtggtggagtttcatctaactgcttacctgattagaagggttttagatcttctcctgcaaaaaggaaagaatttgatgacttgggctttattagttgctccttatggaggtcttgaagcttagattatttatgtgaatcttttattgaaaggcttcacctttccaagtattgtagttaagttatgcactctaaagactatcaggacttgtaataattttgatcccttttatgttgtaagacttgagttctagaatgtaaagtgtattttataaaagtcttc

SEQ ID NO: 43732 - DNA, 2635 bp, Zea Mays
cgggagccaccaccggttcgtgtcgggaccggaaaccacgatcagccttgcacagttcccggcttccagccgccgccgccgcggggagcaccggccgttggttcttcgtctccgccccgcttgcgagaagagcgacgcgtttccccttcgaaccctcgtgtatcgtgggtcatggtgacgcctcgtggtagcggcgggagatggtgaagatagtgacgtacaacgtgaatgggctgcggccgcgggtggcgcagcacggctcgctccgctgcctcctcgacgccctcgatgccgacatcatctgcttccaggagaccaaattgtcaaggcaggacctatctgcggatgtaattatggctgatggatatgaggcttttgtttcatgcaaccgctcttcaaaaggccgtggagcatactctggtgttgcaacattttgccgagtaacatcatcattttccagccaggaggttgctttgccagtagcagctgaagaaggctttactggacttcaggactatgcaaaaaatagtcaaactgttggggatttcagtattgcaatgcctgttgaggaggagggtcttggtgaactcacaagagaggacctcttaagggtggacaatgaggggcggtgcatcatcactgatcatggacattttgttcttttcaacatatacggcccagctgttgacggagatgataaagagcgtgttcgttttaagctactattttacaagatactgcagaaaagatgggaacgtctattggctcttggaaagagagtttttgttgttggtgatttgaatattgctcctgcttctatagacaggtgtgacgcggcacctggcttcgagaagcaaatgttccgggaatggctgagatccatgctgagagaacatggaggtcccttttttgatgcttttagatcaaaacaccctgaaaggacaggagcatatacttgttttaatcaaaaaattggtgcagaagagtataattatggttctagaatagaccacattctcatttccggttcctgtctccatcgctgtgattctgtggaggaccatagcattttttgttgccatgtagaagaatgtgagataatgaatcatttcaaaagagggaattctgaaaatttatcaaagtggaaagggggaagaagcagtaagctagaaggatctgatcatattccagtttatattttactgaaagaaatacctgaacttccggtccataatatcccaccatcagctgcaagatatcttccagagatccgtggaaggcaacaaagtatagtatcgttccttgataaagggaaaatttatgagctgcaaaatgctgcaaatttgattcaatctgaagatacagtacttgatagttactgtagtgatggcttggaaaatacaattctagctaagaaaggactggcaactggtataactgagtttgcaaaaggtggtaaccttcctagtttgatgtgcaaggggacagatctgaatcaatggataaatgaaggtttaatgggcatctctcatgtcagccagaaaaaatcactgtctagtaccaagtttgtgccacaaaagaaaattaaacgcaacttatcatcccaaccaacaatcaagtcattttttcaaagaccagggtcaaagacagtaaatgctagtaccagtaccttagttactccagcagaaacattagaccttacaaatcaagcatgtgtttcaaatggtgatacactgcctgaaaacatgcagtgcacaacttcagctgcaaaagttcaggataacacagatgcatcgtcatgttcactttcaacagacaagtctaatgctgcagcattggagtggcagaggatacagaaaaagatgaagatgacactaccacgttgcaaagggcatagtgaaccatgcattccgaggtctgtgaagaagggccctaatataggccgtttgttctatgtctgtgctcgtgctcagggacctgcatcaaatccagaagccaattgtggccactttcagtgggcacctggaaagtctaaagagaagagctctaaagagaaacgtctgtgacttcatttttctcccaggaatccaggacattttgcttccaatgagtctggtacatcaccttgtcccagcatactgatgacgtggcgatgtatttgtggagaggtaagctgatcaagggcctgtttgggaggtctggctctgactggctccttgctctagtaaccggaggggccacaaaacgtgtcttcaccagctccccattgttttgaaaaggacagaaaacaacttcatgaacattgcagccacagtgccatggataagctacagtagcgcatcagctggaacagccaagagctgtcccaaacgtggcctgaacaagcacttctctcagggatcttctcagaagttatttatttttccgcctggtttagcgtattcaaattcttaatagacaagtcacaagtggccatcagtggagaaatcttacagtcctgtagtaatgttttatatgaaaactaatatggacattatagtattattgcccatatctccccagaaataaagtgccagtcgtgtaagtttttgtttctttcctttttcaaaacaacgagaaagagcatatattaggc

SEQ ID NO: 43733 - DNA, 374 bp, Zea Mays
tgggacaactgtccaaatatggccgaacccacaaagaggagcaaaggcaaggcacttacaagtgtcaagacttgggatgacttttcaagcgaagaggaacctccaaggacacaaaaccgccgatcctcatcatgctcatcatggtcatcatgtaagtgccttacgacaagaggtaaaataagtattccatcctctagtaatgatagtagtagtggtcatgttgtaggtgagggaagcccaccttagatgagcttgcggaagccgttaaattttttgaggatatatgtactaaagagaggctcaacttaaaactttgaaaaataagttaatagctctcaaaatgattataaatgtttgctagaaaaattgaaaca

SEQ ID NO: 43734 - DNA, 1296 bp, Zea Mays
ctgggatagatttgggatcaaggtcgttgtcgtctccaggtccatcaaatgcgacaaggtcgagcgcacgcaattcagctccgaagtcatctcctttcaacagaaagatgcaagtaacaccaagtcacttgcctttgatggttgatacatttcactgtatatcattgcacgacagatccatttagtacctttttctgagttaaactacttcaaacattgctgaagactacaaccagcctacagttgttgtaattgaagcgggtcaagacatagcatttgcaaagatttagttcattctcatcactctgcaatattcggttcatggcctgtcttattttttcccctacaagtcatctacgacagtttgccagtagcactaaatcttttaactgtggttctctactatgtgtaatctcatatcaagattaatgagtatcgtgatcgtataattttgaatcctatcaacccatatggcaaggcaaagaaaaatgacagtggacatcattctagattttacaaaatcaaaggagcaaccagacatggctgtcatgatctaagatacttcaacgtgattggatcgaacccaaacatatgactaggagaagctccaaggccactttgtcaagggtctctgcaatgcacctactggtgcatgatttactggaggttgtgcgcatgaatgtgccacacattggtatgggggttggagttgaagcaggagacatgattgttattcctatcatgtgcacactgcctcctcgctgtcatttgtcgtcactctcgtagtcctgataccggagcatggttgccaggggagagcagtccaaggcaaatttgccatgttggagcagtcacaggagccaaggggctgcagtcacaggtcctgctagccaggatggagcaatcataggacctcctagcagtccaaggaaaatttgcgaggtggagtagttgcaacttttgaaacccacgtgataacatgctcaagcgttcgtatgataaaaaagatggcacataatcaaaagaagatctcatgttctgcgtttgtgaacctgtttgtattttttgaacttgttttgtgaacctctatttgtaaacctgtaaaatctgaggttgtgaatagatttgggtaacttcatacaagtggtggaggcctggtggtaatcctggatgcatataaagcgaggcatgcaatatccatagcactcgtttgacagaaggcaacaccatcaaccttgtcctccacctttaaactagcatgagcaccatccttcttcacatttatattcatgtccc

SEQ ID NO: 43735 - DNA, 2624 bp, Zea Mays
acactacgcacggacgacatcgaggaaccctagactagagcacattgcacgggcgacggcgcgccaccggtgactggcgtcccctcctcggtcctcactccccagcatggcgacgccctgccgcagcagaaacgatcaaccgatcggaaaacattaatttgtattcgatttgaaagcgcacccggcacctgctccgttcctgcgctgcttggcttccggtctgtgtcaaagcttgcatctcacgcgagtcgcacaaggacgaaccctatacagctccaggaggtcggtgccctagccacctaggccaccttcctggagaccgggcggcgacgacggggacgaacgaccgcgatgggcttcgagcgtgtggagctgcggtgtcccagggagctggacccacggccgagctggacgctcggcgatgtgctcgctgagcttgacgcgctggatgccacccgccgcgctgcgccacccacgcccctgaagcagccgccggattgggctaacggtggtggtgagaaggcctttgtgatgcgggttgatgacgacgacgaagacgacacagaagatgaagacgatggtacaagtggtgggaagtcccgggctctggtggccaaaggagcaaggttctcgtgtaatgatcttgcatcaagtgattcagaggatgaattagatggtcaggttgccccataccacttaatggagaaaagggacctagcgaagagcattcttcttgagctggaacacgagcatcatctaaaagttcaagaagaagttagaagtaagctagcttcattggaggtatgccaccaaaatgaaattcggagaacgatctctgcatttgcccgacttcagaaatatgcagaatcaagaaaggagatagacagaagacttgatgtacacttccagagaagaataagtactcgataaacacttatctatggtccaaagggatcatgaacaaaaatcccagattgttgaacgccgaataagagatgatgcagctcttgaagaagctaaaagaaaagagcaagctgtcaaggaagaaaagttaaggcaggaaagagcccagcaagaagcagaggctagacagaaggaagctgcaaaattagcagctgaagcacgaaaaacagcatttgaggctgctaaaaaggaagcagcagaaaaggaagcagcagaaaaggaggctgctaaattgagagatgcagcagcttctcaacctagtccgaattcccagaataatactgcaggcattaaagtttttggcgataaatacgcactagaagcagagtcacggaggcatgcattagtacagaatcaagtgccagaaaacattcatcacagcaaggaattcagcaaatatgaccgacaaattgccaaatccataagtaaacttatgccaactactgacagtgtcagaacaagggctagtgagcttgttaaagctttaaatggacaggattgtccccgtccaatctcttgttgtctatttgctaacaagattatttccattgtcaagagtagaaatacaaaggacaagacctttggaaatttggcctttgcgtgtggatatgtcatgctattagttacaaatcaggtaccagacgcaatggattatcttttagctgagttcaacagagtttgcatatacacggttccaaagcatatgcatgctttgaatgcacaagcacgaaatagagattattacagactgataggttaccaggaagaaaatggacagctcgagagcactgaaagttatctaacatacgtcgttgcatatgttaaactctacgcagcaatgattcagacggaaatcaaaggtgttcgtcatcctcatggtttagctgagggatggaagtggcttgccatgttcctcaattctctcccagctactacagccactgcatgtgcccttcacgctttcctcaagatggctggttttgcacttcacaagaaatatgggtcacagttcatgaaaatcctggatgtaatatcacggtgctttttaccagctttgaaggaacaaggcaacaagatgcaggctgaggctgtcaacaatctacagaattacctgaacgacaagatctacctggaggaaccagaagggcagtacctcgtccagcaactactatccaaggagttgttcatgtaaagatcaaaacaccagatcggtatgagacatcgtgtgtgatcgtctgaagggcggtacctcgtccaagctaccactatcgcaagaggggcctcatgtagagatgaaagcaccagatcgatatggagctgttcgtgtttcagaaacacgatcgagcctttcaaatctcacgaacattatttatgggacagtcccccagatcatttcccccctctgcacgggatcctgacgatgtatttgtttatgtgacttgtatccggccaaggacaggtatgataggttgaggttttatgtttgttgtagttgtacatgtactactagaatcgtgaccagaacaaaataatactcgaccacttcggcgtgggcccagcggtggccaaagtcaaggtcaacttgacacgcgacactttgtctactctgtttgcaatgaaatctaatgtttgtgcttcaaacaaaatagttttaatataaa

SEQ ID NO: 43736 - DNA, 1081 bp, Zea Mays
tatagaaatcaatgtcatatctttatcatataatagaagttctgtacaaaatagctaaataattacatcatatgacgacaacgatcctcagcaaccatagttgactgggagacgatgacctagacctctcacaaactcatcgtattatcctttctgctcctcatcttatcgtacctattcttgacctcggtgtgagtatatcaagagtgagctcacatatgttcatcgcttaacaagttttggggaataatgtgtatgagctcacttatggtgagggctcatgtgaaatgtaaggccaaaaggaatggttaaggctgagcattgcttttaataagttggtcaaaaatcaaaacagcacccccgcactgaccccggtcgaacacctggctccggtcgcgggactcatagccagtgaccacaaccaatgatagcgggtacccgaacaccattccagagacaatcccaagcataataccgaagctaatttgactggtctgcccaaaatccatgtttgttcacgacaacggcggagctaaagctccggcgagcttgttcctagcggctccatgcggtagcgtttaattcaccgacttgaaaagcagcattggctcaccagagttgcagtactcgcgcgaagttgaacggaggaagcgcagaagagctagtcgacgtgaaggctggttccggcggtgttcagtaatgacgatgatctattctggctgatctactatggtagagttcaatcgggaagctcaatgagcttcactagcaccagaagatgctaaaacatggaccagaggagcatgaactgacctgaacagctctggccacggcggagggtatcacggtggcgctgacgaccgatttcagggaactcctgtgaactcacgctctgatggacgaaacagagtagtgcgcggtggactgggttcgcgatggatgggctaagctggcatgacactcaatttaaagaagtcgacttctagttccgtgaatttggccgaggtcgagttcactagacgacctgataactctctggtgttcatgtgtcgtggcgcgcgagtaaacaaagggctctggg

SEQ ID NO: 43737 - DNA, 295 bp, Zea Mays
caatgttgtggcagaaccgcccgaattattccagcttaggtgcccaagtcacgccttagaggcagcaacacacttaaatcggaataatccgttagtccctcagatctagtatgataaagccacttaccaaggatcgaataccactagctcacacgaaggtgaggcacagagaaaatacaataataatgaaaccacaaattaaagtactagagttattacatagatcggagtttcaaagaaagataacaagttcgtacttaaaatgcagcagataatcgataacgtcgatactgag

SEQ ID NO: 43738 - DNA, 2237 bp, Zea Mays
cggccggcgcctgcacggcgcccgcggctccgcgcgctcgtcctacttgccatccgtcactggacgggccacgcgactgcgatccctgccacacgagcgcaacgcgccatgggtccggcgtgccagtgagagcgggagaagctcggacatctccgcgattcagcgcgggatcctgctggactggcctgatccctccgtgctggtgtcggcgagcatgcaaggaaggatgcgaggcgcgcggcggagcgcgcgcggggaatcgtcccggaaggcggcgggccgcgaggtggagccattcacgctgtgcggcgagatgtcccatctcaccagggccacgtcagagccgtgccgcagggctcgcggcgccgccttcgcccgccgggcgaggcccttctcggcgtacgagctggtgtcggcgcgggaggccggccgcgcgggcggcgccgggttctccgcggccgatcgagcctacctcggcaggcagcacatccccaccaaggggccgtggggcgtcgacgacgtggaaagcgaggcctacgtctcgcagttctccgccgatggctcgttgctcatcgcggggtttcggggaagccgcatcagagtctacgacgccgagaaagggtggaagatccacaaggatataagctgcagaagtgtgcactggacggtttcagatattgctctctcacctgaccaacgattccttgcctatgcaagtctgacacctattgttcacattgtgaatgttcagaatgctggaaaggaatcacatgctaatattactgaaattcatgagggattggatttaaccggtggtgatgaggatgaggactttggaatattttctgttaaattctccaaagatggtaaagaagttgttgttgggaacaatgaaaagtcaatatatgtttatgacctttcagcaaataaagtgtcagcccgcatccgtgctcataaagctgatgtcaatgctgttaccttcgctgatgaaactggaaacgtgttgtactctggaagtgatgatagtctctgtaaggtgtgggacaggcgttgcctttcaggggaaaagtcagcaggatcagagaatcaaactttgggacatcaggaaaatgtcttccgtcgtgagatctcgcccagtgagtctagtggactgggactataggtggatgccatttccatcagaagctcataatcttaagcatccaggtgatcagtctgtggccacatacagaggccattcagttctgcgaacacttatccgttgctatttctcccctgtgcacaggtcaggaacagcagatatttttatttatgtcaccagcatactgaaattttcctttgaaatactttcaaaaggttacatttgttagtggaaagttgaccgttaacttgagtaggaggccttgcagttgtgctacctgcttctaagcttgtaattagtgatatataatgaatatttggtctaatttttgtatttatctatgtaattaaggcattgcttcgccttacgctttagcgcttaaaaggtaaaaaggaggtcgataattaagatcatacatctaaaacaattatcagtgatgacatgaataatttccatgttcagttcatatcgttgtgctttctgtttcagcacgggtcagaggtacatatacacgggatccagtgacaagtctgtacatatttatgacgtggtaaccggggaggctgtcaagaggctttcgtggcatggctccatcatcagagactgcacctggcatccatactacccaacgctcgtcagctcctcctgggacggcttcgttgcccggtgggaggcctcgggcgacgacgacgaccattcggtgctcgtcgccgacgagatgagaggaagcccttactaccggagatacggcgatcccttggtgatgtagagatgtctgcaaagtggttaacaccaaatggtagtgagcatgtactttgctttgttgtttgggaattacaactgagcagcatgtacagtgccgtttggctcatgtggttgtatagccttacgataaataatatgtagggatacagaaagaacacatgagatcgaagcgactttataaatcctatggaatttatagaaacagacaagatcctctttccttgtttttaaaaactttataaatactttttcgaattttgattggattggaatacaccgttgttggattcagaaattatccattcatctcactcactatgggacaatgtac

SEQ ID NO: 43739 - DNA, 3196 bp, Zea Mays
ccccactccaccttttccttccccgccggccgccgcgcagcgcgagcggagtcgccctctccagtagagtaggagtgacgtctctacctatccacctcagccccctcttttcattccccacccgcgccgcgcgagcggagtttcgcagcacgctgcggctcgcttcgccagaattcctggcgagggtacagaattccgcatcgaaacggaagggttccgctcaccgagaaaattggcctcaatcgcgcgtccgtcctcagcgtcgatgccaaggagggaacaacaactggggtttcagcaaaggattggacaaacacaatattggcacttgtgtctcctaattccaaaccggaggacttcaaccgcccagttctttgtgaaattgttgatgatgatgatggctccatggctttgttaccaaaactgcaacaatttgcaaagagggagaacctgaagataatatcaattgcagacctgataagggtgatgttggggatggacaagagatcttagtacgagtgcattcggagtgcctaactggggacatatttggatcagcgagatgcgattatgggaattaacttgctctggcaatgaccatgattgagaaaactggccggggtgtagtagtctatcttcgtggccatgagggtaggggtattgggctgggtcacaagcttcaagcatacaacttacaagatgatgggcgcgatactgtcgaggcaaacttggagctagggctgcctgctgactcgcgggagtacggtataggtgcacagatattacgccatcttggtgccaggaccatgcggctgatgactaacaaccctgccaagtacactggactcaagggctatggtttaagtgtccttggtagagtgccattgctaacaccgataaccaccgagaataggcgctatatggaaacaaagcgattgaagatggggcatgtttatggaagccgctccagtaatcatgcaaacggcagtggcttggctggtgctggcgagagagaggagcaggatcagaatgacagtgctggcgtgcaagagcgaactccagaagcttgagtgcctaactctgcgttccttagagctgctccaatgggagtcttaaaaagagatgcatcttaaaatatagggctccatggcaaaaaaatcactccaacggggacctcattttacaaaaactcaggaaacaaatttgggctccggtctcattggtcccaaatgtaggacttgaaactatcggccctattctcgttcccacgcccccacgaccttcggtcttttcctgttgcattcgttctcaagccgtctctcccacaaaccaaaccctctgcctgtcgagaagcattggcgagatggatggacggccaccgccttttcctcgttcacggccaacaggttggcctcgttgaacttccatggagatggcactagatgtgatagggagatcatcagctgtgtcttctccgccagatttgcgcaggcctcctgtggccgtggctgcagagcgaaggcctgcaagtatgtctgcaacttcccaacagacacaaggacaagcgtcttggcatcgaatcgctgcagaccatgccgatcggagtttatcagtggcaccgatgatgtatcaagatccattgtcaatgattgatgactataggtaataacctttctgttgagattagtagtcgattatatttgctcatgaattcaatcgatggtgatctgggatctccatggttgagaaattgaagtcaaggcctggtgaggttacttgtactggtaggtgctgatagatgtagtgctcaccgatgcttgtgaattgaattattggttctgaaaatatcctcacttcaaccatgcatacgagattatgagtaaatgtgaattccatacactctgttgccccagtccaatacaaccttgctgaaccttgcatatttgtgtgagcaggtacatttttgggagtctctttaatgtttttcttgtttggtctcataattagtggagtacttcaacttatgtgcattattatatcaatttgattaccaaactttattgtgtatagcgtcaaagctgttttgaatgtcttgtgtttgtgtatatttcattctaattccataaccagagtctgctcatatttttacactactctattgaaccaagaacctgaagatgtatttgcctgccaagaaaatatggagagcgaaaatgaggtcatggagtcaccaccattgaatgattcaaattcacagtcaaaaccaaagggtcgatccaagaattttaatgaagctgaagacattttgttgatgtcagcttatcttaacatacgtaaagatgcaattactggaagggatcaataagaaggcaacttttgggaaagagttgagaagtactttaacgttaacaggacatttgagtcagatcgtaactggtcatcgttgaagcatcggtggggtataattcacaaataagttagtagtttccaaggtttccatgacagtatcgaaaggaaaaatgaaagtgggaagacaagtgatgataagctggctgaagcaaatgtaatgttccatcaatttaaaaataaggccttttctttgttccatgcgtggaacattctcagacatgagccaaagtgggctgaagataaaacatctaatgaagggaatgcaaatggggacagtcatcccaatgctcaaagacctgcaggaaggaaagctgaaaaggaaaagatgaaagcaaaaaggcgcaacagtgatgaagagtctgatcctttcattgaagaggtaaaaaaatttgagagaatcgagagagaaaactgagagcgaacgaaaggagcgtgatgaaagatactttgagctgcataagaaaaaagtagacttggagcaagaccagcatgacaagttgataatggcacttgagtcttgacacgagcacaatggatgaccaaggaaaacagtattttcagttgatgaaagaagatattttagctcgacgctttgggagtaggcagccatagttatttagtttttaatactttagacttttttccattcaaaacagattatcttgatgttcatgtaatgtaagaacatattttcattcaaagcagattatcttgatgtttgcaacaatctgtgttgacattgttttctggttactgtaaaagttgagttgaaattttgcttctgaaa

SEQ ID NO: 43740 - DNA, 1905 bp, Zea Mays
tttcagcatcctcgagtaattgatttattatttactccaattagggatgctggatccggtagtatatacgagttcatttggtctcagtttggcagttaagtgtatgatgcgggagaactcaagattttatctaggttgccttggtgtgtgattatgcaccctcaaattcaacacctatcaatttggctaagatggtctcactgggaaattttatctaggttgccacggccgagcgtgcgaggggaccaggccagggcaagcacgagcggctgaccaggggaggatgcacaactgaccaagggtggcgcaggctaggccggcagggccacaacgacgtacacggggtttgacaaggggcagtggacgatgttccttcgccgctgctcgatcgctaggagagagagagaagaatcatgagaaagaataacagaccattttttctccttaatcagtgataccgtagatattttttcttctcaacaccaccaaacttagatttagtggagcatctattgaggtgttttactaatttagtgaatctataagtagatctatagatttggtggagcagatccaccggtgaagctgatggagacgaagatgcttggctaaaaagtttagatggtgaagctatcatgaacaggaacaggaacctattgatggaagagttggagtaagtgtttacgtagccggcaaacatatgtattattagccttgacctttctaaaagttggttttcatcattgaatgctagtttcatgattacggttccctttccaaagcacctcctgcttgctcatactttactgccccaccatcagcagtgctatttgttcatactgctccctcatcagcggttgagcagcaaccgcaggtaagtgcatggtgtggattcaaatgactgaggccacaatagtttggaagatatataagaggaaataacagggatttcttgcaagtttgaggcctcctcaccaccactcttgttgacttctccgaacaataattatatcatctcaaaattgaagttgttttgacaatacacgtgtaattgttaatgaatattaggactcaagtagtctgttgttaagtttcgtggttatatcaaattgaaaggtaccatgcaagaccttaacatctttttcgtacgttttcataacagagacatacattgctatggtacattgatactattcagaaacatagaatcttacgtggttccttgtttaagaagctgcaaccggatactttttcgcttcattgtttgaacacacatatttccgatacccatcgtagctacattcaaattggtttgcttacccaacaccaaagttcagtgtcaggcttcagttccattaggctggttctagtccgtaaaatattagaggcacgcggaaaggtaaacatctatgtatcactcggtcgttaccggtaattactaaagattactatctacttgcttatctacttctttgtcgcagattgtatccctgtatatccggagtcttcatcgcctagtcgtccgagttatcgcgaatgcatagcccttcgggtgtttgtaactgcatcattcgacacatccgtgtttcaacgacgcttaactcggacgtcggtcttcatcaacttggatcgggctcgtctgagttggtcacatcgtactggcccatcccatagggtgactcagcaggaagcccgtcaggtggcccgtgatatgttttagtatctccatgagaatcaggggatatctatcccccacaactacctattagttttagaggtttgaaacagggtcttaggctatccaaagcttcaatgtatcatgtacttgacagtaaataatcattaggtataagtggttgtacaaaattgaggggggctatggcccactttgccacctttggctcc

SEQ ID NO: 43741 - DNA, 444 bp, Zea Mays
aaaaagaacagcgggcggcggctaaaaaaaccccagagggcggttaggcggctggagaggaggaaatgatgggcgaacagggagggcggtcgagcgctgctggggaagacgatgggaactgggcgacgaccaccggataaggaccctgtgcgcataggagataaggaggacgagggaacggcggcctgatttttctttcttcagaagcagagcggcggcgggataaggctggagaagatgagctcgagcgctagaagaagcaagcagagaagaagcaagcagggacacgctgcgcaggaaaaatcttaccaacggtgcggcatacagaggataaaggataagaaagccgtaaacggtggaagctaaagagaggacaagacatctgctaaaaatctggaatttggaagctggtggaagtgacgtgagcaagggaaaatgaaattt

SEQ ID NO: 43742 - DNA, 269 bp, Zea Mays
aattcatgtgagaagggagaagatcagctagcggatgaagccgctgcaggatctcgtgctgggttgcaacaagtttggtgtgctgctcaagtttgaattcagagtaaaatgtttctcattttgggtggtgggcaaggtagtgatgctcgatgaaatcataaactatgtgcagaccttgcaatggcaaatcgagggatagttacacatcgaggcttttcgaacgctactcttctggctccctcctgctgctcttcgctctagctttgaca

SEQ ID NO: 43743 - DNA, 1130 bp, Zea Mays
atgcacaaggtcgtcctcttcagtcttcgcctcggaggtgtcctcgttttcctaggattttttcccggagttctacgcgcattttgttctgggtttgctttccggttgggagaggaatcgggtgcggcgcaggaagacactggttttatcccacatgtccaatcagtagcagctaggaacagtaggcgtgcgccagtgcgtgtgatgcgaagcgaggagaggatgaaagtggaggaagccggcggcggcgagattggagaaatggagccccccgcggtcagcacggtggcggtggcggtcagcgggggcaggagtagcaggcacgcgctcaagtgggccctcgacaagttcgtccccgaagggagggtcctcttccggatcctgcacgtccgcccggcgatcaccatggtccctactccaatgggaaattttataccaatctcacaagtacgcgaggacgtggcatctgcctacagaaaagaagaagaatggcgagcgagtaatatgctagttcctttccagaagatgtgtgctcagagaaaggtagaggccgaagctgttttacttgaatcagatgatgttgcttctgctataagcgaagagatagggaaattcaatatttgcaagttagttttaggttcttcatcaaagagcatatttcgaaggaaactcaaaggaagtaagactgcaaccaaaatatctgagtgcattccaagcttttgtacagcatatgttatttcaaaaggcaaactatcatttgtgcgctcagctacatctgatattgttgaaacgcctcgatctatatcctcttcaactatttcttcacctagcactagaagtctttcctcctgtgcaccttcagcgtgatcaagcgttggcaatcataaacaagttgtcaaacaggagagttagctcttcgagcagtgttgtgagcgagatctcttacaatgatgagccggccctgacaaggtcacactccatgatatctgagatgcagttcagcagtggtagcagtggaaattctgtttacaagagcttccaaagggataatttgcctaacaactctgatgaggcatcagtttcagaaatttcagaaaatgtaaatcatctgagtggtcaggtatcccact

SEQ ID NO: 43744 - DNA, 1805 bp, Zea Mays
agacaattcactactgtttgaccacagtaagaaaaaggacatatgctgtttgcctgttctgcaacaaagattgataattttaggagctatgataccgtgagcaaagatgtaattcaaaggtggacatatcctatggtgcctgatgtagtatccagtcgtgattcctcggagagtagacttcataggcagggaatatacaaggcatcagatgtaacattgtcaccttctgcacaaatcggtgcaaattctgttgttggtagtgtgactagtattgcaggtcactgcaaagttttaaattcagttattggacaaggctgcaagattgggaaaaatgttctgattaacggctcatttatatgggacaatgtcataattgaagatggatgcaaagttagtaactctttagtctgtgatggtgtccatctaagagctggtgctgttgttgaacctggttgtgtactgtcatttaaggttgaagttggaaagaatgttgttgttcctgcccactcaaaagtttcattacttcctcagccttcaaatgaagatagcgatgaagaacttgagtatgctgacactaactctggaattgcagatagtccaccattttccagtatgaggagtaatggtgatcaagcaactgttccttcagaagaagatgagttgggaacatccgagcttgaagagctgcagcatgctgtgcctgatgatgataggtcagaagatgaatccaacaatccaactctaccagataaagatgattcttcagacagtctggttgaggatgatgatcatatttctaagtttgagaaagaggtggaagagacattccaacgagctctgggtggcggcgttaatcgagataatttgatactagagattaatggcctaaggttagcctacagccttcaacatgcagattgtgctggagctgtgttctattctgtcatgaagagtgcattactggctgcacaatctagtaatgatactcttttgaagacaactgctgatgcacttggcaagtggaaggatcttttgcgcaattacaccaagacagttgatgaagagatggagatacttttaaagtttgaggaaatgtgtcaagagaccacaaaagatttttctccgctgtttccaaagatcttgccatacctctatgatacggaggtagtaagtgaagatgcaattttgagatgggcggaagagaaagaacatgctgatgagtctgataaagtttttgttaaacagtcagaggcttttattcagtggctcaaggaagcggaagaggaggatgacgaagaagaggaataaccctggagttgagctggcactcgaattctttcatgcattgtgagcgcaggatctgatttgagtgggtctctcgcaaaaatcgaaggacgatgaaaaaaccagaagggccctgggggccaaaagaagaggaaaaagccggcaggagtagcagtggaaggttgcacttgcactgctgggctaagcaatctcgctgtgcgttcgcacatcttctgcagcatgtgctgtttcgagtttataagctgcatactgtgactagtgtgcattgtttaatgttggtgatggttttactatgaccatgagaagagaaagcatgcagttttcctaatactgtttgacctttgtaatcttctggtcgtaaagagttaccgcggaatcacactggacaattcgtcgataagaggaatcgcattttggacttgggatgtgttctgtgcggataagaggaatccatctttagttctggttctgacctcacagccacgctggtcgatcgagat

SEQ ID NO: 43745 - DNA, 505 bp, Zea Mays
atgcatactgaaggccttggctcccttgtctcaccgttcaccactaatgtgattgacaacattgttcggagtatgcctgctgataaagctccaggcctagaacttaaggatgcccttatggtcacacctgcttcgagaagagttggagaaattgtactcttttgcagtaagtgggtcaccggaggaaaagttggcagcttcaaagattttgtgtggtgcatcacttcttcgtggttggaacattcaggaacatgttgttcaaatggtgcttaagttgttatcgacattcctccctttggattctggatcagaagggcgatatgtacagcatatgcctatgctgcatgctcttgtatcaggaatttcttctattgacactgttcatattctctcactgtatggtctggaattttcagttattgcgaattcacctctacgtattgatctctcgtgtgtcctggatcatgttgtttctgagctcactgctttccttcgtaagctgtag

SEQ ID NO: 43746 - DNA, 6446 bp, Zea Mays
cacggttctgccctgcgacaccacccacgcccgtctctccgaagccgccagcgtctccacccgagaccccgacccaccccgcctcccccgccgccgcgctcgcgctcccccgcgacagccgccatacgccctatctccgccgtgcctgcgcctcctcccccgcccgcccgagacccgccaagtttcccttccttgcacggcgagatccaccatcggcgcccccttccctggcgagccacagccgtccatgttcctggccaccggcgacctcccttctctagcccttggcggcgagccaacacctcctcccatggctgccccccagaccccagtcccgtccgcgcatccgctcttccgtcagcgacgcacctattctcccctctctccccgacgtcgcccatggcgtggacggcgacctccctcaccctgcaactctgcacgtgtaagggccgtgttgcccgcctcctttccccacaccggcgcagccccctgtcgccgcggccccttccccaaacagcacggcaccacatgctccccctgccgcgcccgcactctccttccccaaataacacggccccacatcgctggttgcctcgcctcgccggggacccagcacgatggtcagggagctggtgggtgggggagacagggaggagcggaggaggaggtcaagctcaacatggacattgtgttcgtgacgctgccttccccaccgacaccaacgactcactccagaacccggatctggggcccttcctcctcaagccatggtattgggcgagggtggcgccgcctcgcgtgcttgagttcgccgagcgcgccgccagggtgctcgagcgaagaggtgagggcaccgagctcgagctcgccatgaatctccacatcgctgctggcatccactgcggactcagccaccaagccctgacattgtagccagtttcttgcaatcagaacgaatgccagttggtaaccatttaacatttcttttgctgtgtcaacttattggagttggagagaggctatcactatactgacctttatatcatcagaattgacataaatgtgatttacacgtagatacaagtttgtggcagagatttctctgacacgccaatcagtcttcgatgcgaatgcttgttgctcatatggacttgtggttgtgataatgagttcatctccgtgcacatttgtcgtccttgtggttacagcagttaactgagtagtctctcttgactgcaaaacaagcaatctgttgcctctgctgtgatggtggagcaatttcagcgccaagaatgatatctcgcattttagattgtgtcagtgcagaagtattaacattgtttttctttgcataatcagaaaggatgaggtcccttagtgcacactcaaccttcaaccactgttcatcattcagagatggccatatatgatgtgtttcagtaataattgttttgtcaggtttgagcaacatctttgccttctcattattcacatgaagtgcacgtagaataagcacaatgtgggagaatgttgtgtatgatgatatacttttcaaccaatcatcatatatattataaagaaccatctgtggttcagttgccttcagtataagatcaccaaacttctcaatcttcaagcaagcctggaaaggaagctgcagctcactgcccttaataacaatgttagggaagtcaggtagatggacctccaagggatccaacatgcccttccttgtcacaacaatttgctttggctgctcttctacaggaagagatcgaaccaatgcagcaacctcctcagcggttttccacttggccagctgcccaagacgcttttgccccgcccatacacttgtgtggataacctgcacattattatccatactcagtttaaacctacctatgttcagggttttacagaaaaacaaaatcacatgaaaactagagcagaaattcgaaaagaacaaaccttaagaaaaagttgacccgttcttggattgaaaaatgaaaatagcaccattaattggtttggtggtcaagttaccctaaaatgttttgtgaatagtgactcgatacacatttgtatcatccacgaaccatatgatttgattgctgaatatctctccatagttctgtgaagacaggtatggttcatatattcaaatatccaaacctcatttggagttgtgataccagcaacctttgacatcgattcaagatgctactggagtgttattcatgtgagtgtaatttagtacatgatccaactggtaacaaactttatgatactagcatatcacataatagatgagattactagaaacagctcatgttattgaatatagaaatttcagttctattgtttttacacaaatttgtttgtgatgcttcaaaccgctaatgattttttttaaaaaagttgtgcaatgagcatatcacataatatatgagaatcttaggaataaaccaagttgctaatgagtaaaattttggctttgctttttaaaaaatatgggttcaagttgttcctgacagatgccactgcacaaatggacgttgacacgttgtagtgatcacactgtcacgagagctgagcaaactacagcctgcaagagctacacgtggcatgcttgaccacatcatggtggagaatgcaagtgttaaagttgcattgaatcgcattgccgttgtttctgtcctggatgcacataccctgtcagtgatgtcttatgaagcttggaggctcatacatctgtttctgttggctctctctagctatatgcagtggagctgctaatatgcatgaagtttgggctaggtgagcttcctctttcacttttcaaaccagtataggtattggccgatgtcaagaagacaaggccggcgacgagaggacgacagcgtgcaagaagagaaggcccatgttaggcgcaactatagggctcaaggtcaatcagttgtggtcacacttttccatttttacgttcagctaaactgaccccctgtctcatggtgcaactgtgcaaggataggcaacaagtgttcaacaatatgtctgtggatcaattgacctgcatttcagcttttagttgaggatcaaaatctcgtgtcgttcagggccctcggtagagagacattaatgtgtcggcaccgtggatcgtcgcagttgtgggtcactgtaacggcactggtcacaggcaccatctgcctctgttcgtcctcctctattggcctcctcagcacctacagggtccagatggaaaagtttctataatacatatgtaacaaatacatactccttgttcaagagatcgtaagcaagattgtaaacggtatccaacgcagaagcacctaatatggttacagagtattactgatgggcttacctgcagactgcatgctactactcaaggatgttgttgcaaatgagttgtggagaaccgtagatgcaaatggttggagagcatcttctgcaccacacatctattggcctcacataccagctgaatctgagagcaatgggtacttgtgtgtccggtgcaacggcggcttgaccttacaaatcagtgttgctggtataaaggaatgcgacaagtcagtcggcaatcttctgtatgcagtcgccaccaagtacccaactaatgcacttgttcaccgtcctgtccttattagctatgtcttgtcaacaaagataaagaaccccgcacagctagatgctgctctgtcatttcttactaatactggtcctgattctctagatgtggtcaaatttgaagaagcatgtggtgtaggtgtggttgtttctattgaggaaattaaatctactgttactgatgtgcttgaggagaatatggaagctataaaggagcagcgatatcacataaatgttggtacactatgcggacaggtcaggaagagacacccctggggtgatgctaaggcgataaaggaggaaattgacaagaggcttgcagaaatcctaggtcccaagacagaagctgacaatataaaaccagtgaaaaagaagaaggaaaaaccagcaaaagttgaggagaaaaaagttgcagttgccactgctgccccaccatctgaggaggaattgaacccgtacactatatttccccaaccagaggaaaacttcaaggttcatacagaaatatttttcagtgatgggaacatatggagagcgcataacacaaaggaaattttagaaaaacatcttaaagcaactggaggaaaagtgatgacccgttttccaccagaacctaatggatatcttcatattggtcatgccaaggctatgtttattgattttggtctggctaaggagcgaaatggccattgctaccttagatttgatgacacaaatccagaagctgaaaagaaagaatacatagatcacattcaggaaatcgtccattggatgggatgggagccctacaaagtaacatacacgagtgactatttccaagctttgtatgaacatgccgttgagttaatacagaaagggctagcatatgtggatcaccagactgcagaagaaatcaaggaatacagggaaaagaagatggatagtccatggaggggtaggccaattgaagagtctctgaaattatttgaagacatgaggcgtgggttgattgcagagggtgcagcaactctccgtatgaagcaggatatgcaaaatgagaacaaaaatatgtctgacttaatagcatatagaataaaattcaccccccatccacatgctggcgacaagtggtgtgtctatccgagctatgactacgctcattgcatggtggattctcttgaaaacatcacacattcgctgtgcacacttgagtttgacatacgtcgcccttcatactactggctacttgttgccttgggcctttatcaaccatatgtgtgggaatattcgaggctaaacatatcaaatactgtgatgtctaaaagaaagttgaatcgacttgtgacagagaagtgggtagatgggtgggatgatccccgcttgttgacactggctggtctccggcgacggggagtatcatcaactgcaataaattcctttattcgtggaatcgggataacgagaagtgacaatagcttaattcgtgttgatcgtctagaatatcacatcagggaggagcttaacaaaacagcccctcgaaccatggttgttttgcgacctctaaaggtggtaataactaacttggaagaaggaaaagtactagaccttgatggcaaaatgtggcctgatgcttctgatactgatgcttcctcccactataaggttccgttctcaagaactgtctacattgagaaaactgattttcgcctaaaggactcaaaagactactatgggctagcccctggtaaatctgtcatgctaaggtatgcgttccccataaaatgcacagatgttatctctggtgatagtcctgatgatattgttgaaattcgagctgaatatgatcctttgaagacttctaaactgaagggtgttcttcactggattgctgagccagcacctggtgtagagccattgaaggtggaagtaagattattcgagaaattgttcatgtcagagaatcctgctgaattggaagattggcttggcgatcttaacccacactcgaaagaggtgataaaggatgcttatgctgtaccatcacttgccactgcggttctgggtgacaagttccagtttgagcggcttggttacttcgccgtggatactgactccacacctgagaaactcgtgttcaacagaactgttaccctccgtgattcgttcgggaaagctggacccaagtgactgttcagtgtaatttagggagggcgctggttttgatcggttgcagaggcgcacctgaactatacagtttgtgaagaaaatggtcgtctaatacagaacagtttaaaggccttactctttataaaatttagggttttttaatctggtgccctcagttttggtgatgtgttcatttgtaccccttgtttacttcgaatcagattttgtatgatagtgttagtgtcccgattctaccgtctgtaaccgaaaggtcccgggttcgagccccagcctctgcatattatgcgggtaaggcttggcgcttaaagatacaattcccaagaccccgcacagtgcgggaagcctacagcactgggtacgcctagtgttagtgtcccgattcccattctgtttgatgtcatactattgtgatgggagttctgttttcccctgcgtcctcttttttttgcaaatccttactgtgatactactccctttaattttcaaattataagccattttgatttccttggagagtcacatcacaagtctattaaaattataaagaaaacgaagatttatcaaaattataaagaacaaatatttataacataaaatagatatagtataaaaatattataaaaacataa

SEQ ID NO: 43747 - DNA, 1086 bp, Zea Mays
atggggagtgaggaattggaaactgctttgatggagatggtcgagcatgacaacagacgtatgttgagtgcaaaggttgagaagcttgaaacagaggcatatgaactgcgcaaagctttttcagacaagcaagagcaagagcaaatcttgttaagaatggagcaagaacagaaagtggcagaagatgcccgcatagccgctgagcgagatgctgctgaacaaaaacacgctgctcacttgctccaggagaagtatgaagcagcaatgacagcactttcacaaatggagaagagagctgtaatggcagaaacaatgctggaagctacaaagcaataccagttcacctcgtgcagaccatgttcctgcgaagataaatcaagaaccaaaccaaactgcacctatcaggagaatcggcctgctttctaggggacttggatggcttgacaagggcaagcagggaaggcagaattccaatgaaacatctggagcctaaactcatctaaagtccaggatgaagtcatagctcccaacaagatctggattgttcattaacgcttggattgcttgatcaccgtaagagtgttgaaatcagcatcgatacatgttttctcgggaagattcagctggtatattccatgaagttttgcaggaagtgtatcttgtatcatattgagttcaattgtcagataaagttttgttggtaggtcagaaaggcttctgcaagtcatcggtgtaaattttcttttattagttccattaagattgtcaatagttagtgttccaaataggagaaagaaaagaacgacttactacacacaagaaaaatttctgttagattagttacagtatcatggagttgttctggagaagagcatgttttttttatctcttcagaaatgtcaaaaccaccgaagagattctctctctgtatttttgtctgatacgtgtggctcatacattcttcagtcacagttgacatgtttgatgtaaggcaattattgtcacgaggattctgattacgaatacaacagcagaaactccactatagggaggcgttttggaaagttaattgttgtcagttcctca

SEQ ID NO: 43748 - DNA, 663 bp, Zea Mays
tacttttttggaagtatcaaatattgttttcaaaaattgcttagccccgcctagaggtaaatctcgcggatagagtttgtcctttacactaatgcctagctcaggttttatcctaaggaaggacggctctacctataagaatattttcatcggatcatcgggagatctaatgcaaggttccctgtgacgttttaatcatcctgaggtacacaaataagtcctaaggatgaaagtacttaaatcaagacttgggctaggaataggtgatgttctgcataggttgattaaagattatagggaatgtaggcttgatgatcgaggactatattaactagccacatgccctggtataggacagggtaagcctaatctcagcttgaccaatactagaaaggttaccacgtaatgggagtggatagatggcgagagtagcgtgtaccctccgtgtcaagaggttggatggtggagtaattgtgctctcggttggcgtgaacccggtctggtcttgagatagcaggggcgggttggcatatgcaagggttaagtgctacacatgtcgtgtggttagggatccccagctgggtacatcgattcggatcgccgttatatcctcggacaatggagacttgatcactgccctgcaatctaagtcatggatggaat

SEQ ID NO: 43749 - DNA, 292 bp, Zea Mays
caatagtgcacaacatgttccacgtgtctccgttaaagaaatgtcttcgagtccccgcgcatgttattgggatttcaggtgtcaatattgaaccagatttaacctacttggaatatcccataaaggtgttggatctaaaggatcgggtcactcgaagaaaagctatcaagttttactagatacagaggaaccaacacccgaaagataaagccacttgggaattagaggagtatttaggtatgaaccaataggggcacacccctgctttgtaggagtaatggggaaataagcc

SEQ ID NO: 43750 - DNA, 434 bp, Zea Mays
cgtgaccacctcaacggggagtaggtttgcaagaaccaaaccttggtaaaacaaatcatcgtgtctcgctctttattcgctcatgatttgttttgtgccctctctcttggactcgtttatatttctaacgctaacccggcttgtagttgtgattaagtttgtaaattttagattcgccctattcacccccctctaggcgactttcaattggtatcagagcccggtgcttcattagagcctaaccgctcgaagtgatgtcgggagatcacgccaagaaagagatggggagcggcgagaagtccatttcaagccacgggaaggctccatcgggagagtcctacaacaaagggaaggggaaggaaaaggaatccccttcacacaagtcatgtcagagcggtgacaagaagaagaagatgaggaaggtggtctactac

SEQ ID NO: 43751 - DNA, 228 bp, Zea Mays
tttctccttcagcgccgacgcacgctcgtcttcctggcagcgcccgctgctcgccccctctgctccatctccctcatggcgccctgctggccgcgctccctcacagccgcgtgctccttccctgctcttcacgatcgcgcctggccagagctccctctagctcacccatggcgtcgaccgctcatctcccttccctcacgacgctcctccctcgacgagcctccatgg

SEQ ID NO: 43752 - DNA, 718 bp, Zea Mays
tgggacgccctcagttcgtcgcgatggtggtccaaatccgacatggtaaagcgatggctcctcccaagaatggtcaaggaggtactggcatcacgatacaacctgtccagattgtcacgagaagcaacgagtgctcgtttttcctgctgcaagcaagaacaacactaagcattcaagcaaggggagcaaaacaggagcagccaagagagtttacctcatgttccatcttctcgaagtcgagctgtgcattcagagaggagttcaaggagcgagcactgtccaagaaagaagaagtttggattaagtcggcctggctctgggaatacttctcttcaatgtcagagcaccaccgagccaaatctgataaagcagcagaagaagagtgcaagatttagaataagccgagtaatgaaagcaaataaggaaactatgagctcactaaccaatatttgacgccctcagatcatctatttgtttttgaagcagtaaagggttccactgcatcagagacaaaacttgaccagggacaagagcaccgtaggatctcagttgggcagtacaccaccaagaacatcctatgattatgaaaagataagcaaaaaagctagtttaccagtgggaacagtaaaaaaggaaaagtcgactcacctgaagattggagaggaacaaaggaagacccaaagcaggaagagttgatacattacttgatgaggggaga

SEQ ID NO: 43753 - DNA, 1780 bp, Zea Mays
caaatattctagaattgaagtacataataatctgtcgtgacaatctactcagtgcctatgccgtgacattccctttctaccaagaagccaactcgtaaaagagacctcaccagataagctacgacagcattttaacatcgtttgaagtaggaacctcacccagattcattgaaccgccagctctgccatcttatccttgccacgtgaagtgacgttcttggcgaccccatcaatctcctcgatttggatgtccacgagcttattgagctgttgctcctgcgtcctgagatcctctggctgctgctcaacaacgcttcctgttagttccagaggcactgccaaggatctcccccttcatgaggtcatatatgcaggccctgaagttgtccatgctcttatgatcctgagagtcgaggcttaggaagatcagaatttcccagcaccggaggaactgtttcttctttatcttcagcttctaacgaacagtctccatcaggtcagccggtggaaccattctcaaactttgggccctttttgacaggttggtctccttcagagacgagacaatagcaccaagtgcaggtttgatcggatcaaacatgagcaaacggaggcagtcaacggatgatctcacatactgcaggtcaagaagcggaaggcgcgggtgcctctcgacgtcgccgacgccgtgatggagccagtacggcggtccggccggctcgccaacctcccggataagcccgtgtaccgcgagaaggttcccgattttgggatgaagattaggaggacgtacggatcggtgagaagagatctgaccaaccgggtgtacgcgaccgacgatgcgaggagctacgccatctctaaggcggaggatctggagcaagagctggactccagcttccccatcttcatcaagcccatgacccagtcccatgtcaccgggggcttctggctgggccttccgattcatttctgccggaagtatctgcccaagcgtgacgagatgatcaccctggtggatgaggatgatgacgagtccgacacgctgtacctcgcaatgaagcgggggctcagtgctggatggagagggtttgccgtccagcagaagctggtggatggagattgcctggtcttccagctgattgagcaaacaaagttcaaggtctacataactagagcaagttcctactacgaaagcgaggactgatgaaactagtagcttgtaatctggtgattggagctcagtgaacattacacaattttcagaatggctgccatgatgttaaccggtttccttcttcatccactcagttatggaggtggctgcgttggacaagcttgcatctgggaatcgctggggtgtcttgaaactttttggtggcagaaagttagctgatagaattgcggaggtcgtggagggaagaggtgagacgacgagggactgggtgccaccgccgaaactgtagtcatcgctggagaggaactggccattgctgttgtagcctgcaggcgcaggaggatgcggcggcacagacaggaggggcagactctgttgtatggttttcgcttagatttttttggtagcagttgtatgttctatatacaaactaccccttcttcttgagaggagagagtgcacaccccttcatcaaattgaatagcacgtatgtgtaccgctatctccagcagcttattagctcctatttcttattttaaactccactgtatacagtacaaaacactatatacatggtcctattggccatagcttagtaaccag

SEQ ID NO: 43754 - DNA, 1180 bp, Zea Mays
gagacacggaacaacccctttctttttcttaattcctcatccactcgccgcacgacgaagagagcggctcccattccccaccacctactcggaccggagcagcagattctcgaagcgaccggtgaaacattctcgcgccaattgtgggggccatgggcgccaacggacacccgccggcgagcaccgtcgcgcagaacggatcccactctggcggaggcggaggagggggagggggagtgaaccctagcaacggcggcacgggggcggctcttcggcacgaccctggtctggcgcgggagtggtcgacggaggagcagaccatcctcgacgagctgctggtcaagtatgcatccgatttacccgttgttcgttatgcaaaagttgcaatgaagttgccagagaaaacagttcgggatgtagccttgcgctgcagatggatgaataaaaaggagagcgccaaaagaaagaaagaggatcacaactcgtctaagaaaagcaaggacaaaaaggtttcagattcttcgtcgaaaccacctgtgcatatggtgggtaggcctaatgttcctccataccctcttccagttcttccaatggacgatgatgaaatctcatccaaagccattggaggtccaacgggtgaaatacttgaaactaatgcccatgttttgggtcaaatttcgtcaaaccttagcaacatgcaggacaatatctctctgctctgccaaactcgcgataatatactcagggtcttgaaagagataaacgatgctccagatatcatgaagcagatgcccccgctacctgtgaagataaacgaggagctcgtcaactcgttgctccctagaccaactgtacctatgcagtagtgatagcaaaatgagcttttaagataggcagctgaaataaaaaaaaaaaggggcagccctggtacttttttgttcgttttgtagctccatcctctcgccttctgtattgtatgtttcgtctggatgcttatgtttgttccaaccttttgcaagtcaggcggttggaacgtgtaccaagttaccaagggctgcttccacataagtatcaggtcctgactctgttttgtaatctatagctgtttggtaatgccatggaatcggagtacactttagggtctgtttggttgggcggtggctgtgaaaaaagttgctgc

SEQ ID NO: 43755 - DNA, 2006 bp, Zea Mays
gagaaaccacgcgtgtcagccagccattggatcaccaccattcgcgctgttcggcgtgcgcacccgatcccgtctccgtgcggctttgtgagtagagaagggaaggggaagcaggagcaggaggggttcgtcatcgcgtggtggccgcgccgctctgttcctccgtcccctcctccttccggctctcgctgtcacatgtcgtgtggtgtgggggcgctctgatccggatggtgcagcgccgcgggatcgcccacggccatgattgatcgcgaacgagcagtaactgcgtgaaatgctataccggagatgccattgtgcacggaggtggtttattttgaggaagagttgggacacagtttggtgaattttgttgtgtgctggtctgagagctagtgctgctgggattgaggaaatgcaagttaataatgaggcaccactagggtgcctcaagccaaatatttctcagtataactctccagagcagataggtggtgttgaagggtttcctgagaataatgaaaaaaggaatgatattgttgctgcggaaaaaatctgggaggcgactccaaaccaaggccttagcaggcccatctaccgacaagaattttatgcctggccatatatttattcagattatcaaatcgtgcgtcagccactaccttatggttttgacaaccaattttatcagataaatagggaccacggtttccctattgagaacagggttcaatatcttccattcaagatgctccctcaagtgcaactggaaaactcgaagaatgcttccaaacatatgttcggccgacgtatcatcaatttttgactgatttttgcaaggagcttactggcatacaacagattcaggtggacagaggtgtgcctctaggtgaagccttactcatgcacgataaatggctagaggacaagggcatcaagaacacaaactttgctattgtgacctggtctaactgggactgccgtataatgctggagtcggaatgcagatttaagagaatcaggaagcccccttattttaacaggtggatcaacttgagggtaccgttccaggaagtgtacggggacgtccgctgcaacctgaaggaggcagtccagctggccgggctcacatgggaggggcgcgctcactgcgggctcgacgacgcccgcaacaccgctcgcctcctggcacttctgatgcaccggggcttcaagttctccatcaccaactcactggtgtggcaacctgccgccgctccgcagtcaaccgccgccacctgccacttctccccggaccgctctccggacccagtcgtcgtccagctccagcaccagcagcagcagcacaagccgaaggaggcgctggggtctcccgcgtcgctggtgaacccatcgtacgccacccccgcgggagggaaggacagagccatgtactgctactgcggggtgctgagccggtggagcgtcgtgcgcaagccgggacccatgcaggggcgctacttcttcgggtgcgggaactggaccgccacccggcgcgccatctgcccgtacttcgcatgggcctcgtgaatagcaaagcaagcagagatctgggctggtgctttaaccgagggaggcgcgccatgttgctgcggctggctgctgcgcctcccagttccgtatatattattattgttattattatggtataataactttgctcgcgagacaatggaggttatctaggtagtgtctctaacctgtcgtactgacttctgtcgatagaagagaatggggccagatgctgcttaggtgtgatctatcctatccatccatggataataaagaagtttgtggattgctgttttattaacttgatggaactcctccgtaggtgtggtttgtgcaacttggattttgaaggcttgtgcgtctgtgagtgtttgatcaaatcgaaggtggtgtttgtttgctgaatgaaatggttatggaaggtgcctattattcctgacaagctctgttcagtgaga

SEQ ID NO: 43756 - DNA, 3979 bp, Zea Mays
gctagtggcaggtggcagcgagtgagaaggtgagctcgcctccctcgcgcctcccattcccccctcgcgcagtcctatcgtaggaatgggatgaggccggggcccctccctccttcctcctcggcgcttctcccgtgacaagcctccattctccagataggggaggatggatttgtccaggttcgcctccggcgtcgggcccagccgcgtggccccgcgggcgggcctgcagatcggcgccgccgagaatggcttccgggcctgctccctgcggcgagcacggcaccgcggcggcgggaacgggaacctcacggccgccgcgtccaccctccgcggccgcggcgggctcttctacctggctcccacgcgccggagtcatcccagtctccggctcttctacctgcttcccacgcgcgggagtcatctcagtctccgcgccagatggcggccgcgctgccagggcaacgactcattggcctacgtcgacggccccttggagaccgctaagggctccggcgaggtcgacgacaacgtgcccaccagctcggggtccgacgacgacaggggcctcgccgacgtcgacggcctcagggagatgctgcagaggtccaggaacgagctggaggtggccagggtcaacagcaccatgttcgaggagaaggcgcagcggatatccgagtcggccatcgcgttcaaggaccgcgccgacggcgcccagagggatgtgtgcgcggccgtagccaccgtgcaggagatcatcagcaaggaggcggacgccaaggaggccgtccagaaggctaccatggcgctgtccatggccgaggcgaggctgcagctggccgcggaggcgctggaggccaaccggggctcggtaggcccgacggaggttagcatcgaaggcatggagcaggaggccctcctgtctgcacaggaagagattaaggattgtcgggcagccctgtcgcggtgcgcggaggagctgagtcgtgtccaggacaagaaaatggagctgcagaaggaggttgataggctgacggatctcgctgggaaggcccagatggatgcgtccaacgccgaagaagatgttgccaatataatggtgctggctgagcaggcggtggctcttgagatggaagcctcacagcgtgtcaacgatgcggaaatggtgctgctgaaagcggagaaggccatagcctcgattgataccgtggtggagctaccgtcacctgctgaagagcagagaagcactgaagaagacagcgtttctgaagggtacgagtatagcagcgatgtcactgatgatgtttatgtaagggatgaggtgtcaagtatcgagcgcctaatggtcggtgacttgactgttcagggctttgagcagcttgaaccatcccgtgaaatatatgatgaagaaagcagtaataagatgtctgttgagcctcagaaagaagctgagtctgattcagataagtcgaaacaagggaagaagcaagaaatggaacgaaaggagcacaccaaggaaccactgagtgctccaaaagcactggtgaagagatcatcccgtttcttctcggcatctttcttctcctccaaagttgatggagagtttacacctacatctgtcttccgagggttaatgaaatcagtgcaaaaacaagctccgaagcttgttgttgggatattgcttctcggtgcaggggcattcttcttaaatagggctgagaagagtcaactatttcagcagcaaggcattgccacaagtattggaaaggtaacctccacaacaaagcccatagttcttgagatacggcgaattccacagagagtaaagaagctaatagagctcttacctcatcaagaggtaaatgaggaagaagcttcacttttcgacatactatacttgcttctggccagtgttatttttgtaccattatttcagaaaatccctggaggcagtcctgttcttggatatcttgctgctggtgtcctcattggtccatatgggctgtccatcatccgtaatgtgcatgagacaaaggcaattgcggaatttggagttgtgttcttactatttaacattggacttgagctttctgtggaaagactaagctcgatgaagaagtatgtctttggcttgggatctgctcagctcattgttttgccgcactaccaggaccagcagcaattgttgttgggagtggcttggctctgtcatccacagctgttgtcttgcaagtattgcaagagcgtggtgaaagtacgtcacgtcatggacgtgctacattttctgtgttattgttccaggatttggctgtggtggttctgttgatattaatacctctcatatcacctaattcttcaaaaggaggggttggtttccaagcaatagcagaagccatgggaatggctgcagtcaaagcagtagctgctataactgccataattgctggaggtcgtctgttgctccggcctatttacaaacaaattgctgaaaatcagaatgctgagatattttcagcaaatacactccttgttatttttggcacaagtcttcttacagcccgggctgggttatcgatggcacttggagcttttttagctggtctgttactagcagaaacagagttctcattgcaggttgagtcagatatagctccctatcgtggtcttctgttaggacttttctttatgacggttggaatgtctattgacccaaagctgcttctgtcaaacttcccagcgatctctgtgatattgagtctcttgataattggaaagacattgttagttacatttgtcggcagggtgtttggggtttctgctatagctgccattcgtgttggcctcttgcttgcacctggtggtgagtttgcttttgttgcctttggagaagctgtcaaccagggtcttctatcacctcaattaacatcgttgctatttttagtcgttggcatttcaatggctctgacaccatggttagctgctggagggcagtttctggcatcaaaatttgagcagcatgatgtgaggagtttattgcccgtggaaagtgagactgacgatttgcaagaccatatcattatattaggctttggacgtgttgggcagatcattgcacaactcctgtcagagcggttaattccttttgttgcacttgatgctggaagtgatcgggttgcagctgggcgtgcacttgatcttccagtgtattttggtgattctggaaagcagagaggtactgcacaaaaattggagctgaaagagcttgtgctgctgcaattactttggatactcctggtgcaaactacagagctgtctgggcgttgaacaaatatttcccaaatgtgaagacatttgttagagcacatgatgttgatcatggtgttaatttggagaaagctggtgcaacggcggttgtccctgagaccttggagccaagtcttcagctagctgctgctgtccttgcacaagcaaaactcccaatgtcagagattcaggaaaccatcaacgagttccggaatcgtcatctgtcagagcttacagagttgtgtgctacgtcaggaagttctcttggctatggattttccagagctacgtccaaatcgaagtctttcacctccgacgacgaaaaccaaacagtggatggcacactagcaatctgatgctgatgagataaaatgggatccccttgctagcgctagattggttgcattgttcagtagataatcctgtttcatgtggaaggagggtggaataattattcatataagagctgtcataaaagttggcgtccatttttgtatgttagacacttagtgcttgtttgagagtaatggaagggactgagagggccaaaatcctttatgccccgtttgtttccttttattttgaggacttggaatctaactattggaataggctatttttttaaaatgtgacattccaccacttccaaagttatcatatgagcctatctctaatt

SEQ ID NO: 43757 - DNA, 1351 bp, Zea Mays
cttcatctctgtctacttcattaggattatgaattcagatttgttcttaacgtcaatgttccttcccttcaatccatagatgtgtctctgtaaaaagagcaaaaggtagtcaatacacttacttttcaaccatcatttttatagtagcaatatgatgatccaagcctccaacaacttcacatcgtcagaatcaaagaacacatagtgcactgtaaaccattttaatacagatgaaactggactttacactctccaaattgcacaagcttctcagccccttaacccacccacctgcataaacatgtacacagaaaaacgccaaggctgttggagaagttcttgctgctcacagcatttctaaaattaagggacctcaccatcagtgatattccaaacatataaaggtggctgacaactctatcaactagcaatgaagaggcccatgtgatgttcttcatggcagcacactccgtgtgttaatggaaaaattctagattttaataatgcgacaattgatcatggatcattattagaaagcatgccatagcgtacgccgagggcgataaataatatggtgcaaaatccagcattaatgtttgggagcccaagattcagcaggctaacaaatttggcttgtcctagctctggatctttgggggttcatttaaggaggatgtcaacagtatagaggctggttgatagaaatagaataatgcgtaccaggccacagggtgctagatgttgtgctctggttttattcagataaacaccaagatggctatcgcgactagcattctcaacatctcaaactacgcaggctcccaatgtgatatcagcatcttgatctagaagggcagcggatttctcgagggactacgacgggatgcctctagatgtacaaccccgactcccacttcttcctcttcctcatgtactggaccgattgcagcctagctggcgcgcttgggctactcaagatcctaatctacaaggtttatgtagatgggagtaccaccgtgacttgggagctaacttggataatgatctcttagttctcaagatcagttccaataacatgtggcactactccagtgatatgaccctccttattataactgccaacatataagttacctttcttacaatatattttagtccgctacagcgcccgatagggtgctattttttctagtttaattaaggctcccttggaacaatggatataaaagtactgtgtccatcctatgatataaggcactgtaaccaatttttagttttgttccatgatataagggcatgtacaagctagatgttataatggtgtttgggatagctccaggttctagctcca

SEQ ID NO: 43758 - DNA, 1201 bp, Zea Mays
ttcaaatcttgaaaatgcttcttgcaatcttattcatatacctttgactattggtgcaaatatggtccaaaatattaaatagaataaagcaatcgattcatatctaattaaattataaattggtttaattccaattaacctatgcacttaccttatgcaaacaagttcaattctgcacttatatatttgctttggtttgtgttggcatcaatcaccaaaaagggggagattgaaagggaaatagggttaaccttttcccagtattaattttggtggttgaatgtccaacacaaatattggactaactagtttgctctatattacatgctctacaggtgcataaaggttcaacacaaaccaaaaaagattgaagatagggttcaaatataaaggagcaagaacccaagtgtgccttggtctggcacaccggactgtctggtgtgtcaccggacagtgtccggtgcaccaggaccgtacagggctgaactggccactctcgggtttcttcaggcgctctccactataattcaccggactgtccggtgtgctaccggactgtccggtgcaccagcggagtaacgactatccagcgcaatggtcgactgcaaaagcgccatgatcagagctacagtgaagaacagtgcgcgcagagtcagagccgtccgtcagaggcgcaccggacactgaacagtgcctgttcggtgcggcaccagactgtccggtgccactagaggacaaagactccaacggtcaaaagctccagaaccctaacggttgggtgacgtggctggcacaccagatagtgtccggtgcgcccatcgacagcagcctgccccaacggttgtttggtggttgagggctataaataccccccaaccaccaccacaccaagcatccaagatttctgagtatcacattcaatacaaggtctctagcattcactcctagacacaattcaaaagatcaaagcctctccaagtcccaaattcaactcaagcacttagtgacttgtgagagagagattttgtgttcttttgagctcttgcctcttggattgccttcttcctttctcatttcttttctcaagtgatttgtaatcgaagcaagagacacctaagtgtgtggtggtccttgcggggtctaagtgactcgtgagattaaggaaaaggctcactcggtccaagtgaccgtttgagagagg

SEQ ID NO: 43759 - DNA, 788 bp, Zea Mays
cttcttaatctcaaattcaactttatcttataggactcagatccaaagtatccttggtttaggagttgtttgcttacacataattgcaaacaaactttcaacccttacattaaggtttctaagttgatccttgagctcaagtattccttccacttgatctccctttgaaaacaaatttgctctaggttctaagtcttacatttaataccttaaattccaagccaacttattacttgctcaagagacgacttctcttcccatgtcttaaacaaagttcttaatctgagccctgtactctaatacacaacaccacacttttgaatcgaaaattttaacctagtaaatgcattctaggtgtaacaagcaagataatgcaaatgtttatgatgacatgtcagagttttagttcacgtaacaccaggggtgttacaaccttcccccctaaaagaaatctcgtcccgagatttaaaactctaggcttagtaacggaaaaggaaatgcgtcactggcttatttccccaatactcctacaaagcaggggtgtgcccctattggttcaaaccaaagacaaactgcacaaaacctaggacttacaagaacctaggaactcaagcacatgttcttccaaatactccttcgattcccatgtggcttcatctttcgtgtgtattggttccactttatctcgtaaaactcgataacttttcttcgagtgacctgatcctgttgatctaacacctttatgggatattgcgaggaggttaaacctggtttatggctaacatctg

SEQ ID NO: 43760 - DNA, 2081 bp, Zea Mays
cacaagatgaaaaattacttgtataaaaaatggttttgaccatcactactcactagtgaacctcgagacctgtttgaagctctaggaagtctacatgaagcaaccactaggatttgcgagcacgtcatagctcaatcatatgtgtaagctagccaaagctaattatagtttgaagcaagctccaatcatagatcaatcaggtgtctaagctggccaaagctattttcaattcagtgataaattgctgcatctaggttttagggcttcaaaggttgacactttgttcttttatagcaagggaagtgtctcaatatttttttggtctatgttgatgacattgtagttgctagctctttataggatgctattgatgctatgctccaagatttgagttcagagattgcatcgaaggacctaagacaactccattacttccttggaattgaggtatagaaaactggtgatggcaattacttgtctcagactaagtacacgttagattcgcttttaggttgaaatgatgaattgcaggcctactttgactttgccagtacttcagaaaagttaagaactggtgaaggtgaactactagagttagaggatgcaacgaggtacaaaagcattattggtgccttgcagtatttgattttgatatggccagacttgagtttttcaatcactaaggtgtgttaattcttgcatgcacccactactgataattggactaaagcgaagatgattcttagttctacggatggaactggatatacaaaactttatgcagaaccctcagctgcaggagtttgaattccagaactttccgacttcttacctccgctgtgctgctcatcgtgttgcacaacattatggcttagagactatagtagcagatagtttagtagaaggctcagttagcaggattgttgcaagaaaaacagcagaaagcaggtatcctgcaatttttttatcagaagttcctagcaatcaagcaagaaatgatcatgaaacagctgagaagcttaagtttgtcatttatcaaaggcccaaagcattccaaaatggaagcgctgattctagaaacaagagtggtgtaccaaaaactgttgatgagagaatagaggaatataataaagcacgagcacgcatcttcaatggttccatttctgcagattctgatgctgcaagtattatgggaactctttctactggcaaagatgaaccagtaaatgttgacccttctgttgatgaaaccaaagtcagcacaatgaacagtcgttccagagttgctgtttttaaggatactgaaaaggatcgtagtgacccagactacgatcgaaactacaaaagtttatgcagtatgacattggttatgtgcaatctcctggcatgtccacaaaccagcatactatgtactttggccagcctgatctaacaatagggtcttctggagctgctgtttatcgacattggccaaccccaacaatgatgtatccccattgctatgataatgttagtccaatgatgtctcaggttcctctgtaccagtctttcaaccatgattaggagattctgcttgctggaaagttgggaacaattctctgttgaacttgctatgttgtgttgtcctatgttaagtggagttcctttagattcgagccgtttttattacaaaaaattgtataaggagtcctaattcgttgaaactatttcgtgaactagtctggaactgtgatgcttgtctaatgtctagttctcgtttgcaatttgctcccggtttatagttagtagtgtgctgcgactggtcttgaaccgtgtcgcgtggtcgtactggtagaaccaggttgctacttgccagcagtcattgctttgattccgattttttatttaacttctttttaatcaagtatttcaaataatctaccctagaagttacttttacatctagttgtgccagaccacaaggacgacaaaataagattgttaaaatatgaaatgtaaatagaatttgccattgtttttcccattgagtttagagttcaaatgtcacaccggtatattccttaaattttcttatattcctc

SEQ ID NO: 43761 - DNA, 465 bp, Zea Mays
tatccagcttcatggattccaatgaatatacaacattatttcaagtctgctccccattttaatactagcaaatagatgaacattgagaagcaaaaaggcctaaggattgtaacagaatcaggaagtctgtcatcagcactaagatggatttctgatgaggaagtaagttttcttccacttgcagaacgtctcttatattcatagtaccaaagtttgtatattggataaagatgtctctatagcatcgaacaattcttgtatttcttatgtcactgctaactttttgtctggatttatttaatgagtacggctgtatattattagtccagtgcaagtgtaaatctaactattttaaaatttctaaaggttagaaaacaagtatatattgttgggaactctgagcctcgtgaaaatattggcgttcttaatgagcttatacatgctcgtgacaaacttgttgttccg

SEQ ID NO: 43762 - DNA, 2070 bp, Zea Mays
ctacaattcgcccccttcccgcacaacgcatcccccttcctcctccccgtcgatggtgttgtcttctctctcaccctaggacaagggagacactatcgctcctctgccaacgatgtcgagtgctcccccacacgtacggagttgttccaaagactcctgtacttcccctgcaagcctcggcggtgaccatcatcgatctatggacctcggtgagtggaggtcacggatctactccaccggtgtcgacgaggtttgtttccccgtcctggagaagcgacgacgcaatagatcttcgtgcactgcagagtcgtctcccccaagccgcaaaggaatcactccactccatcctcgttctttgaatcgatctggtaaaccttggcctttcccccaaatcttcccgctgtccttccaccccctcgcctccataaccccacccactgtactgcttttgtttcacttgctttctgttgaatccatgctacatttgactgtgaattcaggaaatcattaagtataatcgaagtcccgttgatttctggttttgtaggacattatgatctgttttcttgatggtacataaactgagtttttatagttgttagatgcttgttgtattcgtttgtttagttcagactgcagaggttcaacaacagcaggcttagggtatgtgttgatcttaactccattttcattagcccattagaagcaatgtgttattttttggttacattattatcttttggccgtgaatggcaccaatacataattagttggtatgcacagacaactttgtaagcctgacttggtgatagctatggtattatgtaatccaccttagtacacaacactagctgttcatgcatttacttatctgtcatgatatactccaattatcctagtacatctaaataatctggtaaggtatattacatcattcatttgagttgtacactaataaacaaatgttatccatgtgtagagccttgtggtgaaatacttgtcacttgtgtccgtcatcttgtttgttggtttgtttatctatctttttgcaagctcgtccaagagccggccaaaagcaagcaagaagagatgttgatttacttataggttgtagttttaggtgtatctggtggttttgccagaggaactcttagtagtttgagctgagtgaaagcttttaagtttacaattactgaccacaccatgaattacaacgacgtgagcatcagttttgaaggtttagcaaactctggcattttctgactttcatgctgtccatcttccaaatgaagcccttttggaggcaaatctagttttatctgctctatgttatgtcaatactgattttgtatatttgtaagtgctgtggcaatactgattagttatgattattgaaaatatataatttaatggatatgatatacatatttatccttctttaagacactctatttttgtgtgagtgcagtggcaaatgttttcggctgttggccatgaatttatttagtattttatttgatctcatgagattagaacatacatctctagaagctttgaaggacattccttagtcgatatgcccaaatgatggttttcttgaccaggtgtggatctgatttgtaatggcttattaggatttaggccagattgaagaggactatagtctatagatcatatgctcatttcaacatcaagggcaatttgattcaattaagtctaggatgatgattttcagtacctaggatgaagtttcagagctgccacctaatttcagagctgcaagatttctacagaattggaagactatgctaccaaaaaagctttcctaatttacctaagatgaagttcagtattgtttaggacgagtcatatgtttatgtctttgtgtctccaaaaatatttgtacacgtatcaagtggtgattattttaagtttcgctactctatatattggctattttatttcaatgagaaatggtttgtccattgcaaccgtgtggagtttctcatttttattaatggcaaatgctgatgtatattcatttttgttgaataaatggtttatttcttg

SEQ ID NO: 43763 - DNA, 2846 bp, Zea Mays
cgtttctttcttcctccacacgcctgcttgttcacctccatggctgatggctccatctcctcctgtccctaaccccctccggccctcccctcctccaaagccctaaaccccacgtagctcggtgtgtcagtccactcgcccgcccggtcggcgccgcacccatctttcggattctaccctaaaggcatgaccttggtcttccaatctggaaattgagtagcaatcaagtatggctgcaagagcaatcacgaggagaaggaagtatcttttcgaccatgttaaaacacctaacctctcatcttcatcctctactttccaacatggaagaattggttctgaagatgagccaaaaataacactactgtttctggagcaaagctctagggattcaagatctgagaaggagcaatactgtgtgaatttgactaataggaatttggcaggtattgctaatagatttctgcgacgtccagctcatgggatatctctttcatattatggaattggaaagaatgactttgggttgccactgggagctagatctatgctgcagtcagttcgtgcatcatcaactgcaaccgcagggcaacctaagttggatattgatgacgaacagagtggggatcagaagcaaaatagaaagaaaaaagagacatccccagaggaatgtgatcaggctgtggaaggcctaagcactgcaaaagctaaagccaaagctaaacaggtccaagaatctctcaaggctagccaatcggccatgcagaaattctgggcaaggcttttgggtattggtcctgctctgcgagctgtggcttcaatgagcagcattactggttagggacaaagctactatgggcagatgttagaatctcatcaagattactggtgaaacttgctggtggaaaaagcctttctagaagagagaggcaacagctgacacgcacaacagctgatatcttcaggctggtaccatttgctgtgttcatcgttgttcctttcatggagttcttactgccagtgttcctgaagttatttccaaacatgcttccatcaactttccaagacaaaatgaaagaagaggaagcattgaagaggaaactaaaagcaaggatggaatatgcaaagtttttgcaagatacagcaaaagaaatggcaaaggaagtccaaacatcacgtagtggggatataaaacaaactgctgaagatctggacgagtttttgaacaagatcacgcttggtaaatatgtgcaaatatatgggtatccggccttttggtacagatcactacttgaggttcatgcttcgcaaaaaactgcaagacattaagaatgatgataagatgattcaagctgagggtgttgaatctctttctgaagaggagcttcggcaagcctgtcgggaacgtggtcacctaggtctactgtcaactgaagagatgagacagcagctccgagactggttggatctctcattaaatcatgcagtgccatcttcacttctcatactttcaagagcttttactgtatctgggaaagtgaaacctgaggaagctgttgtagcaacactatcttcactaccggatgaagttgtggatacagttggaacagtactgccatctgaagattcagtttctgagaggaggagaaaacttgaatttcttgagatgcaagaagaacttatcaaggaggaagagaaaaggaaggagaaagaagaaaaagcaaaacaagaggaagaggaaaaggcaaagctcaaagaaacgaagggttctgctgaagatttagctttgaaagaaatgattgaggctactgctagggaagaggaactgcgaaaggcaaaacaacacgacagggaaaaactctgtaatatcggccgagcattggcagtgctcgcatctgcatcatctgtaagcaaggagcgtcaggagttcttgggacttgtcaacaaggagatagaactatacaactcaatgcttgaaaaggagggtgcagaagaagctaagagagcatacatagctgctagagaggaatcagaccatcatgctgaggctgctgcagaagaaaaaatttcatcagcacttattgagaaggttgatgctatgctccaagaattagaaaaggagattgatgatgtggatgcacaaattggaaatcgttggcaactgcttgataaggaccatgatggcaaagtgacccctgaagaggtggcggcggcggcagcttatctcaaggacaccatagggaaagaaggcgtgcaagagctcatcagcaacctttctaaagacacagaaggaaaaatccttgttgaagatattgtgaagctagcatcccaaacagaaaacaatgaagaggaagaggaagcacggtagatgggagagtatatggaaacatcacactcgttcagcagtcaaaactcatgtattgaaaggcaatacgtccatttcttgtgtctcttgactgactttgatagtgacttccaattagcaaggtagattttctgtagaaaggctcatgctgacatgcatttagttagccgccgtgttgtgatttggcaggtaaaattgcaaccaaaatttagaccggttgcatggacgtggataatacagatcaattgtatttgttactactatgcaatcccgaaatattggatctgtttcaaattctcaagtaatcattgatggatgctatttattgaccataaagcttacggaatcattattgttttagctgattttatcgtgaccagttctgatcaatctacgtgcctgcgtggttgctgcattattctgcttggagtcaattttcattagttaaaattaaaggctgcgattttgcaccgaaatgtttctg

SEQ ID NO: 43764 - DNA, 1896 bp, Zea Mays
ttttttttggcaaggcaaattttcaaagattcttgttcagttcagatctacagtatccaggcctgtattccaaaagatacagctgtactttggaatcctgaatttgtgcaggcagaggagcttttcaaccagccttttgattatgagaactgtttgagagataataggttttgtggtgttttgaattcttttgtcaagcgaacatccaatggaaagcatgtgagttcattgccaccaaagcccttgaatagtgctgcagccgccgcgcagtctaagcctagtgttactccaaaggagcagtttgttactgctcgacggcaagatttgcctgtaagttcaaagcagggagcagacactaagtccgagaaggataattccacagtattagataaggctggcaatggtcctgttgtcaaagaacaatcagttgatgcccatgcaagcaaaagtaaagctcaaaatggaaaggccatgcctagtaatggtggatcactggctaacatgtggggccgtgcatcagcaaaacctaagcctccaagtaccactaattctacagctgtagcaagtgttgcagctactgctgatgcacaaatttgtgcaaaggaagaagcagatggaaatagcagcgatgatgaacatgggataaagtacaagaggggatccactaatgcaaataacagaaagagaagagcggtatttgattattcggatgatgaggaagatgacaatattgtaagcattgcatctcctgagctaccaaaacagcataccccagaccctgttgttggaattgctgaagacgctgaagtaaatcaaaagaacttggaaactgaacaccatgtaccaaacaatgggaaaggttcctcaacgggggtggattctgacttcacatctgaatgtaaaatcaaaacgatcgatcctatgaacgattctgggattactttaaaagaaaagagcagtgatcctccaatcaatgacaagaagcaggattctgctgctgagcctgcctccacctcaccaaagaggagaaaggttttgaagacacgcatagatgagaggggaagggaagttaccgaggttgtctgggagaatgaagcttctgcagatgacaaggcagagcagaatgtcaacactattgatgcgactgcaagcggggcgactgtcccaagcaaaccgaagcccgcaacaaacgctgacaaaagcaaagctccaagcaaaacagcagcaggcaacaagaaagctgcgaaggctggagccaagcaagggagcattatgtcgttcttcaagaaagcatgagccagcggggggtgcgcatgcaccaaaatgagacaggacttggttaagcaaactggcagtggcagttatacctgaacattgtcagtcaggccggcgagcaagaagggctgctccaagcaggcgaccgttagctgtatcgtttgttttagctagcgtagcgatggttgagtcaagcagcagagagcacgcattctagctgaggtagtactatcttgctgaagatgtacacgtacacatatacaataactgttgtctactgtgctgtctagaagagtaaaggtccaaggtggaagggcggaacagtttgagtacctgtgtctggttggtatggaccccactggaagagagtgcacacaccatcatggtcttggagggtgcgagctgggcaccggtggcgtagcaagccagcaaacggccgacagcaacgtagggagggagttggagagccagagccaccccatcgtatcggtatcgcgactcgtcaacacatgtttgctgttggtcctacaagatgacgattcatataccagcttggagttggagagccagagccacccctgcggccgaccgaagccagcggctaagcagctaaatgcctga

SEQ ID NO: 43765 - DNA, 2007 bp, Zea Mays
aactacactcatgacagcttcaatagcatatctgcattttttcctcgtcctcagaatcttctctctcgcaagatctatgggaggaatacattgatctgatcatgtagtgcatgtgcaatgatacctgtgaaatagaagtcgttttctggggggagctccatcgtcgggaagaggggtcatggctcaccacggacaaaaggtagtttatgatcaagctggtgtgggaggctcaccacggacaaaaggattttgacagctgttgtcaacgaaggcgagaatggtgtactctaagctcagcaatttccagaaaaaatcgttaacttgcaagttagtttcaatatttctagcatattccaatcacagcatcgtccagcgcacacccatccaatttaggggcttcttgttgtgctctcaggccccagtaagaactccaatccctagatctcttttcgtgtgttaagttgtgcttaagaactgctgatgcagacattaggttagggcaaggattttggttaattggaataaggcagcgctttaaccttagttcctcagtttcagctttaacatgtgttgtctccatagtatatgctctgattaacatggcggagaggatttgtgaggtgaattacttgtaagatgttatctaagtggggggacagggaaagggaactgtggctccattgaggatgatagtgttatgaatttcttctcctactttagagctctgttctatattgttcttcggtaaatcggttgttgcattacttataaggtatgcctaatttactgttcttggttaggcaccatagatcctgtcattgtttgagtgcagtaaaccatgtaaattctctcttataagttgtccttttaattatactaataatcgattgtccaaatttgtttagacaccatattattttgtcattatttgagtacagaaagaagtaaactctcttacttataaatgtgctaataattctctatctaaatttaggcacttgaaatataccaactcgcatataagatataaattatattaacgatgccacgccaaatgtgtacttccctaggtcgaaaagcaaggtcctgtcatcacaaactcctagcaaatttagcgatatgtcatgagaacaagacaggacaacattacagcctcagagaggaatgtgtttggggtgagtaatttttttgtgttgtttcctctatccatggccatggaggagcaaaggaggccacctagctcgaagatagcgccagtgtccatgaaggcgtcctctgcaaatgcgacgcttcaaggcatgaagaacagaagccattttcgaagggacaggaaaactgcgctgcaacaagacgtgtggacaagctgaggaagaagttgtggcacgagaagaacgtccactaagctctaaagcaggcgttctcgaggccgctctgcctcgcctccctattgtctcaagtcaatgtccttctttgcttttcgatcaatttcacaagcaagaagcaacctaaccaataatctattgcccttccgaaggactcgatacactttctgatttctgcctcttctgaattgttcctagacattggagcttctggccccgttgtaagtggaaaatccttgtacttaaaggttgcaatgtagtggccccgttgtaacgcacgggcactcacctagtgtcaataagaagtacaagctcttgtctgctggtaaaagaaaaacatcttgactggacagtgacattaatataataaaaacggtgtttggctgctatggaaaaatgccagccgactttcttttaaaaaaaatatgctagccgatgtatttttgttggactctatggaaagatgtttttcttttaccagcagacaagagcttgttcgctcggcttgttcgctgcggctttaatccgactgcggctgcggcttctacagtattttctctctagggattgcagctgcaacagtattttgcagctgcaacagtggtttttgtagtgcagccgaacg

SEQ ID NO: 43766 - DNA, 2356 bp, Zea Mays
aaaccctggttctaccacgcgactaactgagccgccgacgccaggcctccacgccgcatccgcgtgaccgcgcctccgagctccatagccccgggccgccggcgccgggccatcgtgatctcgtccgcctcccagcatcgaccggacctgcccgcagcccgcgcccaggccatcgcgccgccgacccgagcttcgccaggcgcctaggccgctcgcccgcccggccggcaggacgactgggcgagctcctccccgcggaggcggggacggcggacccgcccccaggccgagtcgccgagctccgtcccgcgcgggcgcccccctgcccagtcccagccgccccgctcctgtcccggccaggctcagctccgccctgttccggcctctgtacagcatccaggcacgacgacgcgagacgagatggcaggcctcgaacggcctcgccgccgccctccgccagaccccgtcgccgtgctccggggccaccgcgccgcagtcaacgacgcctgcttccacccctccctccccctcctcttctccggcgcggccgacggggagctcagggcctgggacaccgcgagccaccgcaccgcttcctctgtgtgggctcatgctgggtcggtgggagtgtattctgtcgctgctggtgctggacttggcaataagataatcagggcagggatgggacttgtaaatgttgggcgattgaagaagctgggctttcaaggaagccactacttacaatcaaaacaagtacataccatttctgcaagatgtcactggtgaagtcttcttttacacatgccactgaatctggctctagcagctcagctagtgacgtggaaccacaaatagtgccaactgaaaatgcagaatgccatggtgtaaaccctacaataggcccccaagaacatgatcaatgcactacctctaatgggcataatatgctggcaattgctggtcaagaatcctctcaggttgagctttgggacattacaagtgctagaaagatcgtaaccttgccccaaacatgtagtgccaatgcgacagatcatcctactaagaaaaagggactatgcatggctgtgcaagctttcatcccccatgaatccgcaggctacgtaaatattttgtcaagttatgaagatggaagcactctttggtgggatgtacgaaagcctggattacctttatcttcagtgaagtatcattcagaatcaggtgtgcagctttatccattgctattgatggattttgcaatggtggaatctcaggaggtgctgatgataaagtagtcatgttcacgctcgaccatccaaagggcacatttattcttaggaaagaaatagaactcgagcgaccgggtattgctggcacagcaattcgtccagacaacaagatcgctgcaaccgctggctgggatcacaggattcgagtgtacaactacaacaaaggaaatgctctagccgtgttgaagtatcacagtgcttcgtgcaatgcagtgaccttctcatctgactgcaagctcatggcttcctgctcggcggataccacggttgcgctgtgggacctctatcccccaaaaccccaaagcaaagcggacatcacagaaacagacgaggcctcctgctagctcatgtagtttgggccttcctgataccttctggcagaattttggagcttccgtgcaatgaaaatctgaacttgtcgcaacagtgcaagcgatttattctttttcgtcaaagaaaagagtaagttatgatgtgccttccacagggaaacgcaaacgtatgcatgcaactgttgttaggaacggttctcttgatttctttatttttcattgaaattctactcggtttcgtggaacagttgtagtgtctcaagagcatgaaattgatttaaaggcaaggcagttgaagaactgactctttgaatactcagatgattgatttgaacaaatttctgcaaatttccagtacactgtacacctacatttgctactgttcgatccaatggcagtactgaaccgggatgcagttcttgctgttgtgcatgtccaggaaagagggtatcgtatcccaatgttccatgtagttggggggttctattgctagaaaagaacattagtccttgctgactcggtgactccaatgcgatgcgagcccatgaacgacggtcctaaccttcacgcgcaacagccgcaatcgccgctcgttctagttctttggcgtcggccagccacggccgcctcaacgccgccgtatcttcaacgtcacttgcggcatccgacgacggagccgaggtgccatcgaaggtgccgtcgaacggcgcctcgcagaaggccatcgcggccacg

SEQ ID NO: 43767 - DNA, 2106 bp, Zea Mays
gagaaatctcaatccaaagagagccttctccaccgctcttgctcgtccaaccttctccatcgtctcaccttaggtttcgctccccgccgccgccgccatgatgccgcagcagcagcagcccggcatggcccctcctcctccacaggccgcccccggagcgccgccacactggggcggcatcccgccgcctatggcccctcagcatcagtacgcgccaccaccgacccatcaggccccgcccccgccgcagatgtggggccaggcgcccccgcccccgcccccgcctcaggccgcgtacggtcaggcgcccccgccgccccaggccgcgtatggccaggcgctcccaccaccccaggccgcgtacggccaggcgcctcccccgccacaggccgcctactacggggcggtacccgcgcccgcggcggtggccgcggcacctgtcgggcccagcgaggtcaggacgctctggatcggggatctgcagtactggatggacgataactacatctacgggtgcttcgcatccacgggggaggtgcaaaatgtgaagctaattcgtgacaagcatactggacaacttcagggctatggttttattgaattcataagccgcgctgctgctgaaagagttcttcagacttacaacgggacaatgatgccaaatgttgagttgccattccggttgaattgggctagtgctggtgaaaaacgtgatgacacccccgactatacaatatttgttggtgatttggctgctgatgttacagactatgtattacaagagacatttagggcacattacccttctgtgaagggtgcaaaagttgtaacagacaagctgacaatgcgcacaaagggttatggttttgtgaagtttggtgatcctaatgagcaagctcgtgcaatgactgagatgaatggcatgctatgttcttctaggcctatgcgtattgggcctgctgcaaacaagaaagctactgttgttcaggagaaaggataccaacaggctcttcatataggacttgagctgcgatgcgtgtcttgtgtaatgcatgacctctgttagatttttgttggtggtcttgaccccaatgtcactgaagatatgttgaaacaagttttcaccccttatggggacgtagtccatgttaagattcctgttggcaaaagatgtggttttgttcaatatgctaacagatcttcggcagaggaggcattggtaattctgcaaggcaccttggttggagggcagaatgtgaggctttcatggggtcgcagcccttcaaacaaacaagttcaggactccaaccagtgggccggggctaatgctggatattatggctacggtcaaggctatgaggcctatgggtacccccagtctcaggaccctaatatgtataattatggagctggagcttatgctggctatccaaattaccaacaacaaccagtagcacagcaaccgccgcagcaacagtgagaggtccagtgacgctactgtcatttgggtgattgacgtggaaatatttatgagttgtaagatgagcttcggatgcaagctggattaggtatacagacatgattttcgtagtactcagattctgagttgccctcgtatcagagcttgtggtcccaatagcctgcagctgcagctaaaacgatctattttggtagcggaatgttttatctgcttattttgtaccgtgtcttccgctactgcggcggagccttgataacttgctatgttggatttttcccgagtgttatcgcatgaatgttgtcatttgccttggtgccatgttggtgttggcaaacgagcgagcagaacctgcagatcgagcagtacctgagcaccattttaacatggtttaacctttttagctggctcttgttaggattggtacattttcactgagtagggcacctagccgaaccgctcggttttcggtgttggcattttgagaagttcggtcatccgtgtcggctttctgttttgttaggtttgtatcgtagatagtactatacgtagaggtgtttgaaatagtgatgagataagaaatgagataaaagagttgttggatacagtcttacatcgtacatcgaatc

SEQ ID NO: 43768 - DNA, 1348 bp, Zea Mays
ggttccttctctcccctgagaccaccaacgccggggccggaaaaaagggaagccagagcacagagccagacctggcggcgctggacatccaaaaacgccgccaaggatccttctctctctctctctctctctcttcgcgtccatcgacctgaccgcggaggcgcgtgcttcttcttcccgctctccactgcagtgtcatgaagattgagggaaacttgcatgtttgatatacccagctgctttctgtaacgaaaaactcgtgatcattttgttgaattggtcactgtcagggagggatctacttgtcagtttttggtattaaggctgctggccttcccttgcagggtatctgtagaataaatgggagaagcacactcggatgaattttgccattgccaggggtgtgctggcaagtatgcactactcagagacgaagaaaacccacgattggcaatctttgagaggcggctgccttgctgtggttgtgggataggatggtctacccatactttactgctgcaagtactacaacaaggatcctcgagagcgccctggtctagctgcatcagctgttgcggctctcatcttcacagttctggcaattatcgctctctctgtggcactgataatctgtgtatacaagtagtacccaaagcgaggaaaacgcggtcgctggacctggaattcagaagaaacttgtaatttgagtgatagtagcatgcctttgcagtcatcctacatgcatcagtatcactatagcaagttgttgaattaaatgctgctaccgtcccggttgaccagtcggctgccgttgtttatcaacgaggatgttcattgctctatctcaaactgtgtgctccatgacctgtgatgcttctgaactcctgctgtcttggcgaccttcagaagcaattttctccagtttctcccagaaggagaaaggcaatggcaaagcagcaactagctctagctgggccctctgccatggtgacgcaaaggataacacaagtacgcaacgccgcatgagttggtgtctggctttgtcaagtgtccctctcgcggtgcctgtctcctttcacttgtggagcacggtgagctcgcaaattcgttcactgcaaaagagcctgctgtgacccccctgaaaccaacctctgtcgatgggcgaaacaatcaggcctttagctttcaggaggaaacaagtggcacatttggtatggcttcagcttcggttaccgtccataaaaaaagcgttggccatctaaaaaaacggctcctcgcaaggggcagagaaaccaaaagaataatgttctttatcgaggagccaggatcataaaaattgtggtctttt

SEQ ID NO: 43769 - DNA, 341 bp, Zea Mays
tatatattcatgcactatctcaagttacaaaacactaacatatgctaatatatgtaggacatatttcgagattaatggaagcatttgcacaaaagttatacagcgggcagtattatggctgaagggctatagtcggattgataaatccttttagctggtagaattgttgatgtgcagtgatccttgtttaaccccttgtgggatgcaaattgataggtaaaagaatttcactaaatggttcattgtttgagtgatgcaaattgtacagcacattagcacctaagatatgaggaatcatgcataatacaaggataacaacatatcatgcaaatcttgtggaa

SEQ ID NO: 43770 - DNA, 4210 bp, Zea Mays
atgaaggccgcgcgggggagacgctgggaaagccgcacctccgcgcccccatcaatcccgcccaccaccaagcttgccgcctaccaaacccgccagctccgcgcgagatccgccacagttatgccgcgcgagggagatggcgggatagccgctaggcagatccgcttgctcgcgagggagaggaaggaaggccgctccgggctaagcagatgcaagtcggtgcttgtcaagaacaaccggccatgcccggggttgccagggaagcccgtccacggtgtcgcaccattccccgcctcgaattcggggtctccaagcccggacgccatcagcacactccgtcagcgatttggaaaccgcgcagatccagaccatcaacgcctagggtggaggggattcttgcatgccgcgcagatccaggccattccccgcctagtacatggacaaacctccaatagtgtaccatcagagtttgtgaagtggagggatgtcgtcgttctctgcagcaagccagtgccatcatcgattaggagctttgaactcatgtacaattagtatagtgtctacggtgcaggtccatcgtttgaactccataagatttatcttcctggcaacccacgagtacatgggtgtatccttcttaatataatgagaatggagttttttgcgaatagctcaagcagaggaaatgttagtcggtcactctgtgtggattttttgttcacaaatgattttaaggctgttaagcaattttttagtcggcttctcattcatactgaactgtacatgtgcaacatgtttgcagctgaattttttcatgaccttcacgaagaggtaatggccactgcttctagaggacatggtttattgatccggttgcagcagttagaggcagaattttcaatggttgaaaaggctattgtatctcagacggggcactcaaattacccacatgatgatggattattcttcagatttgatgttgctgctggtgctggagcctcaaaaagaacctgtgaagctggttgctactgttcaacagttcagaattaaaatagttgttactgtacaactgcattattgcaccccttcttgtcgtagcctctacatgaggtgagcccttcttgtcgtagcctctacatgagatcgaagctaactgcctggggagcacaaaagcgaatgaatcatgctaataacaggttgtattttggcagttctcatctggacttccacctagaccaactgcatgacatgtagaataccaaaattataaccaggttgatagatttcagaagtatgctaataacagggaagttattcaaaatataagtaaaaacaagaagcaagactgcttgagcattactgtccataaatggattacattttggatacacaatgaaagcactgctaaccatttaagtattttttgtgcattgatagtattacctttataccagcatatatgagagataatttgggcagtgtaacaccaccgaatgttttttgtattaagattaacacctcaggcatgccatactttgacttcataccaaacacatccataatcttttagtattgacaacataataagaccacatgactgagaaagattgaagttaagctctgcaaccattatttatccatttactgcatcaaaataatggagaaaattcggttcaatgtaccactaggggaactcaaatgtgataaatggtctatgagaaatattttggctcaaatcatatctattatacacctatacaaattttgaatatgcgactgttgtactaatgtgatgttttacgtgcattgtccaaaactgctgtaatgtgatgatttactatgaagcctagctgctattattcccttgttagtagtaatgcatacctcatcatactaattttcattccagacttccagttagacatgtatcatatgcatgcttgtatgagggacacatttcttggtcagttttttcagaaacatgagaggattagtttcttctttaattgtgtacacttggattgcatcttagcaattttatgtctcagtgatagttttcctaataataaaatcaatacaattcatagacaatgctacttgctttgtctgttagaggtgacattcaaattatttcatgttcactggtccaacagatttgggaagcttcagggtattggttatgtaatgtgatgttttactatgaagcctagatgttgttttcagaaacatgatagtttttttttcagaaatacttgttttttagtttgtccaaaactgctgtaatgtgatgttttactatgaaatgtaatgtgatgcatcaaaagaaaattagtatgatgaggtatgcaatactgttgtgatttctgctccattttctccaatttcttcttgttcattgtccaaaactgctggatactggtttaagcatgtgttatcttgatgttctggtgctagggacatgttaaatcattgaatattaagaccgacccgccatatttgctttcggtgagcgacgcgtgcctgtccacggccacgatccgggtctccccgcccaagtagcagagcgacttatcggtcgggcgcgggacgatccggcccccgaagctgcacatcaggcggagctggccccttcgcctcgcccccatccacctccccaattggttctcgttcttcagtgcacgatatcaatccactaaggtgctgggtgcagttaatttcccaaactatatttgggggtgttcagcaaaaactgcgtcaactgcgcccgtgcgggtgagggatcactagaggctggactcgcgctagagatggtcaaggcaaaagcaagggtctgatatgatattgacattcccttagttcctttgcgttactgcgatggtgtgaatggggacgcttcgagtgctcagtattctgaataatttgcaacagtttgataaactgctcagtactctgaattggaattcattgttttcattgcattttcctacattttgctgcccatttaattcaatgtgagtaggagtatcacatttgcatatcttcttcctaccataaagcttaacaagttcggcttgccttcttgcctaaaattgagttacagtatactttcgacagcgcaccttgaatacttgtatgctgtgttctttgtcatctgaactttgtgtgaactgttgtagctatgagcctggaccggcttttgaggaggtcaaagaataagccatgcttgatatatcaccaacagactcgacagaattttggttaattcagtggcctaaagaccagtctgagctagaatatctatccttcatgtacgttaaccccactggttttgctggagtaagaaaaagagttgaagacttgtacaaggcccatgaacaagaattgcaagattacgatactataacaccacatctgcttgatgtagtgttgtgctagcatgctctggtgttccctatatatttcttacacagttttctaactcatttcatatgggatcgtacaattaaccagtctgctacacattttcattagttccaaaatttgatggtggtattttaattcattaggctgatgcctatagggagctttacaattagctgcatgtaacaaggttcttagataactgtaggatccgagataggcagcttggacttcatggaggcgtcgtgggacgagcccgtcgccttgcactttgggattgaggtgagaggaatcaaggactaagtttcacggagggagacaacccctttgccgcatggagaagcttacgaaggcaaggcaacaactcagcggatgtcgttgcacagcaggcagacacctgtgatggagcagtatatagcgttagttctatacatgtattttaatatctatacagagtaatctcagaaataaaaccgagtgtttgacagcgaggccggagcaggcgtccccagcgtccccatacgcgtttctcgcccccaccccgacagaggccgctcacccgtggtgcagatatcgcccttcatcttctctgccttgggcatcgccgtctccatcggcgtcttcgtcctcggcatggcatggtgagtcacagtgtgcctccacaccctgtgtcgccaaatctgcacggcgttggaggctccagtggtgtcctccatggaagagacataggtcaaagggccatacttcatagctatttccccctcgatgtttcaagtgaaaggtgagagca

SEQ ID NO: 43771 - DNA, 1186 bp, Zea Mays
ggccggggtacagtacaggatgcgggggttgacacgcgctgcgaaacgcgcaggggagatggcgttcaacgccggtggtggcgccgtcaactggttcccgggccacatggccgcggcctcccgcgccatccgcgatcgtctcaagctcgccgacctcgtcatcgaggtccgcgacgcccgcattccattatcctcagcaaatgaagaccttcaaccagtgctctcagcaaagaggcgaattcttgctctaaacaagaaggatctagcaaaccccaacataatgaatgattgtatctcaataaatgcacatagctccagttctgttaaccagcttcttggttttgctgagctgaaactaaaggaagcaatctcaaaggagccaacccttctgattatgcttgttggtgtccctaatgttggcaagtctgcactcataaattctattcatagaattgctacttctcgatttccagcgaaagataaaaataaacgggctacagtggggccactgccaggtgttacacaagatattgcagggtataagattgcaactcagcccagtatttatgtgcttgatacacctggtgttcttgtgccaagcataccagatatggagacagggttaaagcttgctttaacaggagctgttaaagactcggtagttggggaagaacgtatagcaaaatatttattatctctttttaacattaaaaagacacctctacactgggagcggttgttgcacagaaaagaagagtggtgtgaagagatatgcagcagtaataaaaaagacaattcattacggaggactcggttgaataactctgatgccgtatatgttcaggatttagtgacggaggtgcagagggcactatgccgtacgttcctgaacttcactggcaacatcgaggaagaaagtgagctggaaaccctcatagacatgcagcttgtggagctccgcaaggtgttcaggataccccataagcctttcgatgaaacgcagggccctacctccaagaagctcctaactctcttcagatcaggaagcttgggccgttcatcctcgacgaccttcctgatggatctgagaaataacctgtttacttgattctttttattttgcactcggcagctgatgttctatgatggaaggcattggtacgagctgatgttcttgcagggagga

SEQ ID NO: 43772 - DNA, 3824 bp, Zea Mays
atgaaggccgcgcgggggagacgctgggaaagccgcacctccgcgcccccatcaatcccgcccaccaccaagcttgccgcctaccaaacccgccagctccgcgcgagatccgccacagttatgccgcgcgagggagatggcgggatagccgctaggcagatccgcttgctcgcgagggagaggaaggaaggccgctccgggctaagcagatgtgcttgtcaagaacaaccggccatgcccggggttgccagggaagcccgtccacggtgtcgcaccattccccgcctcgaattcggggtctccaagcccggacgccatcagcacactccgtcagcgatttggaaaccgcgcagatccagaccatcaacgcctagggtggaggggattcttgcatgccgcgcagatccaggccattccccgcctagtacatggacaaacctccaatagtgtaccatcagagtttgtgaagtggagggatgtcgtcgttctctgcagcaagccagtgccatcatcgattaggagctttgaactcatgtacaattagtatagtgtctacggtgcaggtccatcgtttgaactccataagatttatcttcctggcaacccacgagtacatgggtgtatccttcttaatataatgagaatggagttttttgcgaatagctcaagcagaggaaatgttagtcggtcactctgtgtggattttttgttcacaaatgattttaaggctgttaagcaattttttagtcggcttctcattcatactgaactgtacatgtgcaacatgtttgcagctgaattttttcatgaccttcacgaagaggtaatggccactgcttctagaggacatggtttattgatccggttgcagcagttagaggcagaattttcaatggttgaaaaggctattgtatctcagacggggcactcaaattacccacatgatgatggattattcttcagatttgatgttgctgctggtgctggagcctcaaaaagaacctgtgaagctggttgctactgttcaacagttcagaattaaaatagttgttactgtacaactgcattattgcaccccttcttgtcgtagcctctacatgagatcgaagctaactgcctggggagcacaaaagcgaatgaatcatgctaataacaggttgtattttggcagttctcatctggacttccacctagaccaactgcatgacatgtagaataccaaaattataaccaggttgatagatttcagaagtatgctaataacagggaagttattcaaaatataagtaaaaacaagaagcaagactgcttgagcattactgtccataaatggattacattttggatacacaatgaaagcactgctaaccatttaagtattttttgtgcattgatagtattacctttataccagcatatatgagagataatttgggcagtgtaacaccaccgaatgttttttgtattaagattaacacctcaggcatgccatactttgacttcataccaaacacatccataatcttttagtattgacaacataataagaccacatgactgagaaagattgaagttaagctctgcaaccattatttatccatttactgcatcaaaataatggagaaaattcggttcaatgtaccactaggggaactcaaatgtgataaatggtctatgagaaatattttggctcaaatcatatctattatacacctatacaaattttgaatatgcgactgttgtactaatgtgatgttttacgtgcattgtccaaaactgctgtaatgtgatgatttactatgaagcctagctgctattattcccttgttagtagtaatgcatacctcatcatactaattttcattccagacttccagttagacatgtatcatatgcatgcttgtatgagggacacatttcttggtcagttttttcagaaacatgagaggattagtttcttctttaattgtgtacacttggattgcatcttagcaattttatgtctcagtgatagttttcctaataataaaatcaatacaattcatagacaatgctacttgctttgtctgttagaggtgacattcaaattatttcatgttcactggtccaacagatttgggaagcttcagggtattggttatgtaatgtgatgttttactatgaagcctagatgttgttttcagaaacatgatagtttttttttcagaaatacttgttttttagtttgtccaaaactgctgtaatgtgatgttttactatgaaatgtaatgtgatgcatcaaaagaaaattagtatgatgaggtatgcaatactgttgtgatttctgctccattttctccaatttcttcttgttcattgtccaaaactgctggatactggtttaagcatgtgttatcttgatgttctggtgctagggacatgttaaatcattgaatattaagaccgacccgccatatttgctttcggtgagcgacgcgtgcctgtccacggccacgatccgggtctccccgcccaagtagcagagcgacttatcggtcgggcgcgggacgatccggcccccgaagctgcacatcaggcggagctggccccttcgcctcgcccccatccacctccccaattggttctcgttcttcagtgcacgatatcaatccactaaggtgctgggtgcagttaatttcccaaactatatttgggggtgttcagcaaaaactgcgtcaactgcgcccgtgcgggtgagggatcactagaggctggactcgcgctagagatggtcaaggcaaaagcaagggtctgatatgatattgacattcccttagttcctttgcgttactgcgatggtgtgaatggggacgcttcgagtgctcagtattctgaataatttgcaacagtttgataaactgctcagtactctgaattggaattcattgttttcattgcattttcctacattttgctgcccatttaattcaatgtgagtaggagtatcacatttgcatatcttcttcctaccataaagcttaacaagttcggcttgccttcttgcctaaaattgagttacagtatactttcgacagcgcaccttgaatacttgtatgctgtgttctttgtcatctgaactttgtgtgaactgttgtagctatgagcctggaccggcttttgaggaggtcaaagaataagccatgcttgatatatcaccaacagactcgacagaattttggttaattcagtggcctaaagaccaggatccgagataggcagcttggacttcatggaggcgtcgtgggacgagcccgtcgccttgcactttgggattgaggtgagaggaatcaaggactaagtttcacggagggagacaacccctttgccgcatggagaagcttacgaaggcaaggcaacaactcagcggatgtcgttgcacagcaggcagacacctgtgatggagcagtatatagcgttagttctatacatgtattttaatatctatacagagtaatctcagaaataaaaccgagtgtttgacagcgaggccggagcaggcgtccccagcgtccccatacgcgtttctcgcccccaccccgacagaggccgctcacccgtggtgcagatatcgcccttcatcttctctgccttgggcatcgccgtctccatcggcgtcttcgtcctcggcatggcatggtgagtcacagtgtgcctccacaccctgtgtcgccaaatctgcacggcgttggaggctccagtggtgtcctccatggaagagacataggtcaaagggccatacttcatagctatttccccctcgatgtttcaagtgaaaggtgagagca

SEQ ID NO: 43773 - DNA, 2238 bp, Zea Mays
tttaatgttgtcaaatgcgataagatatttgacgagctacttaaaaatggcaatattaaattaactcatactatccctcctatagatgaattaaagagacgtgcttattgtaagtgacataattctttttctcatgccaccaatgactgtaatgtttttcgtcaacatgtacaatcggccataaatgagggccgattggcttttcaggagatgcaagtggacacacaaccatttcctgttaatacaatagatatcgcatgcaaaaagatcttagttcagcccaaaacgaccgataaaggcaaaagcaaagacatcatcattggcaatcctcgcatgtcaaatatattacagaaggagattgctcgaaaggcttcggacgataaggctaaaaagttcggaggcaccggggggcaggcacaattaatgagccaagcacgacagcctggcctgagcatcacggacggtctgacacatacgtgcggacggtccggtgctcagacagacggtccggctaactctgccggacagtccacctatggccaaaggcatcagcctccacacaaagctttaaaagggaaagagatgcaatggcaaagcacatatggtcggctgatcaaagctgaccctacttttgatcagttgctctccaagaatactaggaagaagactgttctacatggtcggtcaacgaagaaaccccggtcacctactaaaacgaaacgggtaaacaaaacggccctaaaggcgacacaacaagcatcgcctattcatcccatgagaccagggtactttccacccgtttactcatcgtcggtatattatcttgttcaaatatggaatggtatgatgatgaatccatggtacatgtatagtccttttgtctatccagactgggggcacctccattctattctttttgatccattgatcaaatggccatggtcgagaaagatacaatctgaaacggcctttatacattggtgctttattgaatgatctcaatattgaaaagccggtgacttacatcaggtttagttcatatgcttttggttcgtcaaccttcaccaaaaggcagggggcatatgttacggccgattgaaccccccaacaatcgatcaaatcaagtctatttctcgttttttttaccttatgcattaggagtagctctagtttagttctagtttagtatttcaatccccaaattctccgcttctcttttgctctacatcgattagaggagtctaggtcggcctaccgagcctagacaacatctaggatttctcctccccgacggggtccctctcgggagcgagatccaggcaccgccggcaacctttgtcgcccctgcgcacgcgcggaccgtccgacctttaggcgcggaccgtccgaccgtcaggcagggaacccaagcccctattctaggtcgcggactgtccgacccctggccgcggaccgtccgcgcctctgcagagggcaccgacgtcggttctcgttatagtgattggcgccagaaaaggtatcaacagtaccctccgtggcaagaggctggacggtggagtaattgtgctctcgtttggtgtgaacccgatctggtcttgagatagctgggggcgggttggcatatgcaggggttaagtgctacatatgtcgtgtggttagggatcccgagctgggtaaatcgattcagatcgtcgttatatcctcagataatggagacttgatcactgccctgcaatctaagtcatggatggaatcataataagcaaaattcatgttgtattgattaatgtgatgatgaaattagactaaatgcaaacaaggtttattaatacttaatctagcattaaaatgttgaaagtaaggactcattttagtaagcttttctgcaaactattaaagttgattcttgctaaaagcctttccttgattcccaaatccagcatatccttgagagtttttttccttagtcgggtaagacttgcgaaagtacactccgtactcagggttttcgaacccatgttgttgtaggtgatgaggagtattctagttcctgtggctggagggcgcatccagttctggaggaggactagctaggtttatgtatgcgctttggagggttcttaccttcctgctattgtaataagttatgcactttgagtatctcaagacttgtaatatttataatttttttatgttgtaaaacttgagttttggaaatataaagtatgtttgtaaagt

SEQ ID NO: 43774 - DNA, 1144 bp, Zea Mays
caaggtcatgccgaaactcatgagtactcgattttgatccgatccgacctctacgtttgaaacaggtggaccgagagatccagctgccaagttattgccgcgggcacggccgcacggccaatcccaggagcccaccgaaacgcccaacgatcccctcccggcctgccgcccgtccggacccgagccggcctcgcattcggcgccgcgccagtcgcgcctccgcctccgtcgccgcctgctccggcgagcgggacccagctcgcctctactcccctactgcgaggtacacgatggagggagccggaagagatgccaaccctttgagcagttaccgaattggcagaaccctgggaactggatcgttcggtaaagtgaagatcgcggaacatatattgactggccataaggtggcaatcaagatcatcaatcgcctgaagatcagaagcttgaaaatggaaaagaaagtgaagagagaaatcaagttactgagattattgatgcatccttatatcatacgcctttatgaggtggtacatacacctgctgatatttatgtggttatggagtatgttaaaaaaggagagttgtttgattacatcgttgagaagggaagactacatgaacaagaagcatgtcgtttatttcagcagatcatatctggtgttgaatattgccataggaagatggttgttcactgtggtttaaagctagacaatgttcttttggattcaagacgcaatgttaaaattgttaattttagctcaagtaatgttatgcgtgatggccactttcttaagacgacctgtggtagctcgatttatgcagcacctgagatcatatctagtaagctatatgttggtcctgatgttgatgtctggagctgtggcgttattctttatgctcttctttgtggcactctcccatttgatgatgagaacattctagagcttttttacaaaataaagggtggaatatatatccttcctagtcatttgtcactttcagcgagggacttgatttcccgaatgctggttgttgatccaatgaaaaggattacaatacatggaatccgtgaacatgtgtggtttaagattcaacttccacgctatttggctgtgccgcctccagacacagcacaacaagt

SEQ ID NO: 43775 - DNA, 3566 bp, Zea Mays
taaacatgcatgaaaaatgtgtgtatcaactataaagatatcaaatccttctcggctctctcctctcccctttcatgccaagcacttaaacctaagagtcttgtggatggatggtagcaatcatgttaggaactaaggtatgtcgagctgttgaactggtctcaatgtctctcaatggctaatactataattgtcgcctttctagtaatagaggacggagaagacttactcatggttatctgctactatgggtctgatgacgtgatcgaggaaggtaatgtcttgatggtactagtcataggggttgtaggagttagaaatggtgaagactctcttttgacctaactcatgtggcttaagcgccctaaggagttagagcatcatagggtggggcaggacacttaatggtgagttgttgagatacacccatggcctctagtgccactccctatcttggtgaattggtgagttgttgagatacacccatggcctctagtgccactccctgtcttggtggagtgaaaactaccatcatgggtggggcaggacacttaatgataaaggccctaaactaaagtccttcaaactatatatctagcctagtatttctaaagaggggcaaggactgcaatctagactggtggtactaaggaaagaactcatgtatgttgaaggatatgctagaaatatgtaaaattgaaggccctatctattgctagatctagtcttatcaaggtgaaatctactcaaacatgttaaacgtcctcttaatctagtgttcttagaggttggcctaatgtctctgctctaccttgacctcttcatcatagtgttcctactatactagaagcctttactgctttgccctccactaccatcttctattgacctacattcatctacactaaaaggtcagatatcctttcattagatgatggtgggacaaatggtggtatggtgctagattcaccaaccttagagttgtgtgaacatggtggcaacaaaagttaagatggtggcacaaggtagtccttgtatgagctttcatcgatcacatcgctgctacaaaagctgatctaactctacctgctcaacctgacaaatagccttatcatgtgtctgctactatctatgttgctcatctaaaatcacttgacccctctagctaagtgttatagctcatgggcacgcatccactatgttggtcaacatataatacccaaaagccttgggagagttctcatgtgttaatgccaattctagatgtgaaattagctaagagaacatataggataagtagtgggcgtggggaagctgacgatgagccttaaatccatctggcactagatcctcaatctcacataatatggagtcaccaacatcatactctatgtgagagatgagtgcatctagaagccactattttatgttgttgagagactcatcgtacacaacttttagtagtagtatcctcttcataagtgcatgaaggatcctcactacaggtggaatgttcactacagctctatatgattgctcaacaaacaactagtgagatagagaggttacatgggttgtagggggtatcacttgttgtgtagtctattgggtgggtcagcgaaaccataataaacattatgtatccttgttagtgacactataaaatcagataactctgatgtccttggcatagatcctatagtggtacccttagaatatgaaccaaaaccacttgtagtcctagtcaatccaatggtgactgagagatcccacatgatagaggaacttaatgttcttatcatcaccgcattggcaattttcttaactagtctatgcaaatcctaactacaaaagcaagataatttaacatggttgtaagttaaaatgcattcaaagggacaacacaagctcatattttagtgaaattacttagatcaagaacattgagcttgttcctcaacttaaaaatgcatgcctcatctaaaggttttgttttagatatctataattgatctgttgtcctcactcctagtaaaatgtcaccttttgctacatgatctctaaggaactgatggtggatatctttgtgcatggtgcgagagtaatgaattgggttgttggcaagttttacgatgcattattatcacccaaaaggggtaacttttcaagaattacaccacaatctagaaggttttgcttcatgtaaagaatttatgcatgacaggacgcaaaggtaaactgtggattattggtatagctattccactggtagcaattctgctatgttcaacctttacctttctgtggctgaggaggccaaagaaaggagtgctgagttcgcaggacagagctggtgctaataggattgaagaaaacgccttggtttggacaattgaacagaagagttcagagtttactctttttgacctttctgagttactggaggccacaaaatcctttgcagaagaaaatagacttggacagggaggtttcggccctgtgtacaaggggcaattatcagatggtcaggaaattgcagttaaaaggcttgcttcgcattcaggacagggtttcacggagttcaggaatgaagttgaacttatagctaagctacaacacacaaatttggttaggctcttgggatgctgcattcaagccgaggaaaaaattttggtgtatgaatatttgccgaataaaagcctggacttctttatctttgatgaaagacaaagcagtttgcttaattggtataaacggcgtgccataattgaaggcgtagcgcaaggtctcctgtacctgcacaagcactctcggctgcgcgtggtacatagagaccttaaagctagtaacattctcttggaccaggatatggaccctaaaatttcagattttgggttggcaagaatctgtagctccaatgatgctgaaggaaacacaaagagggtagtcggaacatatggctacatgtctccggagtatgcctctgaaggcatctactcggtcaaatctgatgtgttcagctttggtgttctacttcttgagatccttagcgcgaaaaggaattcaggttttcaccaatatggagactttcttaaccttctcggatatctgtacagatcatggaggcttgatgagctttctgctgttctgcagacatggcacctgtgggagataggaagatggcttgatcttgtagaagcatccatttcgaaagagatgcatgaagcagaggctaggcggtacattaacatcgcactaatgtgcgtccaagaaaatgcggacgatcggcccaccatgtccgacgtagttgctgcgctaaatagtgagagtgtggttctacctgagccaaagcatccggcttacttcaacctcagagtatctaaatctgtggaatcagcagttgttgttgaggcgtgcagtctgaatgagatgaccatcacccaagatccccaaggcagataggtcttccacctgatttcgtttcgctggtcattattgtacatgataatgtggacgtgaatggctatccttgttccagctttgaaactaatcattatggtcttcat

SEQ ID NO: 43776 - DNA, 1907 bp, Zea Mays
ccccgctcgagcttcccgtcgctgctgacttcgatttttttcgtgtccatttttctgttttttgtcatgtttgtctcggctctggagttcggataggcggtgtgcattctgctgcagaacactgaggaatggctgaagaggatgtccagccccttgtgtgcgacaatggcactggaatggttaaggcaggtttcgctggtgacgacgcgccgagggcagtctttcccagcatcgtaggcaggccacgccacactggcgtgatggtgggcatgggccaaaaggatgcatacgtgggcgacgaagcccagtccaagagaggcattctgacgctcaagtacccaatcgagcacggcattgtgggcaactgggatgacatggagaagatctggcaccacaccttctacaacgagctccgtgtggcgcctgaggagcaccctatactgctgaccgaggctcctctgaaccccaaggccaacagggagaagatgacccagatcatgtttgagacgttcagctgcccggcaatgtatgtgtccatccaggccgttctttccctgtacgccagtggacgaacgactggtattgtgctcgactctggtgacggcgtgagccacactgtccccatctacgaagggtacacgcttcctcatgctattattcgattggaccttgccggtcgtgacctcaccgacaacctgatgaagatcctcaccgagaggggttactccttcaccacgacagccgagcgagagattgtcagggacatcaaggaaaaacttgcctacgttgcacttgattacgagcaggagctggagacggccaggaccagctccaccgtcgagaagagctacgagctgcccgatggccaggtcatcacaatcggcgcagaaaggtttaggtgccctgaggtgctattccagccatccttcattggcatggaatctcctggcatccatgaagccacgtacaactccatcatgaagtgcgacgtcgatatcagaaaggacctgtacggtaatgttgtcctcagtggtggctccactatgttccctggcatcggtgaccgcatgagcaaggagatcactgcgcttgcccccagcagcatgaaggtgaaggtggttgctccgccggagaggaagtacagcgtttggattggtggctccattctggcctctctcagtaccttccagcagatgtggatctccaaggaagagtatgatgaatctggtccaggcatcgtccacatgaagtgtttctgaattctggagctgtatatctgttatttacttatattttcagttagttgggatgctagattgtcccatggtttctctagcattcttggttctttctaaatcattgaagggctgttggccatgaagcattgtgaaagatggttaggtcgactgatgtactacatgaagaaacatgtgtaacttcagtagtacggatggtcaggtcagtgttttttttttcaagaccaccagatcagtgcgttcctgatatgcgcgatctgggtttctacacgacgcaagggtgccggctgtcgcgtgtcgcccatgcagtttgagtctttgagagttcagttggtttatgcacttctgtacgtggtcatggaatcattcgcatttgcgccccgccgtggcgtggttgttgatttatacttggatatgtttgttttattccttctcatgaaacagctgttgttgtctctaagtgctagtttgggagatataaacccggagaggattggaggggctaaattacccttcttattcaattttgagtaagaaggggaatttaactccttcaattccttccggttttatggctctcaaactagtcctaaaggggtaaattgtttatccttcaggacttgtttgggtaatcttggattggagtggatt

SEQ ID NO: 43777 - DNA, 606 bp, Zea Mays
tggttgcctgaatgcgggaggcgtgggctgcatgatcaggttggctgacgccactgttgcttgcttggtattgcaatgtggtggtggtggtggtctggaattagtgaattgcatgtcagcgatacaataacacagacaggacaggagatggattgtttgataaatttattcctgcgccggtctgcctcgacggctcatatctatacgcccgcttgtgtatgtataagccctttttcaaaacgtggcagattggctactttttgatgagatgtagtagtattatctgtaggagcaacagctgtagtattatatgcattcgtgtttgtgcaatgcaatgcacatcaaaacccttgtgcggttgtgcctggccatctgaagggacgacttatttgttcatgtcgctggtcttcgttttgctggcccagtgcccagtggcctacgaggctgtgctgtgttaaggattggacatctgaagggttcttttgctcacggcttgctgtgctgttaaggtctggacatctgagatgacctacgaggctgctgttatgcagggtagggatgtttggtgcttcaattaggttggtaccgacgaccccgacccccgaa

SEQ ID NO: 43778 - DNA, 572 bp, Zea Mays
gtggtgctctacgagaagcacgaggcgaagaaggaccccgagcacgcgcacaggcacaagatcgaggaggagctcgccgccacggcggccgtgggcgccggcggctacgccttccacgagcaccacgagaaaaagaaggaccacaaggcgccgaggaggcccccggcggcgagaagaagcaccaccacctcttcggctgatgacctggccggcgagagcaccggtccgtcaccgaccgaccgaccgccgcgccgcgccgcctgttttcgttgagtgcatgcctgcatgcatgtttgacgtacgattaacaataagtcccttccggacctctgcgagtgagactgagatgtggggccgcgcgcgtcgaggtgttcctgtacgcgcttgattttctctgcatgtataattgcgttgaataagcgagagccatgtgtgggtgtggctcctcccctcccaaagtcaagcccttatgtgtacctgtggttctttgtactggtatatggagatgatgtgttaatgtaacacgattttatttatcacctcatccaaattatttgttactttaccctcgt

SEQ ID NO: 43779 - DNA, 298 bp, Zea Mays
ctttgttataagtgttgcatcctttttagtgtagattatcatcttatactatttatactcatgctcatgcatgtggaccgtgcatttcatgaggtacgctagttgatcacgtgacacggaagacgaccccaagtcgacctcaggataatgcagagattggacatctccgcaagacgacgtcgtcagtcggaccaacctgaagatggacagacgaagcaagtatcagaacaaaggctgatcgtcaagtgatcgacgtctaacaaacactaacctagtgtttcttccaggcaagctctgc

SEQ ID NO: 43780 - DNA, 2731 bp, Zea Mays
gttcgaagcaggctctccgcatttgcgggggcaaagcttgcctcgatttatcccttcctagacccgactcacgtgggagcatccgacactgcaaatgtggagaggctacttcgaacccgcgacctgatgactttgagatagctttcaccactacccttggtctatccttttttggctctgcgactgggtgtttgaagaatgccatatgtttttccttgagagcaacttagggcataataggcattctcgcaatgatgtttccacaaagcacaaaagtggctatgaaccttctgacacagaaactgagtggcatgaaagcccttggaacgatggagcattggcatcgaataggaatcgtcttcctaaagattctggtaggaatgaccaagttggtactaggaggcaaaacatatctcctaactgcacactagattatcatgctgagaaaacttcaaacttgagatacagtcgtactcctccaagggtcacagaacaaaggcgccatccttctccatttacagctgtgaagaatgaatcacgtaagaagagcagccggacgcctcccagatttcgttcttctatggaaacctttagtagatcatcaataaaggcaaggttttcccgcaatcgttcaatttctgcaccaaaattacggccacaagagaaggaacatcctgctagagctcctgcatttcctggcagtaaccctgtctcaacacatccagaaagagaagttgctgataatatagaagaagattcacatgcagaaaactgttcccaggagatcagtgaattgattgcaaatggcaagttacctaattccagatataatgagtatgcatttacgagcacagagtcgatacctgcaggtgatatcttcttctcccgtgattgcagggctccacttgagaaaacgtcaacaaagcttaacaatattgaccaatcatttacctctgactcaaatgtccatactgagaatgatggcactgttactcaaagtaatttgggccagccatcacaatttgtttcagctcggacaggtctttcgcgcacaactacgaaatccagttatgctactggtcgccattgccagatgagcaccaccaccactttgagtagcccatatagcaatggaaaattaagtggggagagtggaaagtttagtgaaatcactgggaaactagttggaggcgtcatgaaattcacatccagcaaggtgcaaaacgatacgtggcttccatgtatgactgggaaggcatgtcgaaaatcaagaacatcaaacaacaaaaaaaatgatgaatctgaatcaagtttcattcagaaggcacttgtcattgagaagattagacttttttgggctgataaatatcgtccacaaaatttaaatggatttacttgccacagggagcaagtccagcagcttaaacaatcgaattttgcccacatattattttcaaaggtcctccaggatcaggaaagagatctttgtgcagagctgtcctcactgaaatttttggcgattcatctttgaatgtctctcactatttgaagagctgcaatggccaggggtccatatctgtgcctattctcgtcccagtttcatccagcaataaccatgtggaactccacatgaggtttcaatcgaagaacgctagatatgctttgatgactctagcaaatgaaatgtctgataagtgtaaaatcactgagccaattgtgagaaagagctttaaagtgattgttctctatgatgttgataaagtcagccaaaataaccagcgtctgataaaatggataatagattcctcctctgatgcatgcaagataataatgacttgccaggatgaatctaatctcctagattctataaagagtcgttgcaagattatttcaattggtgtgcccagtacacgtgaggtggtagatatccttacctatacatcaagaaaagagagttttgatcttcctacaagttttgctactaccattgcgaatcaatccaggaagaacttgagggaggctatattggctctagaggcatgtaaagccaacaattatcccttcattgatggacaagctataccactaggatgggaggaggttctggaggaacttgcagtagaaattttggatgatcctgcccctaaaaggttatttctggcacgaggcaagctccaaaaactcctggtggaatttgtacctcctaaactaatactccagaagctcgtagaactcttcttgaagggaattcagactggcgtgaagagggaagtctactattggcatgcctactatgacaagaggttgcctgttggtgcaagtgctctgcttaaattggaagaattcgttgccaagttcatgagcatccaccggaagagcatgtcgcatgagcccaagattcctgaggtgccgcagtgaaacctggcagagcatgtcctcgtgcggttcggccgtgtcgaaatcccgtttgtggtggtggtttttctgttttatataattcaccttacgtgatcaactgtcatggtccatgtttttcttgttctatgtatatactatatggtacacatatatgctactactgagtacacaaatatgtccagccgaataaatgtctatacggctataccatctgtgttggcaatatcttgttgcaaaagtttgggagtggacgtataataatcttttgatttgaggtacgtgaattttggctatcagtttgttcttttctttt

SEQ ID NO: 43781 - DNA, 379 bp, Zea Mays
ttcttgaatcagcgaagatgataaagaactgttcaggaaaatgcttgacaagttgatactgactgtgatgaagaaaagaatccctcagcatatcccccgctgccagcacgtccacctcatgactgttcccatcaaaggagcaaaccactgccttactgattaactcatccctacgtcgatggatcaaaccagtcgcgatgatggcacagacagctcttgcaggccgagcccttgggtctccggggtagcgagcatccattgtctgaccaccctggacagcctggaggtaagacttccgttgcagcaaagaagaagtgggtggtgcttgcacaggatgcaactccagccccttttgaagagggcctgagaaaggtttcag

SEQ ID NO: 43782 - DNA, 2164 bp, Zea Mays
caccttcttgcaattgcagccgccagccggtagtggcagtacggcaatttcagcctcagctgaaggtcactgtctctcttccatctttttctctctcaacaaaactccctgaattgcaaactccaccaaaacaaactccaagcccatccatcaccagtcctctgtcccctccccgaccgcaacgatctgctttgcatcttccccttcctccaattccagtcccatgcgtaatcgtctttcggaattgaatctctccatgtcatggcgctctgagcaagtacagctgcagtcagtgagagaaatgtaggcaccacaaatcggtccagcaaatccctgctcgtgctctaccaaaaaatccagtctttttccagcccaaatccgcctcttccgctgctgccataaagtccggactttacgaggctttcacgacgtgcgagatttctgttatcgatctccacgaacccgatagcctgccataaagtctgcacagacgcttcgcattgcttcaaccaaagatccatccaaactctgcaccccagaaagctagtacgatctcggggggacatgaagcgcctgcagtgcttcaagcagagcagcggcggcggcaatggtggcgggccggggaagcgcctggagcggcggctgtcgctgggcgagtacaagaaggcagtgtcgtggtccaagtacctcgtagcgccgccgggggctaggatccggagcggcggcgaggagctgtggagcgccgacctgtccaagctggagatccggggcaagtttgcgtcaggccggcacagccgcgtctactccggcaggtacaccggccgcgaggtggccatcaagatggtcagtcagccggaggaggacgccgcgctcgccgctgagctagagcgccagttcgcctccgaggtcgcgctcctacttcgcctccaccacccaaacatcatctcgcatgcaagaaaccaccagtattctgcatcatcactgagttcatggcagggggctcccttaggaagtatctacatcagcaggagcctcactcagttcccctcaacctagtgctgaaattagctctagatatcgctcgcggaatgagctacctacactcccagggtatactccatagagacctgaaatcagagaacatacttctgggagaagatatgtcagtcaaagtcgcagatttcgggatttcatgcttggaatcacagtgtggaagtggcaaggggtttacaggaacctacaggtggatggctccggagatgatcaaagaggaacatcatactaggaaagtggacgtgtacagctttggaatcgtcatgtgggagatcttgactgctttggtcccgttcagcgacatgactccagagcaggctgctgttgctgttgccctgaagaatgcaaggccgccactgcctgcttcatgccctgtggcaataagccacctgatcatgcagtgctgggcgaccaaccctgacaaaagacctcagtttgatgacatcgtggcgatcctcgagagctacaaggaagcccttgatgaggacccgtcgttcttcttgtcgtatataccacctccaccggaccacggccaccaccaccatcatcagagccttctccggtgcttccctcgctccatgcgaaggtctgcatctctgaaagtatgatcaggccgggatgttgcctctgctcatcgatgctgtgtacaatatgcaccccctttcgactttctttgttttctatgcgcgcgtcggccctctattatgcggcattagcatgctatatgagctagtttatgctctcattttctccttgttggttaattatttccgtcattgatgccttgagtaatgtagagatgacaggcaggcatgcagcttccggttattatctatggatgccatttgcttttggtgatgggaaacatgaaagagccccagtaaatgtaatataattaagctctccattcaattgtgtttgtgcttcttcctttcggctgttatcatactcgtcgcaaatgcgtaggcaggcagtagagtttgaatcggttggtgttttgtttctaaaatggaaaacttgaactgaaaacagtttgtgctttatagtatgtctgccttttggtcaacaacaaaagtcccctccaaaagacaaaaggatttggcaaaatagt

SEQ ID NO: 43783 - DNA, 557 bp, Zea Mays
agattgttcttctaacagtttcaagctgtcatagcctgaattagatgttggagcacatgcagcaatctccccccaaattcctccccatgaccctactgagaccatagcttatagtgtatttttttatagttttttctttttttagagctgtcatagcctacaaactttagaagaaaaatatgcccctttcttgtcaaaaccattttgtgactgcaaccaactttaatatatgtgcactgcagatcaccacccttctcgcggctattccaatcatcggctacgcgtgcatcctcgacatcgggtgggagtgggccggcgtcatgtggatatacaacgtcgtcaccttcctgccaatggacatgttcaagctagccatctgatacgcgctgagcggcaaggcgtggggcacgctattggagcacaagatcgccttcaccgccaagggtctggactgcatgtgatggctggttcaccatcgtcgtatttgaccacgccaagtgggtcgtctcgtcgtcgcttggttctttcagcagcaatggcctcactatttcttctaa

SEQ ID NO: 43784 - DNA, 639 bp, Zea Mays
agaacaagcccactcctcagagcccattgggcctgtaccgaccccgaacaaacaagaagtaggtcccgccagggcctcatccagaaacacaacacagcccattggtgcgttggctaagaatacagcccaggtatgctacgcaggctgcctcggcgaggtgtccggcgaacggttcaacgatgccgtgtggtgccatgccacagcctgatccgcgagcatattccactcccggtccacgccttgcacaatcaatcaatcatcatcatctatgtgtaaatatatatatgtgcatgcattactattactattcttaacacaatgggcgatgttcctatatatatattctacgtgccccagcgtcagaactaataaaccatccatttctttgtaccagtcatcaactgcatgagcgaggacatcttttggtacggtggagatggaggacaatcgcccaatctgttacaagtgtgttgtgcttgtgcctaggcaagctggccttgctagtaaagatcggatactagttgtttcaaaagtatgatctgcactatagagtgtactgttcgcagagtttgtttgaatatgagtatgagtaagctgctgaaggtagtcttagggattgttgctgaaggtagtcttagg

SEQ ID NO: 43785 - DNA, 543 bp, Zea Mays
gcaggtgcttttgcagtcgaccgttggcgcgtgagagtcgttgctccgctggctcaccggacagtccggtggcacaccggatagttcggtgaattatagcggagcgtgccctagaatttcctgagagtggttggtttggaattgtatggcctggtgcatcggacactgtccagtggcacaccggacagtccggtgcgccattttttcagcacactcaagtccatttgctccaaatgaattgtgaccccctaactgatttctttcttggtttgtgttgaaccttatgcacctgtaatacatgaattctagacaaactagttagtccacttgtttgcgttggtcgtcaaccaccaaaattaattataggaaatggttaacccaatttccctttcaatctccccctttttggtgattgatgccaacacaaaccaaagcaaatgtaaagtgcagaaatgtaactagtttgcaattgagatgacttgtgcataggttacttagaattgaaccaattgaaagtatcactaagaatgagtaagagtgaat

SEQ ID NO: 43786 - DNA, 349 bp, Zea Mays
tttgccacctccttgtgttttaaaatctttatcaccttgtttgatgcattaggtgataggagttgtgtgctaaaccgttgatgcatttccttccttgaaaattgattatccttccttgatccccttttatgaaaaagattttgatgcttagccttgctttagaaaaacaaaatgttttgtttttaaaacaaaggtggtgcttcagtgcgtgggaatgttttcaaaaataaaacttgatggtgaatccatcatggccgtgatgggttcaacatcggaaaagatgtacctctgccaggtaccaaactttgggaattgaaatgattaagctgagaccgggcgagtgacttgc

SEQ ID NO: 43787 - DNA, 809 bp, Zea Mays
acatagaatttgtttcaaggaaggagtccacggaagatcacacatcggagtagttccacaatggatcatgactagagacttcgataccagcacgcgccaagcagcaaaatcatgtgtgcgcattctcaggaggccctcagtttcgccgcggtaccataagtccttaaccccgaccccattacaaaactggcacccataatgaatctcacgtggtaagaacaatttgtgcagagataacatactgatataacctcgtaacggattatgactactaactatgatactagcgtgtaacgagcagcacaaccatgtgtatgcatccactggaggccctcggttttaacgcgatgtcaccgattttagtcataacaccattactagacgtaaccaataagaaatctcacacaacacaaatagactggtcaaggatgacaatttacaaagagttactccacctgtaagaagggttacaagtagagagtcaaagagattatggcccgatgaaatgaacaaggcacgaccataacctaaacttgatgaaaggagtacgatgcgagactgttaattcagccccaagcatatttctatgcccatcgcagagattacaaggtcaaggattaagttgatatgccttcgatgaacataaggaaaccaaggcatcaactgaacaaaggaatggttctggaaggagacatgacttgatatccttgttttaagcttaggtacattttatgtctaataaggaaattgtctacccatttaattgtatgggctttgtcatggagtaataatggacaattcaaatttgg

SEQ ID NO: 43788 - DNA, 1664 bp, Zea Mays
atcgccatccaccactggtcggtccactccaccgcccgtcccccgtgccgttccgtgcgtcgcatgactgtcgccgcactccgcttgccgccgcccgccgcagctccctccggccgcgcgcgcctcgtgggggccgccgcgcaccgctgctcccccaggtgaggtgaggtcagtggtggattgagaagggaggctatcggattcgggaggcgtttgggtggtggtgctcccagctgctgctgacgcggagcggccggacgaggacgacggcggcggcggcgtacccgaagatggcgcggccgccgatcctatccgtcgcgctgccgtctgacaccggccgtgtgctcagcatccagtcccacaccgtccaggggtatgttggcaacaaatcggccgtctttcccctgcagctccttggctttgatgtggatccaataaactctgtacagttttctaatcatacaggatacccaacatttagaggtcaggttcttaatggcaaacagctctgggaccttattgaaggactggaggaaaatcagttgcttcattatacccatttattaacaggttatataggctcagtttcctttttagatactgtgctacaagttgttgagaaattgcgatcagttaatcctgatcttgtatatgtttgtgacccagttctaggtgatgaaggaaaactatatgttcctcaggagctaatatctgtttatcaacagaaggttgttccagttgcttcaatgcttacacctaaccaatttgaagttgaactacttactggattgaggatcacctccgaagaagatggtttgacagcttgtaataccctccacagtgccggaccacagaaggtggttataactagtgctcttattgaaggaacaacagccagaacaatttaagattgagataccaaagatacctgcatatttcacgggaactggagatttgacaactgctctcctactaggatggagtaataaatatcctgatagcctcgagaaagcagcagaactggcagtttccagtttgcaggcacttctgaaaagaactgtggaagactataaaatggccggcttcgacccatcgaccagcagcttagagatccggttgatccaaagccaggacgagatccgaaacccaactgttacatgcaaggctgtgaagtatggaagctgaatccatagtacccccactgacaaaggtgccaacaataatgagcagtgcctgcaccgccgataagcgggtgcacctacttccatgactcttggtcctcagttttgggatgctgattctgttacaccttagctccaaaatgagaaacaatcatatttctgaaaaaagggttatagacttatagggttatattcaggctgtgcgattgctgcagtctttgggaatgcgtggtggcctgagtgagattgtaaatggtccttatcattgttgtcttcctcgttgtgttgttgttgttgctgctcccgctgagttgtggtggttggttggaaactctaggtatgctttgtttgaggcacattacgaacatatggtgttgagatgtgctcataatgcttattatgataagtgattattgaaaagatagttataatttaatattgaccttagtgtgagtgtagtgttgtgcaacatgtcttttgagt

SEQ ID NO: 43789 - DNA, 1314 bp, Zea Mays
actaccctattccgatctcgaggacgccacgccacttttaacccccccacccccccttctgtcgtggtgcctcggcccaagtgctaacgcccaactgccaaggcggggaggggggatccggtgcgcgcgcgcgcggaaatgaacaccggctgattagtaggtgggagatcgaggtcgcgcccttgccccacacgccactaaaggccgcgccgacgggctcatcaggcgctctggacgggctcgcttctgccgctccgcgcttgtgcggtgggtgaagtgctgctgctggtgcgggaagcgtcgccaaacgtgcagaccttggtgggggagcgaggagtcgaaacaaggaaccatgagtgaaacagggcacactgtacaagtcactaacctctcgagcagagtatctgaaagtgatctttatgagttcttttcgttctctggccctattgaacatgttgaacttatcagatcaggagaatacggtgctactgcttatgtgacattcaaggagcgctttgccttggaaactgcggtattgctcagtggggctactattgtggatcagccggtatgcataacttattggggacaacctgaggagacttttaatttctgggacaggccaacttgggaggttgaagaggaaattgaatacacggaagctcttacagtggctcaagatatcgtgaagacgatgctagcaaaggggtacgtgctcagcaaggacgctttggctaaggctagagcctttgatgagtcccgcggattaacagctgcagctgcagccaaggctgcagagctgagcaagagaattggtttaactgacagggtcagtgctggtgtcggtgcaatgcgatcggtcgatgagacatatcgcgtaacggagacgaccaagacggtagctactgccactggaagaactgcagctaaggtggtaaatggtatcgtcaccagcagctacttctctgcaggagccatgatgttgtctgatgctcttactagggctgccaaggccgcggctgatctggccgctcatggcagacagagttaagtgaaaaacaaaacatacaatccatcctttttcagttactaaacatgaggacgaacaccttaataggatgcttgaagtgttgttgttcgatgtatatttataacagacaacattgttgatttgttgtataaattaaaaggagacgtacactgcgtttgcactaataagtttgattattgcaaatggagtcgagtgatcgtgcagtcatgtttctgactttctgctcatttcatattctcgcatcgctgttgggtgctgccttc

SEQ ID NO: 43790 - DNA, 376 bp, Zea Mays
ttgtgggttcccagctgccctctcttatctgcagtaggagacaaaaattgatattttgaccatataagatggaccaagttctgtgtctttgtctgtgctgtgaatctgcatgatagtagtgcatgggagccacatctttgagtccatgttgtgctggcacactggaaaacacttcccctctgcatgtttgccaagttcagggaacacctatcccatttcaggtatttaaagggaagggagcagtggaaatctcctctctacctcgagctctactcacagaccactgcaagggtgttggggttcttgtattcctgctagtgatgaccctctcccacagccaccaagtctgctctgtccagagcatcaagtgccagtg

SEQ ID NO: 43791 - DNA, 1397 bp, Zea Mays
actagcacatctattccgcttccctctcccactccactcgccatggcggaagcgctcgtgggcctccgcatcgctgcccccgccgtctcgtagccgcagcctaggtttcatggcagccagcttcttcccgttgtgcacctcgccgcgtcccggcgcaaccgactgtgcaccgcccgtgcggccgtctcagggccaccggaggtggacgaggacgattccatgagcatcgacaacttgcatcgcttcttcgacctcaacgtcgggaagtgggatggccggttctaccaattcgacgcgcacgggaaggttcttcaggagattagcacgaggctgtccgtgagctcgtacggggaggacaaactcatcagcctcctgcaatcgttgtacattaagcaaggatcctctgcaatatcgattgtggacgaagaggattctgaacctgaatgggtggagtacaaaatcaaagagacgaacatgttcactgtggacaaatatcagcagtgtacagatagggttctttcctgaacaaaaggcatttgctctgaggtaccagactgctggaatgctggagactgttcttcggattggtgtgcttggagaagatgatactggtgaagaatcccccaaaaacttgaagataccttctcgtaagccatctattgtatgtgaaaattgtctttactcccttgaaggcaatggtagaatcagggcttttcacataatggatccaaagggagtgctcgacacacttcttgtttttcatgagaagaggcagggatctaaagtgccacagccacttacaaactattcagttggtaccaagagtgctagcagcgataggataaatgcactacttggaagatgggaggggcattctgtgactaagcggagtggggtgtatggagcaacacttgttgaggcagatacagctattgttctcaagatggacagtaatggccaattaattcaggatactttatcaactaaattcggaactggaacaacaacggtcaactggacaggatcagcaaatgacaacttgcttcagtttgatggaggatatgaaataacattgctacctggtgggatgtacatgggatatccgtcagacattagcaaatctgttgcccaattagattcttttcatttggagttctgttggatggaatcacctggaaagaggcagcggcttgtccgaacttacgattcagctggtttggctgtttcgtcgacctatttttctgaaaccaaagtatgagtcacagtttcctcttacaaaatgtattgcaacgaattttgtaagtgatccaataatctcactaactatttttgttgttccgtgcatgatacttgagtgtatattctcagattttttttctctctatccaaaaggcaga

SEQ ID NO: 43792 - DNA, 1037 bp, Zea Mays
tggtgccgatcttccctgccgaccttgccataatccatagtcgcgacctcgcctaacgcattcgtcgcttggccctatgtcgtttggctcggcgaccatgttcgctaccgcatgtgcttgttcctaatgcgcatcgcgccgtagttggatctcgccgattgactcccgctatccgccgtgctgtgtgccggcgttctctcatgacggaccacaccgtcgtctagccttattcaatttgccacagcaccatcgttatcatccagctccatcacccgtcatttctagtattttccccaacaccgcgcctttctgatctcgccgttcgtcgatgcaatttatgtgtgcagatgaagaaagcgaagccagtgtacatagctcgcgggtgttcagctgaaggtcgtcgtcgttccgtgcgtcatcaagaaatccctagcgtcggatgaagacgaagctagcagcgtgatgttcaccaagtgcgcaacaaaaagctcgaacaagtcgttgatcgtcatcctcgtctacgccaagatctgagaagattaggcgcagaagaaaataaatcagtacgcggccaaagaattcttgatgtggacaaagaagaagcgtgattcgacgtagcactcaccctatttctggtgaaatgctgagctgaaaggcgtcatcgatttcgtggtttcaagtcggatgtcataagggtaagttaattcgtattccagtcaattaagtctataaatagattaaatagaattattggtcacaataaatgttattaatttagcatgcgtatattgtgataatcgatttagataaataggtaaatcaagtaattaagatacacagtttaaatagttaataaaaagctaggaataaaaatagatgttttcgtgttattatgtcaatttggttaatgaatgtagtcgatgccctgctgtgatatccatgatgcttaatgcttggttttaagtgtttcatcctttttagtgtagattatctatattatactcgttatacatgtgctcatacatgtgcatcgtgca

SEQ ID NO: 43793 - DNA, 2787 bp, Zea Mays
atggccgatttggggagaagggcggcttgcgcggacaatgtagctcatatagtccatagcctattcgaatgccttctaagccggcccgttggcccaactgaaacattagtccgccttctcccccgagacccccgagagtcccctcgctgccgacgccacacaaacgcctccaccctcatgttcaccggcgctgcgggcggcattggcaacctgccacggccgcgcaggccgcggctcggcggaataggacacgggggcgtcatggtgtctccacagggacaggtggctctgggggcacatccgcacctagccgccccgccgtgcaccgactacgacgtggcctacttcaaggcctactcacacatcggcgtccacgaggagatgctcaaggatcatgtgagaactagtacttacagaaatgccataatgcatcacaaagatcttatttcaggcaaggtagttttggatgtgggttgcggcactggtgttctttcgatattctgtgcttttgctggtgccactcgtgtttatgcagttgatgcaagtgatattgcatttcaggctatggagattgtaagagagaatgagctgtctgacaaagttgtggttttgcatggccgaattgaggatgtcgatattgaagaaaaagttgatgtcatcatatctgaatggatgggctacatgcttttgtatgagagtatgctgggaagtgtaatttttgctagggacaaatggcttaagccaggaggtcttattcttccatcgcatgcatcgctttacatggcacctgttacgaattctcaaagataccatgatagtatttacttctggcgagatgtatatggcataaaaatgtcctctatgatgcctcttgcgaaactatgtgcgtttatggagccatcagttgagacaattagtggagagaatgtcttgacatggccagcagtggttgcacaggtggattgttataccatacaagctcagaagctcgaaaccatcactgctgcatttaaatttacgtcaatgttacaagggcagacctggtgcagtagtgagagctgtttcaccaagtcaccaagtcatgggttcgaagtaacctctccacattttcgtgggaaaagcttgccttggtttatccctttccgagaccccactcatgtgggagcctccgacattgtgtctaccctttttataagcctacactcgtttcaaagcatgcatatactgctttcttcctgttttgcactcggttgttagctgtaattgggattagacatgcactgtgatgagagacttttttcagtgctttcagttaaagggatgagccttagttgtaagttgtatttcccaacgctgagaatgaggatggcatgctactttttccatgtatatcaatccaggatgtttctaatttcttgtaactactacaaatttcctaaaacattatataaggatacaatgttctaatgctttgggaagttaggatatgatgttctaatgcttgagctggaatgcaatcaacaagagcatttgagagaatctttcatacatgtgacttattttgagttacaggcctgatcagagtttagtttttacccatgattggtggaatataatgtgctacatgtggtgtttgatctgatacagctttcttctgctgccatgtcttggttaactgctttatcgtagtgaactctcttgcttagtcacattgccataaaacttttacgatggtaattgctcaatggaaattatattgatttagcgtgcttgatctttgtcgtgattgtgtttatatcatgtaggtgttacttagtgtagatgggataatagtgccaatcatgctctcgttatcttgtgttatttttttagctccattgcatggttttgcattttggttcgatgttgagttcaatggaccagtacgccagaaatcgaagaagcaacctagtcaatcattggatgagaacacccaaaatgccagcccaagcaataggaagagaaaaccagatgtctctattgttctttcaactgcaccagaggatgcccctactcactggcagcagacccttttgtacttgtttgaacctatagaactaaacaaagatcagatcatagaaggctctgttactatctcccagagccagcaacatgctcgcttccttaacatctgcctgaaatactttactggcgaccaatggtatgtcaaagaatctgtgatgcgataatctgggggaaactgaaacatagtaaccttctttctgaataggctcaaatctgttttgtatgaaggacaaccttgctgctggtcattgcggtttaggagcattctgactgtactgggttgtcgtggtagcaaattgataaaaaatggagtgccatttcgagtgcagcttgatcaaaatggtagtgggcctcgacaagtaatatgtgaatctttggctccaaactcaaattgacgaacaaaacatagaacatgttgacaagagtagtaccgttttctttttttttttgttcttttgaataggtacaagctgctggtactttattccccataatagactgctcattcattgtaacgcttctgcagcgtgtagtgcagcatagacggtatgattttacaaatggtagcattgaatttttacgagtggagtttttgaagagtaaaatgcatgaataaaatgtgcatggtgtctggacaagtagaatgcatggtgaatgtcagtttgtttcaatttggccattagctccttaataatcatacgtatttgatttactaggttccgt

SEQ ID NO: 43794 - DNA, 195 bp, Zea Mays
agcaaggagacgagaacgcgtgcagtttcagccatgatccacggactcccaacacgcaaactccaggaaggaagagatcgtgactggcaagtggtaacaacagaacggcgtgtccaggtgaggcaagtactggggagaccgagcagagaggagagcgggctgagaacaggaatgcgaggggcactacgagaaggg

SEQ ID NO: 43795 - DNA, 640 bp, Zea Mays
ctactaggtatatgcccgtgcgttgcaacgggggacacttgtacacaaatatgtcattgtttagtgacgctatcaagaatcaactcaacaatcataacaaatgagttgatctaggtaatgagtgacaaaaatcagccatgcaccaaatattaaaggatctaactatgtagtaatgaagatatagacaatgaagataagatgctgggattgaaccatcatagttgagatagaaagcaccaacctcacttgttatttggtgcatggctgatttttgtcactaattacatagatcaacacactcacttgttatgatttttgagttgattcttgatagcatcactaaacaatgatatatccgtgtacaactatcccccgttgtaacgtgcgtgcatatacctagttacataacaaggaagaaagaatccctcaagctgaagaattgcctggaatagaggaaaggtttagtgtcatacataagtagacatggaatagaggaaggtgaatgcctgaatgtaatgattgcgatttgtgactgctcaagaaatatgtgttgtaaaattacatttttcacctgaaatttacctttcaactattatgttcaagatgtttactggaaacaaacataggagagtaacctgac

SEQ ID NO: 43796 - DNA, 794 bp, Zea Mays
gaaccacaatactgctattgctactattcatgtcacggaggaaattcaggaaacaagatttaacactgcaatatctgcaatgatggagtttgtgaatgctgcatacaagtgggaaacccagccaaaatctgttattgaatcctttgttctgctgctttcacccttcgcgccacacttggctgaggagctttggtttcgcctcggacatccacaatcattggcctatgaacagtttccagaggcaaaaagtgagtacctggaggaatcaaagcttgtactccctgtccaaatcaatggaaagaccaggggtacaatccttgttgacaaagcgtgctctgaggatgatgtttttcaaattgcagcctcggatgagaaactctccaaatatcttgatgggaaaggcatcaggaagaaaatttatgtgcctggaaggatcttgaatgttatcttagatcaacaaaagtcaaggacctgataattgctcttgtttgtccatttatctcgttatgagtcaggaatagagatcaataagacatgacagatctgtaaatttgttttttagcacttgcagtttactgtcaatttgccaacaacaacaacgtcgaacactcgttaggttaatgttaaaatccaacagaaaccgtcagtcaaggttaagcatatggatagttatttttatgcactctttggggtatttgaaactgctctaggttccagcttcagtgtggagctgtagtttacaatacagatttaaatagttttaacaaatatttttaatcaaaataataaacaaa

SEQ ID NO: 43797 - DNA, 2895 bp, Zea Mays
aaatcacgcaacaatacacgtccagcagagaccagagtccagactagcaaatgattccttagcagttccctgcatgccttctcgctcgccggcatgccggccgcgtggaagaaaccgccgatcagccgctgacgcggttgcacgaccactcgccctggcgctcattctcgtctctaccctgcctcgcgccgcgcactcgcaggatctggcgctgccaccagtccagccacgtggtgtgaggaggacgatgacgtgcgacaacatcccggagcccttcggcacaagatctagaggcgcgtcgcgtctacccggcttcgaggtgacgtgcgggccaaacagggaggccatgctgtccatcggcggcgatgcatacatgatcgatttcgtgtcggtgtcgggcagctacgtggtcgtcttcgcggagcccatcacgcaggtgtgctacgacggcaagggcaagccgacgccggacactggaaccggcgccaagagctcggaagggacgacgacgacgttcacttggagcttggaagggacgcccttcactttctccaagagtaacaagctggtcaacttcggctgcaaccgcacgctcatggctaacttcttcatcgtgcccggtgattccagcccgctatacaccagctgcaccaccacgtgcaacaccctccaaatcagcggctcttgccttggggaagcctgctgcgaggcccccatggaccaggtgaacggcgccaaggcgttcagcctgtcgttcgaaaggaccacggccaacggcaccggcgaggaggacggaacctgcagcgccgcgttcttcctggacaaagacgagacggtcttcacgttcagtggcgatgaggtacggccgctaaaaacagccttgctgccaccaggtgagcgcaggatggttttggattgggcgattgggagcaccagctgcgagcaaactcagagctacaccttcgagaaactgtgcaagtacggcacctgcgtcgacgcgcccaccggagcgggctatctctgcaaatgccctagcgggtacgacgggaatccgtacgtcagtgacggatgccaagatatcaacgaatgccggaattacaatagtaataattgcacctatcagaacctctgcaacaatactttgggaggctatacttgttcttgccccgagaataatattggtgacggttacaggacaggaacaggctgcaacaccactcttgcgacacctgaggtactaacgaaagatctaacaatgaatgttctttcatgctgcagtttctccttcacaacaacctcaaggtatcaacgtgtgtgatcacccggaaaagaacccttgtacatacattaagtattgcattgatttggaaggagttgtttcgtgcgcctgccctgaagggatgagtggcgatggcaggaaaaacggtagaggctgctgttttagctgtcaaaagcacttccctcttgacacagttttgggtgtaagtcttgtgcttatggttacaacgaccactgctgcgtcgtgctactgctgggcagtaaagaaaagagagctaggaagaaagagagcggaattattcaggaagaatggtggcttactcctgcagcagagattttcaacaatcacatctcaaggcgaggaccaatattcatcaaagatattcagtgcggaagagctcaaggctgctactgacaactatagcgagagtcgaatacttggccgaggtggacaaggcacagtgtacaagggcattcttccagatcaaactgtagtcgccataaaaaagtccaaggtgttcgatgagagccaagtggagcaatttgtcaatgagattgccatcttgtcacagattgatcacccaaatgttgtcaagcttttgggatgttgtttagagacacaggtaccattgctggtttatgagttcatatctaatggaacactcttccagcacatccacaacagaaatgcaactcgccctctaacatgggaagactgcttaaggatagctgcagagactgcagacgcacttgcctatctgcactccgcgtcttctatacctatcatacacagagacatcaaatcaagcaacattctgttggatgggaacttcgtggctaaaatagcagacttcggtgcatcaagatcagtcccatttgatcaaacccatataactactcttattcaggggactattgggtacctcgatcccgaatatttccaaagcagccaactcaccgagaagagtgacgtttacagtttcggagtcgttcttgcagaactgttgaccaggcaaaaacctatttctgcagcaaggccggaagattcatgtaacttggctatgcatctggtggttctatttaataaagggcgcctacttcaggagatagagccacacattttggccgaagcaggtgaagaccaatgttatgccgttgcagagctttcagtgagatgcttaaacgtgaagggagaagaacggcctgccatggtggtggtggcttctgttttacaagagctaagaaggtcattcaccatagaccaggctgtcggaataaaagatgaatcgatacaggaaaacagtgaacaagaagagaaacatctacatgagtccagatcaattcccagtttgcagtcatcagaagtaagcacacaatgtagcatggaggccaaaatgtcatctttttgttgacaaaataagcaaattttatattaaaatcagaacacatatactgtgacaatctcataaactaatataagtatagctcgtataccagttaaattaaaaacataaatataaatactagtataaacatagcccatagactagtcatattaaacaacgtgaacagtaaatgccagtgtaatcatagcgcttataataattaaattaatca

SEQ ID NO: 43798 - DNA, 531 bp, Zea Mays
tttcaggttatagttttgtgctgttgctgatggtgttaagtgccggtgggctcggccttcttataagtctaagtaacccttctatacgtcttactgaggatggtcacttgagctagcatatatttcaaacttatacttttgtaatcactctgatgaatataatgaaaaatttttgtaacttgtaaaattttggtaataatatttccgctgcaaaaatattggtgtgtgtgatttgtgctacttaatatcgcggttctggttgtaggtggtttatccgatgtccttggggcaatcgaacggatcctgttaaattatatggtacacatgcatggccgtctgaggtctttaggacaaggacaggtgcatgtgggcccgataccttgggaggttctgccacaaatgaccctagccgaattactgacacacggattcttgaagaagacatgttgagccgaatcgacttgatgttgagaggcaagatttcgaatgttggtgctcccttatcgtattatgcctggaatcttgtaatac

SEQ ID NO: 43799 - DNA, 1836 bp, Zea Mays
catctatgttcttctttgtagatgccatctcatatggtaatgtagatgaggaggaaagttttattctcagggatcgactcctccccctcattatttgcctactgaggacgaatttaccgggatacacttataactgttatgaaagcttcaatcaaaaccacagtaggagagttactcccagttttaactgccagaccaatagattctgactcagtaactggagacagagctaccgatgctgatgctggaggccagtccttagcaaataagttgcggagtctttcatctgaaggatttgttcaacttttatctgccattttcaggatagtacaggtacatttacagcaagcagctgaagtgaaaagaatagttgagtgggtcatgggaaaccttgatggaacgttaggtgttgatgctagtaatcctacgttacaacatggtggtacagttattcctgatacccaagaaaatgactcttcaagaggctctaatactcttacacggagtacttccaagatcccatttgtccaaggaaaaacaaatgatttttccattataaattcgttaaagaatgttcgggctgatgtcttgagagagaacactgaagcagttttcgcggcttgtgatgctgcccatggacggtgggctaagctgctaggtgttcgttctgctttacatcccaggttaaggcttcaagaattcttgatcatctacaacataacagaagaatttatagctgctacagaaaagattggaggcaggttgggttacaacattcgtggaatcctacatcaacaatcgaagcaattcgttgattatcagcataatgttcggatgacaaaaatcaaggcagttctagatcaagagacgtgggttgctgtggatgttcctgaagagtttcaagcaatcgttctttcactttcatccacttattcttctgttaatggcatggagatgcctagcactgatgataactcaaagtttagtgatcatcggtctacaagtcaagaaccgacatattcagctaaaaatattgctgataatggcaaagtaacatccgggactggtgaaaacaaggttgaattcacttcacagactgaaaataatgttgccgggaatctaaagtccaccttgcaaacgattgtacatggaggtgttggctatcatatggtaaactgtggtttaatactgttgaagatgttatccgaatacgttgacatcagtaaatgtttaccatcactatctttggaggtggtccaacgtgttgtggaaatattaaagcttttcaacactaggacttgccaacttgttctcggtgcaggagccatgcaggtgtctggacttaaatcaattacgtccaaacatttagctttggcgagtcaaatcattagttttatgcattctttaattccagatatcaggcgagtacttttcctgaaaatacctgaagcgcgcaaacatctgttaatgtctgagctggatagagtagctcaggactacaagatccatcgagatgaaattcacaacaaacttgtccagataatgagagagaggttgcttgcaaatcttagaaaattaccccaaattgtggaaggctggaatggcccagaggataatgacgtgcagccgagtcaatttgctaaagctgttacaaaggaagttacctatttgcatcgcattctttcccaaacattgcttgaggttgaggtgcaaacaatattcaggcaagtggttcaaatattccattcacatattacagaagcattttcaaaattggaagtcaatactccctctggcaaagaataggtatgctgcttatttgtgcatcttttagca

SEQ ID NO: 43800 - DNA, 1670 bp, Zea Mays
ctggctgtcaccgctaccattgaaattcacgcgactgctactgctgcagactcgggccatcgagcgttggtacttggctagggttttgcgagaggcagaggcgagaggccgactctctggcggccggcacaccacgcagggcacgacgcagtgcgcacgacaagcgccgagcagcgcagcggctgatggctgcgcgcaggcaggggagcaggaggcagtgtgcgtggcaatcaggcaagccgcaagcggcacgacgggctgggcgtagacgaacagcacggcggtggacagcgacgcgacgactccctagtgatttgatggacagatcttggattaatagtaggcgttttagcaagcagcatatcgcaggagtgaaaagtttcatgaagttaatttcaaagcgttttgcagatattgatgaggtactatgtccttgtcgaaagtgtttgaatcggattgctagacctaagtcaaagatagaggatcatttacatattcatggtatggcaagcacgtacactacgtggatacatcatggggaggcacaatttgatactgtaataaatcaacaagctgaccatctagaagaacaatattgtatgaatgaggatattagtatgaatgagtctgaaaacccagaagatagattgcctgatatggtacgagagttgttcacagctggagaggaaggtgcacataaatctatgtttgcagttgtattggaagatatggagcaagaacttcaccctggtgcatcgtacacaagattttcttttgttgaaatatttgaggaggcacaatggcacaagttgaagaggaaagaagtggaaaatgagcttagccatccagttgacgctgaggcatggaaagacttgacaaaaaaacataattggttccaagagatccctagaaatataaggcttgggctagcccacaagatggttttaatccgtttggcaaaatgagctcctcttacagtatgtggccagtttttgctatcccttataactttcctccgtgggtatgtatggagcaatcaaacatcatgttgtgtctactcatccctggtcgggaatgtccaagaaaagattttgatgtatttctagagccactagttgatgagttacaagaactttggttgggtgtttctacttttgatgcactgagtaggaaagattttgatctacatgctgctgtaatatggtgtattcatgactatcctggtttgagcactttgtctggtagagttaccaaaggatactacgcttgtgtccattgtgacaaagatccttgctccaaaagaataaggaataaaatatgctatattggtcatcgacgttggctaccacatgaccatccatggaggaaaaagaaggattatgatggacaaattgagaaccgtgacaaaccacaacaatttagtaccactgagttgatgcaacaattggaaagggtgaaggaagttaaaccagggaagcatccaaatagcaataagaggaagcgagatgcaaatggtggtcaatgttggaagagaaggtcaagcctgtgggatttgccatattggacagatttgaagttgcgtcataatcttgatgtaatgcacattgaaaaaaatatatgtgagtacttgctaggtacatttcttgctcttccaggaaagtcaaaggaca

SEQ ID NO: 43801 - DNA, 625 bp, Zea Mays
aagcagcagcggcaggcacacacacacgacttggcggccggagcaaatctaaaagctgccactggaaacgaacggccaggtcctgtactcttgttgcgatcacgctccatctttttttgcctttgtcatcctagccactgggcgcacgcagcggtgcggtactgcggtgccatcgtgcttgcttttcttctccaatccgtgtcattcagggctgtggtggtttcggattcccaactgagggggggggggggggcaactgtagtatctgatcatctatcccgttgttgtcgttctacctttttttctctctttttgggcttactcgtggacgtggacggtcgtttccgttcccagctgctgctgctacctgctactgcttgagcatgtgactgatgaacttcagttagactaccaacaagtttaactagaagaaggttgcagcatctaactgcacaaaaaagacagtatctccttcgcacaaacaagctggaggcagaattagttttatatatatgtatcagcaacatgattaaggagcaccctggcgtgcaaaagctccagaaatgatggaggtctgaaggaataatctccagtgtcgcttttatgaggctggtggccggccgcc

SEQ ID NO: 43802 - DNA, 1436 bp, Zea Mays
tcccggcattctccttctgctcttgctgcgtcagtcttctcacactcgcgtgctccctgtgctggattttcctctgctctctcccattgtgcccagccagagccgcccccaatcgccgtgcgccctgctcctcgcgtccccctgctccctccctccctccctcatcttcctcacgctcggatgtcaccagagcttcccccaaggccggaatccctggctgcggctgctgctctgaagttctccctgcgcgtctcgagcttctccgcgatggctgccatggagtccaccgtaccacgcccggccggaaacttcctccagcgcatggagctcctccagccgcgtcccctcagctcgtttacccagctcgcccaacctccctgctctctctccctgttccccctgctcgcccctgcgcaggtgagtcaccccggtccggctaggacaccggacgtcgtgcgcaagtcgatttccttctcgagctcggcggcaggtcatggtgatgccttgctcctcctagctccttctcccttgccgcgcgcaccttttctgcgccgcgccctagcccctctgccgagctcgtccatagccggcttcgagctcggccaatgcgtggacaccagacgaactccctggaactcgcgccataaccctgttcatcagcggcgcgcggattcctctcctccctagcccctgttcggatttcacctggccgctgctgctccatcggatcgaccagtctgtgcgccgagctcagcgtcctttgttttccccatggcgcgtcctgctctgttgctgcctgccggagtttgccgatggcctgtgtcgttcctgcgcgccgtggtcgtgtgcaattcgcgcacagctcgcggagcttctcctcgccccgctcctagatcgtcgtccctattcccccacagccgcgacgccgagctcgccccagccgtagctcctcatcgtgtgcctccacaccggtgctcgactagctcgacgatgatcagaccgtcgccctgctatgtcgtgttccatttccgaaacacagctcttcgttatggccgttagaccgccgttgatctagtcgtcgcagctcctctgtcacggttgatcttggtttcttccgtgccgccgaccgtcgacctcgtcgttgcctcacagcgcttggacaacgacatcgttactgggcaacatgtttgcccgtcgccacgttatcttcaacatcacgactctactagacttcgtgcgctcgtcgacacttagttgtcgatctccgccacgtcagccttgacgcgtcttgcgttcgcgctggaagatgaaagagaagagctagagcaacactcgtcaagtatcagtggtatgttaattaatcgcatgatacggaagaagaaccaagccggccccaagcgcgggctaatatgcaagctgaagctgatgaatcaacc

SEQ ID NO: 43803 - DNA, 2719 bp, Zea Mays
gctatggagcagttttttagtgtttcgctgcacggaagtgactctgctagcccctaatcatatgagagtgattttgagtgtgccaaacgccccctattgaaattcccacgcgcccgtcgtttgccaccttccccaccagcaccaagcggcgagagcgggacggggcagagcaagagctagggataaccctcgcccaccatggcgacgcccggcgagcagcaggcaccggctgcggcggagtaggtcgtgtccgtcgagatgcctgcacccgacgggtggaccaagaagagagggggaagatccgagattgtttttgtttcgccaactggcgaggaaattaagaacaagaggcaactaagccaatacctaaaggcacaccctggaggccctgctgcttcagattttgattggggaactggtgataccccaaggcgttctgctcgcattagcgagaaagtcaaggtttttgatagcccagagggcgagaagatcccgaaacgcagcaggaactccagtggtaggaagggtaggcagggaaagaaggaagcccctgaaactgaagaagccaaagatgctgaaaccggccaggacgccccaagtgaagatggcacaaaggagactgacgtggagatgaagcctgctgaagaggcgaaggaagctcctactgaaactgatgacgctgagaaggctgcagacaaggcggacgatactcctgctccggcgccaatggaagaagatgagaaagaaactgagaaaccagctgaagctgttgtagctcctcttgcgcaatcggaggagaagaaagaagatgccaagccagatgagcctgaagctgtggctccagctccagtaagcaacccaactgagaactcagcccctgctcctgccgagcctgctgctgttcctgccccagtgcctgagaccgaatcagttgccgagcctgctgctgttctcgccccagcgcctgaaaccaaaccagatgccaagcctgctgctgttcctgccccagcgcctgaaaacaaaccagatgccgagcctgctgctgctgctgctccagtgcctgacaccaaatcagttgctgagcctgctgctgctccagcgcctgacaccaaatcagttgctgaacctgctgctgctgctccagtgcccgagaccaaactagttgctgaatctgctgctgatgctgttgctgctccggcgcctgaaaccaaatcagatgccgagcctgctgctgctccagtgcccgagaccaaaccagttgctgaatctgctgctgatgctgttgctgctccagcgcctgaaaccaaatcagatgccgagcctgctgctgccgctgatccagcacctgaaatcaaatcagatgctgccgccgctgatccagcacccgggaccaaggcagatgctgccgccactgatgccgcgcctggagccgagccagacgccgctccactagagaacaccgctgccgacaaaggcggaagcgaggagagcagccagcccgtgaacaacgtgaacaacgggcactcaacgtgaagtgcatctgaggccggaacggaacaccccttccagcaccgtgtatctcatgtaggaacaaacatttgcattcgcattgtaatctgatggatcggtaagcatgttgattagtcagtctgacgctgctgggtgacatgttggtaattaggctctgcatttgagctctttttttttgtatggctgctgtcgccgccgtacatgtatcctgtatccaccaccatcatcatccccttggactattggttgtgttgtacctaactgcgtaagcatattattatcaatgttaggccatgtatactccgctctaatgtttgtattttgtgaaatttggataaccagctgaatgttgtttatcatcatctccagtgtctatgagaaaatagtaagagtgcctggctgggtatgtataaaaaaaatgcgttttattttactgcatgtgaaaatgaaatcgaccagaggctagagctgggtaggcgtcgcggccgggctgggcaccggcggcgagcggcagacggggcacgtcgggcgcagcctcagccagcggtcgacgcacagctggtggaaggcgtgcgcgcactcgggcagcacgcggagcacgtccccgctggcgtactcgcccaggcacaccgcgcagcacgtcgtcgtcccggtggcggcggtcgtcgtcgcagtcttcctctccgctttctcctcgccgtacaccacctcgggcagcgccttgagcgcggcctcgtctagccccgcctcgacgtccgcgcccacgtccacggcggtgccctcctcctcccgccgcgcgcgcgctgccgccgtcgcgggcgcggcgctgcggacgcacgtccgcagcaggaaggccacggcgacgatggccatggcgctgacgacgccgaaggcgacctccacctccagctccaccatcccttcggctggccggccggcgcccctgcgtttgtcagtgcctgcgacgacgagctacgtggaccggaccggatcggaggcgctagctgctgggctgctgttccattgcaaccaccagctgagccgccaacctactcgatcgagctgctaggtcgacgcaattgagctgatgagcttctcttagtttcagctggtgcagcgttgcttgttcgagctggcgactggtcggggttccatggcgaaaggtcatgaagcgcctagccaacccaag

SEQ ID NO: 43804 - DNA, 1424 bp, Zea Mays
cttcatcccaacatgtgctagacggcgattctaaagccagcccatatttgtcttagctattaagcatgcatctagattggcattctctttcgaaaaatcaactaagtagagcttgccgtctaatacacccttaaaagctaatgaaccatcacttcttctaaagacagatacatcaacatttgtaaacaagcaattgtaacccatgtgacacaattgacttacagacagaagattgtacccgagcgactctactaaaaatacattcgatattgagtgctcgttagtgagggctatcttgcccaagcctttgaccttgccttggttcccatctccaaagatgatcgtatcatgggaatccttgttcttgacgtaggaggtgaacatcttcttctccccgtcatgtggtttgtgcattcgctgtcaataatccagctagagccctcggatgcataaacctgcaaggaatttaagcttgggttttaggtacccaactcttgttgggtcctacaaggttagtcacaataacttttggaacccaaatacaagtcttgtctcccttgcatttggatcccaacttcttagcaactacttttgtgttcttacatgaaagtacaaatgaagtattgcaagcatgataaatggtagaaggttcatggcacattctcctacgagcatgagacacaacatgatttctcttaggcctacttctaccatgaacaaaagtggagctagaggcaaacatagcatgtgaatcattaaaagcaacatgaacataactcttattataatgagaacggctagcaattttattatcataaataaaagcatggttcgtttgaggactactcgccataggggccttccctttctccttgttgggaacgggagtcctttggcttgttaagttcttggtttcctttcgaaaaccaagtccatcattaattgaagggtgtctaccaatagtgtaggcatccctagaaaatttcaatttatcaaaatcaaccttgcaagtcttaagttgggcattaagacttgccacctcattatttaatttagtaatagaagcaagatgtggcagccctcccaagttatcgggcccacatgcaccaatccttgccttgatgacctcagatggctctgcacgtataccatgtaacttaacaaggctatcacgagttcaacaacttgaactcgtcatcccaaggatctcccaccatacatgcatattacagtaatcacattcgatatacacacacttcggagataagagcggaagactttacaaaacgttctttttatttctaaaactgaaggttattatataggaagagttacatttattacaagtcctgatatactcaaagtgcataacttattacaaaagcaggaaggtaggaaccctcaaaatcttatacataagccta

SEQ ID NO: 43805 - DNA, 207 bp, Zea Mays
caggttttgcaagttgctacccgaaattcccgatcaaaattctggtttcgggtattttaggttcgggtatttcgggttcgggtttcggattacgggttttttgcccagccctacccggtatgccgccgtcaagtcaaacagcggctcctcctcttccctccacttcttccatacgacagcgaaacccaaaaccgatgcagctgaaat

SEQ ID NO: 43806 - DNA, 738 bp, Zea Mays
gttgcccgaaaagaaaaaggattttaccctcgggttattaggaaatgaagttgcttaagaaagtttgagcttttggatgaagattaagatgggttagtcccctggtgaattattagttgatgatgtcttctagtgcccttggtaatcctctactgttttggctagttttatgcaccttgtattaaagtgtactcaggatgggttgtttgttaccttctttatgaaatgcatttctgtaccatagcaaacattcatctacatgtaattgacttgtagaacacctagaagaagtggtgtctgaagaaggagttcacttcagtgcctgctgatccagtggtggagtttcatctaactgcttaccacaatagaaggattttagatcttctcctgcaataaggaaagaatttgatgacttgggctttattagttgcttcttgtggaggtcttgaagcttaggttacttatgtgtatattttatggaaaggtttcacctttccaaatattgtagttaagttatgcactctaaagactatcaggacttgtaataatttcaatcccttttgtggtgtaagacttcagttctggaatgtatagtgtattttgtaaaagtcttccgctctatctccaatgtgtgtatcaaatgtgattactgtaatatgcctgttatgtgggagatccttgggatgatgagttcaagttgatgaactcgatagccttgttaagttacccggtacacgt

SEQ ID NO: 43807 - DNA, 1294 bp, Zea Mays
tacatttatgactttttttaagagataggagacttaagacaaaattaaaactattttctctatttaaaaatgttggatgcttcttctgatgataaatgcctgatttgcttctttgattgattgaaacattatagttggacatcttagcatgtaccaccataaggtaatgtattagatttagtaggtgacacactaatctacttagctaataaatcccccaaagtaacatgattcgtaattactttccttgtctacaattctttcttaccatttgtttctaactcagatggtcaataccaggaagggtggtggaattgatctacccccaatcgacacaatcggagggtacttagacaacaacaacaacaagcagagatggatcttccaaatgctccaccagtcgtggctgatccagcagttgcagcccaggtgcggataatgcaacatatggctgatactatggcggatatgcacgcgcagatgcgacatgagcgtcaggagatgcgccaagagagggaggagatgcgccaggagcgaagggtgcaacaacagcaagcaccactgccaccaccaccaccaccagttccaccccgggacaagcaccgggagttcatgagccacaagccaccgacgttcgctagctctctagatcctctacacgctgatgattagctgaagtctatggagaagatgttgaatattgcacagtgctctgaccgagagaaggttctctatgcttctggtcgacttactggtcctgctgctgattggtgggattcctacactgctgcccacgatgctgctgatactatcacatgggcagaatttgctactcagttcaggaactatcatatacctgctagactgataaagatcaagaagaaagaatttctgtcgcttaagcatgggagcatgtgagtcagcgagtacaacgacagattcattcaactatccaaatatgcaccggatgaagtggctgaggatgagagaaagcaggaacacttcatcgaaggactcaatggaccttggcagtatgctctagtggttcacacctttccatcatttcagaggttgtttgacacggccctagccattgaacacaagtgtgttcagccaggggacatgaagaggaaggcgatatcccagggtcaggggagcagcaatgttcgtcctcgctatgttccaccccagggtacaccggttcgcactggaggaggccagcgtccagctcagtacacaccacagggcactccaccgactcatcaggctgcccccactggcaccccggtgaaat

SEQ ID NO: 43808 - DNA, 1565 bp, Zea Mays
cacccccacccccacccgatcccgatctcaccgtctccaccccgaccccctcccaccagtctccaacagaccaacagcatctaatcaatcaagacagccccgtgctagctcacccgccggggctcgccacgatgagaggcctcctcgcgtgcgccaccctcgcccgccgcgccgccgcctcctccgcgcccgcgcgcgtccgccacctggcgggcgccgcggaggcggcggaggccgagctcaagaggacggcgctctacgacttccacgtcgcccacggcggcaagatggtgccgttcgccggctggagcatgcccatccagtacagggactccatcatggactccaccgtcaactgccgcgccaacggcagcctcttcgacgtcgcccacatgtgcggcctcagcctcaagggccgcggggccatccccttcctcgagtccctcgtcgtcgccgacgtcgccgcgctcagggacggcaccggcaccctcaccgtcttcaccaacgagcagggcggcgccatcgacgactccgtcatcgccaaggtcaccgaccaccacatctacctcgtcgtcaacgccggatgcagggacaaggacctcgcccacatcgaggcgcacatggaggccttcaacaagaagggcggggacgtcaagtggcacatccacgacgaccgatcgctgctcgcattgcagggtcctcttgctgcacctactctgcagttgctgacgaaagaagatttgagcaaaatgtacttcagtgacttcaagatgattgacatcaatggatatgcatgctttctgacgagaactgggtatcacttcgattctttatcgccattatttgagcagtattgtaaggattgtcttatttcttatttcagctacaccggcgaagatggttttgagatctctgttccgtcagagaatgcagtggatcttgcagaggccatcctagagagatcggaaggcaaggtgcggctgaccggcttgggcgcccgtgacagtctccgactggaggcaggcctgtgcctgtacggcaacgacatggagcagcacatcacgccggtggaagccggcctctcatgggcgatcggcaagaggaggagggcagagggcggtttcctgggcgcagacgtgatcctgaagcagctccaggaagggccaaagatcaggcgcgtgggcatggtcacgcaggggccgcccgcgcggagccacagcgagctggtgagcggctcgggggagaggatcggcgaggtgaccagcggagggttcagcccgtgcctgaagaagaacatcgctatgggctacgtgaagtcgggaatgcacaaggctgggacggagttgaaggtggtcgttcgcgggaagtcctacgacgccgtggtcaccaagatgccgttcgtgcccaccaagtactacaagccctcgtagattatattcttgtacagagggacgccttgcgtttctcttttgtcgttgcggcttgttcttggcagattggttaagcattgcaactgtaacttctgtgagattgtcttacggttcacatttcataaaaaaaaaaaa

SEQ ID NO: 43809 - DNA, 1454 bp, Zea Mays
atagatcgcctgtgcaccctaagtccatccgtcacaacctcaagatgcccccggggaagaaggggccgcgagtcccacgacatcacgcagatacagaacctactcctacagactatgagaaacagagggcaattacaatcatgaagaataatcaaatgatgcaacggttagggattcgtcaattacagtcaatgatggctagtattccaagtggaaggatgaacgataatgctcctcaggaatctggatcgttgtatgatggtgatgatattgaagactctgaggatgagatggaatccctagttgataagtcggtagccagccacatccccaacaatggtgctgaaatctcttcgaaaaatacaagagcctctaaaagggttgttgcacctggagtgcaagaacaaccaattagagttactaggcgaaggagtgctaccataaaccaagagtccaaccaaaatataatggctggtatattatctgattcttgtgatgccacaaaccaagattgcatccaacgcatatctactgttgtacaacctagttcaccaatagagaccgagagcgaagatcccaccggagaccaaggcgagtgattgtctatacactgcgttcctataaatttattctataccaatacaactacatcaaattatgttcaatttctctgataataggattatgtatatcgaattaaaatgtttcagatgttgtagcttgttctttctctataggctttaatattgagatcttatccttgcataatactaataaattcttaactgtgttcactatacatatcatgaattgtttagtctaggtatgcaaagaattaggattgattcttgtaattttggtgtcatactagttattaattttcttatactcaccgcaataaatagaactagtaccaaggcaaagaagtatgggcaggcaacttgagtcattaagcagaggattaggcattaagattccaatccagattcgtgaagggaaaagaagaccagaggcacctatccaagctgccaaatttgcatcagagggtgggatcgcacttaggcagcacatgccgatattttcacattggaaggagtacaagaagaaagagaacgctggtaaaatagaaaactacattggaaagattgctggacaattcaccatggatgctgataatacagcagtgagagcagcatgtattgatatgctaaagggtggtcatcgctagatgaggtataacctaaaaaagaaatacttcaatgaggttcctgcaaatctagtgaggactacatcgcctgtttcgtgcatgactgatgaccaatggaaacttctagtagaaatgtggtctacctcaaagcacaaggacacatgtatgaagaacaaaattagtcgtgaacaagtaaagtttccacaaggcacaggctctcaatcctacattgcaaaggcatactcat

SEQ ID NO: 43810 - DNA, 475 bp, Zea Mays
ctgttcttgcaaaacttcctgcttcctgttgtgtatctgtaacaacaccatgtatgtgaccacggccacttgtcttcctataacaacttttacaagagttggtaattgttttctatgtgctttgatcgatgtaaattttattttctattctttccaagagtgggtaattgttttctatgtgccaagctcaatattttgaaagcatccatttcatctagttcatcagatataatggtgaggaactacccttgtcagcattctgcaggacaagtgttagtgaatgggagaccttgaggagcattgacatggatactgaggtgtgtagagcctgttctgctagccacattttgttcatcattgttcataatataatttggtgagtatatcatagcaccatcacatgcatttgtttatgacataagatgagcaacattaactgcttagtttggctattggtactgaagctaagaaaaaa

SEQ ID NO: 43811 - DNA, 847 bp, Zea Mays
caccccccctcttccatcttcttcctcctcaaacctttgcagccctcaccacacaaaaccctagccgcccccccccatttctctttccccccctccaaggtgcagccctcccacgtggttctccatcgtgtggctgcgatctcaattagagtttggagggaggaaaaaggaaggaggaagggaagaacccaaggtgaatttgtgtttaacttttgttgtttttgtgctgcaatcaattggattatgcgtttatctttgcgaatcggtagatgtgctgtccaggaattttgtgagtgggtggacagcagtagttctagggatttctgggaattttcgtgggttaattagtgggactcagtaggataatcatgtagatctttgtcataccttaccaacgagtacttatgcgctcaattcggaattataatttaggagatatcgttgtttgaatccgggtatgttgctgtccaaaaaacagatttttcaggtgggtgaacagcagtagtattagccgtttctgggaatttttgtgggttaattagtgggaatcagtgggataatcatgtagagctttatcatacctttccaacgagtacttatgcgctcgattaggaattataatttaggagatatcgttgtttgaatccgggtatgttgctgtccaaaaaacagatttttcaggtgggtgaacagcagtagtaatagcagtttctgggaatttttcgtgggtaattagtgataaccagtatgataatcatgtagggctttgtcttatctttccaatgagtacttatgcgcttgatttgaaattatattttaaaagatatcgctgtttgaatccgggtat

SEQ ID NO: 43812 - DNA, 981 bp, Zea Mays
atgatagttcattagcctcctgccactttgtgccccccacgccatgatagtgcagggccacttaatcttgatgtcaatgacaagatgattacaggtgatcaacatgctattgggaaggaaacaacacgtcgtttgggaatgagtactaaatgtacccttcctcttctttactctgaacaaaataaggatgagtcacttgcttccttgccaattgatgaattgaccgagaaggctgatggcttatctagagtctttccagaacacagtgtaattaatagagttgtgttgacgggtcgagcaattttccaaaagatgaaggattacacacttggttttatgcttcttgcactgatatggaagtttgacttcccaccatttatggtacagatcattgccatcctcaatgatggttctattttgtcaccgaagaaactgttctatgtccaaagccttgagaagactgtccaggatgattttcagaagctttcttccctgtaccttcaagtcagcacaatcagtcaggcccttaactctatgacgcggtctcgaaacctcgcaggctcgtagctggtcatttgtgtaccgtcctaggttcttgctgacctttgccttcttggtggcgcagctgctgagtgatctgagtctagtcccataccttactgtcgtatgtggtctttcctcatctcctcacattttgtggtgtttgcattaaccttaatctgtttttgtgatcttggggatttcgggttttagattggcgattggtcagtggtgtgctgtgtgcatggtgcatttgagctctctatgcatcagattgagcttttatatacaagtcatgatttgtgttttaggcttaaccctatgggataaagctaacgaagaatcactgctaaaatatgtttccattattgattgtagcatgattgtgtttaagaaatatgttcaaacttttgtgtcttcattatcaaatattttctcata

SEQ ID NO: 43813 - DNA, 1469 bp, Zea Mays
gattaatcttaatgatataagcgatgatttatatcacaaaatgttagaagatatttttaatgacatcagataacaagtatgtgtttttgctatattttttatttgtcatcttataaacgttgaatattatatatattgtgtgtggatgaggcctccatttcagatttcgcaccaggcccctaaaaagtcaggaacagccctgctcacaggtgcacatttatctattgccctggacaaagaaaaataaaccaggatctagtaaccttatcccagtagaaatatcaagtattggatcactttgtgcttagccacaagtgatgttcccagctgcttttcttttgtttgcagtagaagacaaaatggatattttggctatggggaagggaccaaattcagtgtctctaactggtgctgtgaaccagaccaggtgcagtgactgtagcatggatcaggttgggggataaagaaaaagatctttacctctcggctgctgtaggaaatatcagtttggattcatttaagtctgcacacactagagttcttatctgttggtttactgtctacagaaatagacaaatcagataattggatgttggaatggcccaagttcagtgtttaaattgaggctgggtgctggtattgtatgagcaccctgggatcactcctttgctgcatgcttgacatgttcactaggtgaagcagctctggcatttctactactgttaccttctccttcatcataaggttaaactactcaagagccctgcacaccatcgccagtctggtgaccatgccacccggttccctcacctcgccgtgggcaagacgtctcagggagtgaccagcccgaatgaccctcgttccacgttctcctaagaccatccccaaagacagtctcaccgtcgaccggttaaactgtgtcgttcttggccggtttcgtgcgagcaccgtagtcgtggtaggtctctattgctcccagcgtcggagtttgaagctctaccatgcggtggccgtagaattgagcccaccgaactgagtttgccgccgccgtcatcggtagttatgtcttagcgtccccgcagtcgattgaacacaggttggagtccactgttgcctgggggtcgcgatggtgccgtctccgttgactaggtcacaccaccgtggcggatcgggcgtcagaccgccggcgttgagcacgggccatcggggccaagaagttgcgaattggaagtgaccgaaggaccgaggtgaatcggttagcgacacaagaaacagtgtattggtctcgagttggtttgtcctgttcagcgaggatctttttgcaaaagtgcaagtgcgagcgcgcgggccgtcggccgcaggccgactgtgcctgtcacgcgggccgggtgggccagtttgggcccgagacctattcaccaatttgtttttttcttttatccaagagattggaaattattccaaaaact

SEQ ID NO: 43814 - DNA, 329 bp, Zea Mays
cttgaggactgcgctcgggcgagttgttattgtgcttaggcaaaccgtgaacatgtctcacgtccgaggattgacattgggtgaatcagaaccacatctcttgctgaggttggcctcgggcgagtcgtgactgcctcgagcgagacgtaactgcctcgagcgagttgtgactgcctcgggcatgacctgattgcctcgggcgagacgtggccttgggctagctgctgcctcaggtgcatgatggccttgggcgagctgctgccttgagcgcgttgtggcgtcgggcgagtcgtgtccggtgtgccatgcgaccgaagtcgcacaacgtt

SEQ ID NO: 43815 - DNA, 1460 bp, Zea Mays
aaaacaaatttagctgttttttctttcgacgttttcgtccctacctcgcggttggggctcgcggctctcgcggcccgcctgtgctactgctgcacccgcacggccgcgcgcacctccaccgcaacggtcacttctagctctcgtgcagtcgtgcgtcctccatcgtcgcctctcctcccgcggtcagggtaacgccgcgtgtctcccgtcgcatactcgctcacacccatggccgcaccgccggccgcctcgctagtggcacgcgccgccctcccgccgcgccttcgcccaaccaccgcttctccccttggccccgccgtcctcggtcccagcagccgccgccggtacctccgtctccgccgctcgccatcgctggcggggactgccgcggcggcggcgagctccccatccgtgccttcctcgtttccggggcccgggccaggtatcggcgatgccctcggcgacgtcgaaatctactccgcggccaccggcgagcccgtcctgttcagagacctgtgggaccaggacgagggagtgtctgttgttgcgctgctaaggcatttcgggtgcccatgctgctgggagttggcctctgttctgagggacacaaaggagagatttgattctgctggagtaaaactgattgctgttggtgttggcactccagctaaagcccgtattcttgccgagcgcttgccctttccgttggaatacctctatgctgatcctgatcggaaggcgtataatctcttgggtctatattttggtgttggtcgcacgttcttcaatccggccagtgcgaaagtgttttcacggtttgactcccttaaggaggcggtgaagaattatacaatcgaagccaccccagatgacagggcaggtgtcctacaacaggtaaagaactgttgtacgcaaggaaagacgagggcacaggcgaccatgcacctttggacgatgtgctcaatatctgctgcaaagttcctgtaacctaacccgacggcttgtcccacagctcagtaggtacttggaaagcactttcggcgtccttgattcctgaacttccaggatcgcctgctgcaagagtgtcttctccaccaatgtgccgatattttcttttgagatgcttggtttactttgatatctttttggtgatggatcgtgagttgttggcttgttgcattatgaattgcgtactgtaagtatccagtttgctgtttagcacttatacaattcgaaagcaaagttcgaagtcctggctgcctggctcttccttggagatggaagtttttgcacttccagaaatatcgggaacataaagtccatgtgatcttttgtgcctttaaaattttggatcgtttcctaatggaaatctgttccagttttattgacatcagaaatcctatctcctgtagtcctgttattcagcgtctgagtggagctataaaattgatcttatcatt

SEQ ID NO: 43816 - DNA, 2650 bp, Zea Mays
attggacaaaaatcttctcatcgcgctcctcaagcgctttcctggcgtcttcgaggttgtcgaggagggcgtctactccccgctgtcgtcgctccccgccttgctctgccgcggccgtgcctcgccgccacaggtccaccgctcgagatcccggtcgacgctccggcctgatctccatttttggccttcggttggagatcggcacttctcggtgatgtccctttggctgcacggccacccaatcgggtgtttgggtcttcgatttgggtctgtagcgttggagatacccccttcaaactgctgccggtccggaagccgtgcctcctagccgcccacgctcgccgtccgtgatccgttctcgactgttggtgctccggactcacagtccatattgatggctacattatcatggtggatggaatggtcggtggagaatgttcgtgaggcatttttctcctatttcggggaaaatcagcacgtgaggttgccatctaccccagtgatccccgttgatgatccgaaggtgccccttcttcatacatgtttgcaccggttcaaggggacccttggtggcagagagaggcatcgcacctgcttttcgctgaggtgcattattgcaagtggtgacgaagatttgattgaccgcttcagaattgacgctactttccatcgattcacggagatccttgggagttggtctcatgggtactatttcaaggaggaagctatcggcttgttattcagtcttctcaccgagaaatacaagttacctcagtctagaatatatgcctcatactttagtggtgatatgtcctcttgtttgagttcggacgacgagtcaagaaataccttgcagaaatatataggagcagaaagaatcttgccttccatgtccaaggttgatttttggatgcccggtgaaactggtccttgtgggccatgtattggttttttccttgattgttcggacaacaatgatggtgttgattccgtaaggaacataacggatggcaagcttgtcgagatatgccgtcttgtgtttgttgagttcgatcggcaagcagatggcgtcttggagcctttccaagctaagcatgtcttaacagggattaatcttgaatgtttagctgccattcttcaaaagaaagaaagccactatgacttagatgtatacgcttatgtaattcgtcaagtctactggcgtactggtaaaggtttcaaggattacacaggtaaggttggtgctgctgatacagatggagttgatacggcataccgcctagtcgcagatcacatgagaatgatcgctgttactaatgcacccggttctcaacttggttagagcgttatgtttctgttggtcacgaatgttaatatagttacgacatcaatgtatgggtttgtcatgagcacgagtacaattattggtcattttcaaggaacaatcagaccaatctgattgttggatgacttattacatgaatacatttttttgtcattacattgttcttattgtgttaaaattggctttcatctttatgaataccagggttaggaaatgaaggtcgcgagtatttcctgaagtgtgctgataaacaggctgtgaagtatggctatcaagtacttaagataaatgaagaggattacgacatgatgtcttcttcaatgcaccggtgcaaataacagagcatccatgttgttgatgcaattcttctaaatgaacctgatttatgtaccgagcttgaaagagaaataatcgacagaatagtcaaagatgaagtgatgatctacaaaaagactaaagcagaggcaacgttctcctgcttggagagaaaataaccctcgatttagatatcaagaaagtgttggagagccatctcatccatcttttccagaggcctcttttgtgtggcaatacacaaatgcaggcatgcaactgtatatatgcaagtgttttgaaaatgaatgtccattaactcaaaagctaagctactgtccacttatactgcagttggaacagaacttggaactatcagagttcaataaacaagttcttggtgtattgccgaagcttacatgcagcttatactttgatgtgacattttctagctcttgtggcttagagaagacctttgaaactgcactgtttggttttcttggtgtccctctacgccatggctggttggtagatccccaggatgctgagttggactcctcaatacgtggaagctcctactccaaactttcgtataatcttgctatctatgaatcaattcgacccaagacaaattcagggcctcaaaagcatggtcgatatgaagatgatatgttctattcagcgcttgcattctctaaaactggatcagaaaaagaacttgattctacttcttattctcttccttacataatgacctcagagcgttacaacctactgtcctgatctggaatgaaaacttaattacaatatctaagtttgaagacaaaatatatgtgttgctgaacgatttgtccttgttgagaactgaaaccgatgctgtgtgggaaaggttaacacagtttcttgcgcatggtctcgttggacatgcccgacactgacctagccgacgccatcggtctttctggcgggtaacagtttgctgcacaaagtccc

SEQ ID NO: 43817 - DNA, 448 bp, Zea Mays
ggcggttattgctgcctgcaccacaggctcctacaagaaaacacagtgcagagttggatgactgccaagatcaatgtagatatggatgcaaggagcctattgctggtaaaccatggcacctgctacggttgatgctgcctcatccgtcttggaagataaatctgtaaattcggtctgaatctcaggcggttgttgtatcaacaagtcctggcacaaagccttcgttgtaataatataagcattgcatggagctgtgtgctgaatgtgtgctacggtactttcaatactgggctcagcatcaatccagaagatgtactctaaacaaagattctggatggcttcttgtgccaactaggaacaatgtaaaatttatgcaagcatttctgctcactcctgatctatgtaatactaagctaaaagcttaaagggcttaagggcttaaaaaaat

SEQ ID NO: 43818 - DNA, 4781 bp, Zea Mays
tgctattgggcctctcaaaggcccgaaaaaacacaggtcaccgtcctctcctctagcgccgcccatccatccagccgtccaacgcctactaccgccgccacccgcctcccgcctctcctctagccccagccgttcagcgccgcccgcctccctcctctcctcctctcctccctcctccagtgccgccacgacgctcgccactagcgccgttcgcctcctccaacgcccgagcaccgcctccctcctccctcctccagcgccgactgcccctaacaccgccctctagctcctctagcagccagcgtcgcttacagccatcaagttccagggcaggagtcaagacagtgaatcacccagctgctctattcgctaaatcatggaagatagtaatgccctgattttgccctgcaaaaggaagaacaaggcgcaagtgaaagccaaggatggtaagaaagccaagaaggaagacccaaagatgagcaagacgaagctcaaaaagctgcaaaaattggaggaggaaaagaaaaagaagctgctacaagctaaaagcatcgaggaagcacaagatctcagaggatgcatattcactgcttcatgcttcagggactattggtcaagctgagactttgaaagaaaaacggaggcgtgctgtgcaattctcaaaggctggcctggatgttcctgaagaactctcactgttcaagaaaagcggtggtacgaaagttcctgaaaacagtgatgttggggagcaagtttccccattaaagtttgttgagccagcaccaattgtggattctggtagagaatgtaataacaaaatgaaggatctagtgaaagctattgaatgccaaccgattatgggttttggagctggcattccagagccagaaactgaagagcctagtgatgatgctcatatgttgacaaatcagaaaattcagttgtcaattccaagttgttctggagcagaattagatttgcagggtaaagaactaggacaagggcagcattctgtacaggagtgcataaatcctccaattgttgtacctgtgtcaagactgcatgaagttgagaaggcaaggagggatctcccaataataatgatggagcaagaaataatggaagctatctatgaaaattctgtagtaattctgtgcggagagactggctgcggtaaaactacccaggttccccagttcctatacgaagctggcttcggcactagtgaccgagctgatagaaaagggatgattggtatcacacaaccacggcgcgtagctgttcatgccacagctaagagggtttcctatgagttaggacttaagctgggaagagaagttggttttcaagttaggcatgatagaaaggtaggaagtgaatgctccatcaagttcatgacagatggtattttgctgcgagaaatccagggtgattttctgttgaagcgctattcagtgatcatattggatgaggcacacgaaaggagcttgaacacagatatacttattgggatgctttctagaattataaagattcgcaaggatttgtatgcaaagcagcaggaaaaattacggtctggatttaagatcaaaccagaggataagatcagtcagttaaaggtggtgctcatgagtgctactctgcagttaaaggactttatttcaaatagaaggttgtttggcgtgatcccaccagctgttaaggtacctgtgcggcagtttccagtatcagttcacttctcaaagaggacacatgatgattatttagggctagcttataaaaaggttatgtcaatccacaagaggcttccaccaggtggaatcctcgtatttgtcactggacaacgggaagtggagtacttgtgtaagaaactgcgaagagcatccaaggtgcaaactgctaagaatcctgggaaaactgatggtgaagacaatggtccatgcccaaaagtagatgaaaaggaaatttttgaagcatatgatattgacagagatgaacccgagcaccgatatgacatgttttcctcgtatgatgacgatggtatgtatgatgacgatggtatgaatgttgagacaaatattgattcttctgacaacgaaacggagagcgaaatggatactgaaaccgatgacgaagagtctgttactattgaaactacagaagaggatgttccagtattagcatttttgaaagatgctgagagctcatctgcgttgaaggcatcatttggagctttgtcgggaataccaaatgtgctggaaagtgtcgaggaattaagtgatgctaaatgtgaagaaaagaccagcacttcacttcgttgttttagtaaatgcacagaacataagcctgtttcacatggtagacttcgtgtcttgccactttatgcaaagttatcagcttcacaacagcttcaagtgtttgaagatgtcccagagggggaaagattagttgtggtggcaactaatgttgccgaaacctctctaacaattccaggcataaaatatgtagttgatactggaaaagaaaaggttaagaattatgatcatgctactgggatgtcaagttatgatgtccaatggataagcaaggcatcagcatcccagcgtgctggaagagcaggaagaacagggcctggccactgttaccgtctctactcagctgcagcatatggtaaagatgatttattccctgaattcgctgaacctcagattaagaaaattccagttgaaggtgttgtcctgatgctcaagttcatgtctattgataaggttgagaactttcctttcccaacaccaccaaacaaggaaagtttggttgaagctgagcgttgcttaaagacattggaagcacttcatagtgatggaaaacttacacctatgggcaaggcaatggcacagtaccccatgagcccaagacattctcgtcttcttcttacagtgattaagaatttgaagaataagcagcaaggctttgctagatctaacttcatattaggatatgctgctgctgctgcatcaggtttgaattttactaatccttttctcaagcaattggatgaatgtgacacttatggtgaatcagtagaaaacactaatctggaagctaatggtccatgggaaaggaagagacagaagaagctcaaggctgtggttagagaggcacgggaaaagttttctaaccctagcagtgatgctttaaccatcgctcgtgccctgcagttctttgagttgtcagaaaacccagtggaattctgcagagccaattcacttcatcttaaaaccatggaagagatgtcaaagttgagaaagcagcttctgcagttaatatttcgccatagcaaatggtgcgaggagtttgcttggaattcgggtgactctgctgaggttgaacgggcctggaggaacgagcccagtatattgcagttgaatgaagaggaacttcttgggcaaggaatttgcgctggatgggctgatagagttgcaaggaggattcacacctatttgaaaccatcagaagacgatcgaaaggttcgagccgttcgttatcagtcttgtgcacttgatgatacaatatatctgcaccgatcatcatctgtcgcccaagttgccccagagcttgtagtttactcggagctacttagtacaaagaggctatacatgcacggtgtaacgaccgtaaagccagggtggcttttgaagtatgctagttccctctgcaccttctctgcaccgttggaagatccgaagccgtactatgacccactgaacgaccaagtctactgctacgttagcccggtcttctctcgtcataactggcagcttccgttgcacagtttacctatcaaagacggtgcgagccggctgcaggtgtttgcatgcgcgttgcttaaaggggacgtcctgccatgtctacgggacgccaaggatttcctcgcgctgtcaccatccgctgtgttggggcctgccaggcaacggagagtgggagatcttcttagcaggatgaagatcggtccgaagttagtcgacagcagggcagcactgagaggcgtgtggaattttgatcctggttttctctatcctgagctcaagttgtggtaccaggatagattccatgaccagtttgacttggtgtgggagcagatgcaccaacaggttctccttgaggggcgcaagcttttcccaaagaggtccaagaaagttaaaggctaggccaaaatttttggtgcagttggttggctggcagaagcttttttgtgtgtgtggttttaaggaatagatacgagagatgcagtgagacatcatgcacaagcagttttgtctagacattttgccttgatctggatttgttccattgcatctccgtgttgaactgttgatgtacaccgttcctctgcaagcaaccttcaccctgccatctgtgtcagaaatgttttctgatccaaccatttgctcaaaaccttgaacctgaaaaatatcctgatatccaaccatcgccatggcccatggggattggagggaattggcttcgagtgagggccaggggtaggattcgccagaaacaaacaggggatggtcgtgcgcagattgattacatttctctcctttccgtctctcgctctatttgcttttagcatatgaagtgtccgattccaggggtaaaaacagcggtagagtcgatataaaaatgtagcactaaactatattaccctcagttcaagaaaacaaattacccctctggcatgcttgcatgaactttggtctgcatgtaaaattgaattccag

SEQ ID NO: 43819 - DNA, 1001 bp, Zea Mays
caaagtccaaagcccccaaaacccaaaaccctgcgaccccaagataccaaagccagcagcagaagccgatgcccatgcagccgcaggcgccatcgatgaccccggccgccggaatcaccacggagcagatccaaaagtatctggatgagaataagcagcttattttggccattttggaaaatcagaacctaggaaaattggcagaatgtgctcagtatcagtcacaacttcagaagaacctcttgtatctcgctgcaatcgcagatgcccaaccagagactgctatggcgccgcctggtgcatcgcctggagtagggcagtacatgtcacaggtgcctatgttcccgccgaggacacctctaacgccacagcagatgctggagcagcaacttcagcaacagcaagctcaattgctaaacttcagtggccaaatggttgctaggcctggcatggttaacggcatgcttcaggccatgcaagtccaacaagctcagccatcgccggtaatgaacagaccggatgctggtgggatcgcctcggagccctctggcactgagagccacaggactagcactggtggcgataatggcggtggaagcgactagtccaaagagtcttgaggatttacgagctagccttgtaggttgcaaaatatgcacgtatactgccgatgaccaaagagaggatcgatcctgcgcccttagttgataagtggccatgatctttgcatggatgatcagtagctgtcacggttttatctttgttgccagtctgtagaacacacgtatagattgttgtgacatttatttgcttgctgtttccacaatgtactgtcgtagacttggagccatatgctagtttatggcttcaggagctggatttcagttacgagctgtgatggcaaaactttcaactcttcaggtagctggattcatttatgttatatgttacaagtttcatatctgtcaccaaattggaagcagtacggattctcatagcta

SEQ ID NO: 43820 - DNA, 1827 bp, Zea Mays
  misc_feature (1827)..(1827): n is a, c, g, or t
gtgattcggcccattgtagccccgagacagcgtccgcctacggcctatccgcgtcagcccgccggcgagtcgcgcacgagacctgcgaggcgcgatggcaggccgcggcggcgccggccggcggcctcgcgccgtcttcatggccttcggcactcagggcgacgtcttccccatagcagcgcttgctgcagcttttgcgtgtgaccaacaggagtatgctgtggtgttcatcactcattcagcgcaccggagtttgtcagcacatctagcagccagcagtgttagatacatgcctgtgtcaagcccgcctgtcctcgctgccgaacagttagagaatatctcaagtgattctattcaatcaaaccatgagcgtgagtccttttcaatgcggaaaaaagccattcaagcggagcacaggaaagaatgcttgtcttttgtggaagaagtttttggaaacgacccaagcatcagtggggattttattgtgatcaatttcttcgctttggttggcaccttgcagaactattccaagtaaagtgcgtcattgctgctccctattttgttccatatagtgctcctacatcattcaaacgccaatttaaacaaacttttcctctactttacaagtactttcaagaagctcctgcaaatacggtctgctggactgacattatccattggatgtgggcactcttcatggaaagttggggatcatggagaaatgattgtctgaatcttagccccattcctttcacagatccagtaaccaatcttcctttgtggcatgtgcgagaggagtcacctttattactgtatggtttcagcaaagaaattgtggagtgcccaggatattggccgttcaatgctcatgcttgtggcttttggtttctacctatggattggcaattttcttgtgacaaatgcatggagttgtctggaaatatcaattcttcatttggtggtatgttgtgtgcaaaccattcttccctggaacacttcctcacaaggaatgcttattcatcaagacctatatttgtaggattaagttccattggtagaatgggctttcttagaaatcctaaagcatttttaatggtgcttaaggctgccatagagtcaacggattatatgttcatccttttctcatctggatacaagccattggattctgcaattcaatctattgcttcatcagtaaatgaatcaagaggggtggattcaccttctcttggtggtgacagcgctctcctttttaatggccgccttttctgctttttaggatcaataccgtacagttggctttttcctaggtgtgcagccgctattcaccatgctggcagtggatcaacagctgcagcactacttgctggtatccctcaggtaacatgccctttcatgatggaccaattttactggtcagagaggctacagtggttgggagtggcgcctgaacccctacaaagacaaaatctagtcccagataatgatgacgccttgagcatccacaatgctgcagatgtgctagttggagctatcaggtcagctttatcgccggaaaccaaagctcaggcggccagaattgctgataggctttcttctgaggatggaattggagaagccctcaggatattgaaggcgagagtgttgactcagaacaaaatcatcagctcattcatcgcaagtaaataattagtactgatatgatatgaggcattgatttaaaccactaaatttaagaaatggacttctaatgcaccgccccatgtaagatagagtaatttctcaaaccaatcaactttacggggcgtttggatccctttattttan

SEQ ID NO: 43821 - DNA, 684 bp, Zea Mays
ccattgtttcctcagctggatcactgatctaaatagcattgcacaacagcacaagcacctcgagtcgagatcttttgtcgaccggtggagctaggtaccttttttgcggcagtagtgcacgcaagtcctgatcaagatgcagggaggagggagagcaagaggtgtggccgtagggacggcggtgttccttgcgctggtgctcgtggcagcatcagtgcatgctgacgccgcggccgcaccagcgcggcgccttctcggagccggcggcggcgctgcgccgccgtcaccaaagctgtcggtatccgttaccaaggcctcgtccataccacattgcggcaaaacgcacgacccaaacactccatgccctccttcgctctcaactcgcacgccatagcaaagctagctagctgtataaaacttggagcttggacctccgcctcggggttttcctacggaactactgtgtttagcttgaataagtttgccgttcatgtataggatggcagtattgatcacgaacattagcagtggagaataatttgtcgggttcgttgaattatttctagttcttttgtaataattatgatgttgattggttcggttatttagtcctgtaattagttcacagagtgatctattaccgttgctttatattccctatgttcttttttatttatcgtcgga

SEQ ID NO: 43822 - DNA, 686 bp, Zea Mays
ctgcacttagggggagtattcaaaactcaaatcactctgaaaacccctagtgcaagccaaaatgcaaatttcaccatttgcctattttcactaaaaattatctagcctatggcaaaatattttgaaaattatgagaaaatatatgagggtaccaatacctgtcccaacaagtgttattttgtgtgattataagttgggatttggtttggttggaaattagatagaaaaattcaaaaatttcaaatctttcctctgtctgggctcaccggacagtccggtgtgcaccagacaccgcactgtgcaatgtccggtgcaccggcagccgcgcgctcaaaatcctttttcctgtgcgctgtccggtgtgcaccggacaggcactgtatactgtccggtgcgcccatactcggtttttaaaaaatctttccctgcccgagcccgaggccaggctctatttcctctctatggccactgcctctctctgtctctggcagtttcctccctcgccggcgacctcccctccccggcggcgatcctccggcgaccaagtgcttgtcttctccttcctctggtgagcagccctgcttcccccatgcatcgcttttccctctctctctctctccatttctctggacagtgctcccctctccacccttttgtgcctaaattcaaaattctgtgaattccag

SEQ ID NO: 43823 - DNA, 635 bp, Zea Mays
gcgctcgccgcgcacatggccggagcttttccctgtgtcgcgcgcgctccgtcatcctttgctgtgacttcgcaccgtgaagtttccctacacgcgtcgagctcccgcgccgaatcctttttcagctcgctcgtgatgcccggcgtccagcctgctctgctcgcccgcatctgctactcactggtgatagcttcgctcgctcgtgacgcccggcgtccagcctgctctgctcgcccgcatctgctactcactggtgatagcttcgcgtgccgtcgagcctgtcgaacctcattcttccctactcaacctcgtcaaaccccgaatcctggacgttaggcaaaaataagcgaggtccatgtgcatcgcttatcaagtgctcggtcgaagacttcaattgaaggttgtcgttgttccgtgcgtcatcaagaaatcccaagagtcgggtgaagacgaagctagcagtgtggtgttcaccaagtgcgtgacaaaaagctcgaacatcctacgtgactcaagttcgattcgtcaaaattattcagtcaaggactagatctttagcaattgattaccaaagaaaagaaggcccctggatgacgtcaaccggaaaccgtcatcgtgcttctgactatcgcgtc

SEQ ID NO: 43824 - DNA, 1080 bp, Zea Mays
gtggttcggccaagcctgaaatccttgcctacatccatgttgtggtgtccacttgtacaagggttgctttcaacccctctcaagtgattacgtatcaaacttgagtgacacaatcttccttatgaatatgaacccctttcgcaaggaatctccacaatttgaagtcttttgcatccttatacaaaatcggagttacaaattgaatatcacaagggagatgtagaactacttggtaccttccctacaacttatacacacatgattagtacttaatccaattgactaagtgtaggaaacttacctcttttacagattttcacccaggttcctgatttggaccaaaccaaataaataatgcacttttcgctacaaaaagaaattagagaccaaatgcaagtgctacaaacattgtgacctatgcaacatgtgtaaaggtccaaacctcacagatttgccattttgctgcaagttgcatttttgggtccctgtttagctcaacataagtccaaaatgcacttttctcacaaaattgcgttagagatcaaagtaaagcactatagacatagtatcaggcttatgcaactttttcaaacactcaaacctcatgtttttactgttttacaaaaagttgcactttctagcctctagtttagttcgtttggacttagttccttcagtttgtcttcaagtgaacccgtgctcatattcatatcaaactagttagtttattgtggtgtgttggacacttaatcaccaaaacatgtataaatggctatctagcacatttagcttctagttttgcatgtctataaccatggtcccctgtagatggccttacggcatgtttgggggaagggggttgaggggtaaaaaatgaatagtaagcgattttaaccactcaaccaacaactcaaccctcttcagactgtctccactaacatccctaaattatgtcttataaagaaatattctatgttctttaccgcaccctttaaaagatttcattatttatatcttctttgtctttagcaacgttccctatattcgatcctctatatctatagtgttaacagaatccat

SEQ ID NO: 43825 - DNA, 2023 bp, Zea Mays
atggggaagctctcctccgtgggcagcaacttcatggcgtccgctggcagccgcagcaccagcggcgggtttgacgagggggccaagtacttcgacggccagatcctcaaggcgcccaacctccacaccttcacattcatagagctcaagacggccaccaagaacttccgtccggacagcgtcctcggcgaaggagggttcgggagagtctacaaagggtgggtggatgagaagaccatggcgccgaccaggaacggcaccgacatggttgttgcggtcaagaagctcaactcagagagcatgcaggggtttgaggaatggcagatgcagtatatgatcgtcgacggcgtttctagctcctggtaagggagggaggcaggcagggtcgttcccacgtcagagcaaaactcttgcaccaagcctccaactccaagccaccatgtggccgaatttgattgctttttacgctacatggtggttgactagtcgtgacactagcctgctcatgcaagtctctaatttctttggtccttattttacagcttctgtttccaaattcccacaccgtgtatcttttctgcttagcttcaagatagatatatcccttcgctggaggtagccatttgacagtgccaagttggattcaggtacatcaagtttgatacatttactcctgcagctgagcgggggctcccggtcacaagggtcattagtcgcatgacgctgcaacagatccttgctcgagcagttgggtatgacgctatattgaatggaagccatgtagtcaattttacagatgatggcagtaagtgccatattggaggacggtagaatatttgaaggtgaccttttggttggtgccgatggaatatggtcaaaggtgaggaagacactattcgggcactcagatgccacctattcaggttacacctgctacactggaattgcagattttgtgccgcctgatatcgatacggttgggtatgttcccctatttttgcgacttatggtgatgtcccttgctgtctcggcaataaagtatcaccagactgcaggatttaggccgcccaggtccaattgtattgtaataaaaacttttaaactggtcagtttgtgtaattaaaactttttaacattttgttccagtgagagtgcaaatgagtacacagatgatgaggatgcaagctggaaagtccgtagggcatcatcaaagtgcctatctgcaattatagtgtctcgtcctgaaatgttggtgaagatgtttctagaggcttgtccaaagttaattgaacgatttcgggaaagagaagagaatgtaaagatggatatatttaacaccttcattgagctgttacgccaaactggtaatgttacgaaaggacaaggcgacatcgatgagtccagccctcgctggttgctgaagcaagaggtccaaaagttgtcaagtctatcaacaggcagttacgtgaaaaatcaatcaagacaaaggttgggacattttcagtactgaaggagcttgtggttgtattaccagactgtcttgctgatcattttggatcacttgttcctgggattgagaaggctttgaatgacaagtcttctacctccaacctgaagattgaagcacttgtattaacaaggcttgttatggcttcacattcgccatctgtgtttcatccatacatcaagtggatgaatatgcctgatcttctggaagttatagatttcaaggacacttttcttgatgccaaccatgttcagcaaagttttccagactaccaggagatgtacgaggatgcaagacaagtggcgactgatgctgtcggcagtatcggaactgtggcgtcgttctgtgtagagaaaagagtggtcgcagcgtacagggacaagtgtgaggctctaaggaaacagggcatccgaatgagaattttttctgcgtactggaattctggttctgatttcagcgtacaggcatgcatcagcagagcccacagacctgcattgacatgacaagagtccctcg

SEQ ID NO: 43826 - DNA, 1627 bp, Zea Mays
cggaaccaacccttgtgtggtaacgtccggatcgaagcctggctccacgcgaccgacgcagcggcggctccacgcgaccggcgcgatggcggctttgacgcgaccggcacggcggcggcgcacagccccgacaacgaccctccccgctgccttctccacgatccctacaacaccaattatagttggggaaggtgaacctcctccctcttgggatccggtaccaactccaaaagctatggttggaaaaggctccccaaggttcaacataggtggttccccaaagttgcgtaggttcattcctacaacaagtgctactaaaaagaagacttctcctaaatgcagtggggcaaaaaagagtggaagttctccaagagtgaaacaaagagcggattggaatccaggccttgagaggtctcttgttgacattctccatgaatttaaagaaagtggatatagaggtgacaatggttggaactcggaagggtggaatagaatggtcaaggagtttcatgtgaggaacaagtatgtctcctttacaaagtctcaaattcaggataaagaaggtcagctgaagagagactacaagatgctcaaagcagcaaagcaacagagtgggtccacctggaatgagaaaaggaatatggttgaaggaccaccagctttgtgggagaatctcattgtggacacttggctgaagggacttggaattgcacttctcttgatgcaccgcgagaggaagaaccgaatgagcaacttcaggatgtagaagatggaccacaaggctttgatctgaatgttgttcatgatgtatatgatgaagttgatgatgcactcactgaaaggaatgaagatatgcttcaaggaagggctaatactctgtcacgagatgaagaaagtgggcagcgaagacctgctgcgtcaagaaacaagcaagaaaaggaactaaagaagcctagaaagactgacaacatagaaaatatgatgaacaaatacctagaaacgaggagcaagcaagtagaagatgaagctgcaagagaaaaggaagcaagagaaaaggagacaagagaaaaggaggcaactcaaagtgaagatttctccatcaaaaggtgcatatcagttctgaacacaatggaagaagtgaccaaactggagaaggcaaaagcatattcagtcttcaccaagagcaaagagaatagagagactttcatatgtgcatgtgaagcggatcaagaatcagctttgatttggctaagaaatgagatggcttagtaggtttgggcgatcaataggtgatgcttagcacatctggaggtttcttattttgaactgacatgcttagttataaagtggtgtttctttttagcacatctgttctatctcttagctgttgaagatgtcagtttatacctgtctatcaatccatgtcacaagttatacttgttttttcacatgcctcttgatcctggaatattatgctcagctctgctgatgaagagaagaacgcagggctgtctgactctggcgttgtagattaatggccagttgatgactgtgctaacgatacagctcaccacaattaatgtccagtggccctacctgctaacaacttgctaatctatgcagtcgg

SEQ ID NO: 43827 - DNA, 1906 bp, Zea Mays
gtctcaaccacccacgcctcatctagagttgacacgcgccatgtactggacgattggccgctggagacgacgcacgctcggccatggcgctcgctctcctatccccctccacgccatcccatcgtatactgcttcgtcctattccatttccatctctgccagtcgcgcgcgccactagtgccggtagcttcggcctcgcgttcttctgccccctctctcgcggttcctcctcgctgcagaggaccggcgcggcaggcggcgttattgatagtgccggagagggctcatcggaagaaccggtcgctggatggctcagcgcagacctgctcaggcggatatcaggcgcggcggacgcggaccgggtcctggacattgttgccgagtcagttgaaggcgcgggtgccgctctgggcgcgcccgagtgcaacgcgatcgtctccgccgcttttgaccgtggcaacatcgcgctcgctctctcggtcttcgaagccatgcggtccggtttcgcgggagttggaggctggaggtgggcaaggcctgatgtgaggacttatgcgttgcttgtacagcggttggcggccgccccgcgtgttgctgatgcaatcatgataattgattatgtgtctcgcgcaggtgcttcttctatggatgaggttcctttcggaatcattgttcgctgtccaacctgcatgatagcagttgctgttgtgcagcctcaggatggaactcaggttgtttcctgttcaaagtgtcgatatcaatatgaattattttctggagacattacgagtattgaatccgaagaagttagcatggatatttcagccctggagaaagccttgagatttattaatatgaggaaagatggtattccagctgctgtccactctattgtgatccgctcaccttcaggaacagcacgtacttacagatttgctacccagaatgtaactcttcctgctcaagaaggagaaagggttaccatttccttggcggccccagttaacgtttaccgtgacatgggacccctcaaggttgctgcgcgctcacaaggatttaaacctggagaacctatgtgtctcactaatcacatcaatgggcaagtctcgaagttgctaagagctccatcaaagaacaagggaacatttttccttagcccatatttattgcaactgccattgcatcagctgccataggaacaacactaaatggagtggtcctgccaaaaattcaaaagaaaaagcagtggatatagttgctgtacagcaaaagcttttgtctcagtatgatattcttcagagtcgtcttaaggaactgaaacagtttgctcaaaaagaggtgtggatgcttgcgcggatgtgtcagttggataacaagatagtagcagttggtgaaccatcttatcgctgtgctcaatgatcgaaattgaagttgagatggactctgatgttatagctgctgaagcggcaagcagtgcagagagaatatctgagcagatacaacaattaatggagatcgatagtcttgaagagcaatggcgtatacaagctgaggctaatgatgaagcagaaaggcttcttagttcagattcctcagaaacatatcctgctggacgtgtaatgtaatataactctgttagtgcgcaggcattattctttattttctatttagttgtttatctctcttcaatttaaatgttctccctaccaaagtacaaacaaaacctctagttagacttgtcaaggaaaataatgccagaaaattagaaaaatagtggaacaacatgataatagatagatcatatcattactacacaaaatagagtgtcacattcgttaataatggcaggctaccactagagacaagtgcccgccgagataagtggttgtccgcgttaatggttaac

SEQ ID NO: 43828 - DNA, 1711 bp, Zea Mays
ggcttcctcgcgacatggcagttgccgccgacgccgtcaggtgccaacgggaaaggcaggaagacaatactaatagtttcgatttcagtagctgcaagcttgttcctaccatgtatatatgtgttggtatggcacaggcaaaaactcaggtttttcctatgcaaaaaaaccagcagcagcatacaagagaacattgaggctctaatatcatcgtatggatcactagctccaaaaagatacaagtactcagaagtaacaaaaataacatcatgcataaataataagcttggagaaggtggttatggcgtggttttcaaaggaatgctagatgacagtcgtctagttgcagtgaaattcctgcatgactccaaaggtgatggtgaggagtttgtgaacgaggttatgagtattggcaggacatctcatattaatattgttagcttatttgggttttgtttggaaggctcaaagcgggccctaatatatgagtatatgccaaatggctctttggataagtacatatactcagataacccaaaggaagttttaggatgggataggctctataccatagcaattgggatcgctcgagggttggaatacttgcaccatagttgtaatacacgcatagtccatttcgatatcaagcctcaaaatatccttctagatcaaaacttccagccaaagattgctgattttggtttggcaaagttatgtcataccaaggagagcaagctttctatgactggtgctagaggtacacctgggtttatagctcctgaagtacattctcgaaccttcggagttgtttctacaaaatcagatgtttatagttatggaatgatgttactagagatggttggaggcaggaaaaatgttaaatcatttgctcaagtttcaagtgaaaagtattttccacattggatttatgaccactttggtcaaaacgatggattactggcatgtgaaggcacacctgaaaaagaagaaatcgccaaaaagatggctctggttggtatgtggtgcatccaaatattaccattgcatcgccctactataacaaaggttttggaaatgtttgatagaggcttagatgaattggacatgccaccgaggcaaaacttcagtcaaacatttgaagatccgacttacaatttcaacgcagaaaatatgagcactagcagtggtaccaaaacacaaagatgaagagataaaaattcggtcagggagggatgaccatcaaaatgacccaaacaacggtcccgaccgagaaaatctccgaccactggcctcccatcactaacaagatatcgtaaccagagagcggacgaggcacaatacgagatttttttaactaagcccgaaaattcgtcctgagggtaatcgaatctgggacttgaagattaaccactaggctagagaccctttcgcaaagatgaagagataagcactttgaattcaaaatttatatgacagttaccttaccaatattaccaacaactctgtaaaatgataccttacaacatcgaaattcgacattaaacttctgtatgtatatatgtgagatattttaaatttgaagttattacatgttaggaatttaggattagggatacaaagattaacataaaaactcctctaatatagaggagaaaaaacattggaaaatagatctactaacatgacataagtgaaacagacacaagagtgg

SEQ ID NO: 43829 - DNA, 496 bp, Zea Mays
ctacagtgtcatcctatccttacctcctccctttgccatggataaacttcaccctacctgactgagctctgtgaacctgcgtggatcttcttgagtgagccacgactacatctcatgttcatagttatccctactgcaaattcaagaatccagcccccttgatcttttcacttgctatttaaagagcaaccaggggggagaaagaaagcaggagccaacccagtaatccttgcttcgaccatcaaccatagtgagtagcttcaattagcagtattgcttccccaaaccataccctggacgtgcccagttccactgatcaagccaccgcgtgtgtctggtgaccacctcgccaacacatcaacctcacgtggccaggcggttacgaaaacgaagaagaagtagaggttgaagaaggaagagctacaccaccacttgaagaccacctgtcgggaactgcttttattttgatatttgtggagcagagcccgactctcct

SEQ ID NO: 43830 - DNA, 1312 bp, Zea Mays
aggcatcaccgcgtcagctactcaggtcaggctagggcgttgggctgccatcctgctggtttaactccacgccgcctgcacctgccaggcaggggcgctaggttgccatccctccaggaaccgatcagccgagtagttgctgcctcgctggtcaggttgctgtctggctatttacttttattgatggaatcggctgtggaaggaaaggggaggactgcaagtgatggaactgattcagaaagtaattcgtttgacaagagggatgatatgtctgaagatgaactggtagtgcttggtggaaaaattgatgattcagtggacaatgtcaatattgatgaatctgaggacaacagaagtaaacaaggggtcaagagaaggcgcaaaagggtgaagatgaaggctacagctgaaactgaaaggagcaaaaaggcaaaatctaaagtttgggatgcctttactaaggtgactgtgccggatacgacagagaaggggaagatgatatcaaaggcaaaatgtaactattgtaagaagctatattcttacatacaaggatcaacaacatctcatttgtcaaggcacatgagaatttgtgccgtgtatttgaagcatgtggcaaagcagcagaatcaatctcttctaaattttgctccatcaacagcaggtgaatctggatctggccttcctactatcacttctccaaaagattataaccatgagaaagtaaaaaaactaattgctaagatgataatagttcatgagtatccatttaggatggttgagcatacttggtttaacattgtcatgaggtatttgaatccttcatatgagtttattggtaggaagactataagagctgaatgtttaaagatctatgagtctgaaaaagaatcactagcaaaagtccttaaaggtgttgagtatatttccctaaccactgatttgtggacatccaatcaaacattatcctatatgtgtttggttgcacactacatagatagtgattggaagatgcaatgtcgtgtcctgaatttttttgaattggaccccccacacaaagggcctgttataggacaagcagtatatgaatgtgttgctggctggaaaatagaagataaaattgttttccatgactttagataatgcctcaaacaatgatggtgctattcgaggtttgagggccagattttcagctagacaaggaagtgcttttgttgcaaaatatttccatatcagatgttgtgcacacataactattcttgatccaaggtataaaatgagatttattgagtggtgcttcaataagatatttgat

SEQ ID NO: 43831 - DNA, 2351 bp, Zea Mays
cccaaaccccggccgaccaaccccaaccacggacccggactggctgtccgcctatcacccgccactattgctcttgcagcctgcttctctccccccttctcgccgcgtacgcacgggtcgcacgcacgcacaccccgttcgtgccacactgccacctaacccccctcccccacgatcccgaggctactagcactaggcgtcgtcctcggcagcaacggcggctgggctcccgccgatggcggcgtccctcgccgccgccgcctctcgcctcgccgccaccggcggcgagttgtcgtggtcggcgcggccctgccccgggagtctcgtggcgagcttccccagcgccgggcggctccggcgccccgcttcgggcgtgcggtgcggaggtggggttttgcccgcggccgcggggacgggggcggaagcggaggaagggggccgcttcgttggctggttccgggaggcgtggccttacatccggggccaccggggcagcaccttcgtcgtcgtcatctccggggaggtcatcgccggcccgcacctcgacggcattctgcaggatatatcccttcttcatggtctcgggatcaaatttgttcttgttcctggaacacatgtccagattgataagctcttggctgagagggaagaaggctaagtatgctggtcgctaccgcattactgattcagattcattagatgctgcaatggaggcagctggccgaatacggctaactatagaagcgaagctgtctcctggaccaccaatgttaaatctccgtaggcatggtgttaatggccgttggcatgaaatctctgataatgttgcaagtggaaatttccttggtgctaagaggcgaggggttgttggtggcattgattatggattcaccggtgaagttaaaaaaatagatgtttcacggataagagaaaggcttgatagagacagcatagttgttgtgagcaacatggggtactccagcgcaggagaggtcttgaattgcaatacctatgaagttgctacagcatgtgctttatccatagaggcggacaagcttatttgcattgttgatggccaaatatttgatgagcatggtagagtcaatcgttttatgtctattgaagaagcagatatgttgatcagaacacgtgctaagcagagtgaaattgctgcaaattatgtgaaggttgttgatgaggaggacatcaatcatgtccgctgcctcccaatgaaacatggtacagaacatggtatgaatggaagggaccatattaatgggtatactgcatcttttcggaatggtgtgggtttcaatgatggaaatggtctgtctggtgagcaagggtttgctattggcggggaggagcgcttgagcaggtcaaatggttacctatcagagttagcagcggcagcatacgtatgccatggtggtgtccaaagagtgcatatcatagatggtactgttggtggagcattgttgctagaactattcactagagatggtgttggaacgatgatagctagggatatgtatgaaggaacaagaatggccagagaggaagatctttctggtattagaaagatcattcgtcctctagaagaatctggtgtcctggtgcgccgaacagatcaagagcttcttgaagcattgacatcatttattgtcgtggaaagagatggctcaatcatagcgtgtgctgccctcttcccttttcttgaggataaatctggggaagttgctgctattgctgtatctgaagaatgtcgaggccaaggtcaaggagacaaattacttgattacgttgagaagaaggctttgtcccttggacttgagaaactattcttgcttaccacaaggacagcggattggtttgttcgtcgcggctttaaggagtgctcgttcgattccctgcctttggtgaggagaaaacgtatcgacctctcgcgcgggtcaaaatattacatgaagtggctccaggcagcagaggttgggcatatggctgccgacggttttgccatgagatgatgagtgctgcaaacaagcatctctacgaatctagtcgatggacgtgaggtttctttatgagctgtgcagtcgcttatacatcgtagaaatgtatatttattgtgcaagaaaataatcagtcaataatcgaagatgtggttgtgtttcttgagttgatttcttcttgagcatagcaatgctcaaaagagttgttgatctgcacactgctgacaaagcctgcacgactgcgctttttaaactgataaatacttagctgcaaattcagcaatgttcttgttgagctccctccatcgcctcctctagaaaaaatgcgtatgttacgca

SEQ ID NO: 43832 - DNA, 1242 bp, Zea Mays
ctcactatcttctccaatggcaattcattagggcgggatcaacgacaggtaggtcgccggaaggcgagctagctcgtcgtcatcatggacggcggcagcagctggttgccattcctaggccgtggaattggcgacggcgtatcggggagcagtggctcggaggtgcagcggaaggaggacgacgacctgccgatcagctcgcaagtggaggaggagctccgacaggcaatgatcatgcacgcacgcacgcttgtaatctgcaattgttttacttttttcttctacttgctgatgggcatggagagaactggacacccagcagagcgagagacgacgacggcgttgcccccctcatcggaatcatccatgttccgctccttccctggaagcccggccgacgaggcctcgtcgctcaggccacggagcagcaacaacaatagtaccacggcgaactcctaccaccaccacccggcagaagtctcctcccagtcccatctgaccgagctctccccggtcacctacggcggcggccaccgccactgtgacgaccatcagtgctacgtcaatctcgacacgatcctaaagctggacgacgagttcaagcgctgccacgacgaacaaccccacaacgaaagagcgcagcacaagaacggcttccgtggcggcgcgttcgtgccctacacccgccacctcggccccaagaagaagcccaagccacctgcaggctccggcgggcagagggcgatcaaggcggccatggcagccttggcacgaatgcacatggtcaggctcgcccagtggcagtgctaccagatggaactggtggtagcgcctgcgccgcccaccggcgggatcaacggcaacaaccagcagcagcacgttttgtcggagcgcaagcgccgcgagaagctcaacgacagcttcaaggccctcaggacagtgctccccccttcttccaagataaggcatccacactgatgagagcaagggactacgtcagcactctccagtctagagtgtctgagttagaggagaagaacaggatgatgctagtacagttgcagcaccgccgcaatgatgtttctcccaacaagattgaggtcgacatcagaagtaatagagaggaaattaggaaacatgacaggaatttcacctgaagatatatagcagttgttatggtttatagtaggaggcctaaacagccctctagtcggcccattatagagggacatatagataagg

SEQ ID NO: 43833 - DNA, 1203 bp, Zea Mays
gagtcgtctagtgtcaggtgatctgaatctcattccggtggcttctgccaagtgctgaggatcggcatccggttcggttcgtcgtcctcgtccccactccccacctgcgcagctgcgctgcgccatctcgaatcctctccttccaccatctcgaacctctccttccgtctcctccccggccgattcttccagtctccagccaccttcaactgccggccgcaagtggccccgcgtctcacccctaaccccagtgaagaatctaggcgtcgtctatccagccccgtcatcatcaccatggaggagcggggccagcgacaagaacaagtccatggttgagcagctgcagaggtacggggtcatcaggtcgaccaaagtcgcggaggtgatggaggccatcgacagggggttgttcgtgccacctgggggctcgccataccacgatagccccatgccgattgggtacaatgccaccatatcagcaccacacatgcatgcggcttgcctggagctactggagaagaatcttcagcctggaatgcgagctctcgatgttgggtcaggcactggatacctaactgcttgctttgcactgatggttggaccagaagggcgagcagttggtgtcgaacatatcccagagttggttgctacttctactgaaaacatcaagaaaagtgcagcagccccacatctaaatgatggatccctcagtatacacgtttctgatggcagggaaggttggccagaactggcaccctatgaagccatccatgttggagctgcagcaccgcagatccccgaggcgctgatcgagcagctgaagcccggcggcagaatggtgatccctgtcgggacagtcttccaggagctgaaggttgtggacaagaagttggatggcactgtcagcataagagacgaaacgtctgtgcgctatgtgccgctcactagcaaggacgcccagttgcacgcaagctgagtgatctatcatgtcaaaaaaatgttatcctcacctgacaaggtgaggcattcaatcgaatcgctacccttgtaaatgtattaatcctactgtctcagtaaatgcgctggcttggaaataaagtaaatgatggaacatcatggaacgtttgtttttcttcagctgccccggtgttcttactatgcaacttgtttcttcagagcaacagctgccattcaaaatatttt

SEQ ID NO: 43834 - DNA, 1863 bp, Zea Mays
aggggtgtcaaatcttgaaaggcatgcaaattgggtgtcaaatatcaaaatctgttgccaagaatctacaactttgaaagtgctaaggatatacccatgtacatttctgctaacaattagcttcacatctgcatcgttggaactttaaaaatcagaaagaaactacagtgagctcaaaacctccagaggaagcagtcaagatttcactaaaagactgtctagcatgcagtggctgtataacatcagcagagacggttatgctggagaaacaaagcttgagtgacttcattgatcacataaactctgataaagctgttattgtatctgtgtctccccagtcaagagcatcactagctgcattcttcggtctttctcagtcacaggttctcagaaagctgactgctttgttcaagtcgattggtgtaaaggctgtctttgacacaagctcgagtcgagatctatctcttattgaagcatgcaatgaatttgtttcacgttatcagaaaaaccattcatgtagtggccaagaagctggagccaatcttccaatgatttcatctgcatgcccgggttggatatgctatgctgaaaagactcttggttcatacatcctaccttacatctcatctgtgaagagcccgcaacaggcaattggtgcagccattaagcaccatgtggttgataaacttggtctaaagccgtatgatgtttatcatgtcactgtgatgccctgctatgacaagaagctagaggctgtccgggatgatttcactttctcagtagacggtaaagaggtcaaagaggtggattcagtactgacaactggtgaagtgttagacttgatacagtccaaatctatcgatttcaagacagtagaggaatcttcattggacagattgttaacaaatgttgatgaggaaggccatctatatggggtttctggaggttctgggggctatgcagaaacagtctttcgctatggagcaaatgtaatttacaaaagagaaatagagggtcctcttgacttcagaatcttgagaaattcagattttcgtgaaattacattggaggaacctgcagaatattgttaggaagattaagatgggaaaatgtgaatatcactttattgaagttatggcgtgcccttcaggttgtcttaatgggggaggtcaattgaagcctgttcaaggccaatctgctaaggaacttatccagcaattagagagtgtgtacacacaagatatatcaatatcggatcctttcagtaaccctatcgcgaaaaaactatatgacgaatggctggggcaacctggttcagagaatgcaaagaagtatttgcacacagaatatcacccagtggtgaagagtgtggcctcacagttacagaactggtgatagaggtttcttgttgcactgggaactcctatgttcctcaagagccaagaggaacctgcaaaccgagcaaacatggcgacctgtccatgctaagcaaatatggatcacacaagaattaaacttactcaagtttttttggcattatggcgaagaagttttgttaacatataggttttcagctgctttctagttaaatgttgtgccagggaaacaacagctaaatcgcaatgtgtaaaatgaacgaagtaatgtgtaaaataaacaacagctaaacatggcgaccttttcattgtctggtacacgccctttgccacatttttttttttggtaaggaaggatagctcgttggttgcccgtatatgttttttagatgctcgggcatagtagagaagggaacgaaaaacatactcagtcccggtatattttagggattttaagacagataaaaaggacaacacaagagatgca

SEQ ID NO: 43835 - DNA, 882 bp, Zea Mays
ggtttatccgatgtccttggggcaatcggacagatcctgttaagttatctgatgcacatgcatagccgtctgaggtctttgggacaaggacaggtgcatgtgggcccaataacttggaggttctgccacaccgcacgcgcccgcactgccagtttttcaccggggaccctggtgatttgaaaaacctttgaagagtctgcaatactgttttgtgtcactaacaattttgaatagacccctcccctttctattctttacaacccgcgatccccgatggtggacggcaacaggccgagctccggcgagctcgtactggccgaaataggcaacggctagctcttccctttgttggacaccaaattcaacccctgacgaccatttcccctcactcaattgcaagactctaatgcctaattggtttggccgacaagcttcaagagcacacatgaatgctagaacaagagcgaggagaacatgatcgggcctgtggaacgctgaccgcgacgagctcacacacgcgatgttcttgaccgatttgggggaaatcccaaatttggagctctagtgaataatccgagacaccagtgggtgcgctagatgcttgaatacatagcggagccgattgcacgctcaatttatagggttcgagggcggtggcccgtgaattggagatggcgtggtggcggccggagagaaggaaagttactggcgcaggtaataccgtggccttcaccgtggcaagcttaccggcgacgacccagctatctaaaatggctcagtgcgacgtggtaaatggcctgaggcatggcgcaaccacggtgaatggcacaagtttctgtgatggtcgcttggccacgtcgccggcgcaagtgggcacggcat

SEQ ID NO: 43836 - DNA, 1505 bp, Zea Mays
atgagagcaggatccaagctatttagagaaaaaaaaacaatggaaagaggcaagcttgacaaaggaggatactcatcaatatctggtccacgcgtgattgaaaaaacgtttagtgacatgagcatcagtggttctggatttggtagtggttctggattaggtggactgagcactgatatggactcatttgccagcaagcccaaaggtcgtccatctacagcagctactgcacctggtaaaggttttggtatgaaattaggcaagacacagaagacaaatcaattcctcgagtctttgaaagctgaaggagaagtcattttggaggatgtacaaccaagtgcagtttctacaagatcatctgctcttccaccaagtgaccctgtcacagtgaacatagaagagaagctcaatgttgttgttaaaagagatggtggtattagtaactttgatgttcaaggaacacttgctcttcaggttcttaatgatactgatgggttcatccatttgcagattgaaagccaagatatgcctgggcttagcttcaaaacacacccaaatatcaataaggatttgtttaacagtcagcaaattttgggagcaaaagatccaaacaggccctttccgagtggtcaaaatgaaactcctctggtgaaatggagaatccaggggatggatgagtcatctttacctctgtcagtcaattgctggccgtcagtatctggaaatgaaacctatgtgaacattgaatatgaagcttctgagatgtttgatctgcacaacgttgtcatatctatacctctgccagcacttcgggaggctccgagtgttagacagatcgatggagagtggaagttcgactcaagaaactctgtgttggaatggtctattctccttatcgatcagtcgaatcgcagtggttccatggaatttgttgttcccccagctgacccatcatcgtttttccccatctccgttggattttctgcatcgagtactttcagtgatctgaaggttactggaattcttcctctgaaggaaggcaaccctcccaagttttctcagcgggctcgtttgctcactgctaactaccaagttgtttaacgcttgtaccgcgagtgttggtccacttgaatgctccaatagcagatgttattgccgtggacttatgcaagccatggcacgggagattattttgtgtttggaaaatttctttactatgcgcttctcattgttatagcatattgcacaaatgttgttctaatgtattgccaccagagaaataagtaatgttcttgcattttgttggcatgcattttgtacccgtctctttcctcctatgaggatgttgtcaggacagtgttatctcctgggcttggtgtaatgtgatcgtagcatctccacctgatcccttgtccctactgccactagtcaacttttggcaacagatccggtggtcttatttatcttattttctattttaaacttcgctctacaaacaatgtttt

SEQ ID NO: 43837 - DNA, 2220 bp, Zea Mays
gtcctgggaaaaaaaatgcacgtcgattggcggtagcctgcctaaccatggcggcgggcgtcctgttcatcatccttggcttcctcctggtgctgccgtcagcaacggcaatagggcaggtctgcggcaacgccggcaactacacggccaacagcacctaccagtccaacctggcctctctcgccgccgcgctcccagccaacacctctacctctccccaactgttcgccaccgccaccgccggccaatcccccgacgcggtctacgcgctcgcgctctgccgcggcgacaccgccagcagcagcaacctcaccgggtgcgccgcctgcgtcaagaactcgttcgcctacgcgcagaggacgtgcccccacgccaaggccgccagcgtgtacgacgacgactgcctcctcggcttctccagcagcgacatcctcatccccgccaacaacatgagcacgctgttccagtactggaacccggcgagcatccccggcggcgacgcctccatggtgagcgccgacgtgaaggacctgctgacgcagaccgctagggcggcggccagcagcccgcggaggttcgccaccgccttcatggacgcatccggcagctccatcccgacgctctactcgctggcccagtgcacgcccgacctgtccgctggcgactgcctggcctgcctccagcggctcgtcagcctgctcaacgccaccacgtccgtgcgcctgggcgggcgggtcctcgtgctgcgctgcaacttcaggttcgagaacatgatgttctacgacggcgcgcccacgacgcgcgtcaccacgccctcgtcgtcagggcccccggcgccaccgtttccggcgccgacgacgacggataagagagctgctgggacgaagccctgggtagttgccgtgtctgtactctgtagcacctcctctagcggtagtagcagcactctgcttcgtcttgtactgccgctggcgaagcagaaggtacacaaaaggtaggcctagattactacgaaagcctacttataacagctcgcgagggggagacgaagtagactgggaaatggaggcgcacctctccgagttttgggtctttgacttgcatcagatattggaggccacagacaacttctccgaagaaaataagcttggcgaaggtgggtttggccccgtctacaagggccagttgcccgagggggttgagatagctgtcaaaagactcgcttcacattcaggacaaggtttcgtagagttcaaaaacgaggtgcagctcatagcaaagctccagcacaggaatctggtccggcacctgggatgttgctcgcaggaggaggagaagattctggtctacgaatacttgccaaacaaaagcctggacttgtttatctttgcaggtatgtatgtatatgccggccgtagttcttacttagtctatctaggttttaatcatggtataatatacgacagacgaagacagaagatcgttgctggactggaacaaccgtctggcgataatcgaaggaacggcagaggggcttctctacctacacaagcactcccggctgcgtgtcatacaccgagatcttaaaccgagcaacatcctcttggacagcgagatgaaccctaagatctcggacttcgggctagcaaagatattcagctccaacgacgtcagcagcgaaggaggcaccactacacggagagtggtcggtacatacggctatatggctcccgagtatgcctccgagggcctcttctctgtcaaatccgacgtgttcagcttcggcgtcctcgttcttgagatcatcagtgggaaaaggaattccggcatccatgagtgcggagatttcatcaatatccttggatatgagaatgcggctgatcgaccaaccatgttggatgttgttgccatgctgagtaccaagactaaggtcctggataagccgaaccacccggcgtatttcaatgtgcgggtagggaacgaagaggcgtccactactgctactactatgtcgtgcagtgtgtcgatgagataatataatgtatccatatatagtttgtgttttcaaggctgccatatcaatatttatttatctacataatataatgtatccatactttcatcctatctctctcatatatttttttattaaattgcatgtcatgtcatcctgtatatttatgtgacatactatttaatgagaatggtatatatatatat

SEQ ID NO: 43838 - DNA, 724 bp, Zea Mays
tttcaatgaggcgaaggccgccgcctgctctggtccccaagcgaagtcttttgcaccgcggagagttttgaggaaggggagacttcgctctgcggttttggagatgaatctgttgagggcggccaatctgcccgttaggcgctggacgtctctggctgactacgggggcgtcatgttgatgatggcctgaattttggttgggttggcctcgatgccgtggtgtgataccaggtaacccaatattttcccctggtgaacgccgaagacgcactttttggggtttaggcgaagtcgtgcgtcccacatgttcgcaaatgtctcggcgaggtcagcgagatggtcctccttgctcctgctggcgacgacgatgtcgtccacatatgtgaatatatttctgccgacttgccccttgagcaccattttggtgagccgggagaaagtggacccggcgttcttgagtccctccggcattctgatgaagcaatatgtgccgaagggtgttatgaagctggtgctggccttgtcctcctccttcatatatatttgatggtaaccggagaagcagtcgaggagtgacatgacttcgcacccggccgcgctatcgactattttgtcgatccgaggaagcgggaagttgtcctttgggcaggccttgttgagactggtgaagtcgatgcacatccgccacttgccgctctttttctgcaccatcacaacgttggcg

SEQ ID NO: 43839 - DNA, 677 bp, Zea Mays
tttcatttgccgtcgcttcggctggagagccattcgtgggcgtaggacgagagagaggatcggcggcggcggcgtgtgggagatggcgcgcgagaggcgggagatacggcggatagagagcgcggcggcgcggcaggtgaccttctccaagcgccggcgcgggctgttcaagaaggcggaggagctcgccgtgctgtgcgacgccgacgtcgcgctcgtcgtgttctccgccaccggcaggctctcgcagttcgcgagctccaggcgcgaaggggctcagccattcattgggccgctataacataatgcttgttcgagtgtgaatgacatcgttgacaagtacagtacacattctaagaatctggggaaatcacatcagcagccttctattgatttgaatgtagagcagagcaaatacagcggcttgaacgagcaacttgctgaagaaactaatggacttagacagatgagaggtgaagaccttgagggattgagtgtagaggaattgcaccgaatggaaaggaaacttgaagcaggactgcatagagtgattagtacaaaggaccagctattcatgcaacaaatcggcgaattactgcaaaagggcacacagctagaagatgagaacaggcgtctaaaagaacaaatgcctcaggtgctaacggctggcacaatta

SEQ ID NO: 43840 - DNA, 1177 bp, Zea Mays
cgtcgatgacccgcttcttcctcgatgcggagcgccacaaggcccggcagccaccgccgacaaagctcgaggaggaggagggcgccaccccgccgcctcctgcaaccgaagaggagatggccccgcacaacatctggcagggaaggacttgatcgtgctcgcgaagacagggtccgagagaacgggcgcgttcgcgttgcccattctacaagagctgctcagcaaccgcgagggtgagcaggcttttttgcttacatgctttcgccaacgaggggcgacgtaccagtatctaattgacgtcctagttttcgtagggaaggacctgatcgcgctggtgcagacagagtccgggaagatgggcacagagctggtgattcagatcgtggagcagtttgaggcgctcggatcaactattggtttgcgttacttagtggagaacattgggaagatcggaggagcgattgggattgagaatgggaacacaggggaagcgaggaagtggtgtggtgttgtcaccagcagttatggcaggatcgccggtcaccaccgtctaagggaaactcacctacttgggagatttattcttcatgcttgttttcggcaaggtctcgaatcagtgtgcaatacatcaaaagtttgctgagggttcaaaagatgttggtgcttctcgaattattggcattgacatcgacaataaaaagattgacgttgcggcatcaaaggttcctacagtagcggcatggacgactagttcccgggtgatgctatttccagcaacaacggcatcgaagatatttttcatatctgtgcaatgatgctatgatcaacactcgaagatcaatggcaccgtctacacttaaccaaaataggatggttacaagttttaagtggtgaagctattgatactgccaaggctcttgctttcaaagaattgaaataacatacacaaaacaatctttgaatcttgtggttgtatcatttatgctcatgtcaatgattgtacaacgtccttaggtggcaaaaggttttgaaccctgagcttgttaaagagcaatggttgaaagaagttagctctacatatctctgaaagttggggccattactcagatgataaacaaacttgggccaaagaaatggtcgaccttgcccaaactatacctagacatattggaaagca

SEQ ID NO: 43841 - DNA, 334 bp, Zea Mays
cttttccatgttcctaaatgactatattggcaggatgccttatgtttccagtttttgcagtggatgtaatgcgtgctttttgttcccctttttccttccatctgtactggacagcacagatgcttgttcccctttttccttccatctgtactggacagcacagatgcttttttaactccttttttggctgcaccacacaccctaaatttatctggaatttggagttacagtccacgttcgcatgaattggaactttcaactgccaaaacatacaattatctggattttggagttatagtccacgttctaaaaaattggaactttcaactgccaa

SEQ ID NO: 43842 - DNA, 2362 bp, Zea Mays
ctcttctttccctctgtataccgcgagcgcccgcagctagctgctagccgcgcgcccgccgctacctgcccgcctccagcgcgcccgccgcgcgtgccccgccgccacccctcgcggtgatctgtgtgggcgacgtccacagctacatcacgaagctggagagcctctggtccaacctctaggccgcactccccgccgacgccttggccaccgcgctggtcatcttcctcggcgactacaacgaccgcggcccgcacacccgcagggtcctcaacttcctcctcgcgctcccgacgcgctacccagcgcagcgccatgtcttcctctgcggcaaccacgacctcgccttcacggcgttcgttggggcgccgccgccgccgcccaacggctccccgttcttcggccacctgcgcagcgccatctctctttcctccctatctcgctgctccctcccctgccgccctgcttatttacgcccatttcttaagagaggatttgatggcctgtcagaataaaagagctcgaggaaattgcggcggccggaaatcctggtgatggtgccacacaaacacgagaatctgcttcgtcctcggcggaattgccgtcggggtcgggcgattcttcggaggacaagtgcctctgtttcgttgagctggctaggtccatggggattagtcaggacactcatgagtcgatggcaacagatgcagccaattacctttgccaccagcttcagcatcttcttgggcctatctcttctgcgacgagccaaagtggcccctgggaggagaggtcggtgatggttaggttgactcagaagctgcagaaatctaagagaaataagtggtggcggcagaggagaaggaagcatgttgcagagctttttcagaaggagcgtgcggattatgatagagttgaccaggaagctgatgaatggagggctaagcaaatagccaaggacattgcaaagcggagggtggaaagcatgcagcagattgctagaaagaaaacaaatgaggaaagaaagcgcctagaatctgagcaaagcgccgcctgcctgcaagaaaatttccggcgctctgtgcgagttctgcagttccggcgttgctcttctttcccgcgccacctgcctgcaagaaagcgccgggggcgtgccgtcttttccccctccacgcttcagcagcagcgcagtaaatttcgtcggcgtgttgggcagcagcagcagttggcagccaacgtcccgctcccccgcccgctattactttcccagctccgcgacaagctaggcgcgcgtcgtcgtggtccgtccgcttccggtctctactccttgtgctctctgcagtaaaatgagcttccggcgcttcgggttcagtttgcgagttgcattgcttagtctgtgtttttaattagggaaccaatgaacacatgtagtgcattgctaattttagactggaaatgctttgggtgattcagatactgagccaaggaacacaaagtacatgtcactgggagacgaccgcagcctgtgcatggaatgcctggggtctgcggtcatggacaccggtgaatgccagcccctgtaccattctatcagggactactacgaggggatgaaaatgaagctggaccagcagatacccatgctcttggttgagcagcaagcgcttaacgaagccatggaaggagagagtagaggcccacaccacatgcctgagacaaggggcctgtgtctgtcggaggagcagactgtgagcagtatacttaggaggcccaggattggtggaaaccggttactggacatgagaactcagccacaaaaactgactaggagatgtgaattgagggtgattcctctggtaagtgtcccagtgggtcaaggctatgatttgaccgaaacttgtgctggagcagctttcactgaatgggatgacaccacttgctgctatgtgaagcttgtttcatgggaagaaggtggttacaagatttctgattatccgatgccgagaggagaggtagtggttggcggacacagtacaacaaaaggctataggactaactgtattgattccggctcccatcaagtgactccttcccctcacgttgactttgcggacagatgtctcaattctagtggtagagctacgaacaacaatctgatgtcctgatcgagagttgaacttgtgtatttgaacttgtgaactatggatgtgaacttgtgtgaatttgtgaacttatgtatttggaattatgtgaatttgcgaacttatatatttggacttgtgtgaatttgtgatatgaacatatatcaatgtgtttgaaatctgtattgtatgtgatatattgtgttgcatgtgatattttg

SEQ ID NO: 43843 - DNA, 1819 bp, Zea Mays
cggagcattccagacgccgcccgaagccacaaagaggccaacacgaggagggtatggtctcctccatcgcctccctccctgcgtggtatgaatgtcctcttccatcgctcagataagaagttcttctgcgttaaggttacttccttgccttcttcatgcacacacacgcccgcatggcatgccagtgggatgcagtcggcgaacgacatgtgggtgtgaggcagtcgtgcgccgtgcgcgagaatggaaggggttgcaggaagctaggacgggagccatacgtcggggcgctcgagccggatcgctccaacttggacgcctcctccggatagctgatggacttgcttccctaactcaagagctaccatgtgtcttcaaggaaccctgatgagagaacctagaatgagatccaggccaagaatgacaacgtcgggacggtcatggtgccaaccttctagagccttgagaccataggcagagaggtccagatcaagaacgacaacatcaagatgagcatggcgccatccttctagagcgttgacaccatagttggagaggtttagtgctaggcgagatggtgtgacatgagcagggctacagtctgtgttggggcttcattctttatttctttaatcttctatagtttcgtgacttactttatttattctcattaatgatagaggataaaaaaacctagaacattaagatatcttttctccaccaaaaactcattttaagttatagaacagtatacatcatatcgagatttcaatggtccacagggatgttttacagttctggtttgcatagtgcacaaatgtttattaatcaggttatattacctatgcattatgcagaaatgggtcatctctgtgttgtggctaggctgattacgctagggcagaattattgcatagactgcaggaaattctgcatctagatgtttctattaatttaaaggttccaaaactaggagaaaacatcacaaaactacaatatactattggatgctgccttgaaaaatgttgaaaaagcatacaggtgttacggtaaagaactgtggaactcctaatttctcttgtcgggatttggatgcatcttctgttttggacaaagtcttaagtcgcttggaagacaaacttctgaactttattgtccttggtgcttgttggaagggatctctagttctggtgagtttatctattcattggttctcaaagcatgtttgaatttgcatcaaacatcaaccacaagtatcattatatacttatctgaggtggtaaattcagttttcttctctcattgaccgatgtcgactgtttatattatgttttaatcataataaggtttacaaattaatatagttacttagattgtccttacaagcattttcatgcgccaatagccataattaggaaaaaatatgattcaacgatacatctcacaattcatgctgctgaatttaggtgctcatatgctccatattgattttctgtcactatttctcatcattcttttatctttgatctaccctacagattaaggtttacatattttacagcaccgtgccttgaaaaccttgatcatgcgccgtcgaccacgctggaacccctatagtcgccgccacgacccatcagtcacgaagccatggagacagaggtcgctgcgcctgactgagctactgatgccagcactcatggttcctcatagttcctaattgatcttttctgttatgtcagtaagccagtagttggtagacatatatgcttatttcctgtcatgttcgttcgtaatgtttgtattaccatattgtattttt

SEQ ID NO: 43844 - DNA, 1877 bp, Zea Mays
ggcagttgtcgccgcgcataatcatactagtgacacaatcacagctagccacctccccgtccccagcatcgccaaaggtcacatcggtcggccacgggcgcggggcaagaaggaccaggtgacggacgagcaggagggaggaataatggcgggcgcgggcgcgggcgggtggaagaagcgggtgggccgctacgaggtgggccggaccatcggccggggcaccttcgccaaggttaagttcgccgtcgacgccgacaccggcgcggctttcgccattaaggtgctcgacaaggagaccatcttcacccaccgcatgctccaccagatcaaaagggaaatatctatcatgaagatcgtaagacatcccaacatagttaggcttaatgaggtgttggccggcaggacaaagatatacatagtcttggaacttgtcactggaggtgaactgtttgatagaatagtccgccatgggaagctacgtgagaatgaagctaggaagtatttccagcagctttattgatgccattgattattgccacagcaaaaggagtttatcatagagatttgaagcctcaaaacttgcttcttgactctcgtggaaacttgaaactttctgattttggacttagcacattgtctcaaaatggagtaggccttgtacacacgacatgtggaacaccaaattatgttgcacctgaggtgctaagtagcaatggatatgacggatctgcagcagacatttggtcgtgtggtgtcattctctatgttttaatggctggttaccttccctttgaggagaacgaccttccacatttgtatgaaaaggagccaagtcattgatccagagaatacttgatccaaatccaagaactcgtatcactattgaagaaataagagaagacccatggtttaagaagaactacgtaactattagatgtggtgaagatgaaaatgtcagcctagacgatgttcaagctatttttgacaatattgaggacaagtatgtatcagacgaagtaacgcacaaggatggtggtcctcttatgatgaatgcctttgagatgattgcactatctcaaggtttggatctctcagcattgtttgataggcaacaggagtttgtcaagcgccaaacacgtttcgtctcaagaaagccagccaagactgtagtagctacaattgaggttgttgctgagtcaatgggtctcaaggtccactcccggaactacaaggtgaggcttgaaggtccagcgtcaaacagagcgagccaatttgctgttgttctagaggtggtgaagccatgcatgcagcgcatcagttggtcgcttgtcctttacacagtgttatttccatgctctgaagtgcacttgattgaatcaggtctttgaagttgctccttctctgttcatggtcgatgttcgaaaggttgccggtgacactccggaataccacaggttttacgagaacctatgcagcaaactttgcagcataatctggaggccaaccgaagtttctgccaaatctacgccgctgaggacgaccacctgctagccgcctagcccagcactgagctactgtagtggcatcaccaagagacgtgattcgtagccgtcagaaagggagagcttctgttgaatctagcattgctcgtggagctgggattcatgttgaccaccaggtgtttgtatattgtagtaacgctattgtagatagtctgtatagctccatttgtgcagttgtacgtagcaggaatatgttaaaaaacaacttttaatgtcaggtataatcggtttgcatccaggaagcatctccaacagtgtcttaaatcagtactctatttttaaatatagggttcaacttataaaaacagttttaac

SEQ ID NO: 43845 - DNA, 1741 bp, Zea Mays
ctcttatcacctcaccgacccaccaccgcacggaccaactcgttctcgtcctccaccaccggcgcctcgtctcttcccgtctccccagtccccactctcgtccccgctccctccaaagtccaaaccctaccaccccacttccccaccaccactacatggcggcggcgctcgcctcctcccgctactgctggagccgcccgtcgctgccgccccaaccgacccgcggccgccgctccgtcactagctgcgcgctctccggacgagagaaaagaaactcctttagctggagagagtgtgcaatttctgttgcattgtcagttggactaatcactggtgcaccaacgtttggaccaccggcctatgcttcttctcttgaacctgttcttccagatgtgtctgttcttatctctggacctcccattaaagatccaggtgctttattgagatatgctttaccaatagataataaagctattcgtgaagttcaaaagccgctggaggatatcactgacagcctcaaggttgctggtgttagagccttggattcagttgaaagaaatgtcagacaagcatcgaaagcactgaacaatgggagaagcttaattcttgctggccttgctgaaccaaaaagagcaaatggagaagagttgttgaataagttggctgttggatttgaggagcttcaaagaattgtggaagacagaaatagggatgcagtagctccaaagcagaaagagcttctccagtatgttggaacctgagatcttcctgggacattgcatttctgcagtgtagaagaagacatggtcgatggctttccctttgaaataccagaagagtacagcaacatgcctcttctcaaaggaagagctactgtggatatgaaggttaagattaaggacaatcccaacatggaagactgtgtatttaggatagttctggatggatataatgctcctgtgactgctgggaacttcgtagatcttgtcaaacggaaattctatgatggcatggaaatccaaagagctgatggctttgttgttcaaactggagatccagaggggccagctgagggctttatcgatcccagcaccggcaaaatccgtacggtacctcttgaaattatggttgatggtgataaggcgcctgtatatggtgaaacacttgaagaacttggtcgctacaaggctcaaacaaaactccctttcaacgcttttggaacaatggctatggcaagagagaatttgatgacaattctgcttctagccaagtattttggctcttgaaagagagtgagctaacaccaagcaatgccaatatattggacgggcggtacgcagtatttggatatgtaactgagaatgaggactacctggctgacgtcaaagttggagatgtcatcgaatcaatccaagtcgtctcaggcttggacaaccttgtcaacccaagctacaagattgtaggataacgtgttttgtatcagagtttcttgtctgtgggtctctgtcctcaagtcgatgtaaagtgctatatagtatcttactcccatatccttctcgctcgttaacgagggtttgtgtcacgcggaattcgatagtaattgaaagtacagagtcattgattggttgtcccatacttagaaaaacctgaaacgaggaacatggccgtgtttctctgttctggaaactttgtccagaaacaaggaacgggaatggtcataaacgacgacgaaacttcaact

SEQ ID NO: 43846 - DNA, 1552 bp, Zea Mays
acgcgagaaaattgaatatttatactacccgtacacagcacgaacgggtatagtcgggccgttttcacccctagtgccatccctccctccggggtgcggaccttcctggagttctttccatcagccgaccaccggttccgaattccgacacgacatcgccaaattcctggaggccaaaacgcgatggaactcccagatgaaagagtacaagtagatgcactggagagacacttactagctggtttatcttcaaacgactatgatggaagttttgaggatgaggtcctctatgatgcatcatttgcagaaatggaagataattttgtcaagtatcaaattgctcagtggactttattatctctattactaatcgtagcttggggagtaggtgtgctcatgctactttacttacctattggggtatatgtatgtcgaagagactttcgctcgaggaagctgtacttgacaccgcatgctgttatttacaaggtaaacaagccttttgcttttccttgttttggagtttccaaaaaggagaaatattggatcctcccttcaatttccgatgttgttgttgagcaagattatctccaatccatttttggtgtatattcgatcaggattgagaatattagtgtcagaaagcctcctagttgtgatgtaaaaattactggggttgctcatccacatgatttcaggaaggccgttgtagtccatcttttgaacactaggaatcaaaaaacatcatcggatgaccaacagagcacaaatttgaattatgcagctagttcttcggaggcttctcttggagatttgatgctagagaagcttgatgaagttgaaatctctgtaaaggtgaaagttgcagaaatgctttgcattgctttaattaccaacaaatgtagactgatgtaggtagtgccactgattgtgaaggaaaatataaaagcttcagaaggcataataacttcagatgcataacttaacgaaaatgcaagcactgctacaggggcctgaaatttccaagtttaagaccacatcaggttgactccatgtgattgaagttgaaattgtttgactccttgggaaatgagaattgcgttctttttggaagtactagggagtacataccaaaattttgggcatgttcagctattggctgcggcagcagctgtacagccattcagcaactgtagcacatgcagcatccaatcagcagctggcacctcagcaaacagccgcttatacgcacagggaacaggcctttactgcagaagtcgcatttgtgcaggagtcatcaggttatgaaatgtaatgactatgtgtttttgtttctaataaataacgacgcaactgtaactaccaaaaaaaaagttctgttaaagaatgcagtaaccagcacataccctcctcttgttcagtaaatatcagccaaagtgccaaatccaaactaaagttatcaagacatctggctgtggctgcctgaaaaactacttggtgcttttcgacccagatgctagctccacagtcaaaaggctttggtgtatcctaa

SEQ ID NO: 43847 - DNA, 761 bp, Zea Mays
gccgtggcctcgcccacaaactaatcctacggcccacggaaccaagtgcggatatcgatgagaaagcgatcagaaaggagaacccagaggaactggtggtcgccttggctcatgcgaaagcagacgctattctggagaagatgcagaacaatgggatgatgaaagagattcttgattctcaagatactactctgatgataactgctgatcagtgtcaaatcgtatccaaaactcgacaagtgcaagcttacgaccaataaaaaggttgaaaaatgaatttgcactttcagaccttgatgttgttcgaagaatgcctccaagccaaatttctctgaaatatgccggtatccatgactcacggatgtgataccttcctgtcaaccactcattgttctccaaatgatatgttgttatccaatattgccatctactctcaaactcttctattgtttctgaaccccatacacatgagttaatcattttcctaaactcgtcattatttagaagatgagcatcaattttctctagcaattttttcataatgtgccacatgcacaacctatgaatggtgtttggaagaacactagctatagcagccctcatgctagcatcctcatcagttacaatatatgcaggagccttccctcccatagcttgtagaaaattctgaaataaccacatatagctatcaatcttctcatcagctaagaaagcagcaccaaagaaaatagaacgcatatgatgattgaccccagtgaaag

SEQ ID NO: 43848 - DNA, 630 bp, Zea Mays
tgccgagcgcttgcaatcaagtagcttcccgcaaattttttccagctacgcgcagttttgttcgacgaaaggtgggtggcggcagcagatacatcatcgtcttggaggaatacattgttgttcttcactggcgcggcgctggcggctcaaggccagttgcttcggacggtcaagatatggtgttcggcggcacacgtatcccccaattgcagatggtcggggttggagttcccagtggcggagttgaaccgcgaggtggaggtccaccacgaccaccgatgttagctcgttctagggacgattcggatccactagcagcttcgacgttcagatgcagtggccatctctctccatccatggatttccaggcggctggtaatgaaattgtccccttcaatttttctgcagtggtagtcagggacgacagattgaaatctggctggtcctgttcgctacacctgcaatacctctgctcggcgatttttttttcaattctagacggagggtgtgggttaagcttggccttcaccatgagtcgtagtcctccagctgttggtatacgtctggtcctagtacaaggggatgaagcttggtactgcacgtttcttgtatatgtatttttcaattggg

SEQ ID NO: 43849 - DNA, 1206 bp, Zea Mays
cgtcggtcgaggagctcgccaccgccgtccaggcggagtcgtcgtcgttcgtggaccctcatcgcgccggaccgccgccagaccacgcgtgcctaggctgccgcctcaggccggccttcgtggtgctcctcccctgcaggcacctgtccctctacggcgccgccatgccgtgccccgcgtgtggacggggggcgtggaggccatcctctgctgagctttccccgcctctcatcatcgatcatccggccgtccacctcatgagccgagagcaggttttccatgacatgatggtggcgtctaattttgctggccaaatgctatcgagaagggagaaggccacaaacttcaaaccagactatgatattgatatccatatgaaggtcttagctatgagtgggcaagtatccagtattcttacaggctacaaactgaagatgatacatggattcacttgttctcatttcttgttaatggtttgtgccttcgtagtcttctccgatatattgaagcgggtgccagataagctacatgtaactaagaaggcagtacttcatgtcttccctgctgctctcccgcaatcgctccgactctcatgcctgtgcccgcgccgtcaactctccgggctcgatgtgcctttccacgcagcacccacctccactcacactcccaccgtggtgaccccctgttcgtcgacgcgtcgatccatggtcagccaaccagtgaaaaccttcttcgcaatcactatgtatggtactgccaattcacattttacaagtgttgtttggaaggcatctaccaactccaatgctctcttcttgatagcggctgcacataacctattgtgtttgaagttaggaaaggagattggtgttagtatcggaaacccatgattacttggttcgaggttgctagcgtgccagcactttttgggattttagtgactccttatttaatttactcctgtagcccaacattagctgttgagaagctaaagaacatgggtccagtaacaagaaatgaatgcatcatgattggaacgatgctttttgcactctcactacagatttttgggtaagatttttctttttaaagagtgtttttaaccatgagttgccttgcaatctgaagctaaacttttggtagctgaacttatgtatttagtcgtttacacttttcttggcatcatgcaagtaagtacatatacac

SEQ ID NO: 43850 - DNA, 2196 bp, Zea Mays
ccccatcccgcgcgtccatcttggtcaagaaaccccaacggcgcgtcgcccccaaaccttagaccccctgcggaaatctctagagccagggtctatccatgggccatcgctgtgcgccagctcttgctccatctctccgcggcggcagcgcaacagccgcccccatgaaagtcgccatcctcaccccccgcgagcctgccccatcccgcttagcgtcgtcccccgccgctgcgcagccgcgacccatctggataaggatgcatccgcttctcccatagccgccactacccctgcctgccctctgctacgaacacgaagataccctggatggaggtggagctctcagaggcttaagatctagaactctatcgcgtactacggattccacagggtgaggagagatacgagcaggtgtcccaccggcgatgcgggtccaatcttcggcattgggagcaatccgcctactcgaccacgaaggttctctgaggcggtgtagccagagatcatgcgggcaacagggaaggacgatagctacgcagcccacatcacgaaggcatataagtgggagttcgccgaaagggaaggtttgcaactggttgtgctaaatccagggactactctgggcccatttttcatgtcatcagtcaataccagcctgaataatctattgcaactcctaagagggtgggtctatcaaggaggacaaacaggttggttgatgagagcaaaggagctttccaagaagttgattgatctgggcatttgtttccttccgtttgatgtgaccatcagggagaccgtcgattgcttcagaagcaaagggctcatctagccctgtgaacatttccagatgttaaaagaacagattatccaacagctgatggaacctgcattagagatattatgttgatgtcacaaatttagttgatgctcatgtgaaagcgctcaacaaggcagacactagaaaagtcagtatttacaacgttggaacaggaagaggtttggtaacacgagaattgtttatttatttgtataactattatttattcatatggatagttgtaccctgcacaggttttaatcagtactttacttaatttacatggtaacaagatagagaggcccgcaaatagttaatctgggacaacatatctctgtactggccatagaggacaacaaaaaaatcaaaagttgaagaatcaccaacggtgcctcctttgcaccctccggctcaagaacctaggcccgagccagttcaacaagtcatgcccacagctgaagtgctgaaccaacagatttactgggaatcaatgaatcagcccgaggcacatctgaaatagatcaaaacaaggtagtcgccttggtcgtggttccacatgataatccgccaaaagcaccttcttctaccagtcctggaagcgtggtgactagctggagcaattcagattctgtgcgttgaaaaggaagtgaaagaggtatatcttgtttacattaaaatatcaaagtactttgcagattttatttcagctctgttgcatgatgcactcgcactactgtctactgcaagtaccatcaccataaactctgaacgctctatgttcggtttcatctttttctttaactagattcgctttcctgtttcttataggctattgttcaggtactaatttgccatagtgttggtctatgactgaatggtacaaaatgcatgcaatgaatggatgatactttccagttaaatcatgtaattggaatacagtggtgccgtcagtggtgcggattgggggcttctagagaaagggtctagcgtcgtgcccttcttgacgaacagtgtgttgatgtgtgccatcatcgcactgggaacgaacgtgatggctagcacggggagcatcttgagcatctgctttgtctccaccactcaccatgctctgagcctgtgttggatttggagatccatgcgggcactaccacagtccatagggtgctcatctcttgtgttcttggctcttgcaagcattaggtcgtttctaaaatcacattggcacaatgaactctatggtgtttgaggttgctgaattggatggagcaacaatgatttgtcgcactaacagtaaaagaaacggttacttgttggttttaaatgttagtaattactacgaagtacaataatttgtatggagcatatccagtttagca

SEQ ID NO: 43851 - DNA, 2136 bp, Zea Mays
cgaaagcggagggaaaagcgagggaggcagccttctattttctgtcaaaacaagggcgatactcctcctactccagcgcacacgcagatcagcgtcgaaatccgtcgcatcgtgcccgcctcgctgtctccgctgggcgctggtggtcatggcccgcagggcgctggagctcgcggcggttctgctcgcgctggcggcgctggcggccgtggcggccggaggggacatcgtgcaccaggacgacgaggcgcccaagatccccggctgctccaacgacttcgtgctggtaaaagtgcagacctggatcaacaaaaaagataaagatgagtttgttggtgttggtgctcgatttggccccaagatagagtcaaaggaaaagcatgccaactggacaaacttgctgttagcagacccttctgattgctgcacccctccaagagagaaggttgctggagatattttgttagtggagaggggaaactgtaagttcactacaaaagctaaggtggctgaatctgctggtgcttctgcgattataattatcaatgataagcacgagttatacaagatggtatgtgagaccaatgaaacaaatttagatattggcatacatgctgttcttctgccaaaagatgcaggctcttctttacaaaggtctctctctagtggtgaagtcttagtggagctgtactctccagatcgtcctctggttgatactgcagaggtgtttctgtggcttatggcagttggtaccattctttgtgcatcatactggtcagcatggagtgcccgagaagcagatattgaacaagagaagcttctgaagggtctgcaaacatgcttggtggccttactgtcaatgtcaaggcggtttaaacctgctgcagaatcgtatgtgaaagtgccattttttggagctgtttcataccttacattggcagtttgtccgttttgcattctgtttgctgttctgtggggtgtttatcgtcggttgccttatgcttggattgggcaagatattcttggtattaccttgatcgttacagtcatccaaattgttagaatacctaaccttaaggtgggttcagccctcctgggttgtgccttcttatatgacatcttctgggtttttatctccaagatgttgttccatgaaagtgtgatgattgtggttgcacgtggtgacaagactgatgaggatggtgtacccatgctgttaaagattcctcggatgtttgatccatggggtggatacagcatcataggctttggtgatatccttcttcctgggctgttggttgcttttgcattaaggtatgattgggctgccaagaagaccttgcaatctggctactttttgtggtcaatggtggcatatggttccggtctcctaattacatacgttgccttgaaccttatggatggccatggccagccggctctcctttacatcgtgcctttcacaatcggcaccttcttagcactgggcatgaagagaggcgagctcagaaacctgtggacaaaaggacagcccgagagagtgtgcacgcacatgcacccatcccccaaggattcgcctgttgcggtcagctcgctgtcgtagacaaggctaacgaccttacctgatgttgcctggccccggagaatgttgctgatgaccaaaaaaagtttccagggttaatgaaggagtctactgatttgtaatgaaccttacatagggataagccaagatcccctgatcgtgatcctcgttgtacagtaggtggtgtatttgtatagtgagtgatgactattgagatgtgcggctgacactggataaaaaaggcgcaggagcttgatgtgggagcagcactgcatctgcatcatgtggctggtgtatggttttgaatgatctctgccgcctcattcttgttcttgacatggacctgttcctggtcttatgaggcgcacacgtggcaagacgctgctggttttgtcggtgaagcgatgtgacgcagtgtatatgtgtgtgtattatcggccatccgtgaccagttagttccttaatattgtaatactagtcgaatgcccgtgcgttgcaatgagaatatataatatcagtataatacgataacttatatacaaaatgtgtgttat

SEQ ID NO: 43852 - DNA, 468 bp, Zea Mays
ctcaccttcttacctgagcgtaggtgcgtcgttacaagtacattacatttctcagtattcccatgtctgtatacccatacacacacatggggtactgaaacccagaaaagtaaatactccacatcgcagccttcatatatacatatgtagaacatgtatatagtcaggcgccacaattaagcacttccctagaccgatgtttgttcggtcatgctctcacatctcaccttacctgagtgccgatccattcagaactgaatggcctcaaaaataacaatacacatgtatgcaatacccacccggttatgggttttcaactaagccacctgatagtccttaatttagggcttaacagaggatgtcgctagcattatagtttttttcaaagctgtaattcaaaaccaaacaatgtgtttagttgaaaataggttttctaaaaccaaaacttttgttttgaaaatacgtatg

SEQ ID NO: 43853 - DNA, 167 bp, Zea Mays
attgtgggattactcaggacaacagtatggatttcattgtgggattactcaggacagctaaaggattcgactttatttgggtcataattgatcgacttacaaagacagcccatttttcccgttaaggtgaaatatcccgtggttgcatatgcagaattttatatcgc

SEQ ID NO: 43854 - DNA, 2017 bp, Zea Mays
ccttatcccctcgttaacacctccccacatctcgttccttgtcctctccatttcgagctcaagctcaatcacttcggattggcggcgggcacgcgccggacgaaatggaagcggcaccatccgcccgcgccttctccccgtcctcgtctccctccgcgggggctagacccagccttcccctcgcgggcctggcctcgcggcgcgcccgggtgctcgcggcgccgcccccgccccgcgccgtcgcctcctcccgcgcgccgctggtggtctccagcccgccaccgccggaggactccggcacgcacaaccccgcgcacgccaaggtcgaccgctccggccgcttctgcagcccccgcgccgcacgggaactcgcgctgatgatttcctacgccgcgtgtctggagggaaccgatgttgtccggctcttcgatcgcaggatcagcgcaaggcgaggcatgcctattgaattacaaccatatgagctttggcgggggaccgctcgaggttggaacggagcaggaggctgagaagctggccagtcagaacgataaggattcagccaacgaagcagatgtactttcagctcctccaaaacttgtttacaacaactatgtattacggttgtccagggaacttttagtggctgttgccagtggatgggataagcatgtggttatcatcgacaaaataattccccaggcttggaaggttagataccttttcctaatcttctatgttgattcatcaatcccttctacatgcatcacagcatcaaactatttatatgttcagcagtctggttcaaacatgtacttattctgtatattacaccactgtttttcacactacactgtactagtgaacaatcactctgatgcataccagaagctgtttacagtttggtttgaacatatccttattctgtatattacaccactgtttttcattgcactgaaatagtgaacaagcactatgatgcataacagaagtgtatgaccatcaaggatgattttctgccttgtgtttcagcatgcagtgaaatattgagatctcacattgttatttaattattttagactaatgccttaccttattacgaattaattttctagcatagttaattagttatttctgtttgccaccccaaggatgaggaagtgatacataatctgaagaatgtaccttccttaatctgaatcactttgtttctatatttgtttctactaccagagctcagatgtttttatagtaaaaaaaatatatgaaacacaatatactttgctttcagtttataatctaccggttttttaactgttgtcctaatatgtgtttgtatatattttaatatttagttttttgcgtcctgttttatggcataacctgctgttggtacatggaaaatttcatggtcaggatgaacctgtggcaaggattcttgagctctgcattctacatattgctatggctgagatggcatcaaaaggaacaccccacaaagttgtcattaatgaggcacgagccaggaagctaaatcaaaatcatgattttttgcaaatactcatacaacaaaatggtggctgaagtaaagaagtacggagagaaccttgctgtcttgagttcaggcgaataccttctgtctccaaggtttagccttcaacctaagggaatctaaaaggtaaacatgatggactcatcaaggagccacaacacgttcattcttttagaatgttcggttattaggtgaagtatacagagctgtaaaccggtgatgcacattcatgcttcatctaaaacaaccgaaggttatggcttctgatagcctactcgacgcagatcgttaaatgatcagatattaagatgaccaggagttgtgtaaaagcttgatgcatatgtaaaatgttatatatacttggcattggctcattgcaatgggagaaggatattctagtttcataagttgatgtaagacatgtacgctcattttaggattattaatcgcatattgtgtttgcttcta

SEQ ID NO: 43855 - DNA, 660 bp, Zea Mays
ttagaaattgattatgcagttgagaaccaatacgtgaacacaaggttgatatatgccttgtggtttgggttgtgaggagtaattgtcaacaaggggtagtgccttgggttgagtcggttggactaaccgggacacgaggttgttggtgcaacatgtctcttggtttgtggtgtgtaggtgtggagtatatacacggcgatcgatggcgaaggtgaaggtcatgagggttcgtaccgatggattgggaagcaatgaagggtgactagagttgtggtggctaacacctaggacactaataggcacgaggggatggtggagcagatcgtgtcctcgatgcggttgtggaccggcgggaaatgtgtctaggacatggggactcgtatggagtacactacccgtgggtgtttcaatggttgagtctcaaaaccaccatgtgcaacaattcgtagatttcactatgcttgggcctcaaaacctggtagcaaggttctggagggaatcgaaagcggtatgtagtgtcatcatgaaggatgcgtcaaggtgatctagcttcgtgaagattgccatgttcctcatcaaagaagagttcttgagcaaagcctctgatgtgtatgcattcttgtgtactatactgaccatgcaaataatatatgtattttc

SEQ ID NO: 43856 - DNA, 3207 bp, Zea Mays
caaagacgtcgggccgccggcacctgcccgagtggagtactcgaagcgggcggagtcggcgagtgcacacgtcaacacccacccgaatactagtagtggaatactagtagtggcagcgtttattagccgtcacactcccacactcggcctgccgaggagaaactgaagatggttaggggctagaacgagcgagaggcggccgggaggagggaccgatttgtcgatggcgatcggggcgttcgtggagggcgctccggcggacggcggagaaggttacagcggccgcgtgacgcccttcgtggtgctgtcctgcgtcgtcgccggcagcggcggcgtcctcttcggatacgacctcggcatctccgcaggagtggtcgaaactcgagaagggtccacagatcatccttgatcgtcatccacataatccctatctcgtaatcaactgttctacttcgaagtatctatcaacttcactactacagactacagtccacaatctatcaacttcactactacagtccacaagagaggaagaaaattatccaacggacaattccctatatgccactacaattttgctcggtggtcttacctcaatggactgcttcctgaagagattcttcccaaaggtgtaccgtcagaagcaggacagcaaagtgagccactactgcgagttcaacagcgagctcctcaccgtcttcacgtcctccctctatatcgccggtcttgttgcaactctggctgcagcaaccatcacaaggaggtatggccgtcgcacatcaatgctgatcggcggcagtgtcttcatcgcgggctcagtgttcggtggtgcagccaccaatattcccatgctcctaatgaacaggattctactggggattggtctggggttcactaatcaggtcaatttagatttgaaggaaacaaaggcctaggtatggtcaatctagcacattcaagtagagaagatttttgaattgcttataacatgatatatagttcaagaaatcagcacaacagtttcatgctggatgaatgttctaatatctagatattggaaattaaatgtattgtgcagtaagtctagcatgaactcagaaaatcctgtgtggctatgaaatcagtatcagacttgagatcaagtatttcattgagttggacttggtggttaaaaacaaaggcttcttgtggatgtcatttgttcagctcccaagttggctacaatagatcgctaaagttgaacaaaagtacatgtttggcttattatgactttcaagtgtctttgctgctgatgaattatgcgctcttacagagttactgcttactaagcaaccttcaagctttcaacaagtgaagtgattatatatcagaatggagataaaatatagctgaaagtaaaagttgtgatgtaatctgaactttctagtttcagcttgcagtaatattgggtgtttggtttctaaggactaatttttagttcatccattttatttcattttagttcatccataagaaacgtatttggtaatttagggactaaaatggaataaaatggagagactaaaaattagtctctagaaaccaaacaacttctaataattagaatagctagtagaaaaatagtgacagaagttcacattgtgcaagagcaccaactatgaccacaagtcttaacacatcactgtctgcatagtactgtcatataatcacgtttcttatggattagagataattacttttgacgtacagactatactagctgcatgccgttcttaatatctctttctcccagagaacaattagatccatactaacatcatactatgcaagtcacatttgatttgcagtcaatcccattgtacctgtccgaaatggcgccaccccgataccgcggggcaatcaacaacggcttcgagctctgcatcagccttggcatcctgttcgcgaacgttctcaactatttcgtcataaaaatcacagcaggatggggatggaggatatccctgtccatggccgcactgcccgccgcattcctaaccatcggcgcgatcttcctccccgagacgccaagcttcataatccaacgtgacggcaacaacacggacaaggcaagggtgctgctccagaagctgcgcggaacggcctcggtccagaaagagctcgacgacctggtccgtgctagcgacctctcacgagcaacccggtacccattcaggagcatactcgagaggaagtacaggccgcagcttgtggtggcgctgctggtccctttcttcaaccaggttagcgggatcaacgtggtgaacttctacgcgccggtcatgttcaggacgatcggtctcaaggagagcgcgtccctcctgtcctcggtggtgacacgcctgtgcgcgacgtctgccaacgtcgtggcgatggtggtggtcgacagggttgggcgcaggaagctcttccttgccggcggcgtgcagatgatactttcgcagttcaccgtcggcgcgatcctggctgcgaagttcagggactacgaggagatgggtgatgggtacgcgtacctggtgctgaccacactgtgtgtgttcgttgcaggctttgcgtggtcgtggggccctctcaccttcttggtccctgccgaggtttgcccgctggagatcaggtccgcggggcagagcatcgtggtcgctgtggttttcttgatgacgtttgtgattagccagacgtttcttgaggtcctctgccgcgtcaagtcggcgacgttcttcgtcttcggtggatggatctgcctgatgacgttgttcgtttatctgttcctgcctgagaccaagaagctgcccatggagcagatggagcaggtctggaagacacactggttctggaagaaggttgtgggagaggaagcggataggaaagaagcaggagcagggaatatagctttgtcgggcttgtcttagtcattttctgagtcgggtgtgtgtatgtgtatttgatcaaaactgcaaagaaaaacatagtatacgatcgcgacaagctgatgtaaatgtacatttgtatgtaaatcgagtaaacttatcagtctggcgttgttgccagttcctacaactaaccgttccaaatggtacaagagtacagaagcactaatataacaagaatgttgaaacgcactgctgtttcttctttcatgatcggccgtagaaggaaaatttacctaac

SEQ ID NO: 43857 - DNA, 1692 bp, Zea Mays
gccgagctcgcccaaccatttctctgctgatggttgatgcccctccagctactgctcgatgctgccctctcgatcccggagtctagcgctgtcccccctggtttcagccctcaaaccccagcgtcgatctccctcgtattgctgccggtttaccgtggaagaggaaagtccattcggcgcgctctaggtgtttggcaaaaagcttaaaccaaaaatcgtcatcgcccttacatatatcgatttggtttatgacatggttgtggaaactaagatcattgtaactcaaatgagagcttggcacttagcatatagacgccactagaaccaatctggaattactgtgaggagaaacagatatagagtgataaaggtattaatgtaagtactacataaatgtactactggaattactcgtggatacattggcttatctcaaggtagaatctttatacccagtggtttagtctgtggcagcatcgtcctatctagctccacatagtactgctagaagcacctagctaggtgagcaactagaattgtttttcacctatgtctaagtagctaggatgtaattagatggcgaggtctatcttaccgcgccgctgctgtcatcatcgtcatttagatctgaatatgtcaaccattcttggcccctaccgtttatggcaccacttcctttgattgtgattctggttagctttgtgaactccatgcattagagcaaaccaaaactccacgctcttgcactggtttcagccaaaatagttctgtatgtagggatagtgtaaaaattttggtacatgatgaatcattgaaagttattgagaattaattgtgaattgttatgctctattgaataaacataattgttggttagatgctgaaggagaagtataaaaattatctagtatactaatgctacgctgcaaaaggtaagcgctaaatttaaaatatattttcttttgttcctccattttgcataagtaacaggtttctgtcgctagttggtggtgttgatgtgaatcagcaagttcaatgtgtttgctgtttattacagaagtggataaggccgttagatgggctagaaaccactatctgtcatcaacagctcttccttctatcaagggagacaagttaatcattccccatgagagtctggatatatcaattgagaggctgaaggaacatggtataacaactaagaaatcctctcaaaatctgaagaaaattggggcttgccacatgagcatcagtcaaagggagggcaggttgcaattcgttccactatcgggtacccaaacggccacagggtaaaggagccccgccgggcagcaccacacaggtgatagacactgcaggtaatgccccacctgtctgaccggggtgcgctgttacctagctcccaaacaaggcctgactgtttggtgaaatgcttgggacaaagtggccagcaagaatggagtcatggaacatcggcaggagggatgcagcagcggcaaccgatgtatcccttggacaatctggttttgacatgatgcaaatcaatctgttgtacattgtattttgcacttgcatagattgtttggctaattacaagattatctcagtgttttggtttggatttagagtacacttatgtatgaaatattgattggtattcatctatattatattaattatattattattaaa

SEQ ID NO: 43858 - DNA, 1158 bp, Zea Mays
atattttttttatcttaaacccctactcaatcttatcctcttctcattcttctttctccctcccatgtcttccaccaggaccgaagtcgtgcgccgccgcccgcctccaccggcgcgcccgctgcgaccgaccccgacccgccctcttggcagcggacagcggagttcaccactcttggcgaagcgaaatccaccgtacaccgctgcctccctctccctgtctcgtcgaaccagccgagcaagccaacgcacacccagcgatcctcgtcgtgcgtcctcctcccccacggagggaaggatggcttggtccgaggacatggcggaagccgacgagatggagagcaggggtgtgcagagctcggctagcccgtgtcgccgccacaagcgggagattggagacgacgacgacgacacggaggaggagggctagcccgtcccaccgccacaagcgagagatcggagatggcgaggacgcggaggcctcggcgtcgttgtcggcgtccgccgcagtcctccccgcggccgaggtcgagcagatcaagcgggagatttagactatgaagttgatcaaacatcccaatatggtccaactgcatgaggttatggcgagcagaacgaagatatacatggtccttgaatttgttgatggaggtcaattctggaaggctaggagaggatgaatctaggatatattttcatcaacttataaatgcaattgattattgccatagccgaggagtgtaccatagagacctgaagccacagaatttgcttctggattcaaatggagctcttaaagtttcaaacttcggcctaagtgcatttgcaccacaaacaaatgtatgatctctagtcagtaactagaaacaaatgtactatctaggcactctgtgtcacgcatgtgacccggtcccggattcatgacccatagtcatacgagtgtaccctctttctaaccatccaagcactccatgtcatgtatgttgtacccagaatgcacgatccatagtcatatgagttagaacaacccacatagtactggatgatgagatgtgtcttattatgactatggatgagacttttgtgatgtaattaatgagactatggatttaaatactgttatgtgattgtgtgtgagatgttttatgtgaaaatatg

SEQ ID NO: 43859 - DNA, 1330 bp, Zea Mays
gatttctatggatacttctatctcttgttggcatgtatcgtcttctagatcatttggcactgtcacgtgcatgctctgggcctgaggaacatcatgagggctataaaaagggcagaagttgaagcaacacctgtgaccagaaagagtccagaaaagcttctgaagtttagactgctggggctggcgatggcaccatcagtttgacagacatgttgatccccaatccatttattttctatctgaatgatgacatctccttctgttatgctgaggattctcctggagaagtcattgatcataggggatctcttggggaatgcctaatcaacaattaatttaatttcagcaatatacagattgattaaggaatgtgttaattcttctaaaagttaaaatggctagcattctaagatcctcaataatcatccaaaaaaggattcaaatttgagtgatttataataaacataaatctgtggatggtatctttaaaagctggtgaatggatgttgcttctccttttcctagtttattaggattaggggtgaaagcagcttggacactgtctgcactggaatctctgatgtgaaggaccagctttgtcgtatagttcctgtgaactgcatagaaatcttccatggccatcaaaatactggttcgtgccatcttacccaccaatgactgcaagttgaggatcactccaacattgagtgttgctgcttcacttgtgggagctctttgagcaaaactgaggataaagaacaccacaaaggaggtggttctagctgctaactccatgcccttaagctgtgcaagttttagagaatgtgtgtgtgccaatgcagtcttatatggaaaatcttataggtgctaacctcaaatatataacgtgggacgtatctgattacctacatgctgaagccggtggcagtggagattcaaggaaatccctagcgagtaaaccaagaatgatctggactgctaattcaatgggttttggaatacctgcattgggaagctgatagctgctcagagattcaaggaaattcctggtaacaaccgacaggatctctgaccaagccaatctttggccctcaagtggtaatataattgcgaggagaaaggtcaaaatgaactcactgctggcaatcctgcgggttgaagcatgagatttccgtccgtccagaaccaatcaagaaagtgttgaccatagccaagtcagtgggggcttagctttgttgtgagggtaagtacgaactgacgagtgacctcgagggaattgaagcatcacgctgtacgttaagataatctgatcggtgattgttgacttttg

SEQ ID NO: 43860 - DNA, 1808 bp, Zea Mays
ccgaaaaacaagaaccatcgtacgggtgacgtggccaacacttccgtttttgttccggccaggcggctcgtgtccccgcagtcggcaggagcgcggacgcagatccgacggcctaggggcactccggggaggccacgcaacgcgcgcggcggcaggcaagaactccgaagtcggcacggccgcacggccgctacgatacggcgccctcacaattgggccgttataaaacgtcacaggaggaggagataggcacacggcgtgccgcggtgggcgaccttttttgcaccgggagataaatcgacagcaccctgacctcaagtcctcaacccgcaggccgcagctgctcccgcccgccgcgcaagcggccaagcgccgccggttcttctcgagcaagagtacatgacttttgagctaagtgtttttcgtgagtatgatgatgactgggtgttgcccagtgccgatatcactcttgttctggttgggaaacttggctatggcaagagtgcaactggaaatagcatccttggacgggaagcatttgtatcagaatattcacatgccagtgttactaatacttgtcagttgggaagcactaccctgaaggacggccgcaccatcaatgttattgatacaccagggttatttgatatgagcattacatcggacgaggctggtaaagagattgttaaatgcatgaacatggctaaagatgggatacatgcagttctgatggttttttctgccacatctcggttttctcgagaggacgcaagtacagttgagaccattaaagtcttctttggtgaaaggattgtcgaccacatgattttagtcttcacttatggagatttagttggtgaatctaagttgaagaaaatgttaaataatgcgccagagtatttgcagaatgttgttgagctatgccaaaacagagtggttgtcttcgataacgtgactgaagaccgaaggctccaagcgcagcaacttgacaaattgctcgatgtagtggattcagtttgtgcaaaaaatggaggaaaaccattttcagatcaaatgttcactagcatcaaggaggtgcatgatagagaaaaagaggtgcatacctcgggatattcagatgagcagatatctgaattgaaaaaggagattcatagaactagggatgaacagcttgcgcacataaccaacatggtcgaggaaaagttaaactgcactgtggagaagttgcaacagcagctcatggaagaacagaacgcaaggctggaagctgagaaggtggcgtacgaagctaggctgaaatcagaagcggagatccagaagctcaaggagagcctcaagaaagctcaaatggaaaatgatgagttccggaggatggcgcagagccagggcagtaaatgtgctatcctataggcattagtacttgctagaaattggtggagctatcgtgctgacgcgtctcttgtacgtagtactttctctgttccaaaaatatatagttcaatacaccttagtagagatgactacgagagtatccaaacaagacctcgtcggacatgttagcctgaagcttgcttatggacatattggatatagtttttgggtgagaacttttgaacaacttccttgtttttttctctcatgttctaatgcatcttttctctagctgtatgcgcacaacattggagttgttccccaccaaatagaagcattagggatcatccgacaaagaaaacgagtatcctctttctcactagaattatcatgacgaacagcaaaaggatgaataacaccgtcttcgtcttcattgc

SEQ ID NO: 43861 - DNA, 804 bp, Zea Mays
ccaaatttcactttgtcgccatcaatcctggacgacattcctgatcttgcccgaagtatctcgaatagatttttaaaaatgatatggacaaaaggtgggtgagaaaaggcaggagacgaagctcgtagccaccttgaaccagtaagaaaccataccttgtgcttaccttttcttgtaagctcgattttgacttacaacgatcttattcatgtaggatgatgaagctgaagtcgaaggtcaaaaatgatgccgaagccgccgaagccgaagctccttggggattagatagtagactgtaaacaatgcttgagaaacttttgagagcttttgtaaacgtaacttttgtaaatgtaaacaatgccgaaggtctttaatgaattctgttcataccttattatatatccttaccttcccattgctgtataggaaatgctttgatgtggacgaaatttttcctttttgagccgtcggcgaaaaaacaccttcccttcttttcgtacgcagcgaagcatagagaacaacattttccccttttttccgaagctctcttttttgtgcacgaagctctttcttccccttctttttcctctttttgctgaagcaaccatttatgccatgaagatgactatcctacttatgcctagatgaatgtttatgaatgcaaatgttatgatgtaatgtgatgtgcaaatgcatggccaaacatgtatccgaagtcatattcataaccattttaagaaccatcacacctcagctctgcattcccttaggaacgactttggagcttcttcgcctttacttttg

SEQ ID NO: 43862 - DNA, 1102 bp, Zea Mays
ccggtgagcagcggtcggttcgacgcgtaggggctcaatggtcaggttcggtgcctaggggctcagcatcatcaacattctctttggcatgtggtacaagagttgatagaggacaaggcccgatttcccatgaagtacgataacttgattgggtggagatctcgacgttgatgatccaaggcttcgagcgaacgaatcctcgcaatcacgacaccattgatcctttggttatcacctgtgacacacgagtgaccttgccatgaagccttatacctgcaagcgtaatcaagaacacaatcaagaacatgaagaatgcaatcaaaactgcattgatcacaaggtggggactcacaaaccgatgaacgacgacactgcttgatgatatatatgatctaagcaaaatccaaaccctaatgtgctggcggctgctgttaaaatagaggttaggggcgtgcatgacccctggtcgcacccataatgggctacaacacgatacacgtcccaacagcccaacagacggtgtcgcaataccaaaacaaaatttgaacactgacttgtttcgacgattcccgttgactccggatgaatttttaggtgcttccagttgaggttgaaagaatatatccttatctttccatccatataatgcccaacctaatcggagtttggatgcattctgagcgtctgttttattgctggtcctagactccgaggtggagacgaagttgagtcggacttggctttctcttgttgttgtgaacgtcctagcttctcctccttgacatcttgatatttcacaagtccttgatggtcctctccaaggtttctaatcataaaaaacatccatggcacaaagcgtaagctctaaaatacaattgactaggtaagaacgaaccgagatttagatgtcgtgcacgtgattgtgttgttggcctatacattatttgtatggaagtgatgtcctcatcaagagtcgctagatcggtgtcctatacaacatgctcgatcacattaagcaccttggcccaaagtcagtgccgcttgaggaccttctagacatcctacgctgctgcacagagaagcatctcacgcacagcggttg

SEQ ID NO: 43863 - DNA, 248 bp, Zea Mays
attgagatacacattattcatgattatacttttgttatatgttgttatttactgttcaggataagatcattatgttaattggaacatggagaaccacccgggaaaacagtgctaccacaagggtttatggacgcccttggctgactaattaggaaagctagtggaggattaccttacccgaaaggggcaagggtagtaggggagtggtcagtgtagggagttccttggttgattttgctgcaatggcg

SEQ ID NO: 43864 - DNA, 703 bp, Zea Mays
ctaaaccaggacattttggatatgagctatgtgtatcaaagattggatcttgagctagagtgtaactttgctctaggtggagggatcaaagggatgaatccctagaagaagctgaaacacaaatgaaactcatttgaaaccctaaaactagcccaaaaggggaattcaagatctagaaggatttagctaaaagtccatatatcaaagttgtagagcttggaaaagtggatatatttcttatttggatatttccaagttctgtgaagaaaattggagtaaatcacaaaagttcagttttgagctcaaattggaattgctgaaaatagtagcaactaggcaattttggtcctttataacttctgatctataaacattttgaagatggtcattataacagagttatagagctacatgagtagtataagtttggttgagtcacctagctctaaagctatttggaacttagagaaaaactggtccaaagtagagctaacagactttctggatttcagacttggtagaattcagagtctgaatttcagcaattggagcaaactttgagctattgtagtttggaatccaagaggttttggttaatgaccgctataggaaacttgtagaataagtataatagaacaactgttattaagtgtcacagccctggaactatatacaactaggagaaaaaggtgttcaaagttgg

SEQ ID NO: 43865 - DNA, 2349 bp, Zea Mays
ctgccattcccctgcggccctgccccatactcccgtgtcttcccggccttcttcggatggccagacccctccttctccaaaaatcccagaataccttgggctcccgagcaggagagagcaatgcaacgagccatccggatagccgcggctgcgacaaggcgagcgctgtcgtcgtcggcggcgagggcatcaccccctcctccccgcggacccctggctcctggctggggcgccactaggtggctctgcagcgggcgggaggcgctgagctacgacgtggtgatcgtgggcgcagggcccgcggggctcgccgcggcgatccggctgaagcagctctgccgcgctgctgacaccgacctctccgtatgcgtcctggagaagggctccgaagtcggtgctcatgtgctgtcggggaatgtgtttgagccccgagccttggacgagctcattcccaagtggaggcaagaggattctccaatcagagttcctgtttcatctgacaagttctggctgttaacgaagaaccaagcttggacactaccatctccatttgacaacaaaggaaactacgtgatcagcttgagccaattggtgcgttggatggccacaaaagctgaagagttgggtgttgaagtgtatccaggttttgctgctagtgagttacaggagtcgcaaccaatgatgttggtattgctaaggatggtaccaaaagggaaacttttcaacctggtgtagaactaagagggcgaataacactgcttgctgagggttgccgcggttcgttatcagagaaaataataagaaatcacaagctcagagagagagggcaagggcaacatcagacatatgctcttggaattaaggaggtttgggagattgaagaaggaaagcacaatccaggttctgttattcatactgttggatggcctttggatactaaaacatatggaggatcattcctgtaccaccttgatgatagacagttggcaattggtctggttgttgcgttgaattatcgaaatccgtttctgagtccctatgatgaattccagaaatttaagcagcaccctgctgttagaaaacttttggaaggtggaacagctattcagtatggtgcacgtactctcaatgaaggtggtttccagtcaataccatatccaattttccctggaggtgcaattattggatgctctgcaggatttctaaatgttcccaaaataaaaggaacccatacagctatgaaatcaggtatgcttgcggcggaagcaactttcaagtccctcgttgaaggatcttcgatggaactgtactgggagaacctcaagaagtcatggatatgggaagaacttcataaagctaggaattatagaccagcatttgaatacggattaattccgggtatggttttgtctgcactggaacgggaagtcaccttatacattgaagcatgggagacccgatcatgaagcaacagacacggccaatctgcatgcgcctattcaatatcctaaaccagatggacatataacatttgatgtcccaacatctttatacaggagcaatacaaaccatgagcatgatcagccgcctcatctccgcttgagggatcctacagtacccgaacgagtaaatgttgcactgtatgcagcgccagaatcacgctattgcccagcccgggtttacgaatatatctctgatgagaaaggtgacccaaagcttcatataaatgcacagaattgtcttcattgcaaggcttgcgacatcaaagatccaaagcagaacatcgagtggacagttccagaaggtggaggtggtcctggttacacagtaatgtagaatgctcaatgatgaaaatatgttgccttcaaaaataataacggctcattcaccactggtgtcaaactggaccaaatccctggctaattgggttggaagttacaccagacatctagcaatgagcaacttccttaaagcagtagacaggatgtcaggatgttcctagagctatgtaccgatcaggatcagtcagggaaagaagcgtgcatcacatggatgtggtgactgtaaaactattgggaagatgcaatttgtcgaccaataacaggcgctgtaagagagatctgtcccaaacgaaagatcgtaaggtgagatggagaatggcccagagctgggaatgtattaaaatagacagagtagataggccaagccccttatatatgggtatataggtaaatacatgaggactaatccaaaaccctagcgaggttgctaacacgccgtaatcttcaactttaacctgtacagacaacaaaaacaatcgacgatagccctttggtgaagatgtctgtg

SEQ ID NO: 43866 - DNA, 1728 bp, Zea Mays
gtgcctttccttctcgctttcactggtaccaggtggcgaccatacagcacggaactccagttcaccgctgcctttcttctactgttcaccccgcgtgcgctcgctcactcgctctctcccctctggctctgagtggcgctagtgggcgaccgccgccgcgtccctccgtcaggtgcccaggtgtagcctcgtcagcccctccgtcaggtcttcgtcggccccctcgccgacgagcacccaccaggcatgagagcgcgcttctagaataatgtctgtgcttacctgcgtgattgaaagcatgggctcatcctgtagcagatcccattctttcgacgaggctgaagcagctgaaaatgcaaagtctgcagacattgaccggaggattttgcaagaaacaaaagccgaacaacacatccacaagctcttacttctcggtgctggagaatcggggaagtctacaatatttaaacaaatattatatgagggagctaaagagttagcccaagtggaaccagattcttcaaaatatgtcttatctccagataatcaggagattggagaaaaactatcagaaattggtgccagattggaatacccatcgttgaacaaagaacgtgtacaggatgtaagaaaactatggcaagatccagccattcaggaaacttattcacgtgggagtattctgcaagtcccagactgtgcacagtacttcatggaaaatttggacaaattatctgaagaagattatgtaccgacaaaggaggatgtgcttcatgcaagagtacggacaaatggtgtggtagaaactcagtttagccctctaggagagagcaaaagaggcggagaggtctataggctgtacgatgtaggaggccagagaaacgagagaaggaaatggatccatcttttcgaaggtgttaatgctgtaatattctgtgctgccattagcgagtatgatcagatgttatttgaggatgagacaaagaacagaatgatggagactaaagaactctttgattgggtgctaaagcaaagatgttttgagaaaacctcattcatgttatttcttaacaaatttgacatatttgagagaaaaatacaaaaggtccctttaagcgtgtgcgagtggtttaaagattaccagcccactgcacctggcaaacaggaggtggaacacgcctacgagtttgtaaaaaagaagtttgaggagctctacttccaaagcagcaagcctgaccgtgtcgaccgagtgttcaagatctacagaacaacagccctggatcagaaacttgtaaagaagacattcaagctgatcgacgagagcatgaggcgttccagagaaggaacttgatcgaggatgtggtgttataagccacaagacaagtaactaggatggtgtgaggagcagaaagtttacagtgtcgcggctttggccgattgtgattctttttacatgaggaacatttgttgatctttttgccccaccacaagccagtaaaagtatctgttttgcgctggtcttggggaggtttgggtcgtctccatttccccccaatgttaggacaaaatgtacttaccatcttttggagctctgcctgtttggcctcacaatatcaagttcattcgttgttgtctatgcagcatgcctattcacgaattgtctgaatttgttaaccaacaacagatgaaagttcgattggtactctctcaagactgaatttggctacg

SEQ ID NO: 43867 - DNA, 1213 bp, Zea Mays
gtggcgtggtgcatcatgagttgattcctcaattttggtggaatggctccattcctcaaatttcaacaagaagataaaaaactatctaactccgaggcttttctgcgtagatcagagactcagcgaaaggctgagcaaaaggtccgcgaagaaagtgaaaggctgcgacagaaggaacgtgagcaaattgcagagaagcgtaagcgtgatatgctgctaaggcggaagaaaagaggttggagctgttgtacattcagtggactgagcaccataaaaggctgtccaatttcttaaggttatttttatttctggtccaaaagtgtccatattgacaattaaattgagggaagatacattctaattatgcagacttgatgtttgataaccattagtgtatctatttacattgtatactgatgaacaatatttgttccatgtttgactctatcttattacccccttatgttggcaggacaaaagctgaaccacctatttactacatgccaactaaaccaattattgacgatccagccattgttgaacagaacaaggaaaaggtattcgaagaatggaaatctatgcgcagggatgagctgactcggttccaaaagcaagttgaggagcaatatctctcaaatgtggagaggcagctggagaggatccagaatgcccggaacgctcgaaaggcgaacgggcatgctaacatgcaagaaatggacaaggagctggacacacacagggcggagcatggtccgaagactcggcgagttcctgaggagggcggtaatgatgacgacgaagacgcagaggacatggctgcggaagacgaggtgatggatgaagttctgggcatcaacgatgggatcaacgaggacccatccaagccgtccgaagaagctactactgaaggtggtgagcctgcacccgaggaagcacaataggattctttgttcacacaagctaggcacatagccgtacgtaccattccgtatgcttagttgccgtattgttgggaactgtttgtgcgtgtatttctgttagacgttccccgctggtttaggctgtgttttatattgctgttttgtctttttgaatgttgagaccatacaactgtcgatcattatctcataattgttgtaaaaatactataattgataccttgatttggacgtcggtggcgttaaacgtttcgggttctgttcttcactacccg

SEQ ID NO: 43868 - DNA, 426 bp, Zea Mays
ggaacctctaatgatgcttcaaactccgctttagtggtcataaccgatctggatcatagacagatgcccttgcagggtacctttaactccatgtttgacttcccgatgcctaccgctgaccgtggagtaacgatatataatgcaagttcacatagaaatgcaaacttagctcgacaacaccgtaagcgagttctagatcaacatcggttggttcttagaggtcctccacgtaacattagagttcctatgcaatgtgcttatttatccgatgactacgttgcagcgctaaaagcttcgtatcctaggagatcaaaccatggaactccagattataattgtcaaatgtgtggtgcattattttggtatggagaaagatcacgtggcaccgtgagaaatatgtccctccaatactataattgctgcaaa

SEQ ID NO: 43869 - DNA, 2199 bp, Zea Mays
atccccatcctttccactactcatcagttttctcatctcagctcagctagctttcccctcccttgcaactgcaagcttgcccaacccaataagctaagcaagcacgcaccatacacactctctagtagctagctaagctagccggccgcccctcctcgcacgcgtgcgcgcaccagcatctatcatcagagctagccacgaaacggatcggagcagcagatctcgatcggcggcccacatgggggatcacgctgagatgttgcatgccgctccggccatgtacaacggcgctggcgctgcccctcatggcgggtggtggaatacggcggtgcccgcgacgacgtgctcgacgacggagctggctgggttcaccacgtggtcgtccgccctggctgctagctacgacctggcggccgaggggacaaaggccaagagcgccgccgcctcttcggagtcccccgggaacaacagctccgtgaccttccaagaaccggcctgcgtcacggatcctcccggcgtcggaaccgccgtggtgcaagtgcaacagcctcttgccaccggttacgccgactggacacatccctatattggcgctactactttgcatgggtttctgcaagacggtcaccagcaggacatgagctcagcaactgagcagagctccatgaccgcatcaagcctgatgaacccttcatccaataacctagccctggcgctgcaaggtcaccaccaccaccaccaggagcatgagcaccagcagcagatgctgtccagcttcggatccgagctgctcttgtcgccgacgacctcaccctacgggttccagtcctctctgctacgaagcctcatggagccggccgcggcgacgaagcaggctttgccggggtaccagcagcagcagtatgatcagtaccagcagcagatgggcatgggccaggcgaggtttgcaccaccggcggccggagctgccagcagggaggcactccagttcagcaacgacgcgctgttcagctggaacccttctgctgctgggttcggcttcggcctcggcgtgccgccggcgccggaccaagctagcagcgtacgttctgtcgtcaaaccatcgccggcagcggcgcgtgctacagcgacccttgcattaaagactgcgctggaaggagtaggagagtctgctagctcgatcatcaccaagaagaaggcgaacggcgagccggccttgaagaagcccaggctcgagacgccgtctccgttgccaacgttcaaggttaggaaggagaagctaggggacaggatcactgcactccaacaactagtcgctccttttggaaagacggacacagcatcggtgctccatgagaccatcgagtacatcaagttcctccacgaccaagttggtgtccttagtgctccatacttgaagaacaacggccatcatcaagtgctccgccacttgaagagctcaagtcctgacaagtcgtccaaggacgacgacagccatgccagcgagatttcgctcaagggccgggggctgtgcttggtccccatatcgagcacgttcgccgtagccagcgaggtgcccgtcgacttcgtgtggagcactccgttcgctgccaactttaggtagaagaaggatgagaattgagaaagagccaaagctctgatcgatcagaggcgtcgaaagagaaataactactacctcgttaccacagatcgatcgacctgctggccctgaatcctgattatatatatatatatatatatatatatatgtttcttagtctagtgacctagtagctagcagtgtatgactgtgtatggtcatggttatctctcataactgtactagtactaagcttattgcagactaagctttgctagctagagatgaacctttggaatgagtccttgaaagacttggactcattctccaggttcatctatctatccacccagggtgtaagctaataagggatcacctaatatatttgagagggcacaacaagtctctctactgatcgtcatcagcttctaattatgattggtttgttaggttgcatcattgggtagttgtggaaagatttgttaaagatgtgtaatggtttctataccttaaactagtgacgacggaatggatcaaagtgcgtagcaggtttctattgattgtactacgtacccaataaaagtggcatctctttgatt

SEQ ID NO: 43870 - DNA, 998 bp, Zea Mays
ctgaaattcgcaacgagctggccggcgatctcgccatggatggttgcagagctgtccttactggagacatgcaatgtcacgaggcgacgatgagtaacagcagctgcgactctgatcatcttcaccgcgagaggggagagcaaggcttgatcagctcgcagcttcagcagcagctggaacagatctacatgctgatggacatggagctagagcatgagctgcacctgcaccacaacgtgccaccgcagggctgtagccagcggcagctgtcgtcgccgttcctgcctttcgccgtcagctccgatgtgacctcgtcgcccgtgctcacgtcgtcgagcaccacaaccttttgtcaacagccagccgaggcctcaccctcacccctggacacgccattttccccactcccctacagctactctgacacgatcccggacctggaagagatcatgagccgaccacggcacaaggacggccatgcggagtccggcaccagtgcattcaggcagtacgtccggcacctccgccccaagaagaagctaaagcagggcggctgcgggcagagggcgatcaagacggccatgtcggtcttggcgagaatgcacagctctaggctttcccagtggcagaggcagatctcctcgacggagatggcggcggcagtgccgtccgacgagagcaaaaacatccagcttctgcacgtccggtcggagcgcaagcgccgtgagaagattaacgacagcttcgaggctctcaagaatgcgttgcccccttcctgctgcaagcgagataaaacatccatactgatgagggcaagggactacataaactctctcaagtccagggtgtctgagcttgaggagaacggcaagagtaaattagacatacatgtgccatttaaatttaaagcatgtgatgacaacaatttcgtgaagcagtctgtgtctgtgatacagactgtcaaatgcacgatgcagtcagagatagagacaccctaa

SEQ ID NO: 43871 - DNA, 254 bp, Zea Mays
tcgagacttcacgtggcaaggcggtaccctctgtgtcagagggtgtcacacctgcagccctcgatgccccacacgtgcgtcgtgccgaggtcttgggacctcaagacgctccgcgggccagcgatgtgtccgtggaggaccatgacatgaaccaaaattttattttgggtcctaacgtacggccaaaggatacgtcgggtggtgcgaggcttgatagtagatatcgatcgaagggtgtgccccgcgttagcctt

SEQ ID NO: 43872 - DNA, 1441 bp, Zea Mays
atcggtgatcggtctcctatgttcacacctgtttgctctcttttcttcccccgttcacctcgcgtgcgccacccacctagggtgaccgccgccgcccttcgcccagccgcccgggttgcgctttgccggcgacgagcgcccaccgcacccccaccatattggtcactggaggattgctgccgttggtaaggatgagcaaaggcccagttccgtttgccaacatcgggaagagagcaaaagatcttctgtacaaggactacaactttgaccaaaagttttctttgtcgacgtctagcggctctggtttgccactggtgtaaagatcaacgaagacttcattggtgatatacggacacaacataaaagcagtagaactactattgatgtcaccgttgatagtgattctaaagtgtcaaccacagtcactgttgatgaagcactaactggtttgaagacttcattcgccttcaaggttcccgatcacaagtctgggaagcttgatctgcaatatgcgcacaatcgtttttcattgaactcgaccattggtttgacatcagcacctttggttgaactggctgcaactgtcggcacaagtgaacttagcattggtgctgaggttgggtttgacagtacttcagctgctgttactaagtacaactcaggaattggatacaacaagtccgatttctcagcttccttactactggctgataaaggggagactttgaaggcatcttacgttcatttgttcaatccgaccaatggagctacagttgcagccgaggtaacacacaagctgaagaccagagagaactatttcacagttgggagctcccatgcccttgatccttcaacattgctaaagatgagattcagcaactccgggaaggtcggtcttctctgtcagcatgagtggaggccgaaatctcttgttactctttcagctgagtatgatctgaaggtggtaagtgcgccttcaagaatcggcatggccatatccctcaagccttgagctgggttaagtcaccttctataaaacagtacaagcataccgtctcccaagaacacaagctttggagcgatacctagaacaaccctccattttagccttttttattttgtaagagtcttttgcaaaggagtattgtcacttgtcagggagttagacttgttttgtggaacgtttccattagagccaactccacacgaaggattgaaaatacagaggtttgcattagaacagaagctccactgcgatattttcccatgttttgctagtcgacgcaaaaaatgattttttggaggtgatttgaacacctaacatcttgagtcgatggtggttttaacagctctggaaatcaacaagggccatttgtacccagcaacagcagaattagttctggaaattggttattttgatgagttttgtttgtgagttggg

SEQ ID NO: 43873 - DNA, 995 bp, Zea Mays
ctggtatcggagcgaagcccgtctcttcggacattacgtagtactttcaaaaggaattttttaaatacttaccttaaacattctttcattcttatcttaccactttctggtagtaacttatcttttgaagtcgggtaacagagtgctaaataagagtatgtgtaggaaacaagggatcaacaaaaagttgattccatgaatattaggttatgcatgcatcatgtttaaactacactaaataaatttctcccctcttatggagatatggcgtgaaccaagaccacctagtgcaaatcaatcggacctcatggtgtaccccgacatcagctggcctctagatatgaaggaagcagcagtggaagcaacgacccaataggggaattggaggccagagtagagcgactcaggtttgaactacgcccacgggtgtggggagtgtgcacgcgatagccgtcgtattgctgaactatcagcaaaagttaatcgcctgcaacatgaaattatggaacgcaatacgaccattgactgggtcgtaaattcgcgctctttcgcctaggattgtgaagccaaagctctagcccgagtagcagaacttagcacatccctggaaaacctgcaagcgtattgcaacaccctgcatgaagaggtgcacatattgtatggtcggctgcacccaaacgtgccaccaggagttgcagcaatgggagctggaccatctggaacagcaaatggaggatctgatgaggggttggaccttttttgagcccctccttccatgaaccttgcagatgaacggtctcctgaagtgggcagtggagtagctaaggacgaagagaattagagtagtatagtttaagtaatgtactcatgtaaaataaataaggaagtcgagttgtatactgagtatgtataattattacagttcagcaatgtaataaagatggtgtgtgtttggcatgtaataatttaggatgttttttcttcctcagacatcg

SEQ ID NO: 43874 - DNA, 1239 bp, Zea Mays
ccagcgtgcacctgccctagccgcgttgctgggaagtctggaacaaggaagcagccgtccccgtccagccttccgccccgcacgccgcaagccgtgctcctgccttcctacccgtcgcgcgcatcgccgattcaccggtgcccgtcgctcgcagacctctccctcgcccctcgcccagcttgtcggaggccgaaattgatttgctctgtccagctctgggctctgctgctttggcctccaagcgcgccatgtgtttctatcgacaataaaattcacaacttgccggagcttgcaactgttctgctctaaaccagtgaaacgtgaagactgaacctgcttctgcttggctgcttgctccaattcaagaatcctctcttctcggcttacttcatttactcttgcttgttctattccttgttaactgactgctgtaatacagatcaattacattgaattttaccatggcagctgaggaagatgtcaagcagaggcagatcattgaaaatcgtgccagaaatataagccacaatgttaggtgcactgagtgtggtagccaatcgattgaagattcacaggctgatgttgctattctccttaggaagctcattcgtgatgaaataaaagcaggaaagagtgataaagagatctacaagaaactagaggatgattatggggagacagtactatatgcccctaaatttgatcttcagactgctgggatttggctttcgcctgtcattgttggtggtatagcagctggaatctgggcttaccaaaggcataggcaaaggacaaatgttcacattatggctctgaacctggtccgaggggtaccactgactccaagggagaaggagaccatgctagacatccttacacctccaccggctccaaggaaatggtggtggccaggcaaatgatgtagaattcatgtgctggacctggtagatgctcacaaatggttaggatgcaaattacagtttggatgcatgatactttgatcgtgactttcagtttaaccaaaagcctgttcatttggctataattcatacaggcttctactagctcaatagtgttttgtctctatggattgtagctgcagcagctcaaacagttggctttaatccgaagcgaacaactagaagtcaaaactttgtaatgtgtactctatcatcgaactagttgtatgtcacacccgattttggaaggcaaaccgaatgcgaaccatgtatgtgtcag

SEQ ID NO: 43875 - DNA, 3046 bp, Zea Mays
ctttggccgaccatgtcacctcatcatcggcattttacgtcccagttttcttcttcttattatgcccccgtgcgaccccaaagaaggagagaactgaagctgcttccactgcctgattattccccaaccagttgttaccattcaggtcatctccgactagtctcacctgcagtgccctacgagcgagcactgtcagcacttgttggtcgccattcctatcccaccagcagccatggcggccgtgacgacaacgccatcgtcgaaaccaaggaaagtaggagaagaccaaggaaggggaagaaaacagcgcccaaccaaggcgtgcgtgcaccatcgtcgtcggagttgtcgactaggacggcgcagagcggcgacccccttgggcgaaaggagctggggcaacacgtggtgcactggctgaagcagggcatgcgccagatggcctctgaattcgcttcctcagaccagccagagacacaaggtaacaaggcattcctgtggtctgatggtgggcacgcggcccacgcggggtttgtagcgcaggcacaggcacacctttctgccactcccatgcccaagggacaggacgctctgtgccgcacggcctccgctcactaccccacgctgttcgacaacttccagagagagctccgcgatgtcctgctgcggcggtaacaagagggccttcttgttgatgatgactggcgctctacacgctcgtgggcgcttctgaaagagatggctagatcggcggagcatcggacggccgcacgccggtctactgctcctgttctgcacaccacgcttggcgtcagcttggagaagacgaggctgatgcaggctagaatcgatggctttgttcagcaaatgaccggccttcttcggctagaacgagatgcggagctggaactggcccaggatcatgaggtgagtgccgccggtacagtgatggatggaatgccgaaaaagccagtggtagctcatggtcaggcccaagaggatggtgacaccatttgcaatttgagagtcatcagcagctcaaccggattaactggtcaacatctagtcttattcagagccgagggaagccacagacttcctgcaaccagactctcccctggagacacggtttgcgtgagagcatgcgacagccagggcgaggttgccgcttcaactccttgcttgcaagcctccgtccataatctcggtgaggatggacgcagcattacggttgcattcagatcacgccgcggcggtgaacctgccttctccaggttcccagggaaatttgcgcgtattgatcgcatacaggctctagcagatgcagttacatacgagcgcaactgcgaagcactgatggctcttcagaagagagggttacagaaaagaaacgcatccatcggggtagtggccactctgttcggagacaaggaagacgcgacgaagccggagagaaacagtctgacggatcgtcgtggaccagaagcacctgacggcggttcgctggagacgcacagccacagcttcgacacctcccagtcgagggctctcgcactggccctggacaaggagaggccagtcctggtgatccaggggcctcctggaacaggcaagacccgtctgctcagctacctcgtcgcgcgcgtggtgcgccggggtgaacgcgtgctcgtgacggctccaagcaacgcggcggtcgacaacatggcggagagcttgtcagcgagtgggctgaagaacattgtgcgagtcgggaacccttccaggatatctccgtctgtggctcccatgtccctggggcagatcgtggccacgaggctcgagaagctcacccgagagttcgagacgaggagatctgccctgagaaaggacttgaagcgtcgcgtacaggacggcggcgacggttcttcagttcgtcagcaactgaaaaggctcggtaaggactacaggaaggagaagaaggaagcagtcagggaggttctggcaaacgccgaggtggtgctgtcgactaacactggcgcggctgacccacttgtgagggggactggaggttgctttgacctggtgattatagacgaagctggacaggcgattgagccatcatgttggatccctatgttgcaggggaagcgttgcattcttgccggtgaccaccggcagcttgcacccgtagtgctttcaagagaggccatggaaggtgggctgggcatgtctctgttagaaagggcttcgtcgctgcacgacggactgctcgctacgacgttgacgacacagtaccggatgcacgagtctatagctagctgggcgtcgaaggagatgtatgacggattgcttcggtcattcccgtccgttgcttctcgactcctcgtcaattatccatctgtcaaggtcacttggatgactcagtgtgcgttacttttacttgatacccggagggcgtatggaagcctaaatattgattgtgaggagagtttagacccagccggtactggttcattttacaacaatggtgaggcagatatagttgcacatcatgtcctcaatcttgtacaatgtgtccccttacatcgcgcaagtgcaactgttacaagatagactacaagaatatccgatggcttttgatgttgaggtttcaacaatagatagcttccagggtcgggaagcagatgcagtcgtcatatccatggttcgatcaaactccatgggagaagtcggattccttgccgatagaagacgcatgaatgtagctattacaagggcaaagtcacatgtcgcagtggtttgtgacacttctactatttgtaacaatgctttcctggctaggctcctcctccatatccggcaacatggtcaggttcagcatgtggatcccagttccttggatgggggctttcacctgcaagccttaccctctttaggctagcgatcttgccatgaaatgtgacatgcagtaaatgtcgagttccataatatggttgaaaattattccttctatgccatgaaacctacaacaatacattctgtaccatcaaaagttgtgtgcttt

SEQ ID NO: 43876 - DNA, 3918 bp, Zea Mays
cactttcaccagctctcactcttatccacccgcgcgcccaccgccgcgcgcagcaccgcgccgcccacccgcggccaccccagcgccccaaatgccgctccaaccctagcctctcgccatgcctttcgatctcgggcggccatgggaaactgatgccgctcgccggtcgccgtcgcgcgggaggacgtcagctcctcgcacttccccgcatccacctcgtcatggagctctgcgagggcggcgagttcttcgaccgcatcgtcgcgcgggggcactacaccgagcgcgccgccaccaatgtcactcgcaccatcgtcgaggtcgtccatttctgccatcggcacgacgtcatccaccgtgacctcaagccggagaacttccttttcgccaataagaaggagaactcgccgccgcgcagcgcccctctcgatatgccgccctgcttcctcctctcctcttgatccatctgccatcccatccccgctctgccagttgcccctcgcttcctcttcggctcttcatccccctcgatccgtcgcccgtgcttcctcctcactatgtcccgtcccctctccatcttgtcgccctgcctccccgcgtctgcgtctgcgcctgccttcggcgtccagagccatatccgcgttggcctccacctacgcacccgcctctagccataagagctcctcccgtgtctgcctttagagatctgctacctccacatcggtgtctagggctcctccattgcctagatctactagagaggcagatgaaagtatttccgtctcatcaactgtgctgaagaggaggaaaacacctcacttgttgaagggagcagtggagacccggaggaagatcatttggagtctgcagctactaatcttcagcctggcagtgacacttgcattgcaagggaagagttgccagatcagaaggatctggtgaaactgcaagctgttatccgtggacatctagaggcggcccatgcctcacggccaaagcagatcagatgagattttttggtcttgcgtggttctttttaatctactcacatgatacttcttattcattgccatccaatttaattaattgccctcgattgaattggttcctttgccattttacttaggaggataaaagaagacactaccttggcacatgcctgttgtcacaatggacaaaagaagattagtgttgtgtgagatttttttcattcctttgatctattgcatgctatttgtaccctaatcgacaaaatagatgagactcaattcaggagcaaatcaccagtcctgttcacagtccaattcactatggctaaaatatcaaacttatgctccttgaggtttgttttttccttatcttcctttaatatctgatgactgatggactggtgagttcatgatctgcttcatgcttttccttttatatatggtcactacctcactggttagttcatggtgctttttgtctacttctttgcccaaaaaaaatcccggggcgaatttcagcatgcttttcctgcttccgctgtgcaaattcacaggatgcgtgggaaatgtgttcttgtttcgtcgggtggtgttcttgccattcgttttagctcaacacaaaacaaatgcttcttgttcttcaggtcgccctgtgtttctttctcgccagtttgggccatggattctggtgtgcatttgttcaatatatcttagtatcttatttaacaatcagtacttctctgatgctcaagagatcaatttactcaaagtagcaaactgtatcatagttgtatactttatcaaacgaggaacctgatgcttgtagtataagcctcattttgttccaaacaagacaggcttcggatacaatcacctggaaatcaatcagtaaacttttgctattcagttttttaaataaaaaatttaggccttacgactttcctcgcaatgtgttcacatgtagattaccttattgcattgcctacttttgtccgttgtgtaaaccaatcttttatcatttatcaaatgattttgctcttaacattaacaaattatcgtttggtcatatgcaactaatgacatcacattaccaagattctggggacccatcgctaccttgtgtcaacagtagactgaccagatcaggtaccattttgaaacctgtgtacaatttcatttctcaataactggccgaacataaatagccaaggcatgggtttatgccaatactcataggttaaatgacactttggtcatatgcatagttgccaccctcaaatgcctatctcatgatagaagtaaatggtggtctaaatcaacaacgactttctataagtaccatgactattattcttgaacaaatgtgtgctcatggttctgagtagatattaccattgccattgttttatatggaagtccagtgccttgtcaatctttggtccacgagtaagtgttttggatattcatgttagtgtacactgtaatcaacagagctggttttctttaacagttttgttatgaaatcatggaactggcaacatgatagaatttttcaaggaaaaaaagggaaacgctcggcggcgaagctaaagcagagcttgcgctacacgcgctgcgagcagtttctgtctaaagggcaaggtctgatctcatatttgagctccccgtggcactgctcgcccggccagccaccatcccggtcttgcgctcggcggcgtgcatgggaagagacgacgataacatggacactgttttctaaatggatcagtatttttggtatatacacatgcttttactagtagaggagtatttattttcatttgtagcagccaaggaacttgtgcattccttatgaatcatgagaagaccatgaagatgcacacaaatttgcttgacttctgaccagtaataattagcgaaagaaagaaaatccagaaccatgaatcagcttgatagcagtaacaaatttgcttgacttctgacgagtaagaaattggcagcaagttcagcaggggccagactaataaatcagcttgatagcatccttgcagcggtgccttggactttggcggttagaagagttgcggctctggataaactcgaagctgacctatccaagttcgacgacgggcccttcttcctaggccaattcagcttggcggatgtagcgtacattacgattctggaaagggttcagatatactattcccatcttaggaactacgacatcgccgaaggcaggcccaacctccaggaattcatcgaggagatgaacaagattgaagcgtatgcgcagaccaagaacgatcctctgttcttgcttgatcttgccaagaaccatcttaagattgcctgaagatgtgacaaagcagcattagtccgttgatcggtggaagaccactcgtcagtgttgagttgaatgtttgatcaataaaatacggcatgttgttgctgactttggacttgcaaagttcactactgataataacacccatgtttcaacaagagtaatgggtacttttgggtatttggcacctgagtatgcagcatctggcaagctcacagaaaaatccgatgtattttctttcggagtcatgcttcttgagcttattactgggcggcgaccaattgacacaacccaattggcactgcttgttataagcacatatgtacttccatttgcatgttgtataatactaataccaattgcaaaattatagttattttttctacccttgttagttaataagcatatttgtggtcaataggttgtattcttattcttgtaaccgtgttaattaatgttatggacttgtagtcttgtattaccttgtgaatatatctgtccctgcctgccatgtgaacgtgcttagcctggaatttgtgatatgtacatatatccatgtgtttgaaatctgtattgtatgtg

SEQ ID NO: 43877 - DNA, 409 bp, Zea Mays
tgcgacaccggacagtctggtgcgatctgacatcgcagactgtattctgacttctgacggactgttccgcagtcgaccgttggcgaagttgatcgttgttccgttggctcaccggacagtccggtggtgcacagttcgatgaattttagtggaatggctctgagaaaactcgagagcggccagttcgtggaggtcttcagcctggggtgcacaccggacagtgttcggtgcgtcacaggctgcactaaatcttgtatgctccaaactttgcagaattccctcaagtctttttcgttgtatgttaatgtgaactttatgcacctgaaaaaaacattcactaggcaaactagttagtccatatggtttgtgatggacctcaaacaccaaaattgattataggaaatgttga

SEQ ID NO: 43878 - DNA, 689 bp, Zea Mays
atggcaggcgtccggtgcacgctcggaggagaacggggatgtcaggttgtgcgggtgggcatgggtccggcgtctacttgcgggagcggcggcgccggagacgggatgtgtggggcgcggatggcgataagtgggtggggtggaggcgggggcatacacaggtcgcgcctgtccaccgccgtcttcagggtcttcgcctgcctttgcatgcataggccggacagggggctccaagatctcctcggatcaaggaatcgttcgactctggcgacctccctcccacccttccatcttggtgattctacacgcaccgcaccgaatctttctccgacgggatccgccttcgattctggtcgcacgccaatcaatcagcgaaggctattggaatctaatggccagatctacgccacccttcccttgttccttccccacgacaaccgcccagatcctcctcacctgacctctcctttctcgtttttatgccttccactgtatctgcagcaaagtgaagtatcagaggctactccgttcggagcaaggaaaggaattgtgagccttgtgttggagaagtcggagactgagagtatatggcgactccattggtgtccatgtcaacggctgaagtgttctagagcaactcggggttgtcgcagagctcagggagacttgccaaccttgtcaccacgctt

SEQ ID NO: 43879 - DNA, 1708 bp, Zea Mays
tgaggggctaaagttcgccacctggttttgtgcttcttcaggtgttcaggatccatgataggttgtacatcgttttctcaaggctcaccactgacgctcggatgctatgagttgtagttgctgaattttccctgcccaccaccacctattatcttctgttcggctgcttttcgatccctctgcaggtaccattggttgttcttcaggcacaacatgtatcagctgcgtcaggagagggacatgaagcatgagacttttgccatcttgtctctgggaaggtttcaaggacagcctctgtataagctcagaccaagcaaattccgtgcagcaattgaggaggctttccttgctgaacgtggttttttttatctccaaacggatgaggttgttggcaaagggaaagatcattccttacttaacccatccatagtccctgccatgcccgttagcaggattttgattgtggttgcaggactgtggatcctttctgtccatgggagctgctgcaattttctcaccttgtcttacatagtgctggtcttgtacgaggtcaccctcagatgaactttagtgattgctcccaggcgcggcatgcatgctttgctttattcacatgatcgagttcccctcacgtccacgctctatccgatgccacgagagttttccagaagcaagtccacggattgtgtgttcagcaaataagtaaaccacattgccgccgggtccacgagggagaaaggaaacacgagcattgtttcctccgtcgacgacagagctccgttcgtctccccctcagtttgacagcctcgctctgtcttctctcctcaatcgcgtgcttactcttcagcatttactccttagtagaaattgccgaccaccgccgcaccttgaagaccgccgtgctgttcgtcgtggtggcccgtctcaggcaacgacgactacgtcggtcgtggcctcaaagacctcccgccaccgctgtgacttgaagccctcctccatgccaatcaaggtgattgacaagtcatttggatttcacgctgctgtggaggaggcccaaagggccctcaatgccgctcatgtcgaggctgaaagtgtagacaatggcattggtgttgtgaagctaatgggtcacaactgttgttttactgcaagtcacccttctacctcgaagggaagagacgactcctcgagttcatttagagacgacgtgaggacaagggtcatgtggttcatcgtgctggctgagggtgctgatcaggacctcatcgtgagaagtatgaatttcatggacacctaagatgcttctggagataaactgcttctagatggctgcctttggctattctagaagataaaggctaggcttatggtccaaaccttcgtctccttctcaatgtggtggcagagaacattgttattgccttcatctaccattcagtttgctttattattattattataaaatagatgatccctattgatcaatatgtcttgactactaatatctctatatgtttatatcaacaacctttatagtgttatatatatatatatatatatgtgaacacattgaccacagactcgcgcttcgcgcgagcccatgtggggatttcagctctctttaatttcttagggagttttttttgtagactattgatcgagagaaaaccaatgaccaggtctccatagcctaacatgattatgtgtt

SEQ ID NO: 43880 - DNA, 533 bp, Zea Mays
tcataattgccgcgtctcaaatcgtacaaagtgcctcacaaagaaagccgggtgggtccgtactaggccgtgtatacatatatcgggatagagaggctgggcacacaagactgtatcaagattattttgcagaacatcccacgtatggtccaagtgtttttcgacgaaggtttaggatgcatcgaccactatttcttcgtatagtgaatgctgtagaacaacatgatgattactttcagctgaagagaaatgcatctcaccaaaaagagctaagttgtttgcaaaaggcaactgcagtctttcgtatgctaacttatggagtaccagcggatgctacggatgagtacgtacgtattggagagagcacaactcttaaaagtctgagaaggtttgttaaagctgttattgacgtttttgaagatgagtatttgaggacacccaatgatactgatacagctcggttacttgcacttggggaagaaagaggttttcctggtatgctcgggtcacttgactgcatgcattggaggtgg

SEQ ID NO: 43881 - DNA, 1147 bp, Zea Mays
gcaaaaactattccagattacctgttggcggcttccgcatgagtggagtctgaggaaggaataatcaagctattggaattctagattagccacagagaggcagaggctagttaatatctttagaaacttggacgttgtttgtgatatgttctcaggggttggtcctctagcgatttcagctgcaaaaaaggtcaaatatgtctatgcaaatgacataaaccctaatgcagtgggataccttgagagaaacatggttcttaacaaacttgaaaagaaaatagaggtttttaacatggatgctagaaggtttgttagtgcaatatattcaagcaagcacgtgcaaccaatcacacaaatagtgatgaatttgcccaatgacgctgttgaatttttagatgtgttcaaagggattttatgcaatactaaatcagaactgcattgtgtgatgccaatgatccatgtgtacggattttctaaagctgaggatccagagcatgacttccatgagaggataaatttaacgttaggcgagaacatcgacactgttgaaatgcacagagtacggcttgttgcacccggaaaatggatgatatgtgcaacttttactcttccacagtcagtggcgtctgcacagccgaattacattacctgttgattttttgtactctctccgtcttaaaatattggcaacgactgttatgcaagcagtccttctgtgcaagcgtgcaagcaaaccatatgatccattagattacgatccaatcacagatacaaccatgtttgttagaggttttttataaagattattgagctgttggtggaagggtttaagtgttaaatgtgacatacggttggatcacgatctaatggatcaaatggtttgcttgcacgcttgcacagaaggactgcttgtatagcagtcgttgcctaaaatattagtcgttttagctcagctctggatttttatgtctatatccaaagacatgtaaaacatataaatcaaatgttatatgaatttattaattgtcgaaaatgaattttaatttgggatagagggagtactattcttactgcagcccctcgtatcttctgtactgtcgtcgaatacttcctatcagattatatagatgatgcccttgatcatctc

SEQ ID NO: 43882 - DNA, 1568 bp, Zea Mays
acaacattgtcacaagtaaagaccttctgacaccaggtgatgatgatgagggtgtcatattcgaagaggatgaggatgatgatgagaacgatggatacctattcgctgggcaatatgatgagaccgacgaggacatcgagattgatggtactcaagatgaatctactgccactggtttgcctgactcgtatgacaaagtttacactaacgtgcctaaagaaacacatatgctgaagtctgttcccaactgcggttattgcactgcgaagaagtttgagtatgagccacctgggttttgtcgtcgtagtgggaaggttgagctagccccactggagacccctccccagctccagaggttgtgggatagtacaaactctgatgctagacactttcctgataacattaggttttttaatggccatttctctttcacttcactgtattgttgcctcgatagtatgacaactaatgtgagagattctggtatatacacattccgagcacaaggcatgatgtaccacaatatcaagtcatttggtagggaaggtggggcggagcataaacaccttgagctttacttttacgatgatgatcccaatcttgagcatcggtattgtaagtgccgcgaagaatgtcaacagaaagacaaagatgttattaaacaattagttggcatactccatggaaactcgtactctgagcaccttaggagcatgggccatgttgagaaccttgatgactatcgtatcacattgaaccttgaccagacgttgaactagaagacatataacacgcctctcacttcagaggtcgctgttgtctggatcgaggggagcaaacggcgaggccagttcagcatgagtgttatgctacatgggaaggataggtcaagccacggcattcgctcataccatggatgctatgatgcactatcgtatccactgttcttccctagaggtgaacttggatggcatgcaaacataccaaaggtcggtgtatccatgggcgaagtggatgcataccgtgcgacgcatagggcaagtaatgaaaacgatgaagatgcagaccggttacgagctgacctgtaccagggcttggtggatagtatgttagatggagacataagagcagaaaaggttgggaagcgaactgtgatgtcaccgtcgtttattggcagtcctcgtgacatgagacgtcgatatatggatgctatggctctgaagcggggtttgccccatgcccattttctactaattatgcagaggaagtacaagctcacgtgccctgagcagtatgatcttttgatctcagccgagatcctagacaaaaagtaccctgaactacgaaagatggttatcaagcatatgatgcatggcccgtgcgggtcgctaaatcctaactgcccatgcactaagggtcatgcatcgtgcaagaatcattatccccggcctttctgtgacgcaactttgcaagggaaggattcatatcctattcgagggttcgaattggacaatagatgggttgtcccttacaacccttacctccttcggctcttcaactgtcacatg

SEQ ID NO: 43883 - DNA, 1057 bp, Zea Mays
cgcgttggcgtcgctcaccgacgacgagaaggaacttggcgactgccagttcgacctctggaagcagtcctacatggcccatgcgccgctgtgtacgacaagctccggcgcagccgtcgcttggacgtggtccagaccggctgcaccgcgctgtccatcgtcaaacatggggacctcatggtcgtcgccaatgtcgacgactcttgggttgttctgggcatcgcaacctacgacgacaccatcacgccgtctagctcatcatccacctgaagcctaacctgccatgtaagtcgctactgaccggccatgaattcttgtgcgctggaatgacgaccattgtttttgttgtgtgagtgtcctcgaacaagatgtatgtagaggagtagcacatccggtggtgcaacgaccaggtgtactacctcgctgatgagctcggggtgcacttcatttggcagcccagccaagagtgatcggtactcaccatatcgcgcgcgttcgacgactattatatcaaggattgtggcgtcatctcgacaccggagcagggcgtcagcatcttccggcccgtcgtcatcagggcgtgcggtgtggaaggcatagggcagagccgaagaggacacagtcacagactcacaagggacggacgatgggcaggaaccttcgtgccactgtccttcttcagcttctcatcaaaaggaggggaaatgcacgagccttgtctcacttttgaagccggactagtgtcacgctgggcagacagacaggagctctcgatcgtcagtttagccagggcaagcgagctgggccgggcggtgtggaacctgacgacgatgcgctgtccgcttcaaaaaccgcggctccggttcttcctactcacagggacgcacacgaacccgtgtgctcgtgcaaggtcgacgtggttcgatcagtcacgcagaccgaacacagccattcatcctgacatcaatgtcgacaaatttgcatggcatggacaatacgagatatttattagagacgcgatttgtgttcaatggacaaattcacagagttagcatgt

SEQ ID NO: 43884 - DNA, 379 bp, Zea Mays
agttttatacaagcagattggcttgttgatgtatggaatttagagaaaagcctgttgcaaaactctctgtcaggcattgtaaggtgctgtttcagatcgaggaactgaacttttcagtgttttgctctaactttggtgcaccatagctattgctctatgtatttttagtcttggagtgttataccaaagtggaagagcaatacttagggaatagattgggttaagtaagtggggtctcttgtaagtttatgagataaaaggcattgaacaaaggggagatgaatggagcaatggaagattaattcagagaactgaaagcaggtccagtgaattgtggctgattcttggacactataacttgtagtacatgcagtgtgga

SEQ ID NO: 43885 - DNA, 4126 bp, Zea Mays
ccaaaatagacccaacaagctacaaagctcccttacggtggccaaaaacgaagcctatgacaactggtgacattgatcctgcagtattggcttcccttcctccatcgatgcagttagatcttcttgttcagatgagggagagagtgatggctgaaaacaggcagaagtaccagaaaataaaaaaggaacctgcaaagttttcagagcttcaaatacagtcctatctcaaaacagttgctttccgtcgagagatagaccaagttcagaagtcttcgtcagggaagggtagtggaggtgtccagacatcaaaaatagcatcagaagctaatagagagtttattttctcatcatcattcactggtgataaacagatgctggcacaaagaggtgaaaaggagcataatgttgaaaacactagatcaaaaaaggaaattcattcttctgtcttcgcatctaaccccacaagtagtttgggaacaatgaagcctcccaacagcaaaactttgagcgattttgggcctgatgttgagacctatcgtgatgagagaggacggattagagtaagcagggtcagagcaatgggaattcgtatgactcgtgacattcaaaggaatttagattttattaaagagaatgaacaggttaaaagtaagggacagacacagaccaattttcacaatggatcaacaggcaatgaagagcctccagattttccagaacatctttttgaaagtaacaagctccagagttcttgtagtcctgatgtggatctttctgaaactgacagagacaaccatcagacctcgtcacaaataggaacagatatcatttctgagagttcttgttatggaaacaaggaagcaatagagatatctttctcggttgatcaaactgaagtgaaggatggcgatgaagatatatttttgcaattagtgtccgggatggcacccaacaacatattttctggaaataattgtttggttaaaaagatggaagaatctgtagattctgagtgtatttgggaagatggtgttattgaagcaggaacttctcctgtgaaaattgacatgaaggatcataagtcatctctgccagagaattgcagcgatgatgagatggagtgggaggaaggtgatagctttgtacctggagttgcttctagtagtgaacataatccatgtaatgcaccaaagggggatctggaagaagcagctcttgtacaggaagcaataaggaggagtttagaggattttgagaagaaggcatctgagaatgtgagtactggagatatacaagcatctgttgaagatagatctttgcagttctccaacaatgttcctaagatatctgaatctcttggtgaaaatgattcacattctggagtacctgttgttgacgagataaacaatgaaacaagaacagaaatcaattatgataaggatgatatggtacaaggcactggactacttggaactgagagacaagaatctgaatcacaacccccactggtgaataatgattggcatgccgatatgcacagagctcatcctctggggtctgtgcctccatgtactacattcacgagtgatctggctgaaaaaccatctgtcagtgcagaaactaacggtgaagatgtaatgatatttacaacaaaaattcctggaacagctttaggcgattgtgataaaacttccaacctaaacattatgaattctgatcaatcaaaatgcagcaaagatattgcttcaactggagaatccttgtcacaccaaaagaaccttttaattgatgaactactagccgtcactgccgaacaaaaagaaaatgctacccaggtagatttgaagtttgccacatctgaggtagattatacacaaatttgtggcaacgatgacaaccatacaatatcagcgagttatgttgacgcggagctatctcgtcttagacaagaacagatatatcttggacatgaaaggcgaaaacttgaaagtcatgcagagtctgtaagcagtgagatgtttgccgaatgccaggagttgctccaaatgtttgggttgccatatattattgcaccaatggaagctgaagctcaatgtgcatacatggaaataaataacctcgttgatggagttgtcaccgatgattcagacgtatttctgtttggagcaaggaatgtttacaagaacatatttgatgataggaagtatgtagaaacatattttatgaaggacattgagtctgagcttgggttatcacgagaacagttaatccgcatggctctgcttcttggaagtgattacactgaaggtgttagtggtatcggcatcgtgaatgctattgaagttgtacatgcatttcctgaagaagatggactgcagaagtttaaagaatggattgaatcaccagatccatcaatatttggtaaactgcatatggaaataagtggtagatcgaagaaaagaaaactcgatgaaaatgattcagatggaaaggggaaaggcctggaacctgaatgcattcaaggttctgatgataaacaatcttctaatgaggatgaacatgtcaaggaaatatttatgagtaaacataggaatgtgagcaagaactggcatgtccctgcaacttttcctagtgagaaagttgtaaatgcatatatttctccacaagttgacagttcaacggagcctttttcctggggaagaccagatttaggcctactacgtaggttatgttgggaaaggtttgggtggggcaaagagaaagctgatgaactgctgcttccagttttgagagagtataataaacacgagactcagctgcgcatggaggcattttattcattcaatgagagatttgcaaaaattcgcagcaaaaggattaagaaagccatcaagggcattacaggcaaaagctttcttgacgcagatgaatctgagcaggataatcccagtactagcaagacgatcaagaagaaagaggccagctcctcaagccatgccagaggtagagaaaaaaggaaaaacgattatggagtcatgggaagtcaagaagataatataattgacaataccaacagtttggcagagacagttgagaatactagagaaaataacaatactactaagataaaaagagggagttcctgtggtcgccccaaaggtagaggacgaagcaggacaactgcgggaagtgatgcaacaataaatcaggaggattatgaaatagaatattctacttcagcttcagatgaggattcatgtaaaaggcattccaacagttacggatcggaaggaagggcattgcgaaggtcaagtaggaaacggaaacaggtgacatacatggaagatggtcacgaagcatatggcaatgatgttccaatgcatcaaaacgatgaaaataacccaggccaacctgctgcagccgcagacgtggctggagaagacacaggatttaatatttaccatcaggatacaagtgaactaaacagcagtcagatgcatacaggtgcaggcattaccgaagatatcaatgaagattcccagcgttttgagttacgggaggacaatcaggtggattcaacaccgaaagactatttgttcaatggtggtggtttttgtatggagggcgagggcgatgaacaagaaccagcgtgtgatcaatctggtgcagaagtagaacctggaccaagtggtccatgtggcgccatggatgaagtttcagagagtgcaagcatatcgacggctatggagtgtaccgagaatgcaagaatggaggcacgcggtgcatcttcgtcgcagcaaagacgcaaggcaagccgaggtttgagtgccatgccgacgcttatcaagcgtaggagaaaatcgtgatttatttgcagtttcactgcatgtatagcacgccattacggcctctgtttggttcaagcgcttatgatttcgcatcagtctttggccaccagtgacgagcgctgtttcgcggacgcaaaatgcacgtctgtgctgtgatttagttccgtctttttttctcgtctgattggttgctcatcgtctcatcctgagcgcattgattttatctgagcttctgtttggttaagagcctgctgggttcgccttttacttaacacgcg

SEQ ID NO: 43886 - DNA, 617 bp, Zea Mays
ctgcacgcgtgcccgcctccatgcgcaccaccaccgccccatttcccttttgcagcgcacccaccgccgccatcatcgccggcaacaccaggcccccctccccttgtcgcacccgttgccacgtagcacctactccatcaccactactccgcacccgagcaccacctcgcatactactcgcctataaaacttctgcaccagctccatcagttcccatcccaagcaaaacacaccagataaaatcccctctgccaaatcgcaagcaactccattttccacccactcacccctaagatcacaatgcttggtgattcttgggttgaagactgttgtacatggttcatagtccttggtttcctcctctgtatgatggtaatactctttgatagaatcctccagtgggaagagcaaagagaaagaaagggtcagtgaaaagtgaaaagaagacagtgaagataagataagaaaaaggttctcccagaatcaaccctgtgttagtcatttctcctcagcctgctcaagcagcaacagcagaagaaggacctttaacacccgtattatgaggtactttaagaagttcaaatccccaagattcaagagttctaccctcattcttt

SEQ ID NO: 43887 - DNA, 1055 bp, Zea Mays
ttctataattgcgaaaatatcccgaatccgtggcttcccttccctggcgcgcgagtgacgagcgtgcgcagaagctagccaagcgatgccgctcctcttccccgccacgccgccgctaccgctgtgccgcgccgcgcgcgtctcacgccgcgccacggcctccgtggcgtccgcggccaggagctcgtcgtcgtcctcggcctcgttcgacgcggccgccttcgaggccgagcggctgcgcctggacgccgcggcgcgggccgggatggagtccaccgccgcggcagcggaggccggcccgcgggcctggaagtgggcgatacggaagcgggtgtgggacgcgctcgaggctgagggcatcgcgcgggacccgcgccccgtccaccaccgcatccccaacttcgacggcgcccccgccgccgcagacgcgttggggaggcttgacatatttcagaagtcccattgtgtaaaggtcaatcctgacacacctcagaagcaagttcggttcttaacattgtcaggagagtgcgagccatttattgaacaggaaagagtatccaagtgtacaacaccactcacacaagacagtaggtcctagaaaaggtttcaaatgtccctatagccctgactccctgagtgcgcactgtaaggctccctcctctgctgttcacaccagcaagcttgtgctcagagaaaaattaccaaagagtgataaaaagctgttgactccgcaacctcggctaaggacaggatttttctcagttatggactctcagatgatacctgttgggtgcattcctgaagcatgcacttctgttggtgcagctaaatatgggaggccaattggtttagatgaaagccttaaggtggatttgattgtgattgggtcagtggcagttgatccaagttcaggagcacggttagggaagggagagggatttgcagagctggaatatggaatgcttcgctatatgggagctatagatgattcaaccatgatagtaactactggttgccatgggctgagccagcccacaggtgatgacagcagcaac

SEQ ID NO: 43888 - DNA, 3538 bp, Zea Mays
atgccccgcccgccctgctctccgtcgcgcccttccagggatcctccatcgccgctcccgccatcatcgcgcccgcgctccatcgatggaaggtgtcgccccgccatcctcgcctcgctccccgcgacacgcggcgccagcttgtgtcgcatcttctatctattcaccagcaaggtacctggcacagaacccagccgaatcctagaacccagccggatcctagaaatttcccattggcatctggtgaccgtatccggtggttgggcgtcagacgcagcggggcggtaccggtgcttggagttggaccacccgtgcaaggcaccgtggtgcgacgggccgctcggcgcgctggagagcaacgggtgggtgtactcggcgcactgctccttcaagctctttgtggccgatgcgtcgtggtggtgccttgacgggaagtggctcttcttctggggcgactctaaccacgtcgacaccatccggaacctcctcaccttcgtcctcggcatcacggacacgtctgctgtgacacgccagtttgatgcagtgttcaccaatcccattggtggggcagggactctaaggatcacaagcatcttcaacggccactggaacatgagcatgaactatctcggcttgcattccctccggaacagaggtttccggcagctcatccggtcctacttcatgtccggtgatcgtgttccagacgtcatggtcctgaactctcgcctgcacgatggctgctactggaccagcgtccgcatctacgcgcaggctgcggatttcgcagcacagttctggtccggagtcatggacaaagtccgggctcgtgggcatgcagtgcccagggtgttctaccggacgcagatgcctcagggtggtatagatgcagggaaaaaccacgcgactcccttcacggaattgagagatgaagctggtgtcacatactcacatccgcagggatgggtcacgttgcagacacttcctaatgaagtccttgtagtgctgcgaaaggtaatcagattttgttagtagacaacacaaggaaggaagcacaaggaagtttaacctgtatagcacaaggaagcaagcagctcagcctccattttatttggaaaagtcttatacttatcagaaaaagaaaagctaaaactctaccctctgcgcccaccttcaagggtcgctccctatcttccttcactctccatcaaagctttgctcgcatcaaattaaatttcttttcgttacgaatttagcttcattatataatattttgctcagtgaattgatcaagtttggtgcacgagtgtcatgctcctaggttttgtactaattgaagaagtagcaaatgtagttcgtggtggtggtttaagtcatgtctgatgaaattgatgcttatatagaggggttctttgtgctttcgaaagaattctgcaggaaaatcgactgcatttgttgttcttgggtacacaatgaaagatgggaaggcatattttcccccacatgacagtatctatacatattgcagttgaaatggaaataattgaaatacaaggtatgtgcaggtgcagtctattatattggagttaagagagcgctagcttgcagtcacactcgatgaagtcctatagggctagattttaaaagtaagatccagtacaaggttacttcaattgcaattagcgattagccaaaactttcatcttcggtctcactaggcctcactaggcctttcatcttcaaaagaatttataaagatattatttttcagtctatctctacatccctctctccatcttgttatgcaattatgagttcattagatgtcattgatctaaattaatttctatccattatgaacttatttttaatgaaccatgctccttcttcgttgctcacaacagggtccatgtacttggcacatgatatacatatacgagatggacttaaaaattaacaaaggtcttcttttggtggtagataattttggttttcttatgattctctttatgaagtgggtgtggtacctctaaacaaatagatgatctgttgacttatggcagtcaggcattacatttttttgcatgaaatcgacatctgagaagtgataattttgttttgatcgcttctctattgcaagatttagatggctactatcctttgcaattgatcaagaatggtgagctattctaaggaagcttctgaacaatatacctgttgtcctggagtgtcacagatggcaaagatttgcgcttagagaaggaggaagaacggtcggtgctagagtcatctccaaagttcttagctgatcagtttccactttcttctctgtagtctggttgcaactgttgatgatattgtaggtgtatgaaatcttctaagcaaactgttaaatacattgcacccgatcagaagggatgctctataatgcagcctgggtgtgatctccgtacatcgtgctccagccgcactcagatctagccttggccgggagacaccgcgacagaggctggacgtgctcttcccgtcctcatgccccatgccgctgcgcgctcttcccttcacctctcactacacggcggctgcggggcaggggtgaaagaggcgaggcttctccagcttctcgaggccggagaccgtttgctcaagggtgtcgttcttgacggcctcctccgacagcgtggacgcgtggttctcaaccatggccttggtcacggcaggaagcagagcctggtgccagagaagctcccagtgccccatgtgttggcagcatatcagcatgaaagatcctatgagccaagagctactagaggctgttgaacaagagaggaacatccgatctaatccttcacgtaatactgctgttttccaccatccaatgctgggtgattttgaggttaagaaactccatcaagaaaagcagttaggaatgatggtggacaaaggcctggtagcaactaggacagggttgagtcagtaccacctgtctcactggcctagaatgtttgaggtgatcaggatgctggaaggagacatgctcacagagagatgggaggtgtcgcagaacgtggacatgccagagttcgtctcatcggagctcctacttcaaaagtacatggattttgcagcggacgaatgctcgcttggtgtagaagccatggagctctctggactaaggtgaccatctgatcgatcgaatcggccatcacacaggtcgcataggtgtcttgccatatcaagcctatattattgttgtattacattggacacatagggaagggaaaaaatccggtgaattatagggtgtgatctgtctgcctatacttgtggtggcattcatttgtgcaaatgattttgatatattgatgtagagaatatatatgttgtttatttctatgtaatcgttgcacactataattttatcaaacaacttttgtattgttgcaaggggcgacaaaaatccagtggattgtagtgtgtgatttgtctatctataactgtggtggtattcatttgtgcaaatgatttgttgtatatt

SEQ ID NO: 43889 - DNA, 707 bp, Zea Mays
caaaaggacagcagcacaagtgccagcaggccaaaagcctcaagatgtcgagcaccggcaatcctctaacactcaaactcatccagaaaaaatgattttattccatgaatggaaggcctgacgccatcaaaaactgccttattacgataagaagaaaaaagtcgggtcgtaacccttacaaaccataacactaaggtttaaaactcctaaaaaacagcagaaaaacagataaaaaacaacaaacccttgaacagaaattagccgtgaggaaggttagctgctaggaaaataagcccctgccgtctcccacaaccttcgctcttctccaacctgctccagaatagcagcaacactcggactgccgccctcgaagacacactgattacagtgctttcataagatccatgcaccaagcaaaacaagggagttaatccccatcttcatttgtccaactgccatttcacttattgtcctccaccagtctaggaaactgtcattttctggttgaggggacagagtatgcagtccaaattgtctcaacaaaagtgaaagtcgtctagaggggggtgaatagggcgaatctgaaatttacaaagtttaagcacaactacaagccgtggttagcgttagaaatataaacgagtccgaaaaagagggcgaaaacaaatcacgagcaaataaggcggatgacacggtgatttgtttta

SEQ ID NO: 43890 - DNA, 1999 bp, Zea Mays
gggcgagctagtccctgcctccgcctccgctacctctgacctctccaatccgttactgctcaaggctctgcgctagccgcccgcgcgtccggctccagcctctgccatgggatcagccggtgaggcactcccgccgccggccagtgagacgcgaccatgggacaactattctcaggccaagctttccacagtcgctcttgcgcccaaagggaggcgtgcggcgtcagacgcgccggcgggaggggaaggcggctggagcgggcaggacgagaagccggcggccgacgacgactggcttccgatcaacgcgaggaggaacgccaagtggtggtacgccgccttccacaatgtcaccgccatggtgggcgccggcgtgcttacccttccctatgccatgtccgagctcggctggggcgtgggcgtcacggtgctggtcctgtcgtgggtcatcacggtgtacacgctgtggcagatggtggagatgcacgagtgcgtgccggggaagcggttcgaccggtaccacgagctggggcagcacgcgttcggcgagaagctgggcctctggatcgtggtgccgcagcagctggtggtggaggtgggcctcaacatcgtgtacatgatcaccggcggccagtccctgcagaagttccacgacatggtgtgccatggccggtgccggcgcatcaagctcccatacttcatcatggtcttcgcctccgtgcacttcgtgctctcccagctccccgacttccactccatctccagcgtctcgctcgccgccgccgtcatgtcggtcggctactcggcgatcgcgtggaccgcgtcggcggcgcaggggaaggcggcggaggcggaggccgactacagcctgcgcgccacgaccacgccagggaaggtgttcggcttcctgggcgcgctgggcgatgtggcgttcacgtacgccgggcacaacgtggtgctggagatccaggccaccatcccgtccacgccggggaagccgtccaagaagcccatgtggaagggcgtcatcgtcgcctacgtcgtcatcgtcgcgtgctacctccccgtcgtgctcgtcggctactgggccttcggcaacggcgtcgacgagaacatcctcatcaccctgaaccggccgcggtggctcatcgccgccgccaacatgatggtcgtcgtccacgtcgtcggcagctaccaggtgtacgccatgccggtgttcgacatgatcgagacggtgctggtcaggaagtactggttcacgccgggattcaggctccgtctcattgcccggactgtctacgttgcactcacaatgttcgtggccatcacattccccttcttcagcgagctgctcagtttcttcggtggattcgcctacgcacccacgagctacttcgtgagctgccctctgccactcttccctgcatcatgtggctcatcatctacaagcccagaaggttcagtctctcatggttcaccaactggatatgcattgtcattggggtgctgctgatggtgctatcaccgattggcggacttcggcagatgattctgaaaatcaagacatacaaattctaccaagactactctggcctaagccataattaacacgcgcccatcatcggctgaaactggtttctaaatctcatcgatgccatggaattccaaaaaaaataaaacattctcagagaaagatacatacatgtacagtctcatgactaatgatgatcagtggtcttgttaatttgtcttgaaccatgaattggttatggattaccatatgcatatatgtatcagtattgtaggggaaatgtttgtgtgtgttcactttggactttgatagagtagcttgtagtgggacattgagaaagatgcatgggccttacatggtctatgttaaatcccatccccccctgatatcattgtatattcttttcttcttcaaatgattcttcgtaatatattattctatctgaaatcaaattattgttcactctag

SEQ ID NO: 43891 - DNA, 207 bp, Zea Mays
gcaacaagttggtcctcgccggcagtggtacggtacatgggtgcgggaatgaatggaggagacggcacgcgaacagtgtttagcgagtggtcgtacgtccggcagatttagcgtctcggaggcagccgctaaattttagcgtatggtttagagtctcttgctggaggcgtagagaacgtttccatccgctaaatttggcggacagga

SEQ ID NO: 43892 - DNA, 856 bp, Zea Mays
caggaagcctccactccttctccctcttctctctcttctctcctccccttgctcttctctggccgccgccacttgcccggacttcctgcagccgagcgcccctgcagctccctgcaccttcatcctgcgcgctccagtcgaccgcgcactgggaccagcgcagtgcccagccgagcagcgcgacgcccggtggcgttcatgtgcttctcggactttggccgttggatggtgtactctgcgggatccgcaacctcctactgagctcccgcacagaggggcaggcatggaagtgcaggcagccggccgtcgacaccaagcaggccttgcgcttatggcagccgtggtgctcggtcttatcaccagtggtgtcgttagatgccaaatgcagtttgctctgcatggggattttgctttctggtgtctgtcccgttggaaatgggtagttcctgagtgacgaacagacttcccatggcagctattctgttgaggatgtgcgaaaggtgcactgcagagtctgagaagtgagagaaaaaaatgacaagtgctgtttaccgctcacccatttttaaccaatgccacggtgatacaattatctgtgctaaagggacaattgtttcaactaaaccaagcaccacagttggaggccagatccttggaaggcaatattgtgaaattattgtaacttgtgtgctaaaacgagatacaattttgcctcgccctggagtgatgtcgctggtggtgcttttgtgactgatcatctctggagcttttgtgaatgatctagatctagctatctatctgtaaatgatctagttgtgaatgatattataattgtgatgcttttgtgaatatataa

SEQ ID NO: 43893 - DNA, 932 bp, Zea Mays
atggctggagatcttcctgcgttctgcaccgaggagatggatcgcgagctcttccagcgaggagtacccattggggcgggcatcaccaccgccgggcatggccggggcgccgcagctacgggccacgcagccgcccccgcggatcctggccgagccgccgctgggcttgctcgcagcgtctccgcagccgcccccgcggatcctggccgagccgccgctgggcttgctcgcagcgtctccgcagccgcccccgcggatcctggccgaggcatcgccgccgcggagcttggtcgcggcgcctccgtagccgaccccacgtatactggccgaggcgtcgccgccgctgggcttggtcgcggcgcctcttcagccgcccccacgggtcctggccgaggcgtcgccgccgcagagcttggtcgcggcgcctccgccacggggcactcagctgctaccgcggggattgggcgggggcatccgccataggccgcgtagatgttcagattgatggagacgaagggcttccccatggtgccagttcaacagctcctgcgatgttcaattgcaatggcgatgttcgttattacagagaaggagacgaaggctacgttccacgattcgacatggctgacgactagttctacggccttgacatgaatggagacagtagccgctttcttggtcgtggtcatagccgtagccgaggccgttccaatggccatacacatgcacgacaggctccatcagctgttgctcgggtccgaggacgtggacgtggtcgtggcatgaatatatgccatactgcaaatgctactatggttaatggactgacttcacaacgatcggctaagaaccctgtagactcacagacacgggttgggatcacttgagacagaccattgaaatggaccctgagtggtggaggaagatcaagg

SEQ ID NO: 43894 - DNA, 543 bp, Zea Mays
cagccgtggatgaggttcatcacccctgcgtttacctcctatgtgctgtccatgcactcctgctacgtgtccataatcgtggggctgctggcgtcccgggcgtcctcctccatcatgtcctggccgagctctggaacatctgtctccccatccctttgcttaaatactgctgctgtaatccctgctgttctcaagttttagttgcttcacttggtgtcttagcggttcgtgtttgtaagtctaagctcctcttccgagccaccaactcgatctgccctagtcttcccatctcctacttaagtcaaggtccagtaggccgtgcagtcctagagctcgagtgatctccttggctcttgtagcctatgtttccccggagttaatcccctcccaatatcttagtccatctgcccagagcttggtgtaccagtccctaggtggtgaccatcgttgacagttagtccacctcgccgtgaccagaattcccagaagaagaagatgaaattcaagaagtggtttctgaagaggagtctgcttcagtgcctg

SEQ ID NO: 43895 - DNA, 269 bp, Zea Mays
aaaagatactcacgatgctagagaagcagcaagggcagctgaaaaaactgcagaagttgaaaggcaaatagctgaactatctcctcccccggagcctctcgagtcattagccaatcccgaagcaaaaagtgaagatgaaattagaaagatggccaaagctattatggacaaagttgtaactcaactactaaacgaagctacagaagtagttttaagagaagaatagctactgttgtagaaacattcataatattgatgtaatatttgct

SEQ ID NO: 43896 - DNA, 2019 bp, Zea Mays
atgtactctctaccaggagcaaccatgtctgctgcacctgcacgcgtcatctcttcctcctcctcctcctccttcgtggagcctcttctccttgcagcagcttcgtcggcggctgcaaacagccaccaccaagtccgccagcgcggccacttggtccgtactttggcggcatcatcgtcgtccaacacgctgctgcggagtgacttcgatctccaggagggcctgacgacggacgtcaaacggatgctgcgtcagcgtcagaagaagagcggcggcgggcgggagatgctggtcaccatcgacaacctcaagcgcctctgcatcgaccacttcttcgaggaagagatcgagggcgccatggcgacgggcgcctgcacgcgtctcctccacagcgacgacctcttcgacgcaacactcgcgttcaggctcctgagagaggcaggccatgatgtctcagcaaaagaggatgttctacggaggttcatcgacggcgtcagcggcgacttcaagctatctctgaacaacgacgtcagagggctcctgggcctgcacgacatgtcccacctggacgtgggaggggaggaggcggcgctgctccacagggccaaggagttctcgagcagccacctcgcgtccgccgtcaggtaccaggacaaccctagcctcgcggagtacgtgcggcagtccctggaccacccctaccacctcagcctgacgcagtacaaggccaggcatcacctccgctacctgcagagcctgccctccagctgcagagacgccgccgtggagagactcgcagttgccgagttccagctcaacaagtcgctgcatcagagagagatgcgagagattaaaaggtggtggatggacctagggttggctgaagaaatacctgtggtacgggatcaggtgatgaaatggtacatgtggtccatggcagcactccaaggatcttctttctccagataccgggtctacgtcgtggacgacatattcgatctcgttggcaccctggaggagctctccgccttcaccgaggcagtcaaaatgtgggatactgcggctgctgattcacttcccagttgcatgagatcatgctataaggccctccacaccgttacgaacgagatcgcagagattgcccacaaggagcatggatctaaccctatcaatcgtctcaggaaagcatgggtggtgctgttcgacggtttcatggttgaggcgagatggctagcgaccgaccaggtccctacggcggaggactacctacgaaatggcgtcgtcacatcaggagtgccgctcacatttctgcacatattcagcatgctagggtatgatgacccaagcaccgaggaagaagaagaagcgatcatcgaccacatgccctcgatcatctcctgcccagccaagatcctcaggctctgggatgacatgggcagcgcagaggtcgttgatgaggctcaggaaggattcgatgggtcttacagggacttctacctcatggagaaccctagccgcagccccggcgaggcggaagcgcacatgcgcggcctgatcgcgagggagtgggtggagctcaacagggagtgcttctgccggaggaccttcccctcggacatcgcgcaggtctgcttgaacaccgccaggatggtcagcgtcatgtactcgtacaacaaggagcagaggcttctcgtcctcgaggactacgcggcgatgatgttggtgctttgatttgaagcatgcatgcatgcatttgctctctccgatccgcggatatgaaagtaaagtagtgattaggttgatgatttgttttgagaccagtaatgtagagtagcgattaggttgtgtaaaattagatagctaggattagaataactgggcaaacgaatatggtatgtgtccatatgtaatgatgcaatatatagcaacatatatggtatcggcgttattatctttttctttcaaaaaatgtaataatattcacatatgcagtgcaatgtaatatggcccctgtaggag

SEQ ID NO: 43897 - DNA, 2554 bp, Zea Mays
gcattggaagccctgcccaagtgaataccatgcaaataatcctgagatgtccaagctgttgcacaaagcaattcgtgagaaacgtgataatgcgtacactgtctaccaacaacatcttgcaagccgtcctgtcaatgttcttcgagatcttcttgaattgaaaagtgatcgtgcacctattcctattggcaaagtggagtctgcaacctccattgttgaacgtttttgtactggtggaatgtccctaggagccatttcaagggaaacgcatgaagctattgcaattgcaatgaatagaataggtgggaaatctaattcaggagaaggtggtgaggatccaatccgttggaatcccctcactgatgttgtagatggttattctccaacacttcctcatctcaagggtcttcagaatggtgacacagccacaagtgccattaagcaggttgcatctggacgttttggagttacaccaacattcttagtaaatgctgaccaaattgagataaagattgcgcaaggtgcaaagcctggtgaaggaggtcaacttcctgggaaaaaagtcagtgcatacattgctcgtctgaggaactccaaacctggagttcctctaatctccccgcctccacaccatgacatttattctatcgaggatcttgcacagttgatttatgacctccatcagataaatcctaaagctaaagtatctgtaaagcttgtgtctgaagctggaattggaactgtagcttctggagtttcaaaggcgaatgcagacataattcagatatcaggtcatgatggtggtactggagctagcccaatcagctccatcaaacatgctgggggtccgtgggaacttggtcttacagaaacaaatcagacacttatacaaaatggattgagagagagggtagtacttagggtggacggtggattcaggagtggtcaagatgttcttattgctgctgctatgggagctgatgaatatggctttggttctgtagccatgatagctactggatgtgtcatggcacggatttgtcacacgaataattgtccagttggagtggctagtcagagagaagagcttcgtgcaaggtttcctggtgttcctggtgatcttgttaactacttcctctttgttgccgaggaggttcgagctgcattagcccagttgggttatgagaagttggatgacatcattgggcgaacagatttgcttaaaccaaagcacatctcattggtgaaaacgcagcacattgatcttggatacctcctatcactcccaaattaggagccaggacgtccacactaatggccctgttcttgatgagacaatccttgcagatcctgagatagctgatgctattgagaatgagaaggaagtttccaaggcatttcaaatctataatgttgacagagctgtctgtggtcgggtagcaggtgtgattgccaagaagtatggagacacaggttttgctggccagctcaacatcacgttcaatggaagtgcagggcagtcctttggttgtttcctgactcctggaatgaacattcggctagttggggaggccaatgattatgttggaaagggtatggctggtggagaactggtggtagttcctgtagacaaaacaggatttgttcctgaggatgctactatagttggaaacacttgtctgtatggagctacaggtggtcaggtatttgtgagaggcaaggcaggagaaagatttgctgttagaaactctctatgtcaggcagtggttgagggcaccggagatcattgctgtgagtacatgactggtggctgcgtagtcgtacttggcaaagctgggaggaatgttgcagctggaatgactggtggtcttgcctacattctagatgaggatgatacacttgtcccaaaggtcaacaaggaaatcgtcaaaatgcagagagtgaatgctccagctgggcagatgcagctaaagggcttgattgaggcctatgttgataaaacgggcagcgagaaaggtattgcgattttgagggaatgggaggcctatttgccgctcttctggcaactggtaccgcccagtgaagaagactcgcctgaggcttgtgcagagtttgagagagtacttgccaagcaagcaaccacccaattgtctgcgaagtgatcgaatcagactacaggaaggtggtaggtgttttctatttgacacaaagtgatctcatcttatcacttcaagaaaatcgaagaccataaccggcgctctgaggcaccgaagtgcccgtctgaagactgcaactttgtggaggctctgcccaggccatctttttgagttgagctaacagaaccgagggttcttctcgacgctcgtgcacctaggtaacccctgtaaattggtttgctgacgctaggctgcaaggggcctgccctgtttgaactgctgtactgtacatgattcttggccgttgccctgtgtaattatgttttggttagctcgtaaatttatacgcatccaatggaggcatacaatgcaaaaaaataattaagatacaacaataa

SEQ ID NO: 43898 - DNA, 3271 bp, Zea Mays
cacagtgccaccggccctctttccctgcccatgtgccctatacggctcctgtctctctgacgcaatgccgtttcccaccgcgcggtggcggcggcggcgcgagggcaccgcctctcggtggtgcgggatcttggtcctggctctggtggcgctggcggccggtgcgacggcggagacgtcgccgttggacgtggcggcgatgcgggctgtggcgaaggcgcttggcgcggacaagacgctgggatgggacgtcgcgggcgacccctgctcgccgaagcggtgggacggggtgtcctgcgactcgtcgggtcgcgtcacggcgatccaggtcggggcgcgaggcctgacggggaccctgcccccggaggtgggcgacctcaccgagctcacccgcctcgaggttttcgacaacaagctctccggcccgctgccctcgctcccgggtctctcctcgcttcaggttttactagcccacaacagcagtttcgcctccatcccctccgacttcttcaaaggcctcaccgggctcaccgccgtcgctatcgactacaacccgttcgcgtcgtggtcgctccccaccgacctcgccgcatgcgcctccctcgccaacttctccgccgtcagcgccaacgtctctggcacgctccccgacttcttgggtgagatgccggcgctccagcggctgtcgctgtccttaaaccagctgtcaggacccgtaccggcgtcgctggccggcgcgccgctggtgcagctctggctcaatggcgcgcacctcaatgggtcgattagctttgtcagcaacatgacgtctctggagcaactgtggctgcattctaacgacttcactgggcccatgccggacttctctaggggccgatgcctcagattcctaatcaacttcatgctgacatcaaagcagattcagagcggttttgtgtgcaggaagccgggaagccgtgcgatccccgtgtgagcctgctgcttgaggttgctgctgggttcatgtacccgaaggcacttgctacggattggaaggggaatgatccgtgtgtgtttccgggcgttagttgcatacaaggtaacattactgagctaattttcaccaataagggtctcagtggtagtatctcaccgtccatcgggaagattagctcacttaaggtgctaaatcttgctaacaataacatcactggtactgtgcctgaggaggttgccgcgttgccttcgctgacagaggttgatttgtcaaacaacaatctatatgggaaacttcctacatttgcttccaagagtgcagtggtgaaaactgctggtaaccctaacataggcaaggatgctcctgcaccaacagcaggatcaggtggtagcaacgacagtctatcggggggaggcagcagcggaagcattggtaacaatgggggttcctctccatcttctgttggagtcattgtaggctcagtggctggtacagtcgttggactaggccttgttgctgcattgggattctattgttacaagaggaaacagaagcctttcggaagggtgcagagtccacatgccatggttatccatccgcgacactcaggttcagatgacatggttaaaatcacagttgcagggggaaatgctaacgatggtgctcgcgcaagcgagacatatagccaagcgagcaatggtccacgcgacatccatgttgttgaaagtggaaatatggtcatttcaatccaagttctccgcaatgtgaccaacaacttcagtgaggagaacatccttggtcgaggagggtttggcactgtttacaagggcgagcttcatgacggcacgaaaattgctgtaaagcggatggaggctggtgttatgggtaacaaggggctaaatgagtttaaatcagagattgctgttttgaccaaggtccgacaccgcaatcttgtttcactgctgggctactgccttgatggcaatgagaggattctagtgtatgagtacatgccacagggggcactgagccaacacctgtttgagtggtctgagaaaaatttgcgaccattggaatggaaaaaacgacttagcattgcacttgatgttgcaagaggcgtcgagtaccttcacagccttgcccagcagacctttatccacagagacttgaagccatcaaacatacttcttggtgatgacatgaaggccaaggtggcggactttggattggtccggcttgcaccagctgatgggaagtgtgtctccgtagagacaagacttgctggcacttttgggtaccttgcaccagagtatgcagtcactggacgagtgaccacaaaagctgatgtcttcagctttggtgtcatcttgatggaactgattacaggacgcaaggcacttgatgagactcagcccgaggatagcatgcatttagttacatggttccggaggacgcagctcaacaaggaaacattccgcaaagcaatcgaccctgtcattgacctcgacgaggaaacctacgctagtgttagtaccgtctcagagcttgctggccactgctgcgctagggaagcgcaccagaggcctgacatgggccatgctgtcaatgtgctctctaccctttcggaagtttggaaaccagccgatccggactcggatgacagctacggtatcgaccttaacatgtccctgcctcaggctctgaagagatggcaggcgttcgaggacagcagccactttgacggtgcgacctcgtcgtttgttgcgagcctggataacactcagaccagcatccctacgaggcctcctgggttcgcggactcgttcacctctgccgacggaagataaagacatttagcgctgctagtaagggtgtgcaaaaaccttatgtttccgttgaaatggaagctcgggcgatccttgttcattcttttagtctcttcacccccgccaccaatctttccatgtctctttattcgtctctgtactgccgtgtagctgctctttggtcgtgtatgctgtgatcttgtcccgaaaattgcctggaagttcgaagactttgctaactggtctatgtcgtttgctaagattaaagtagaagaatgctagagctgtatggttgtatcgggtactgacaatttgcaaaggaaggtgaccctgtgttcgtcaaaaagaagtatggccctggcctgaagcttttccaacgcctaagctatgatcatttcactcgctgtacttactgtcatctactgtgagaactcaactatttgtcatgatctggtctcttatccgctgg

SEQ ID NO: 43899 - DNA, 3664 bp, Zea Mays
cccagtgagggcacaggcccctgctcatttctcggttataagtaatagtctagattttcactattaggtcctctgctcggtctaatttaaatgtcctcgctctgacattttagtgttggttgttgtaaatgtgctcatggctcagaatctgctcggttttgtttggttcccgtttccgattgccacccccctcggaggctcggacaagctacctctccacacgatctgctaattgcgctatgcacgcgtagtgttttgaaggcacgtaagtacgcgttagccgttaggtaccagccagcccagccagcccaccagtcaacccgactgaagattgacggaaagcactcgagtcatggtcatggtggcgacaggctgcatcagcatgatccttgcatggtccgtcctcatctccatcctggctgtcggcggcgcggcaacggcaagcgacgaggcggcgctgctagccttcagggcggggctgagcccaggcgccctcgcctcgtggaacagcagcggcggcttctgtaggtggtacggcgtggtgtgtagccgccgacgcaggccgggccgcgtccgcgtggtggcgctgagcctggcgtccagcaacctgtccggcacgctctcgccggccatcggaaacctcaccttcctgcgggtgctcaacctgtcctccaacgcgctccacgggggcatccccgaaaccgtcggccgtctccggcgcctgacggccctcgacgtgggccacaactccatctccggcgcgctccccgccaacctctcctcctgcgtcagcctggagtacctgcgcctcgagtacaaccagctcggcgggcgcgtgccgccggacataggcaacacgctggcccggctccggaccctcgtgctgcggaacaacagcttcacgggacccgtcccggcgtcgctggccaacctgtcctcgcttcggtacctcgccgtggacggcaaccacctgggcggcccgatcccgccgggcctcggcggcatcgccggcctgcagcacctgcatctggaccagaacaggctcgacggcgagctcccgcgctccctgtggaacctgtcgtcgctggtggcgttccaggtgaactacaacatgctgcacggcagcatccctcccgacattggcgacaagctcccggccatacagtacctctggctggacggcaacaggttcagcggggcgatccctccttccctcttcaacctctcaggtctcgtgagcctcggcctctcgctgaacggcttcactggcctcgtgccccccaccatcgggagcctgcgctccgtcacgagtctgtacctgggggagaaccagctcgaggcagacgacggcgggggctgggagttcgtcgcgtcgctggcgaactgcagcagcctccaagtgctcaccctcagcgacaactacttcagcgggcagctgccgcgggcagtagccaacctgtcgacgacgcttcagcagctctacctccacaacaacagcatctccgggagcatcccggagggcatcggcaacctggtcggcttggacctgctctctctggggataaaccccatatctggcgtgataccggaaagcttgggcaggctgacgaacctggtcacgcttggcctgtacagcactagcttggcaggccacatcccggcttctcttgggaaccttaccaatctggtttacctagatgcacacaactcagatctgggaggcctcatcccagccagccttgggaagctgcacaaactagtcctgctggatctgtcacacagccgtctcaacggctcggtccccagggaaatcctcgagttgtcctcgctttctttgtcactggacctgtccaacaatttcctctccggacccattccatcagaggtcggcgccctggccaacctcaacaccttgagcctgtcagggaaccagttcaccggcaacatacctgacagcataggaggctgcgaggtgctggagttcctctcgcttgacaggaacacgttagacggaggcctgcctcaatccttgggcaagctgaaagggctcaacgtactcaacctaaccatgaacagcctatccggtaggatccctgacgccctgggcagcatcggcaatctgcagcagctgggtctagcgcacaaccgcttctccggaccggtcccggagaccctgcagagtctgaagctgctgtggagcttagacgtgtcgttcaatgatctgcgaggcaggttacctgacgaaggcgtcttcagaaacctcacctacaccacggtcgaggggaacggcggcttgtgtggtgggataccaagccttctgctgcctccatgccccgctcttgccgcaagcatgggcagaaaacggtggcccaggattcttaacacagctctgccggtcatcggagcagtagtcgtggtgtttgtttcggctgctgttcttgttcttgtacgccagaccaagctgaaacaaaggcgaaagagagaagccgtatctgaagttaatgacaaacagtttcagagagtttcgtatcacacattgtcaagaggaactgacgggttttcagaggctaacttgctcggcagaggaagatacggttctgtttacagatgtactctagaagaggaagaggaaggtgcaggtgcagctgcaaccgtagccgtaaaagtgttcaaccttcagcaatcaggatcctcaaagagtttcgaggccgagtgtgagactctgagaagggtacgccatcgctgtctcctgaagatcgtcacctgctgctcgagtgctggtccgcaaggcgaagagttcaaggcgttggtttttgagttcatggccaatggcagcttagacgactggatccatccccggtcgagcaaccccactgcagaaaacaccctcagcctttcgcaaagacttggcatagctgctgacatcttcgatgcgctcgactatcttcacaaccacagccatccatcgatcgtccactgcgacctttaggtacagtagcaaaagctatgcaaaattcagaaagctcaattggaataagaggttccataggttatatcgcgccagagtacgctgaaggctgcgcggtttctggactaggtgatgtttacagcctaggaatactgttgcttgagatgttcacggggaggagccctactgatgacatgttcaaggactccctggacctgcacaggtttgctgcagccgctcttcctgacagagccatagaggtagctgatcagacgatctggctgcatgaagaagcagatggtaatggagacgtggtacatggaagggtaacaacaagtgtcattcggcagtgtttggtgtctgtgcttaggcttggcatatcctgttcaaagcaacagcccagagagcgcgtgttgttagcagatgctgtgacagagatgcattcgatcagggatgggtatctcagatcttgctcgatggttgagcagtgagcagtgaagcactcaaatggaaggttcagcaaacagcatgcattatttgtagtaaagtaactattgcattggagatgttcataaaaaaatgcaatcggaggtgtatacccgacaggtgttgttgttattagttactagtaatattcatcagctaaagcatcgataactgcctttgtcaaagatttatgtacacggaatgttcaac

SEQ ID NO: 43900 - DNA, 2145 bp, Zea Mays
ccaaccgaacggacgtgacacgcacgcacggacgcacggcacgcggacacggcgcgcgcgcggcgactccgggctggggtctccctcttcccttccctcagatccaactccgtttctccattccctccctagcccagccagggaaccagtctcagtgaatcccgcgcccggatcaatctcgcccaaggaagcagctcttcacgacttgcttccagatccatccatccatccatccatccatccgaggttgggccgtgggggtgtcggtgcggtgggaaatggggaaggggatcagcggcgacgcccgcctcgccgcggcgccttacgaccagtgggtgctgctgagccccgccgggggctcgccgcgcccgcccgcgcgctacaagcatgctgcccaagtggttcaagacaagctgtacgttgtcggagggagtcgcaacggccgttctctatcggacgtccaggtttttgattttaagacatcctcttggtcagcgttaagccctgctagaggctcaaaacatcccaaccatgaaaatgatgccacaggtggatcgttcccagcattagcaggccacagtatggtcaagtggaaaaactatctcctggccgtagctgggagcacaaggtcgtcatcatcattaaataagtttggcttattgatgtgcaagccaatagctggtctgctgttgaaacttatggaaaagttccaacagctcgagatggccaatcagtatccatacttggttctcgattactgatgtttggtggagaggataacaagagaaggctactgaatgatcttcatatacttgacttggagacaatgatgtgggaagaagtcaaatcagagaaaggtggtccagctcctaggtatgatcattcggctgctgtttacgctgaccagtatcttctgatctttggtggctcttctcactctacatgcttcaatgatctttacctacttgacttgcaaactctggagtggtctcaacctgatgcccaaggagcacacataactcctagaagtggtcatgctggtgctatgattgatgaaaattggtacattgttggcggtggagataatgcaagtggttccactgatacagttgtaattaatgcttccaagtttgtgtggtcagtggtcactagcgtctcagctagagatcctctagcttgtgagggtctcaccctttgctcaaccacagttgatggcgaaaaagttctaattgcctttggcggttacaatgggaaatacagcaacgagatctttgttttgaaatccaagccaagaaatttagtccaacctcgtcttcttcaatcagcagctgcagccgccgccgccgcttctgtgacagctgcctatgctgtaattactgccacagatgagaaaaccagagatattgttgctacagatgattttgatatcaagagagctcaacctgcaagtaattccaaaaagtttgttgctgaaattgatgtacttaatggagagaatggtaaactagcggctagattggcagaggttcgcgatgaaaactcaaaactaaaggataaattagacatgacaaacttgtcatatggtgaattagcaaaggaacttaaatcagttcaagatcaactagcagcagagggttcaagatgccagaagcttgagtcccaaattgctgctgcacggaagagactggaatctgctggttctttggagaatgaactagaagtattgcatcaacatatatctcaggtggaggaaaccattgcaactactcagagaagaaaatctgggggtgtttggaagtgggtggcgggtagtacagaggtctctgacgatgaatagtaagtcctatctgcagcatgcttggatggaacaatgctttatgtactcaggggttccgctacagttgtagctttatattttctatttcgcacgacctttttggtcagaaacttgtttaaatagagttttaactcatgaattgtctagagcacagtagcacactgcatcatgctgttgctaagttgtactctgtttcaaattgtaagtcgttttagtttttttcctaagtcaaatatgtctaactttggccaagtttatagaattagcatctacaatatcaaatatgcactatcaaaatatatttcata

SEQ ID NO: 43901 - DNA, 2024 bp, Zea Mays
ccgcccgcctcccccaccgcgacaggtaggggaagcaagcgagctctgtcggtgggggagctgctggtggttgtaagtgtagagcgcgcgattggctgccaggatggatcacgtagtcgggggcaagttcaagctcgggaagaagatcaggagtggatcattcgggaaactttacctcgccgtgaacgtgcagaatggcgaggaggtggctgtcaaactgggtggaagtaaggtttttttttcatttgcttgtggttcatcgtacctcccgttttgtgcatgctgtaccacaggtatctagcaggttacttaagaaggccattggattcaaaactcatgtacgctactgtgacacattgatggtcctgaagttgtggataatgtcaaaggttccctttagatcaaggctgccggcgtgaagcactggccaccgggtgctgcacgtcaacggccaacagggggcaccgtgcaggtgggcagaagcagccagcgacaacagtagggcacagggatgtatatggaccttccaaatacactagacttttgcaagcaaccaaagatactctcagataagaagaaaatggccgatgccgaggatatccagcccctcgtctgcgacaacggaactggcatggtcaaggctgggttcgctggcgacgacgccccgagggccgtcttccccagcatcgtggggcgcccgcgccacactggtgtcatggtcgggatggggcagaaggacgcctacgtcggtgacgaggcgcagtccaagaggggtatcctgaccctcaagtaccccatcgagcacgggatcgtcagcaactgggacgacatggagaagatctggcatcacaccttctacaacgagctccgcgtggctcccgaggagcaccccgtcctcctcaccgaggcgcccctgaaccccaaggctaacagggagaagatgacccagatcatgttcgagaccttcaacacccccgctatgtacgtcgccatccagaccgtgctctctctgtatgccagtggccgtaccacagattttagagattacctgtatcgcaattttagatattccgtggaaaagacggaaggcctgggtgtgttcagaacacatgtgctcacagggcttgcccgctgcatcttggttcagtgaacgagggtaggatccagtgcccttaccatggttgggagtactctactgatgggaaatgtgaaaaaatgccatcaacaaatatgctcaacgtgcacatccagtcattgccatgctttgagcaggaaggaatgggggtgcatggcctagggggaggatggcgactaggttcatcgatggcggcaagcagctcgtgttcgaccacgcgacacagttcttcactgcgagcatccgcaccgctgcaggtgctgcatatcatcggcagagaggatcgagttcagatcgatgatgcaaggcggctgcatcgtcgagctgtaacacctgcagcgatgatgcctccttatgggacaccaccaccatatgcagcaatgtatgcacaaggtacaccataacagcaggcaccaatgccaccgggttcacacccatacagttcttatcctatgcagtcaccaaacggacagttcaaactccaataagaatctcttggctgctcacctgtcgcatcttccccgattcaaaatcgtcctggtcgcatcttccccgattcaaaatcgcccaattttggagatatgtgacaaacgccatgccctgtgcattagagaagatacagaatcgccatgccctgtacaagacagtgagccaaattcttgttcattttgcactatgatacatattgattcattaggccctaggttggaggttgtgactgatgagttgggaagggattacttgattggtggtgtacaattcttggactggatacatgttccagtttttggtccattagttcaggaattgtttcatttacatgtatattcagtacactcgtataatggaaacaggcaaatctctatctcattctttggttattgtgtta

SEQ ID NO: 43902 - DNA, 1189 bp, Zea Mays
gggatcatcacgattaccatatatctaattactccactcataaatccaaataacataaataataaatcaacttaccatgactgaaccgacccgatatttgtaagaacgacgatgaacatcaggttcaagtgctttgtcgtgccccaagagagcgcttataggcctctcttctctcgaacatggatttcttatccaaagtaagtccgactcgaagcttgcgagaacactgatagtctccgaataaagtcttcgatcgaacacctggcgagcattaaactgagcttcactttctcctccattcacaactcttggaatttctccatattaactagaactccacacaaatggcgatgatccttgttcaggcctttcaccgagcactcgggggcatcgaccaggggcttgcttctccacattctcttggggattcttttgtcagcgtgaacacaagtcgaaggcatcacgtagggactggcgtcaaagtgaggcgacggaacaacgacaacggggtggggcagtgttgaaggagctcggcgtcatggcaaataggagttcgacggaggcggaagcgattgtcgaacaggaaatgcgcagatcgacgacgcgatgcccgatctggcgagcacgacgcaaaggagggcatcgtagccgctgctccgacatgaagtacttgctgacgagcacgacggaggtcggggagctgccgacggtcggcccgacagccagcaggggtaccagggcacgcgtgtaggaacaacctcgataggacgtggccgagcgagactccgacactgggaaacggcgggcgaccaagcaaaaatccgagctaggcaccatggacacagcagcagggaggacgcagggactaagttcgctagcgttgatgccgagccgggagggactcacagcggggatggctggctcaagggtagtggcgagcgcaggggcgagctagggagctccggccaggcgcgcagagggagatggagcgcgcaggggcgagcacgaacaggcagaacgccgggcgttgcgagcgagctccaagcagggaccgacacgcgtagggagcaccgagcttgatgaagcggctgccaggcgcgcggctaagagggcgcgccatggggagcttggcagagaggagcgtgcacaggagataagaacggcgcgcggcagaggaaagagaaggatg

SEQ ID NO: 43903 - DNA, 831 bp, Zea Mays
gaaggatcttgctcatgaacttccaatttacattgacaatatacaagctgatgaaagattctctaatctgaatactattactgaacttgctaaattgatggtgggcacaaagaagcatcttgcttttcctctggtctacgtcttctaaagctagcacttgttttgccggttgctactgcatctgttgaaaggtgcttctctgcaatgaaaattgtgaagacgatactacgtaatcgcattggtaatcagtttatgaatgactgtatcatttgctttgttgagcctgccatgatagctacaatttccgatgctgttataattgatcgctttcaaaagatgaagaatcgcccgcagaatgcttctatgagagtccaacttgttccacttgttgtgatgattgaacatcggcctcaagcaactggatattttgtatgcgcaatgaggtggtctccaaagcataaacgttcagaatggcagcaccgataaaactaaggtctcatgaaggatcaatatattatgatatttagggtgtatttatttctcgcttaaattatataagctagattatgatggaagagtataaagataaaatatcattttataatcacaaataagctgaaataagctatccaacgttagcttattcaggttatttaaagtctcaaagtgatattttatctttatatctttacgctataattcagcttatataatctagaagaaaaataaataagaccttagtatgacctattttttttcctagccttgtgcaaaaacaatgtagagccttgtgcaagaacaatgtagctcatagcacggctgcgtctgtac

SEQ ID NO: 43904 - DNA, 754 bp, Zea Mays
aagggtattcaattttccaaggaaggaaatgcatcaattgtttagcacacaactcctatcacctaatgcatcaaacaaggtgataaagattttaaaacagcaaggaggtggcaaatgcaccggggcttgtctagaaaacactgtgttagtgtttgttagatgatgtcctcttggcgaccatcctttgccttggtactcgttcagtctgcccttcaagttggtccgactgacgacatcgttgtgcgaagaagaccactccttgcaccatcttgaggtcaacttggctcttttcctccgcatcacgtgattaattatcgtacctaaatgaaatgcattatgcacatgaatgcatataacaagaatagcacaagacaaacaattgctacacgacaacgaattaaacacctagcggcgaggtgttgtactatttcatacggaaacactagttatcgacatacgactaagcgcaataatcacaaaataataaactatacatactaactacaacactcacatttcttctatttaatcatatctaattctattatcaagcaagaataaattataaacacattatcctccttagttacaatatatcatcggaagtctaataaagttagactcaccattattgaaagtcgaaatcttaaaatcagcataagaacaatctaactacccttttaattcgcatttcttaattatcttgaattccacactaattaaataggtcgatgccattcactgttaattactc

SEQ ID NO: 43905 - DNA, 499 bp, Zea Mays
catgtaaacatcaactgcttctcataaatatcccatatgcttgaattgcatattccacacctctgagacttgctgagtccaagaggtccaagatgtcaaggaattgaaggactgaaccgtccatatggtggtgttttgtctggtactacagttagaaagagatcctaacgaaaaggagtggcttgatagagtacagagcccacccattctagggccagaagtattgccgtttgcatgagcatgattggacgcgatgttgctgcaactgtgaagaaatggaggttaagggatgatatttctaaccatggccacttgcttatgtccatcattcttcgggtttgcagatgactgcatcttcgtgtatgaagggctatctattcctgttttgttcagttatgcagggtgtaagatatacatcacaaggccagtacgttctgcatcaattatcttgtccttgagggtcgcccttccgcttcgtggtgcctcggggccaagatga

SEQ ID NO: 43906 - DNA, 1675 bp, Zea Mays
ctccccttggagacttgcaatcccatctgctccggacagagccctcgctccacaccgccggcgacctttttcctcctccgctcgaggagtgggccaacggagggagaccatatgggcgcggaggcagcgcatgggcatccgcagcagcagcctccctcgtccctccgacccggcagggaggccgcggcgccgcccgcggtggtggggctgcagctctcggcgctgatcgaccacgtcgcgcgcgtcgactggtccctcctcgaccgcgtccctggcgaccgcggcggctcgcagcaggtatccattgatgagctgaatcatattcttgatgaagtgaatgcccacatccttccttcccgcaatgatctcactccggtaactacaatagccggtggaagtgttgccaacacaatccgtgggctctcagctggttttgggatatcaactggaataattggagcttgtggagatgacaaccagggacttctgtttgtcaacaatatgagctttagtggtgtagatctcacaagattaagggcgaaaaaagggcacaccgctcaggtgtgtgcttggtcgatgcaagcggcaatcgcaccatgcggccatgcctatctagtgcagtcaagatacaggccaatgaatttagaaaggaggatttcaaaggctccaagtggctcattgtgagatatgcacaacagaacatggaacagattgtcgaagctattaggattgcgaaacaggaaggcctttcagtatcattagatttggccagtttcgagatggttcgtgactctaggtctaaacttgttaaccttttggagactggtaacattgacctttgcttcgccaacgaagatgaagctagggaggttatagggggaagcctggaatcagatccagaggaggcgcttgcattcttgggcaagtactgcaaatgggccgtggtgacacttgcttcaaagggatgcatggcaaagcatggcaaacaggtcgttcgagtcccggccatcggggagagcaacgcggtggacacaactggagcgggcgacctgttcgcgagcgggttcctgtacgggctggtgaaggggctgccgctggaggagtgctgcaaggtcggggcgtgcagcggcgggtcggtgacgcgggcgctcggcggggaggtgcggccggagaactggcagtggatgtacaagcagatgcacgccaggggcttgctgctcccggagctcaagaactgaatgaaactattgctgctgtagctttagctagctaaatgcctgcatgctgcaccagctgttgtatctcccagctctcgaagactcgtagcatcacccagggccggtcgagtggccagtatccagccttccgttgttaattgctggcgttacctttcccctgctagtctgttaatgttactagaatattggtgtccatgaccatgcttgattgctggcatggtgaaggacgggcagatacattagttgatttgtagagccactcctaagactgaatcaatcagatggagtatattgattactgcacttcatgtgtgtgctagctgcctagctagagtactattttctacgcccaaaatttgtatgctgttttgtctttgtaagtacatactcattccgtccaaaaataaaatttgttttagactaaacatacattcata

SEQ ID NO: 43907 - DNA, 1065 bp, Zea Mays
ccagcaacgtgatattcaccaagtgcacgacaaaaagctcgaacatcctgcgcgactcaagttcggttcgtcaaaattattcagtcgaggaaaagatcttcagcaattgattaccgaagaaaagaaggcccctggatgacgtcaaccggaaatcgtcgttgtgcttgcgactattgtgtccaattagtctaggtaagttgattcgtattccagtcaactaggtctataaatagattaaatagaattgtgtctcaaaaaatgttattcatttagcatgcgtatattgtgatgatcgatttagataaatcggtaaatcaagttaattaagatacatagttaaagagttaataaaaagctagaaataaaaatagatgttctagtgttattatatcaatttggttaatggatgtagtcgctgccctgctgtgatatccatgatgcttactgcttggttttaagtgtttcatcctttttagcgtagattatttatctcgtactatgtatacttgtaatcatacatgtgcatcgtgcatttcatgaggtacgataattaatcgcgtgatgcggaagaagacccaagtcgaccccaggcgcagactaatttgcaagatgatgctggtggattaacctgaagatggataatcagaacaatgtgaagccaaaggatactcgccaagtggacgtcacctaacaacactaaactagtgttattcaggcaagccccggtgcatttgccacctccttgtgttttaaaatctttatcaccttgtttgatgtattaggtgataggagttgtgtgctaaaccgttgatgcatttctttccttgaaaattgattacccttccttgatacccgttttgaaaagaattttatgatgcttagccttgctttagcaaacaaaaatgttttgttttaaaacaaaagtgatgcttcagtgggtgggaatgttttcgaaaataaaacttgatggtggatccatcacggtcgtgatgggttcaacatcggaaaagatgtacctctgccaggtaccagactttgggttgaaattaataaagctgagaccgg

SEQ ID NO: 43908 - DNA, 1646 bp, Zea Mays
cggcacgcaacaccgcttccgcccttttctgatttctccatcggactccgatgccgaaccccaaacaccgcttccgccctttctgtttaccaaatccacacggtcccttataaaaacaaaaacaaaacaaatccacacggccccaatccacacccgcgtgccgccgccgccgccgccctcctttctgataaacgccctccccatcggcgtatggccattgaccacatcgtccgcgccgccctccgccaccgaggaaaccgcaagcagtcatcagcaatgccgccgtacgcaccgagagagcagcggcacgacgggccgccaggggaagtcccgccgatgagcgccaaggacgtgaccgccatcgaagccctcctcggatactgcttcatcgacaaatctcttgtcgagctggcgctgacgcatggctccttctactggcccaaccgccccggggatacctacgagcgcctcgagtacctcggcgacggcgtcctcacctgcctcatgtcgcgcgaggtcttccgcacctaccgcacgctccagcccggcccgctcacaaggctccgcgccgctaacgtcgacactgagaagctcgcgcgcgttgccgtccaccgcgggctccaccgctttttgagacacaaggcacctaaacttcaagatcagatctgttttttcatagaagaaatgcgcaaatatccagttcactcaaatggactattggatcctcctaaagttctgtgtgacattgtggaatctcttattggtgccatatacttggactccaacttcgaccaagaggaggtctttcgaacattggctgatccacttattggcttagagacattaggcaagcaccctgtaagcgagctttttgagttttgccaaaagactcaccgaggggtgaaatttctgaaagacgaatgggataagagtttgaaggttcaggtgttgattgatggtgaggtagttggaagtgctatttatggtccaaagaaggagatagctcagaaccgtgctgcgaaggatgctctggataagctaaaggacacacatggacacacccaaagtgaatcagcatcagtagatgtttctgaggcattggacgaattagacaacacccaaagtgaatcagcatcagtagatgtttctgaggcattggacgaattagacatagctggaacactaaattgagtgacatatatagaaatgcataataggtgcaattaatggcaatgaagttttgaatcatagcaacacttggttggtccattttcattgaatttctgtgttgctatgtaattatctctactatatgaaaataccagttttcatggttccatggtttctaccatcaaagtgctccataatatttaggtaaaaagggtaaaattataggtatatgagaattcgaactatggtcgttggctccaaacccatatatatacccacctagttaacaacagaacacgtataaataaaaaaaacgtagttttgtacgtgcactttgctagtcgatattcaaacaccggttaccatcaattttgatgacaaactacaaagaaattgttcattcgatttaatttcaaggctaacctttaattttgaagtgcatcaggaaacgcaacccgataatatgttctgtatcg

SEQ ID NO: 43909 - DNA, 2861 bp, Zea Mays
actagtttatatatcttgtgcgatacaatgctttttattttactcaccagtttatatatcttgtgtgatctgccaattatgcttgtattgatctgccttgtatttttaatatatttgttctgccttgtatttgtgttttataattatctgtagtccatatatatttctaaagtccatataatctgtagatattagataatgggctcaaggaatgagattatggagtgtagaaggaagaaaattctgaaattcatggaaatggaggaggaagaggatgaggaactattttttatcatcattcctagcatactcgaaggacttaatgaagaaaaaagggcagtacatacttctgaatatactggtgctaagaagattagagaaattttagaaggccacgagaattggtgtatgagcgagtttcgcatggagccacgaatatttaaggcaatagctaattatctaggcgggagaggcttttgcgcgatacacgcggagtcacaattgaggaacaattaggaatatttatgttcatgatatcacacaatgctagtaatgggaggctacagaagacatttcagcatagtggcgaaacaatccatagacatgtgaaggccgtcttcaatataattcctaccctcacatgtagatttgtcaaacttcctacttccttggaacctcatcctaagattgcctcggactcccgattttggccattctttcagaattgtataggtgctattgacggtactcacgtccctatcacaatttcagaagagaaagccccaccatataggaatagaaaaggaacattatcccagaatgtgatggtagcgtgtgacttcaacttgaacttcacttttatctcatgcggctgggaaggatccgcatcagatgctggggtgcttaaatccgctattagcaaaggttttcatgtcccagagggcaagttttaccttgtcgacggtggatacgcaaacacaccatcatttcttgctccatatcgtggtgtgagataccaccttgcagaacggcgtcgtcgagcggcgcaaccagacgattataaggagcttttcaaccatcgtcatgctattcttagaaaccatattgagcgggctattggggtattaaagaagagatttcagattctcatagtgggtactcatcatcccactgagtctcaaagtaaaatcccagctgcagcagctgtgtttcataacataattagaagattaaatggagatgatatgtggctagaacaacaaccaagtcatattcaaccagcagattttattgatttgcccgatggagatgacaactatcagaatgatgtagagtcaatgaatttacaaagcagccagggaaatattcttagagatcaaattgcaatgcaaatgtgggaccaatacatccaagatcgggcatgaaagctgaactgttgatcaattatggcaagagcttcttggaatatgaattatgagaagagtcttgttgacatcttgcatgagcataataatccaagatttaggggtcaaaatggttggattccggagggctggcgtagtataactcaaatgttcaatgagaaatttcctctagctcaattttcgaaagcgcaaatccaagagaaagaaaaagagctcaaagcaaattacaagttaataaaggaagcccggaaacaaagtggggctggatggaatgacagccttggcatgataaatgcattgccaccaatatgggacagaataattaaaaaccatccaaagatgaagaagttccaatcaaagccatttcctctctacaaccaattggaattgctatatcaaggaagctgtgcaaccggagatctaaattttacatccacgcaacaactagcaccggttcagcaggtttcaaaccctcaagatgatgctgtaaatgaagctgtaagctcttttaggaatgatgaccttgagctcgattccggtttaaatccatcctcctcaaatgttcaaaggcacgcagtttcaagtactcatgctgatcttggcacaaatgaccggacaccggcatcttcggattgtagagaggatagtcatggaaggaagtgcaagcaaaaccaaatcgctggggttcttgaggattttttgcaattcaagaaggaacaaagtaacaagtttattagtgaggtcaatcaaccatcaaatgaaagaagcaaagaagagtattccattggaaagtgtgttgctattttggagtcaatggaagatctaagtgaagaagaaatggcaaaagcattaggagtgtttaagtgtgaagaaaaccgggagatctttatgactaccaagagggcacgtgttaggttgttgtggcttagggatgagattaacaaacaggtgctatctccacgagtgagtggtgtatgaggattcctgtacttgtgtgtagaaatattgatgtgagatgctaaagctactgaagtaagaagtgcaattgttaagaaaactgaagtaatgagattgttaagaatattgagatctcttgtgcttgatctaatgtaataggacctattagcttctatatttggatgacattgtctttgtataatttgagcacttggtactttctatagtctggaatgatctaataatttagcacttggtactttctatacctggatggcatgtctctatgctgtggtggtgttgaactgaagttgagcatgcataatggagaaccaggagaatcagattgtggtgttgtattgttgttgctataatttttcatttgtgagcttttgtcaacagtggatcgataaacttgtaaaaccaatgtgatattaagtgctgttgaaaactttatttgaagcaacaaaatgttggatg

SEQ ID NO: 43910 - DNA, 1200 bp, Zea Mays
ggcttcttcagatgacaacactgagttcatgattgacatgttacgggagtgcggactagctcacaagacaatactatttattctagaagaattcgacctctttgctcagggtaaacagaggttgctttacagcttacttgatgcaatgcaatctctaacatcccaagctgttgtcattggtgtgagttgccgcttggatgcagatcaactcctagagaaaagggttagatcccgattctctcataggaaacttttatttatttcgccttcgttggatgatatacaacggttggtggagcatttgcttatactggccaaagactcaggtttaccatcaaagtatatcgccgattataactcaagacttactagcatttttagtgataagaaattcaaaggttgtctcaactccctcatggatgctgatgcaacaacgagcaacattcaaagatttcttttcagagctgtgtcatatatggacatggaatctggattcctgtcggtagaaagcttcctaaaggccctttcttccatgcagaggcaacctaagatggacagcttacaagatctctcgattttggaattatacattcttgtgtgcatgcacagattagaaagtaaggagcaaacctcatacaacttcaccagcataatgaaagaatacagatccatacaagacgcctataagacttctgataaatatgcaagcaccgtttgttttaggatggagaaaccaggcgcttgaataccgacctgttaagctcctcatatcctcccgcgagctcgctgagtccctcaagctgaacaccacctgccccgctgtactgcagaagctgtttgatcgtgaaagatacatgtagaatctcctttcagatggccgcgcttcacctgacttgagtcgccgctttcatgtttcaccgggttgtcaagttcatgtttcactgtaaaccggcgattgtattagtatcttgtccactgttcgctggaaaaggtgtgggccgtgtggccaactgcccagcgtgagtcgtgacctgcctgtcaatcgcttgagtcttgaccataggccacacggaattagatatctgtggtgcactgattttgggctaacgacccgatttctatctcgcacaagtttagcagcgtggtgacagtattttggtagctttgaaatgaatgcgctattcggagtttacaaaaata

SEQ ID NO: 43911 - DNA, 3567 bp, Zea Mays
aacacggcgagggcccccggtaggccgggacacaggaccttgacgcgagtacacgacacagctgaaggctgcgctcccctcgacccctcctccccttcgctccccagctccacaccaactcgctcaccgcctgcccgcctcgccggccaagccaagcgacccccttctcatcccctctctcgctgtcgatgggccctgcggcgctcctctgctccggccctccccgcaattaatcctcggcgtccgtgctctccccactctccgcgcacgccccgcccgtgagtcgtgatctcgccgtctccctcactcccatcctctgcctcaccgcacgagccccgtgcggtggcggtggtaaatggcgagcagcggggtgaggaacggggtggggtccaggatgagcgcgaagccggaccggcagggcgccggcgccacgcccaagacggccgcggggaagcaccgcctctcctcggcggcggcggggggcggcgcgtaccggcggaccagctcgggcccgctccacgcggcggcgggcggccgcgcggcgtcggatggagtttctagtagagtaagggttgctgtaaggcttaggcctaggaatgcagaagagttggtggcagatgcagattttggtgattgtgttgaacttcagccagaggttaaagcttcgtaaaaataattgggagtcagaaacatacgaattcgatgaactgctcactgagttttcttcacaaaagcgagtgtatgaagttgttgcaaaaccagttgtggagagtgttatggagggatataatggtacagttatggcatatggccagactggtactgggaaaacttttactctgggaagacttggtgaagaagacaccgctgctaggggaatcatggttcgtgcaatggaggatattctagcagacataacacctgggactgattctgtctcagtatcatatcttcagttgtacatggagatgatacaagatctccttgatcctgtaaatgataatatagccattgtagaagacccaaggactggggatgtttcattgcctggagccacagtagttgaagttagagatcaaaaaagctttgtggaccttctaagggtgggtgaggctcaccgtgttgctgcaaatacaaagttaaacactgagtcatctcgaagtcatgcgatcctcatggtgaatgtcaggaggtctgtaaaaggtagaactgaaatggatgtcagcatttctggtgaaaatgggcattcattgtccatgatggggtctttgagaccacctgttgttaggaaaagtaagcttgtagttgtcgacttggctggatcagagcgcatagacaagtcaggaagcgagggtcatacgttagaagaggcaaagtctatcaacttgtccttaagtgctctgggaaaatgcatcaatgcgcttgctgaaagcagtcctcatgtacctgttcgtgattctaagcttacaagattgcttaaagattcatttggaggtactgcaagaacatcattggttgtaacaattggtccatctccaagacatcggggggaaactaccagtacaataatgtttggacaaagagcaatgaaagttgagaacatggtgaaattgaaggaagagttcgattacaagagtttatgtaggagacttgatattgagctggataaattaattgcagaaaatgaaaggcaaaggaagtattttgacgatgaagttgagagaataagagatgaagctcagtgccgcattgctgaggccgaaagggaatgcaaaatcacattagagaatgagaaaacgaagtgccatcaagaatacttagactcaatcagaatactggaggagaagtggaaagtacatcaacaatcacccaagaaacaaaatgaagaggccgagtctacatccaatgataccagagaagtgcataacttactgcagaatgagaaaatgctacgtcaatcggctgaagatgaggccagtgacctcaagaatcaagtatcacactggaaaaaactggaggctacagctacagctgaggtagtaaaactacggaaaatgctagatactgaagctagccagaaagagaaacttgaagcagaaatagatattttgagaagtcagttattgcagatgagtatggaagcagatgagacagggagtcttgataaaggaaatggaccaggaaaaatatttcctggtttagattcattggtgtctcagactcgaagctcacaattcagagagcagagcaatggaccaaagcaaccaattgccaaactctttgaacaagttgggttacaaaagatattgtcattgctcgaatctgaagaacctgatgtccgcgttcatgcagtgaaagttgttgcaaatctggcagctgaagaggcaaatcaggaaaagattgtagaagcaggtggcctcacttccctccttatgctacttaggagctctgaggatgagacaattcgtagagtagcagcaggagcaattgctaatcttgcaatgaatgaaacaaatcaagatcttatcatggcagaaggaggtgtaaccttgttgtctatgacagcatctgatgcagaggatccacaaactcttagaatggtggctggagcaatagctaacctttgtggcaatgacaaactgcaaatacggttgaggggagaaggtggaatcaaagcattgcttgggatggttaggtgtgggcaccctgatgtccttgctcaagttgcacgtggcattgcaaattttgcaaaatgtgaatctagagcagctactcaaggaaataaggtgggaaaatcactattaatcgacgatggatcgctcccttggattgtaaaaaatgccaataacgaagctgccccaattaggcggcacatagagctcgcactgtgtcatttggcacagcatgaagtaaattcgaacgacattatcaatgaaggagccctatgggagcttgtacggatttcaagggactgttctcgagaagatataaggaagttggcataccggacactgacatccagccccactcttcaagcggagatgaggagactgggaataaaactgtgatgacagagcaacaaagtgcagctggggctggcactatgaagttccatttctcgtgcactttatagaggtacccgttgctctgagtgctggtaatcgacttacctggtttcggcaggcaggcatacacgggcaccacaccgactaatcacaagaggcagtggagcaactttctcctcgagagttcatttttctttgttctgaggggggcagttgaaagcctggacaacactagcaattcatttatttgtaatgatcctagcatagcagatgttgttacctacccaatgcagcgtttgtaatttttttgctgtaaaaatatcaaaggcagaaaaaagtactttcgcagtatacctgttttccgtgaacactagaaagtttttttgtttttgttttattcatatactgcagacgagtcatgtttgctagccgtgattttcttgctttcttaatgcgcgttgacgctttcgtttcttttaccatgtatgctctcagataatct

SEQ ID NO: 43912 - DNA, 4675 bp, Zea Mays
cgccagcccgagccacgatatttgcgctgcgcctcgcctccgcgaagcaacgcggacgccgtgccttgcatttccctttcacaaaaccaaaatccaaaacaaagaggagagcgtcctcctatcctccccttcccctcccccgcggccatctcaccccgatggcctcggcccccttcccgccagtcgcggcgtcggcggcctccgcgccgccgcgcctggccccgcgccaccccttcgctgctgccgcagccgcgcgccgctcctcgctctcgttccgccccgccgcgcgccggcccgttctcccgctccgctcctccgcggtcgcggctaacaccctccgctgcacgcaccgccgcgccgtctcatccaggtcgaggagacgcgcgcaagaactcggcgcggcgcccgcgttggctgcgtcgacctggggcgtcggcgaggagaagggcggttgcctctcgtgcttccccaagagtaggcggggcaggtcggggctcgcgaggttcgcgccgtgcgcgctcccgcacgcgtcgggactatcgtttcgcagccggttgagcgggtccaaggtcaagcctagccatatattgcacgccgctggacctgatgaaccacatgttgcaagtccaacatggtctgatacttcccttgatacacgtgacatggatcatgctattagtaaggaggagcttgaagatgttctcaacactccgcttcctgagcatccgaagctaattcgtggtcaattgaagaatggacttcggtatcttatcttaccaaataaagttccagcaaacaggtttgaggctcacatggaagttcatgttggatcaattgatgaggaggaggatgagcaaggaattgcccatatgattgaacatgtcgcgtttcttggcagtaaaaaacgtgaaaaacttttggggacaggtgcgaggtctaatgcgtatacagacttccaccatacggtgttccatatccactctccaactaaaacaaaggaatatggtgaagacttactcccttctgtgctggatgcattgaatgagatagcttttcatccaaagttttcttcatctcgtgttgagaaggagagaagagcaattctttctgagctccagatgatgaacacgatagagtatcgtgttgattgccagttgttgcaacatctgcactcagaaaacaaactgagcaacagatttcctattggacttgaagagcaaatacagaaatgggatccggagaagatccgtagatttcacgaacgttggtactaccctgctaatgccactttatatctggtgggggaaattgatgatattcctagagctgtgcgggaaatagaggctgtatttgaacacactctttcagaaaatgaaggaaaccctgtaccgagcactagtccatttggtgctatggcaagcctttttgcaccaaaactcccaagtggctttactacaaacctaactggtgaaaaatcacctgccacagataaaataaagcctgtaaaaagggaaagacaagcagttagaccacctgtagagcataagtggtcccttcctgaagttgctcaggacgccaaacccccagcaatttttcagcatgagttgattcagagtttctctatcaacatgttctgtaagatacctgttagcaaagttcagacctacaaggacctgcgtagtgtactcatgaaaaggatatttttgtctgccctacattttcgaatcaatacaagatacaagagctcaaatcctccttttacttcagttgagctggaccacagtgactctggaagggaagggtgcactgtcactactcttactgtaacggctgaaccccaaaattggagaagtgccatcaaagttgctgttcatgaggtgcgaaggctgaaagaatttggtgttacaatgggagaaatgacccgttacatggatgcactgataaaagatagtgaacagcttgctatgatgattgacagtgttccctcagttgacaacttggacttcatcatggagagtgatgcacttggccacactgtcatggatcagttgcagggacatgaaagtttgcttgcagtagctgaaactgtcacccttgaagaggtcaatactgttggtgcggaagtattggaattcatttcagattttggaaaacccaatgctccccttcctgctgctattgtggcatgtgtacccaaaaaggtacatgttgatgacataggtgaaactgaatttgagatatatccagaagaaatcactgaggctatcaaggcaggtcttgaggaacctatttacccagagcctgagcttgaggtgccaaaggaattgatcactcaatcaaagctcgatgaactgaaattgcaacacaatccatcatttgttcctttaaccaaagaggagaatgcggtgaaagtgtttgacagtgaaactggtatatcacaacgccgtctttctaacggaatttccatcaactacaagattacacaaaatgaagctagggttggtgtcatgcggctcatagtagggggagggagagcgacagaagattctgaatcaaagggatctgtcattgttggtgttcgttccctgagtgaaggtggctgtgttggtaacttttctagggaacaggttgaacttttctgcgtcaataaccttatcaactgctcactggaatcaaatgaggaattcatatttatggaatttagatttgctttaagagacaatggcatgcgtgctgctttccaactccttcatatggtccttgagcataatgtatggctagaagatgcatttgatagagcaatccagttatatttgtcttactatcgctctatccccaaaagtttggaacgttctacagctcataagcttatgttagccatgctaaaccatgatgaaaggtttgtagagccatcgccacattcactgcagaagttgactcttcagtcagttaaagatgctgtcatgaaccagtttgtgggtagcaacatggaggtcagcattgttggtgatttcactgaagaagaagtagaatcttgtgttcttgattatcttgggactgtgagggcttcaagttctccaaccatagaggagcgtattgaaaagatttcctttcgaccatttccatcagatgttcatttccagcaagtatacataaaggacacagacgagagagcctgtgcatatattgcaggccctgctcctaaccgttgggggttcgctactgaaggaaatgacctatttaatgtcattcagagatctgacgctgatgaaatatctgaaccagtaagcttggatctaacagggaagagacacatcaatgttcgcagccaccctcttttctttggcatcactttgagtctgcttgctgaaattatcaattctaggctatttacaacagttcgagattccatgggattaacatatgatgtttcttttgaattgaacctttttgacaaattggatcttggttggtatgtgatcgcagtcacttcaactccaagcaaggtccataaagctgttgatgcctgcaaaggtgttctgagaggattgcatagtagccgaattgtggaaagggagctcgatcgggcaaagaggacactgttgatgaaacatgaagctgagacgaagacaaacgcctactggcttggtttgcttgcccatctacaatcttcatctgtaccaagaaaggatgtatcatgcatcaaggaattgacgacattatatgaaaatgcaacgattgaggatctgtatattgcatatgagcacctgaaagttgacgattcttctttgtttgcttgcattgggattgctggcgctgaatctggtgaagatacaaacgatgacgagcctgatgtggatcttcatggcatgggtcccatgggaggccggggtctttcaacaatgaccagaccaaccacatgatcaccattgggatggccaacccttccaagggattaaccttgctccccaagacagggagtcacatggccctaggagactgcatgttgactgtcgtttcccagcaaaactgtttaaagataattcaagcatttgatctggatctggaagactattatatcctgagccacaaccaaaagcttggtggctgcattttttccccgaggagcgttgagttaatgactcagcaaggtcgtgaaaaagaatttattgtttgaggtcatgtagcttcacatgtacagtaaaagcaggttggttcttgcatacagttgttgtaactagtgcgttcagggcattgaagataggatgacagtagatcacagacgttgctgggctgcgaatagcgtaaggcatctgctgtaactgtaacgaaataatgaagcgcagtgtcaggaccctggatagatggcaagtgggtggcatgtgtgcctataaaaagggagaacgtatagaccaagggatatgaaagaaccatttgaacaaactaaatcctctctacctttccattactgttatctcttcataatctctcctctcatgtatcctgtttctctaccttctagaacaatttggctatcagatatcaaattagatcgtcttcctcgctgctatctccttcttcaacccttcttctacctgaacatctctcttctctccgatattcccttctgtggcgctaacacgcaggcatgtaacatttttgtgttattcttttg

SEQ ID NO: 43913 - DNA, 1171 bp, Zea Mays
catgctttggtatgcagcttcggcaattatgcaagatatcgggggtaaaggtctgctttgatactgaaaatgctcgtgattctttctacagagcagcagtgaactttgttttagatgattgcagcagcaaaagacatcggtgcagcaaaacttaatggtgaggatccaagggattttctcgccggccttgctagcaatattggattagacaagtttcgtgctgccactcttgtatgtgcatcagttgctactcgtacacggacatgcttcttgcaatgctgggctctagagattcaaggaaaacggccagaagcactggatgaactcgtgaagatttgtagaattcattacatatttcctccagaggacaattctagatggaaatggtggctgctggactagaaaagaatttgcatgttgccgagagggttcaccttctatatctatacaggagcgtttgtactgctggtaacttaaaaacagctgcacaggctcttggtctgagtttgccaaatgagaatacagaaggatttgcaatgcccattcgtcaaccatagatgaaggctttgaagcccctgacgcagttttggtattcctactttcttaacatgcattatgcagtatgctaccaagacaagaatcaagcatactgcagattcccttctcaacagaatcttagggacagatctgcacgggccccccagacaaatgctgaatcaattgttccgttcatgtgcatttgatagaggggtgctctttaatatgtgcaatgtcatcaaaacctcgtatattcagatgatcgattctgctcaccaaacgcgcccaccgccatgcctaatatcgtggccgtattgggagtatcatggccgtattgggagttctcttctgcagctgtagttggttaggacatctacaacctgagtctttgaattgttattttaagagctacaaaaactgtgcgatgagaattggttttttaagagctaaaaaactgtatgatataatgagatgtcttcaatattaatcacataataaatatagttaatagacaatgtgtagtgtagagagactctttgcaaagagatctctcttatattttttatttaacccttatttctgaaaaggctgtattaaatgatattgtatatgtcattatttcgtggtcgtattg

SEQ ID NO: 43914 - DNA, 1115 bp, Zea Mays
atggatcgtagcgtcctctacgatcaaacatccaggagttttgctagggttctcatccttccgccaccgcccctgcccgccgctagcggcggtgaggatgacgcggcgtgggtgcgcgccatctccgccgccaccaagtccacctcggcgcccaagaccctcaccctcgatggcaccgtcaagtcctccatgggcggcctcccctccgccgcgctcctcgagcgcttcgccacctccctagaggaactctccatcgcgggggtgcgcctctcctcgctcacgggcctgccacgcctcccggcgctccggtgcctctccctccctgacaaccgcctctcggggtccgccgccctcgccgccgtcgccgagtcatgcggtgccacgctgcgccacctcgacctagggaacaaccggttcgcagaggtccaggagctcgcgccgcttgccggggtccgggtcgagtcacttgacctgttctagtgccccgtcaccaaggtcaaggggtacagggaggaggtcttcgcgctgattcccagcctcaagtaccttgatggcgctgacgctgagggcaacgagcgtttggagacggatgacgacgaggacgaggaggaggacgacgagggagaagaaggggcggagggagaggaggagggcgatgaggatgatggagaggaagaagatgacgaggacggtgaaggggacgaagaagaagaaggtgatgaggaggtgactggattctaagcgaggctactcatcacctgtaactttggaagtgtatgtgtagtgctgttgtgtgtaccttgaatttctttctacatcttcctgtggtggcatagaatgcgtgcagtaagcacgtctgcttataacgaagttctagagaaggaaaagatggaatgaaactcaaattttggtggctgcataagtgtggagacttgaattcatatatacttagttaggctcaacgttagcgcaaatagttgatgaccaagtttttccattagtattttagtttggatttaaagtacacttatgtatgagttatttgacaatgcttatttatgagatattgaatgatacttatctatattatattaattataatgttattaaatata

SEQ ID NO: 43915 - DNA, 1507 bp, Zea Mays
aggattaataaaagtaaaaaaattccaaccgcacacggcacctcctctcgtccgttcgccgcctggctcgcaccgctgacagtgcgtcagtccaggtcgatactccctctttccaagatccggtcattctctctcggggtcggctaccgccgccgccgtacgccaggtgccgactgccgagaccttctccgatctgtttgccggcgaagagcgcccgccaaatctgcccctggtttcaaccgattgaaccccgatgtccgacgtcgagaaccctggcgtgggtgggaagccgccgccgtacaaggaccctgacaatgggagtcagcgattcctactcgagttggagttcgtgcagtgcctcgccaaccctacctacatccactatctagcgcagaatagatatttcgaggatgaggcatttatcgggtacctcaagtatctaaaatactggcagcgaccagagtatatcaaatacataatgtatccacactgccttttctttcttgagcttctccaaaatgccaatttccgaaatgcaatggcacatccaacaaacaaggagcttgctcataggcagcaatatttcttctggaaaaactacaggaataacagactgaagcacatcataccgcgccctcctcctgaacctgcaccttcacaggcacctgctacattgcccctacaagcgtccgtgccgacacctgtagctccacctgttcctgcaccaacatcgtctatgccacctgtggtagcaggtggtgcatctgcaatgtctcctatgcagtttgtaggaactccaggcactaatatgccgaagaatgacatgagaaatgctatggacaatagaaaaaggaagtatgcaccacctccttctctgatctttggcccattatcccagtaaaattcatctgaagttctgtcaacaatgcatattgagtcaagtgttattcgttccattgtgcaaataaagactggataaagactagtcaattgaaatgtgaacgtcttgtagctgtgactgaatctgcatatttcttcagagcttataaatgtgatatgaatgtttcataaaactacagtttggctgatgatatgtatacatcttcatcgcaggatgggctaattgaagttcttgcgcaacttttcaacggacactgccggattcgagcacagttgctgcctcaggagccttattatttccttttgttttagtgctggttatttggccttgtagttgagggttcgtgagtttttagaatggaagcttctgacttagagtgaagttagaacaaatactccatgtcgcatgaacttgcacacgtgactttaggtgtcagcattctcctgaatgatcataccatttaccttaatgtttcagcatattgcttggcagcaggaaatatgtactgttcataaactatacatatgcccgttggccccaatacaaagttgacattttggcaatattctgttcatacaaaacaactgtacatgttttagtattttt

SEQ ID NO: 43916 - DNA, 1880 bp, Zea Mays
ggaccgcggaccgtccggcctcagggccggaccgtccgccaggctcaaaacggtgctcaacatatgccccctaccttttggtggagctgagcaaaccaaaagcaactaactcgatgtgattacatcggttctcttaggcatcttgccacatactaggatggtactgtttgaggaaacgcccattcaaagccttaggcaaatccttgccttgtaatgtttgtagcaaataggcgttgccagacatcacctgttttactttataaggaccctcccagcttggcgaccatttcccgaacttccggtctttattccttagaggcagaatggtcttccacaccaggtcccctacttgaaatgattttgctttgaccttcttgttgtaggccctggctaccaatgatcttgtccttttctattgctcccaaagctatcatcctcttgtcggtcacctcatcaatattatccatcattgaattataataatcagtagcagttagatcattttgtctagcgaacctgacagcattcaaacttatttccacatgcaacactgcttcctgcccatagacaagctcaaaaggagatactttagtagccctatgtttagatattctatgagcccataaagcttcagacaaaatcttatgccaatgtttaggattatcagatatcttcttttttatcaaattaatcaatgtcctattactagactcggcctgtccattggcctgagcataatatggagatgaattaagcagcttaattctgtataattcagcaaattcacgtacctcctttgacataaaagaagtaccttgatctgtagtcaaggtctggggaatgccgaacctatgaataatatgctcatttatgaaactcaattacctccttgtgcgtcatgttctttagagcaacggcttcagtccatttggtgaaatagtcagtggcaactaacacaaatcgatgcccctttgatgatgaaggatgaatttctccaataaagtctaatccccatcctctgaacggccaaggcttgatgataggatgtaattcggctgcagggaccaactgtaggtcgccgaatttttgacacacttggcaacccttgtagtacttgaaacaatcagctatcatactagggcaataaaaaccagaccttcgcaacaaccacttcatctttggagctgattgatgagtaccacaaattccttcatgttcttcggccatggctaatatagcatcatctgggcccaagcacttaagcaggacgccattgactgttcggcggtaaagttcatcactcatcaaaacatacttgaaagctgttcgccgaatgttcttatctgtcctgatattgggattccgtaaataattaagtataggtgtcctccaatcacttgcatcgacttcattgtcagccgaatcaattaagagaacatttctggtaaccccggacggtccggcgtcatcacgcggacggtccgcgacctgggaatttggctctgcactagttatcagattttcagttttgtgaaatttccctctctttatccgataacctgatgcatcttgtgccaaatcgttagctctatgattctcaactctagagatatgccgaatactgaattcgtcaaaagaatggattatgctccaacatttctcaaggtaactatttagagtaccatcaaaacattgatattcttctaacacctgttggacgactagctgagaatcaccaaatgcttttacatgttttactcccataccatttaaaagttctaaaccaaacaaaagtgcttcatattcgacttaattgttagtgcaagaagttttcaatcggctagagaagtcaaaggagacattacttggtgaaacaagca

SEQ ID NO: 43917 - DNA, 2154 bp, Zea Mays
aagccaattggcgtcacgtcgtcgcctctgcggaaaccggcggtccacgggaaaggaaagaggaaacagggaggcgacgccgtcacaattcgttctcgcgatttgcccttctccacctccccgtccatgtcgcgggaaatcacgcgcggcgacgctggattcacttagatccaacagggtaatcggcacggggcagcctctccacccattcccgcagccggttgggcgagtcgtcggttcagataatagactgggcgtgtggatccaagaggtttgatccctttaatttggattgaagtgccagctttcggtcaggaaggtgatgctggatgatgctgacggactttgaaagcataccggttcaaagaagtgttgcctgtcaccatgaggctcaacgttgggctcctagtgcccttgatggcacaatactccgcacccacatgggctactttagttgctgggttcttcatgctgcttgcgctttcgctctccacgtacctgatatttgagcatctctcagcatacaacaatccagaggaacaaaaatttgtactgggtgttattctcatggtcccttgctatgcaattgatgtatttctttgataaatccaagtacaagcgtttactgtggcatcctacgtgatggttatgaagcatttgcaatgtactgctttggaagatatattactgcatgtttaggtggggaagataaaacaatagcctttttaaagagggaaggtggctctggttctgggcagtctctactgcatcacacgtccgagaagggaatcatacaccatcattttcctgtaaattatgtattgaagccctggagactggggacgcggttctacctgattatcaaatttggaatcttccaatatgtgatcataaagaccctcacagccaccttatctcttcttctagaatcttttggtgtttattgtgatggagaattcaatttacgatgtacccttactttgctgctgttctcaactttagtcaatattgggccctgtactgtctagtagcatggtatacagccaccaaggacgaattggctcctataaagcctctggctaagtttctttctttcaaatcgatagtgttcttgacttggtggcaaggtgtggtgattgcaataatgtatgctttgggccttcttagaagccctttagcccagagcttggagttaaaatcaagcattcaagatttcattatttgcatagaggacagatgggcattgcttcagttgttcacctctatgtgttcccagccaagccctatgcactcttaactaatcagtcacacggaaacatttctgtacttggggactatgtatcctctgagcccgtggacccttttgaaataaaggaaagcaaccggcctaccaaaatgaagcttccacagttggaaccagatgagagaagcgtgacaaacataaaagaaagtgttcgggactttgttgtcggcagtggtgaatatgtgatcaaagattttaagttcactgttaaccaagcagtgcgaccagtggagaagcgcattgataaattgatgaaaaagaatgataagagtaagaaaagccaggacgacaactgggtgagtgcagcaacaccagagaggcctgttcgtgggattgatgatccattattaagcggaagcgcaagtgacagtggtgtcacaaagggcagaaaatatcgcagagttgtgagctcagttactgctgtggacagctggggaggtggtgatcaagcttctgacggatatgagatcaggggtcgccgctgggctgtaaaaagctaacgatttacatagcgagatggtaaattcgaaccatatcgcgtggggggaaaaggacttttaggtttgcaactgtttctgcgatactggccatttaggagccttcgcaagttcagattgtctttgtataggtacttaggtagctgataatgatatgtaacctttttgcgtagattgtttaattttcttttctttttcttggtcgagtcgtactgacatttggtattgcaaaatttgaaagtacaatagtttttttcattctttggaaatggaaacagagttcagcgagtgtgtccatttggacggatttgtatagtttcgttacacgcttacatgcatctttgatctgaaaaa

SEQ ID NO: 43918 - DNA, 159 bp, Zea Mays
ctatacctatacattgctatgtttggtcactatttgcataaaactaaacatggaacgtcacctgtgatccattgtgctgaggaggctgtgcatgcatccacgggtagtgttgtgttggccacccctgaggtggtggcacccaccccgtcggtggcggtg

SEQ ID NO: 43919 - DNA, 405 bp, Zea Mays
caaccatgttaccactgttaagtgatattttgaattcagtcaatttcacatcatatcatacgccaccatgctctggtggtccacgagctcagcttgacatgctaccaaatacttcactcggttacacaccagagtttatagcacaaaacacaactatcatatagaaattaaatttcaagggatacaaagttaggcactgctatatccaccatgggttccattttgtctggtgttggccaaagaattcggtccagctatgaaacaacatttaattttatttttaaaaaacatgagttgaaggctgccagagtggaactccaagctaaaatattcatcctaccaacagttgatgtcagtccagctactcaggccacagaaaaaaggtataggagttcaacacaagag

SEQ ID NO: 43920 - DNA, 1137 bp, Zea Mays
cgtcgatcggctaaagcaatcatgtgatctgttctctctgctccaaggaacaggacaactgctccagctgtggggcctgcatgggcaagtacttctgtaaagtatgcaagttcttcgatgatgatgtctcaaagggccagtaccactgtgacggatgtggaatatgtagaaccggcggcgtggagaactttttccactgtgataaatgtgggtgttgctacagcaatgtcttgaaggattcccaccactgcgtcgaaagagcaatgcatcacaactgccccgtctgctttgagtatctgttcgactccacgaaggacatcagcgtgctgcaatgtgggcataccatccatttggagtgcatgaacgagatgagagcacaccatcacttctcatgcccagtgtgctcgaggtccgcctgcgacatgtcggccacatggcggaagctcgacgaggaggtcgcggccacgccgatgcctgacatctaccagaagcacatggtgtggatcctgtgcaacgactgcagcgcgacctcgagcgtgcggttccacgtgctggggcacaagtgccccgcgtgcagctcgtacaacacccgggagacgagggctgcgtgccccaggatctgaggcgaaccagaggccatgtcacaaaatgccagggagatgccgtccaacgatcatctgtctgcaggacgttgctgcgcttaaggttaaaggctagcgcgagaccaggcctggtagtccagtcttgagtttggtgctggagcatttgtaatgttccggtaaaatgtaatgcgtccatgagtgctgtccaggcagtaagcacacctgtggatcggggccggcgcaaggtccctaggcaagctgcaggattagtggggctattcatgtttagggcgcgaatgcaacgaaattacccgtgggccgtgggctcggtatgtaacagaaccgattatttctattacaataataacatgcagttctattgggccgagcctaatcaggcaccacgaatgtgaataattgcacatggcgcatatatggcgggcagtagatacatataaaatggagaaaatccgtttattgccatcaaaacttatactgatcactacaataccatctaaaatgatgtgctcccttc

SEQ ID NO: 43921 - DNA, 684 bp, Zea Mays
ttacaacaatggactatgtgagtcccagttctaggccacaccgccacatacctgacattttatttggatatcgctggtcatgcccaccaataatttctacccgatgttgctccacattattctgatatggagcatgattagcagctttgtgattaagcattgacatgcttcgagtcgccacgttcatcaaatcaacttgcaagttacagattgtgctactacatcattccatgatcctattccatgcctcttcactgcttaaagaatcaaacaagaaccactacacatcatagactctacaagccaaaaaggccaccaagaatgatgcatgcgaccacaagaaaaccacgttttcagcacttatctgcagtgtcccatctttttctatcaatcttaaacatatgtacataacccctcaaccacgctactcaactatacaggcaactgaagcactacaactttgtttattttggataaggcccgttaaatatggcataaaactacggaagatcatcattttataacttgatatagtatatgcataaacagttgcccttcagatcatgatatctactacctaaaaagtgaatgatggatgcaatgttttgtatgataaacagtttcgaaatagttttaggatttatacaagtgttttattaccgtaacaaagaattattaatattg

SEQ ID NO: 43922 - DNA, 1066 bp, Zea Mays
atggatgcactaactaattcaaaccaaaagaaagtaaaggacagttggagaattgtcaaccaccgggatatcattccaacagtgccacgtcttatgggctattgccatgtggaagcaccagtttatcttaaatttggggacgcaaaagatgcaccggtatccatgttttactgtaccagacctccagttgtcaccaaaaacataaaattgcatttgtatgtgatacaggtaaataacagcattctagatgatgaagaccaaggtgacgtgataggggagtacacacctgatgttcttgttactgaatttatgaaaggcgagaagcaacttgtggaaaaactactgcaaacagaaataaatttactccgctcaatcagggatggttcggctcttatgcagcacatggaagacttctactatgtcacccttcttgagaatgtgagatcaagttatcaagtggcagatactgccaatgatgaataccaattgacagcgtgatcctagtaaaactgcacagctgaacatcatggactgtgtttccctgcaaaaacttcatttctgaaggacactgaatggggctatgaaagtgtgcaatccttactcttagtggaaacatgaacaggcagaacagccttggacctcagtcaggatagaggaaatgaaactggtttcactggcggatatacttgtagcaccgtgtcaattggtagatatgttgtttgagctattttccgttgatgtagctagcacactttggaatatattgtatgatgtttgaaattctagaaaagttcatagacacctgggagaataactcaagaaatatccaagtccgttttggccaatattttttttcatggagaaacttgcacaccgtggtaggctaccggctacccaagggctgatagggtgtgttaatcgagtgtacgacctagataaaaatgttcaatgtgatggaactatatatcttgcatggaataaagtagcatcatgtaatttcggcattttttcttgaacatgcatgtgaaccgcgtcattatattaagatagaataagttatctggca

SEQ ID NO: 43923 - DNA, 1071 bp, Zea Mays
cccacgtatgccactatctacaccagcttttcaaccgctaaccgctgggtctctgcctttgtgcgcgctcggcattctgcgcagtagcgtccttcgctcagccgacgatggctacctcgccgttgtcctccaccactgggcgtcccctcgctgccggtctgttacaccgttccttgcgccctgctctgaccaggctcgcccaagtcgtgacctcgccgaatcgcgcctctgcttgacgccggtgatggccgccgttggtccctgcgtccttccccggtcgtctcacctcccctcgacgcccctattttttccctagctccggcgtccatcgtgtcctactccttccattcgcacagcactgctctggtggtcgtccaccccagcgcccagcgctgctctcgtctcgctgggctttgtctcgccaacgtcggtcgctgctccaactcacgttcgtggacgccgtatctgcgaccccgacaatccctacataatctgtgttttgtgtttgtcgccaaataaaatccctggcatttcggggagaggaagatgaagtcggctcttcgatcgctaggtgttcggtattgtgcacaaaccagaaattgatattttccatgcaaatatctaactggttcaaggtatggtacgttaattgatcagatgatgcgtagaaccaaggccgaggtgaccacaagatgtcgttaagcgtgagcttcttcgcaacgtgatactgctgaatgaacttgaagattgggtgatcggatcaagtgccaggatgtgagattgtaacgccctgaatttggggtagattttttcttctttttactcaccaaattcaggcgttactctcttttctcttcctgtttcgctccttcttcccaatttcaaagcggtgtagtggtgtccgtattacgtataaacaaaaactaagttgtcatgggtgttgcatcatgccaaatcatatttctttgtttgatgtcgtgcttaatcgcgtgttttgctcagtctcgttccacgatttgaattccgatctgtggttgtgcgtgccatgggattttgacccgcggtgcggcc

SEQ ID NO: 43924 - DNA, 1877 bp, Zea Mays
gaatgaccttttgtgttcgtcgtctccccaaaaggacctcccaagacctggcatctccagcgaatgcgacgccgggaaccaccgaccgtgcgtcctctctcctcgtgcgcttcgcccgtctccacagttggtgcaggttcaaacatggacctctgctcatcaaagaaaagccggacaccagatcttccaagaactgaaaattttctcagattatcagcaacgttttagtgcaacagtgtttacggggtgaactgctggagttggcgttagatagtcgatggtctactgccgccgtgctctctcactgccagtgtcccaccaccgccatgcatgttttgcggcaattgccggctactatactcctccgtctccaatcatcaggcaccagcttgcgacgcaacttggattctctcctctcctctcctctcgttgcaacaaggcagtccagtgaatgagacggatggccccagctgtgcctgtagctgatgcatgatggagctgagcctgtgggtgggaatctcttctctgctggtggccactcgcctagctccaaaaacacacacacacacactctctctctctctctctctctctctctctctctctctatctagtgggaagtttcacatcactagctccatcgcaattggtatgggtggtgcttctgcacaaaagaaaaaagatgtgcctgtctcactccccaaccaacttgtgaattgtcatgcatcgatcctagctagagcatctccgagagcaaaaacccttgttacagttttccaactcacattctactatatattaggatgtgttgggcacacatggaagtaaggcaaaatgatgcatcgacatgtgatacgtgagcacgtatttcagaacccgataggttggttggagtgggcttcttaaaattattactccgaagcgtgcaattgagattgtagtattataatacccacgtatttgtaaatttgttatcgtcgttgctttaaacacccatctatagctcactcactgctgctgttactggcatttctcccctcatcccgttcctgaaaacggatctgaggccgtcgtcttccactgggtcgcgctcctgttcgctccgtcgtcagaaatgcaggcagcgccagcaggtcttgcttcacgctcctcgcggatggtggcccctccggcccgcgccgatgcagttgaagctccttccgaagcacaaagattaaatagagtttggaatggtcttttagacgccattagacacatgcaagtctcagccgatgagttgaggaggttgaccagacgcaaccatgtgcctgagtatgtagagtacctacgcaaaaatagattatgaagcccatgtgagtgctgttactgaaattgcacaaggtctagaccacgtgagcacagatttggcggaagttcttattggtccgcaacctcttcttgaagattatgaagcccttggtttgtacgatgatttccaatgcgatggtgaagatagctctgtggactcggatgagatcaatgatcgtcgtctatcgcatatgaacgagcgtatatgagatatttgtttgcgagagagttcagtttgccattgatgtctgtagcttatgaagcccttagttagttgccactgttgttcctggtacttgtatgaattgggttatgaaaatgaagagttgtgttatgagttgtattttgtgatcatataatggcttcatgtgataattctgcacctgttgtcactgttgttatgagttgtatcttatgaagcccttagttagttgccactgttgttcctggtacctgttgatcatacaattgttagttgtcactgttgttcctggtgctcatgatttcaagatcattttgataattctaca

SEQ ID NO: 43925 - DNA, 2376 bp, Zea Mays
ctccaaacgaaataaccgctacccatcgcaaacgctttccctccactcgtccgctccggccgcgcgcctccgccccacgccgatgccgcccccgcccccaccgcctctcggcctccgcctccgtctctccctcctcccgccccaccctatcgctccttctatccgtcatgccttctgctcaccctccgtcgtgtcctgccatctttcggtgcgccccctcgcccaacgccgcggtgggcgcccgcgccccctctgcgccgcgcggggcgaggccgaggcggagggcttcgcgtggccggatgggtccgaggaggagctgcggcggctcctggagctgctccctagggagctgagtcggcgggtggagacccacccagagctcccggcgctcgtggaggtggtcatggacctcggccggcccccgctcgcgcgcttcccgtccggagacttcctcctctcccaacgccccatctccttcgacgacctccgtcacgctacctcccactcccaggttggggactttggagcggataatcgtgctggaatcagccgcacgctgcaccggatcagcgccattaggaatcggaagggcgtcattgtcggcctcacatgccgtgttgggcgtgcagtgcccgggagcgctaatttgcttcaggatttggttaaggacggtggctcattgctgctcatcggcccacctggggtggggaagactactgtcataagagaaattgcccgtatgttagctgatgactataagaagcgcgtgatgattgtcgacacatctaatgagattggtggggatggtgatattcctcacccaggaataggcaatgcacgtaggttgcaagtgcctaaccaagacatgcagcataaggtactgatagaagctgtggaaaaccatatgcctcaggcgattgttattgatgaaattggaactaaactagaggccatggctgcaagcaccattgcacagaggggcatacagcttgtggcaactgcccatggggtaacgatagagaatctgatcatgaacccatcactagagatgcttgtgggaggaatacagagtgtcacacttggtgatgaagaagctaaccggagaggagttcaaaaaactgttctggagcgcaagggcccatcaacatttacatgtgctgcagagatcgtctccaaaaaagaattacgtgtccatcgtagtttggaagccacggtagatgctttactcgcagtgactctctaaggaatgccagaagaagcttagactctgcatttagtcttgactctgctgaagggcatatagtgaggtcagatggagctgattcaagctttaatctttatgcatatgggatctccgagtcgactgccttgcaagccattcatcagctggagttggacgacagtgttactttaacttataatatcagtgaagctgatgcagtgatcgcgttacattcaaagctcaagaagaactatcagattcaggctgtgctgaaatctcaagatataccggttttcctcgtaaagacaaactccctgcctcaaatcaccagggcactccgtgctcttgtcgacgatcacatggacgaagtgatagactacaatgataaagaagaagcaaggtcatcagaagaaaccgatgctctggaggaggcaaggctggcaatcgagcaagtagtgattccgaaaggcgagagcgtgcagctactgccaaggccatcaagcatcatctcgtcccaagtgggtctcgtcgaaagcttcagcctcaagtgggaggtcgtaggccaggagcctaaggcatgcgtgaggatccttccgcactttgcgccaaaacaagtcgaagctgtcgcgcgagaaaccccagcggagcccgccgactcggactgggagagccacgatgactcggatcatacccagagtggcatcaccaggctacctttcctaccggattagcgcggcgtctggcgtatcctttcagttcttcgtggccctgccgcctgctgtgtatgtattccatttatttatcttggtaataacttgcaccagaaagcacttgcgtggttgcgtctatctacctacgtaatataagtggatagtgctccgatccggcctctacgcgcgcgtacagatatatacagtatctaatctgttgtcgacccgtacagtcatatcatccatgcatctcttcccattttttacatgctctgccaattccccaagtgctgcgtatccgttctaatctagtactaccgaacaagataaagcagcaagctagcatataatcgggtcgttgtgtttgtgccttttgactagttgtccaataatataattaagctccatccttgtacttgtaccagcacatttcttatatatatg

SEQ ID NO: 43926 - DNA, 303 bp, Zea Mays
ggacatgtatgggaaggcttgcccaaggccgccccaaatctgttttctgcagccacagccatctcatgtggagagcccaacaaagctctaggagactagagattcccaagcctcccagctgaaggggtcgacacacctttccccaggctaccaaacaatgtcctccctttgcttcctttctgcctctccatagaaaaccttttcttatcttatcaatgacatctaagacccattggggaatgtccattgccattgctaaataaaccgtcatgcctgtgagaacatgttgcacctgaattctcc

SEQ ID NO: 43927 - DNA, 3016 bp, Zea Mays
ctagcaggtagcagcagtcgcttccgtcccccttcctcttgtattcgcttcgccgcccaacccagcctccaccgctgccttcccgaccgttctcgccgccgctgtctcctcgcccaccaccccgcacggccggcgaccagcgcccacgcggccgctcgatccaaggccagaacgagcccaccacgatccgcatcacgccgatatttttcaggttgttggtacggatctagggttttcctgctgcggattcgttcgattcgctcatggccgctgggcgccatgggggttacagggactacgaggagagggagcgggagctcgacgcggaggcctccaggaggagcaaggagcagcaccaccatctcggcggccgccaccgcgacgtggaccgccgccgcgatggcgggcgcagcaggggtggtagagactttgccaacggccacggtcgccgacgttcgcccccgcccaggagccgcctcgcgggaaggcttggtgaccgtgagcctggcgaggtgctgagcggtagcgcatctgatgactccggtgggaggtcggatagagggagggaaaatggcgtgcgcagttctagcagggagggcgacatggtggcaggcactgggatctcgtcaccgatcaagaagaggaaattctcaccgataatttgggacagggatagcccaaagccaccgcattctggtgcagccagggacaagaaatcggtagaatctgttccttctgagctccctccgccgccgccgctgccacaagaccacatcccactgagcttgtctgtggagaagtcacctatggatgtagaaactactgttggtacagagagtgctgagcagttgccggaacatgaggtcaataaggtgatagagcaggaagaggactatccaagtccaacaatgaggaacatatcgacttcaagatgggcgggtgcaaatgatgatgaggaaggtggggcagctccaatgaagaagagaagtgtttcacctgcagactcctctgtaccaggtcagtggaaacgagcaagcccagaacctggtgaagtctctggaggaagggcaatgtctaggtcatctgattcagggaaaataggtaatgatgagaaagaagattccgaggtcgataaagatgactatatggatgttgacagggagcatgctagtgacagtggtacagaaaactgtatgtcggatactgactcagacaatgaaatgtgcaggcctgaaacccctgaaccagagaggccaccacacaggtgtatcaatatgcttcaaggttgcagaagtgttgatgagtttgagaggctcaacaaaattaatgagggaacatatggtgttgtatacagagcaagggataagaagacaagtgagattgttgcattgaagaaggtaaagatggagagggagcgagaaggtttcccattaacctctcttagggaaataaatatcctcttgtctttccaccatccttcaatcgtggatgttaaggaagtagtagttggaagtagtttagatagcatttttatggttatggagtacatggaacatgatcttaaaggtgtcatggagaccatgaaacaaccatatacacaaagcgaggtcaaatgtttgatgcttcagctgctagagggtgtaaaatatctacatgacaattgggtactccatagggatctgaagacctcaaatcttttgctgaataaccgtggtgagttaaaaatatgtgattttggactgtctcgtcaatatgggagcccattaaaaccttatactcaactggttgtgactttgtggtacagggccccagaactgttgttaggaacaaaggagtattctactgctattgatatgtggtccgtgggctgtataatggctgagctccttgccaaagaaccattatttaatggaaaaacagagtttgaacagctagataagatttttagaacacttggcacacctagcgagaagatttggcctggctatgctaaattaccaggcgtgaaagtaaattttgtcaaacaaccgtataataggctaagggataagttcccagctgcatctttttctgggcgaccaatcctgtctgaagctggttttgatctattgaatagactgctaacttatgatcctgataagcgcatatcagcagacgatgctctgaaacacaaatggttctctgaagttcctctgcctaaatcaaaagacttcatgccaacatttcctgctcttaatgaacttgacaggcgtaccaaacgttatctgaagagtcctgatcctctggaagagcaacgtctgaaagaactgcaagggaacataggcaaccgtgggctttttggctgaactaagagtacttgattggattcctgtccgtactaactgttatgcttcaccctgaatccacgaggtcagatgtcttctgaggattaacactccatccagattgatcataaaagcaaatataaaccgtcttcatcgtaaggtgtgacatgttggctttgaatgggtacaccagtttcacctttggaacttctgtatgtaaaatattccagattgagacgaaagaagcgcaggggaaggaagccttttgcttttatcaggaaatcaatgacattaatacaacttagaagctaagctgtggctgcttcaagataggaaagtgacaatttgtggagggccttcaaaagtgttttactagtgaaccatggtggttgttgcttatcttcagctgacagttataacattgctcacagaaaaacatgaagcgattggtttccgcaataaacaaagtgaaagttagcatgtagagtattgcaatacgtgcggtgccatttgaagttctggtgaggtttgcttgcgatagagctctttgggggcacttagaagtcagaccctcgtgcttattatgttgctgtccctgcatgaaattattgcacatgcacaagcaaccttcatgcagacccatttttcgttttttccaacttacaccggcagcatctcctggagtttagact

SEQ ID NO: 43928 - DNA, 873 bp, Zea Mays
gccacaacttgaacgcggtttcggatagctacaactcgaacacgatttcctcctttaaataggtattgttgctgccatcgagagtagaacacaaccaaagcatctagtttcgtccctgcttcctgcctacagcgtcgtgcgtatgatacttcttcctaatcattcgcgtgcaccgacaaacaagagagcaggtctccaaaactattgcccccagagatcttgtatcaggagagggtaaataaagtttttgggaagcactctacatggatgctcgatcacttcattgccgtcttcaatctcattgccatggctcatctgtcgccttgtcacgtggacgtttcatgtcgtcggtaacaatgagatggtgttaggcgtcaagttgtcttctctacccgatcgtcggcaaggaacaaaccgagaggaaagattattatccggacgtactctccggacttccgcgcgcctacgagcaagcaattcacgcaagtggacggcggtaagcagagctgaatttctacgcacggatcgatctcgatgtgaagctctgatagagagtgtgattgcaggtgaactggacctggcatggcatggtgcagtggtttgagccaaggcggctgcgagctgcaaatggatcaggacagccctagctagctagctcctcgggaagagggtgaccggtggccgtggaaacaggcacaggccggcgcagagagtctacagccacgaacacgaagtggtgtcggcgcacgacgctctcgttaagttcgagatggctgcgtcacatgccctgcgcagcgcaggtacgtacgcgaaggggggaaaaaagagaataaactcaggaattcggttggtttccagtcaggtccatgcctg

SEQ ID NO: 43929 - DNA, 823 bp, Zea Mays
atgtttatctcttgcgcgctcctcttcttcctccctggcgctcggtcgcttctctctggtctccacgcgcaccgcgtccagctccctcctccagctgtgtctgctgctcgccccagcctggagcttcgctcggcttccaactccggcgcccggccgagctccctgctcccactctttatcactttatatggttggagcctggagaatatgcaccagggctatcccaaagaaacacttgtgcgtttccttaaggctagagagtggaatgtagcaaaggctcataaaatgattgtagaatgtttgaattggaggattcaaaatgaaattgatagtgtgctcgagaggcctatagccccagtagatttatacaaatcaatacgtgattcacaacttattggcctgtcacgatacacaaaggagattcttctgtacaacttcgatggtggtacaatttgttcagtggttattttgaaagaatggcttggcatccatcgcgtcgctgctgctgaaatatctaaagtctgggtctcccaatttttggcattggtgttgggcatagcacatatgacaaagcttcggattccggctctcatcaagtgactccccctcatgttgactttgcggatgtctcaattctagtggtggagctacgaacaacaatccgatgtcctgatcgagagcgatggagttaatgtttgaacttgtgtgtttgaacttgtgaactaaaaatgtgaactatggatgtgaacttaacttgtgtgtttgaacttgtgaactaaaaatgtgaactatggatgtgaacttgtgtgaatttgtgaactta

SEQ ID NO: 43930 - DNA, 2116 bp, Zea Mays
tgatatttgagtttatgccaagtgatattttggttgtggagtttggcaaggttcagtgtccttgggcagggcatgcaaacctgcgtggagctgaagacaggccacgtatgattggtccatgcgttgctggcacccttggagtctctcttcctcatgctgtggttgagctcggtgacacctgctccttattcaatgatataaaacttgattcagtgaggatgctccctgtccttaagtctggtccgtgtttatcaccagagtgacacagctcttgagttcaagtcgatatacatcctctccccagccaatagctcggtctgcccttgtgcttagcgctccaacactcagtctggtgaccacgctcacccaactgctcacctcaccgtggccgagacgcttggagcaattgcatccccggtgccacgctgccgcagaacagagtcgtggacagctccaccgctggctttccaatccatgttgatctcgaatgatcttgtgcgagcactgaaggtcgtcgacgtcgtggccagcgagggcgggtgcttggctcgagcatgaaaacattggagcttgttaacatggacgtgttttgacggtgattatgatgcgcctgaggtcagcgccgctgtggctggttgggccggctgagtgagtttgggcctgatattgttctaagttttgtcttttctattagctgagagatttgaaatggtgccaaaatttgtagaaaattccaaaaatcatgggacaaaatttgttggatgtataaaatcaaaagctctctaggaaagttggtttctggatttttaggttggttaccaaatattaagggatttaaatgtgctcttggaaggattgtttggattttaaaaataaaattacagtgccaaaacttatgaaattttttgggtaacattttttggtcatttgagtttgtggtaaaggtttgaggctgttcagaatccatttgctctgaaaactttgtaagccccaaaataaaatggttaatccctaatcaagtgtgagttagtgctttggaaaggggataagtttatctaaggaagagatgcagtttcttaagaagttttaagcttttggatgagatataagttggattagttccctggtttacctaagcgaattcaaattggtcacttttattaagtgctaggttgtctagatgtgtatgcctatcatatacttatttaggagtgtttatattccccacctctccttgtgagagtttgcatttcatatcataacataagcatacatgtatttgtaattgacttgtagaacacctagaagaagtggtgtttgaaggagtctactccagtgcctgctcatcaagtggatggagctatctaactaaaggttgggtagaaggatctagaacctcttctctgcaacaaaggcaagccccggtgcatttgccccttccttgtatttttaaaaagacttttatacacttaagtctagtgaaatgggcattaagtttataggaattgcttagaaactatttgatgcattggctaccttgatatccatacctttatagatacttctgatgaagtatcaaaatatgatttacaaaaatgcttagccctgcttagatcttgtggatagaggttgtcttttgcattaatgcctagctcaggggttatcttgaggaaggatgacttctacctgcaagaatattttcattgggagcatggtgggatcttactgcaaagttccctataatgctcttttcatccttaggaacacaaaacaatcctaagggtggaagtacttaacttgagacttgggctaggaacaggtgatgctccacctaggttaattaaggattggatgtgtatgtaggcctgtatgatcaaggactatcttaactggccacatgccctggatatgggacagagtaagcttgaacctggctattccatacgtgaaaagacaaccgcgcactaggcgtgggagatggtgggagtagcgtgtaccctctggctagaggctggacggaggagtattgtgctctcgggtagcgcagaccagttcatgttgtggaggatctgtgggaatgttgacatatgcagggttaagtgctacatatgtcgtg

SEQ ID NO: 43931 - DNA, 307 bp, Zea Mays
ttggagccatagattaatagagtcggagtctgtaataatgcttaattcagtgtcttagtcctagtcagtcttagttagagttagtttgcttatcatatgttttgatgcttgtcatgatgaacttgtaatgaagttggatctttgtaatgattgtcaccaaggtgtgggcatcccctacaacttgatgcagttattaataaagtcagttgtttagctaggcaacctatttatttccactttcctaattatctgagaaactgtgttggctgtgttgagagccagtgaagatgatcattgttcaatgcta

SEQ ID NO: 43932 - DNA, 511 bp, Zea Mays
aaggcaagccccggtgcatgcaaccccttccttgtgtttttaaatgatttttacacactttaagtctagtgaaatgtgcattaagtttataggaattgtttgaaaactatttgatgcatcgactaccttgatatccattcctgttatagatacttctggtgaagtatgaaatattgtttacaaaaatgcttagccccgcttagatcttgtggatagaggttgtcctttgcaataatgcctagcttaggggttatcctgagaaagatggcttctacctgcaagaatattttcattgggagcatggtggaatcttactacaaagttccctataatgctcttttcatccttaggaacaaaaatcaatcctaagggtggaagtacttaactcaagactttggttaggaacaggtgatactccacctaggttaattaaggattggatgcgtatgtaggcctgtatgatcaaggactatcttaactagccacatgccctggatatgggacagggtaa

SEQ ID NO: 43933 - DNA, 1461 bp, Zea Mays
tgctgaaagcctgaaactgctcaagtagcgcgcaacgacaagagcaacgaggaacatcagttaggactacctccacaaattgagcatcggttaccccattgcatcgtcctcttcggcggcgctggcgcccacaccaccgaaccctcttccagcttccttccacccgagcacgccggtcacccatcatcgccgaagccctccccctcctgcttcagctgtgctggtattagattagatcaaagtggaccgcgtcgggttgggtccagtcctttcgctgcggtgcggaaggcaatggtggggttgggatggagagtcggctcaaaggtgcagagatggggccggagctgcctccggggtttctcttctgctgcagttccgtctcagctggagaatgtcggattcatcggacttgggaacatgggttcccatatggcaaggaacttgatcacggctggatataaagtgactgttcatgatataaatgaaaattctatgaagaaattctcagaggatggaatccctacaaaacagtctccacttgaagtatcagaatcgagtgatgtcataattaccatgcttccttcatctactcatgttttagaagtatacaatggacccaatggcttgctttgtcggggcgaacgcttgggcccatggttatacatagattcatcaacagttgatccacaaacatcaagaaagatatcgacagccatctcaagatgccttttaaaagaaaagaaaggtaagttccaccatataacagtaaagacatagggcctgtttgtttcagcttatagattatataatctagattataatctagattatataatctggattataatctatggagattataatctgtatgtagctgtctggtagttcagattatacgtatgcagattaatgttctgtgagacacaatgacaacaatgctcttgtttgtttagttgtcttctttttttacggtttggcattccatcgattcatacaactatttgcaaaataggaaattaaaattatgccaaatacaccattggaaagctacaaatttcgtttgtaaacatcagtcatagagactggtatacaatggcagtctttataagcatttcatcgattatgtggcgcacacataaaccatatagtgagcagcatcaatggagctagctcctatggtaaatagtccctgctgcgacatcaatggatcatcaaaagggagttgtgtttgctcgtcggggttgcgtttggtcgccggagcaacgcttgctcgcggcgaggacaccggagctgcgttcaggctgcggcgtgaaagcacgcccagaggcgacgccgccattcccaaggctgcacccgctccaccgttgccgaagcattccgcagagccattgtagatgccgcgctcgccgacgccacaatgttccccacgtgaagaggatcaacccaggagagggactcctg

SEQ ID NO: 43934 - DNA, 4362 bp, Zea Mays
aacaagcatattgaatgaaatgaagttctgcgcaagaaactcagtattgacgattagaggaagaaccagaactcctcttacgaaccattatcagacctctagagctgctacactatatgtatgtgccttttggccctttacttgatggattgtgcgagcagtggcgcccctactctttggggtttggtacatgtggcagcagcgcgacattgagcaggagagcaaaataaggatgaaaattgcaaggattttgttgagatagaaggtgccaaacatgaggaaactgcacaggaaaagagccagaacagtttgatgagcagttttgctgagaaagccatgtctgtggcaggacctgtagttcccacaaagggtgatggtgaggttgatcatgaaaggtctgttaatattgctattgttgtgttcctttgtctttacttctttttctttttttttccttttttgtgtgaaaatgtttatcatgttctgactttctgcaagcaggcttgttgcagttctagctgaactcggacaaaagggtgggtttttgaggttcattggaaaaattgctctactctggggcggaattcgtggtgctatgagcttaactgataggcttatctcattcttacgtatcagtgagcggcccttatttcagaggattatgggattttctttaatggttctcatcctatggtcccctgttgtgattcctctactgccaacgcttgttcaaagttggacaataagtgcttcaacggggattatcggatatgcttgcattgttggattgtacatttctataatgatacttgtcatgctgtggggcaaaaggatacgtggctatgaggatccagttgagcaatatgggatgaatatttggtcggcgtctaggctgcgagagttttttcaaggtttggttggaggcgtaacggtcgtagggttggtgcactcgataagcattctactcggttttgcagcgtttcggacagggttctcttcatctttagctagaccccttgatcttctcaagtcttctagtaatgtgtttctgctagctcttcgagggcttgccacagcaactagcattgctgttgtggaagaaatggttttcagatcatggcttccagaggaaattgcagttgatcttggttactacaatgccattctgatatctggacttgtgttttctctaattcatcggtcactaccctcagtaccaggtttcttgctactttctctggtactttttgggcttaggcagaggacacaaggaaagcttgctgcacccattggcctacgttctggaatcatgactgccagttatttaatacaaagcagtggtgttttaacatccaaacctgaaacaccgttttggatgattagcacttaccatctgcatccttttgatggtgttatcggcttaagtatctgctccttgcttgctatctttttcttccctcaaaagcctgttcagaaggatacatctgtgtgatgaggctcagaagagtaaaacataatgctggagtgagcttccaacaaggactaatcaccatgcgtatgctgcgagcaatgaagggtttttcctaccatacatgttaaaatgcaatgccctgcaacttgctggcagcaaagagtatgtgctcggttagcttcttgctcatctgactgagggtactgctgattggaatggcttttggatctataactagagtatccaggtcatttgtacttaggcaagtgtgtatactactctatactggattatcgaaatgggggatggtttcttccctacgttgtaaggtggcggaggaacagatgatatgcctaggaagaggaactagtagatgataagagtttgcccctgatattaggcttcctctgaaatgcaggaattctagaggaatatacaggaatttcacaggaatcagtccattctcacagaaaaaatgcaggaaactgaaaaaaaatccccgcattccaaagggggcatcatctaggatttcttcataccgaattatcgattgacttcgaccacataccgtgcttttgttcatgtctttgaacacaggcacacccaaatttcgaggtttacaaggaaaatcgccaggcagtaaaccttcaatgcttttggctaggttttcattctgaaagtcatgtcttccgcgtcagcataatcctgtattcctgtataacctctgttcggacttcgtagtgctcatctgagttctgattcggccgggcaactgtaaattctgtagtgttcgagaaaaaactgtaaattctgtaatattgccaagaattatgaatttacatgaactttacaggtataagttgcccgcctcacttcaccggctcaccgtgcttcacctgctatcttccatggcggcggctcacctcttctgctccgcaccggccgcctatcgcgccgcgaacccacggccccttgctacccgtggccgcgccaaccccgccacgggaacgtatctggtgctcaaaggggtatggtgctcatgtgcacatttcccccgggccacaccatcgagaagattcttcccctgccgcgcgtcgctcagccccgatggatcgctggccatgctcggggctcccagtcccaggatggcgccaccgatgaggaagccgtacatgcgggagcactcttgcctcatcttcccgcccccgcgcggtcgacgcccgctggcggtcatcaagttcctcggcggcgccttcatcggcgccgtccccgaggtcacctacggctacctgctggagctcctggcgctggagggctttgtggtcgtgtgcgtaccatacaacgtcaccttcgaccacgaggccgccgcgcgggaggtattccagagtttccatgcctgctacgacgcgctgctcgcgtcggggctcccggaggccggcctcagcgccctggacatcgcggagctcccgctctactctgttggccacagcaacggggcactgcttcagctgctagtgggaagctacttctcagaaaggataccagaggctaatgccattgtctcattcaacaataggccggcatcggaggctgtgccttactttgaacagatagggcccctttttaggcaactgatgcctatgatggaggcctcgcctgtttactcgatggccagaaatgcatcaggatatgcatggaaagctctatttgatttagctggaggtcttttacgtgagtatgatcaagaagctacggtatctctgagcaaatttattgatcagttaccatcagtaatgaaccaggtttcagaaggtgtgtctgaatttaaaccaacaccacctgaaaaccgtgaattctgcaagaattcctacagtgtacccaatacattattggtcaaattcactgtagatgctattgatgatacagacatagttgaagatgtcctgagaccccgcgttgattcaatcggtggacaaataaagaaggtcatactgtcaggaacacatctaactccatgtatacaggatgtcaaatggcaagttggttcagaatacactccagcagatgccattgcacaaggattgaaatcattggctcttagtgaaacaagagtcctctcaagaacaattgctgattggtttacatccctttaaattttgagttattcaatacatctgttgaagtttggagttcttcttacaaaggaatgccttcatcaggtctcaacttcccattttgttgaagcagtccactattgtaatgagatgtaaggatacaatgtattatgtatggcacataagagcagtgcatttttgggctgtgctgagctggtcatgctcacccgcaggccctagccgtactacaaatatctgatcaagattggtggtttggggccttacttggatcgtagttgcaagctataaaaagcatcgaacccaaaagtccaagcagctcgatcctgtttgaggtacggtgccagcaaggttaagttggccaaatctgttgcacgcagacagcccaatgggggtttctgcaggctggcgaaagtaaaggcgtgcgataggaaatctgggaatgttttatattgccacattgtaattccacgttataggcgtatagctcaaatacatttggacggtttggaggtatttcgttggtgtgctggcagttgtttctgtatcgtgcatgtctgttgcaagaaggcctggatgctgctgacctgagaactgattgatttcgctgacgcttacagttcttgcaagggcgtgcaagtagaacaacccgtatgcttcaggaattagtattacacgaggttaacaaatgtaataggcttgggactttctttcaacagcatcactgcagtacgtaacctctgcaacaaatgggaccac

SEQ ID NO: 43935 - DNA, 1644 bp, Zea Mays
aaaagttagaaaattaattctgcgttagttactccaggcttaaggttaagcacctcccaaacacgcctatgagggccctcgtccggatccacctgcccacggccatctccaccggatccttcctccacacctcctcaaccgccgcctccaagaccctagtaccgaaccccaacctcgtcccgctccggctcgtccgccacttcccggccatggccgccaccgccgcagacgagttcgtgaagggccgcgtcttccccaacggcgtcgccgtcatcacgctcgaccgacccaaggccctcaacgccatgaacctcgaaatggatgttagatacaaggcacttcttgatgaatgggaaacaaatccaagtgtcaagtgtattcttgtggaaagcagctcttctcgtgccttctcagcagggcatggccgctaccgcattattacagagagaacactcctagccatgcctgaaaatggtattggcctgttcccagatgttggctttgcttacattggtgcaaaagcaccaggagggggtgcagttggagtttaccttgggattactggaaaaaggatatcatcacctgctgatgctatgttcataggccttggtactcactatgtaccttctgcaaatttgggttcactcaaggagtccctgctgagtgctaacttcaccaatgatcctcatagagacgttgagtcagttctgacaggatacaagaaagaaccagagtctgaaccacaactaaaaaagcttttgccatatatcatttcttctttcagtcctgataaatcagtggctgaatctgtggaagagctaaagaaatgtagccgaagtggtgatgctgcagtggcagaatgggccaatgaagctttagcaggaattgagaaaggcgctccattttctctttgtttaacacagaagcatttctctcaagttgcatcagcatatgggactagtgaacactatttatctaagctggctggtgttatgaaattggaatatcgcattgccttgaggtcgtcgattagaaacgattttgttgaaggtgtgcgtgctgttttagttgacaaggaccagaatccgaagtggaatccagccactctggaagaagtaaacatggccgaggtcgaatcagttttcgagccattaggggccgaggctgagttgagtgtgtgaaatatggcctgccacactcagttttcttatttgtgctgcaataataatgtatacaaaacagaaatgcgatgcccacagaaacaataaatgctgtgtcttcatgaactaactggagtggttccattttctcgaaaggggcgcgtgggaatctaaggtctgttgcttgctttcctgcctctgcctgcaatattccagccatggtaccaggtggatggccaaatactctagaagcgtttgccctgggcacttgcatgtagcttgatgtgagtagtgtaagaacaaccgggtacggaaaccgttgtctggccagcagatttcaaggcgtgtttagacaagtgtacaactgacgcgcacagatgtacggagtatatattatatgaaatatggcactaaaactcttttcccaggggctttgacgcaggcccggccgcggaaaaaagaaagaaaaaaatattacaactag

SEQ ID NO: 43936 - DNA, 1169 bp, Zea Mays
gttagagcttcactcccatcttacatatacatggatctcgtctcgtgtgaactgctgcggatcagtcgggggccataagacccttgcgcgctgcgcagcggtgggcggtggccggtggcaatggcgcccacgacttgcctccggatccccttcctccccgcccgaggccgctccgctaacgtcaacgcccctccgtcctggctcccccgccgcctttctctcaaatccagcgcgaccaacgggccgttcactagcgcggacgtcatgggggcggattggaaggggctcaaggttgcttaccagggttgcgctggggcgtacagcgaagcggcagcaaagaaggcatacccaaattgtgaggctgtgccctgtgagcactttgacactgcatttcaggctgttcaaaactgggtagttgatagggcagtgctgccacttgagaattcattgggaggtagcatacatcggaactatgatctattggttcagcatagtttgcacattgtcggagaagttcgccttgaggttcaccattgcttgttagccaatcctggtgtgaagattgaaaatctgaaaagtgttatgagccatccccaggactaggaattgaacatagagaggctgttgacgacactgctggtgcagcaaagattgttgcagaacatatggtccaggatactggtgctattgctagttcattggctgctaaactctatggattggatgttcttgctgagaatattcaggatggcaaaaataatgtcacccgttttatgatgctagctcgaaaacccaacattcttcgcaatgatagaccatttaagacaagcatagtcttttcactagaagaaggacatggacaactctttagggcgcttggtgtattcgcacagaggaaaatcaacctcacaaagatcgaaagtcgtccacacaaggagaggcctcttcgagtatctgatgactgttcctcactcttaaagaattttgattacctcttttacgttgaccttgaagcatcaatggctgatccaaagattcagaatgctcttggaaatctgaaggagtttgcaacctttttaagagtcctcggaagctatcctacaaatgtgaatgaaccttagaaaacactgcagattacatgatgaatctgccgtgtcgtcacgacggga

SEQ ID NO: 43937 - DNA, 4553 bp, Zea Mays
ccctttcgtccctcaccttgtcggagaccgacgcaccccccctctccgctctccgctcctcctccccacaccccaccccacccgctctccagtccacctcacgctcacactcccgcagcccgcccgccagccgccatcctgctgccacctctttcttccttgcgggggcggcaaccaggcgcacggcacctgctccctcccactcccactcccacaccgcgccagccaccagaataaagcagccgttgcggcgtcgcgtcggcgagcacagcgcagcgcagcgcgcagcggcccgggtgcatgaggagggggcggcggctgccgaggccgaggctgtgacgaaggagcgcggagggcgatgccgctggtcaggttcgaggtgcggaatgaggtggggctgggggaccccggcctctacggcggcggagctgccgctgccgccgccgccaccgccgccgcgggggaggaggagcccaaggcgctgctcgagggcgtcgccgtcgcgggcctcgtcgggatcctgcgccagctcggagatctcgcggactttggtcataccagattcgcggctgatgttttccatgacctacacgagcaagttatagctacatctgctaggggtcgcaaggtgctgactcgagtacagaacatcgaagcagcacttccatctctcgaaaaggctgtgaagaatcagaagagtcacatacattttgcctatgttccgggctctgattggcacactcagcttcaaaatgagcaaaatcacctgctagcgactgatctgcctcgttttatgatggattcgtatgaagaatgccgagatccgccacggctttaccttcttgataaatttgacaatgctggtgcgggggcttgtgtaaagagatattctgatccatcttatttcaagaaagcatgggatacgatgagagcagataagaatgctaatgtacaaagagaaaagagatcacagaaaattaagagaaaaggatcacgactaagggaaccatatcatggacaagccatgcctaggcataggggcactgaatttcagcgatcacttactgctggccaacttgttaacagcaggcagtttgcatctcccagcaacgatggtcagggtatctcagagcataagtctacacctgatgcaagatctaatcctgacaatatgagcagatcttcttctcttagttcgaagacacaactgagttcagtagaacaagctatcgatacaaaaccttctgcagtttctcatgagaatggccatgggaagtcattggatactaagttgcacaagcctggtggtctgccttcgcccgtactgcttaacagcaccactgtggatgatcatagtgaccatttgaagcaaggttccccgccagatggtatggttgctagatcaccttatgttaaatgggatgaaaagactgcaattatcatgtctacaagttctatctactgtgacgatgttgttatggatgaggttgaagatgcagaacctacttgtattagctctgtgcagaaagaaactgaccataagattctcttgaggtttcacaactagaactttcagattatacgtctgtaagcccctataaagagtcatctgtcatcactaatatccacgagagtggtgcagagggtgctcgtggagatccttgtgagattatagagcctctgcaggtccattcagccatacttgccaatgatggttcccctgtttgcaatgaaataccaaagagtaagccagatgatgatcttgggtattttcaagagattcctcaaccaggtttctccacctgtatggttattccatcaaacaaagagtctgctgttgccaacaaaaaccttgaaggtgacgcaaaaagtgatgatgatcttattgatggtaccgctgataatgttgtatcgggacctaagattgccaacatggtagttgatgaggtgggtttcaagatggcacctgctaatagaagttcacctggtgacccctctgatgactcatgtgtcattcctgaaagtaggcctcaggattatgctgtaaagagctatgagggagttggtgattgtggtgtgactgaagtgtctaagttatgtagtgagcctcttaacaaaccatcagataatatatgtgcaactcaagatgttcctacaaatacctctactatgtctgctggtgccagtgaagtgtctagttcgtggagtgagcctgttaccgaactaatcgatgacagatgtgcaactcaaggtgttccagcaaatgcctctaccacgtctactgttgtaccatctgttaaactctggacaaatgctgggctctttggacttgaaccatccaaacctccagtatttggtaatggtccaagggaggatactccacctggttttaaagaagctcaaccagtccattcaactgaattcacagaagtgcactgttcaaagccaactgaatcagcagctgtagatgtcccaaatggaaacacatccattaccagcagctttgtggaaaagcttgttggtattcgtcctggttctgcaaacctcaatagctcaggggcaaatcaatcagcagccagaatacctgatccaattcatagtcatacagatgggcactcagatttttcgtcatcctttgagcacaataacatgactggcaaacatacttcaataagcgaacttctagaatttgaggggagtgctgatactggcaccaaaatatactcaactgacatgagaaataacgctgtgtctgcatcaagcttttcaagcattgcacaaaggtttcttgctaatacacttcagagaagaacttccaaatatactgatcttcctatgtcttctgagagggcaaatgctgatacaagtgcaaaatctgaatctactctaaatcctgttgtagaaccaagtgaagcggtatttgcagaggaaactaagtttgagaacaaaacagaaaatggaatggatggattgtccaaaacatcaatattttctagccgccattactctgagaaatcgtctccgccacttgagtacatgaaaatatcttttcaccctatgagcgcatttgagatgtcaaagctgaacctagatttctgtgatggaaatattcatgaaatttctgatgatatgatgttaccgacatttcagttactttcagagtcttccattccacagccaggcagtggttctgagtctgaagatgacacctttggtaggtcatatagttattcttcatatgatgatctgagtccccggctatattcaaactctgaggcatgggatcaagatgatggaactggactggaggaacatgagttatatgatgattcaaatcagataggatcctcaacagcacctttatctagctacatgggattcgagcagatgaacttatctgacatgaagtcagatatttcacttgcaaacattggggatcagaatgtaataggcactttacaatcctgtactgttgaagaacttccaaactttgatacattgatgtccagaagtgatgatcaaaatggtgaaacccccattccacataatctggggaatatgacaccagatgaagatcagttgccaccaccacctcctctccccccaatgcagtggaggatgacaagacaaacaacttcactagaagaggaaacttgcattacaactaaagatatgcttagaaaaacttctagcctaccacatatacacacctctgcccaggaagaacactgtcctccaactgcaccattggatctacaagggcatgctggggaagtgggtgtccagaaaactggtggggtacgagaaattactaatcctcctagtatcatcgatataaaatcaagtttgcttcagcagatcagggataagtcagagcagctgaagcttaatggacatgaaaggtcaaaaaaagcagtaggcggtgacattaaaagcttagacgaaagggaggagttgcttcagcaaatcaggagcaagaccttcaatttaagacgcacaaacgcatctaaggcagatggctcatcacaatctacagccagttccaacgttgcagcaattttggagaaagccaacgctatccggcaggctgtggccagtgatgagggtggcgatgatgatacatggagtgatatatgaccacctaattgcagacgttcatggtagtcttttcctgtatattaagctattacaagatgaagtgattaaatgtgaataccatccttttcttcattgtaattagattttgcaggtcttgttttgtaccttccttagttcatattagtgaatcctaccgtaggtcgctgtggtcgtggaaatgtcagagcatttccacattatgtaaatgcatctttattatttatttatgatagtgagaacagctgaatagctgataaaaataagcatactaatctatctttttatcattgtattgattttttttgcaatgataataagatggagcatgatgttgcaaaaggttgtccttttagctgctatcaagtaaaatatttctaaagcgataggtctgcattaccttgccaagtcacgttttc

SEQ ID NO: 43938 - DNA, 2171 bp, Zea Mays
cgcgccaccacccaagtgagtgacccatcccctccatcggactctccactcccaccgtctcacgaccacgaataccgccgcccccggccctttcctcgtctcctcctcctttcatcgccaccatcgccgtcggtgcgccttgcaggaggtgcgagaggtcggtcgaaaagcacagccatggcggcggtcaaggtggacaaggccaccaacgagctgctgctgggccccgactggaccctcaacatcgatatctgcgacgccgtcaactccgatcacgggcaaggaaaggaggtgattaaagctttgaaaaaacgtattcaacacaagaatgcaaatgttcagtttcttgctttgacgagactctaataaagaactgtggggatcatgtacattatcaagttgtagagcgcaatatactggaggaaatgatgaagattgtgaagaaaaaggctgatatgcaagtgagggataagatcctgatgctcttagactcttggcaagatgcatttggagggcctggtggaaagcaccctcattattactgggcatatgctgaattgaagcgatctggtgttgaatttccaaagcggtcacctgatgctgcatcgatgtttatttctccggtcacacagccagaatctttgccaacatatcttcaagcagggtatggaatgccagttgattcttcctcaaggcttgatgaggcaatgtcatcaaatggagctcctctgagcatctcagacttggaacgaatgctgggggctgtggaactattaaatgagatgttgagagctgtcaatccaaatgaaaaagatgctgccaatgatgaaattattacagaacttgtgacccaatgccggtcataccagaaaaagatcatgagttcagtaagcttagtaagggacgaggacctcttgggccaagctcttgatttaaacgatagattacaaattctgcttgagaaacacgattcaatcgcatcgtgttctccttcatctgctgacgtgatagacgtggtgtgtgaagtgccatcgggaacagctccaaaccaaggaacaaatttccctccacaagctgcacttcgtacagccatagtaccgaccaatgttttggacgacgaagatgaggaaaacgaagacgacgagttctctatgctagctcgaaggaactcaagattccagcccacaaacacccagagcacctcttcaccaaccgtccatgatgaaacagcaagctctacagcctctgttccctatacagcatcgccatcagttgcgaacaacgcattgcctccgcacgatcctccagccccgccagtgagggtctctccagaagagcaggtcatgagtgaccttctcgcactcaccgtgtcatcaaacccgtcaccatcctcctacaccccggtaacacctgaaccaggccgcctgaatcaaagcagcgcaccaacaggtgagcttccgcgggcttatcatggagaccaaggacacgtgtctgcaccttacgtcgctccgtgggctcagccgcagtcccagaccgcaggaagtcagcaaccgacacgcactcaggcacaggtatcttacagctcgtatgcttacccaccgccgccatgggcgtcacaggacagcaccgaatcgaacccttttgtagcggcagcatcgtcatctcagcaataccagtccacttcgagaacccctaccatgccaccgaacttgaggcctctactacagcagtcgcattcttttggagtaccacttccaaccgcgagtctggactcgccaataaatgggaacctgaagcaaccgctgtctgctggggctcgcaggccatcttatgtttcttccaacaagttcttcgacgacttgtttgagaggaactcggatggtagcctgaaagtaggcagcacaaggcacagtgatgtctatggaaaataaatgtcgttctcttgtcctgcctgcgtttgatgttatcagctgcctgcatattagaacgatttagttgatgcttctggcgaacttgcttgcctttccataaataattttgccaaaccaaactatgtggaagcttcagcctatgagctgtccactgtccagacattttgaatggcaaaaggcgattcttcctaaattgtgtaatgaaacgggtttgcttctaaatatagtgttctttagagc

SEQ ID NO: 43939 - DNA, 3615 bp, Zea Mays
gtttgccccctcgcagagaggttccccaaggtctcattccccacgagcaggatctagggatcattagtgtttggcccaaaaaggcgccaacacactttttggtgaccccgctggggatgagaggtgtgacctaacaagattggccatagatggccggttcaaaggatcacttcaatatctccctaagtaacatcgtaaagctgactatagagaacctgccggctaaagataagaagaaattcgaggactacaaaagataaccgaatgaggccaaggcgaagtacctagcgcacttcaaggtggaccgacatcaaaagatcatccggcaaggggaatgcgacctggcatctctttgacctaccgcacctgcccctaatgtaagtaaaacagatgacatacaatctcttaggcattatatagatggcagcgagatcaattgatataatacatagagggcatgagcggaaaatttagggaaatggcacgcatatttgaaaaatctgtcgtttccaatttcccatcacatgagattgatgttagaaccaccacacgccaatcatcgactgtaaacatgcagtcacaaacctagccatcttctggcatgccgatgaattcatacgccaggcaatcgcagcctcctccatcgatttgggataaacccacaattctgcgcatggccggactgtctgggcctggcctcggcccacccgacccactggaaggtggttgcagcctttatggtgaaccaccgagagccgcgcgaggaccgtcatgctcctcgcaggggttaacagacatgctcagaccatctagctatacgcgcagactgtccgagtatgccggaccgttagacaaagagtacacagaacatagtactgcgtgtcaggcacaattctcatactccaccccacccgcagcgcactgtagtcatagcatgccaccacccgcgcatgaggccgaatatttcggtccctacgaagcaagaaagattcaccccataccacacgacaatgggatgcaatactggtatgccttaggggcctttaccgaaagccacctttgaccatcctggtgcaaaagaccgacataaggataaccggccacctgagcccatgtcccgaagaccgatgggttacatggatgaagttcgggaggaaataactgaactattccaagacaaattaggagtcagtgtgtctagcccatggcagtcccattagaggccatatgacccttgatgagacaccgttccgtgccccctaggaccagtttgctagatttctccaaattctcgggcaagggcagtagaagtactcgcgaacacatgggccaattcttggcacaattggtagaattggccgacaacgaagttttctgtgttcgcttgttttcattatctcttactggcaccgcatttgcttggtatgctgccttaccccctaattctattgattcctagaatgatttagagcataagtttcatgagcacctctatttagggactgagtcatatttagctgatctagcatcgctccggcagggggacgaagaatcagttaatgattatctccagatgttccgggatactaaaagtcgatgctttcaggtccaccttacaaataggcagctataggggcagacctagcctaaaatgtgagtgggggcccaacatctgagtgagggcctaaacataggcatactaactaatgagcctttgtagatacaataaataagataaaagattcaccaaaataaaaaaatgagtggggcctatgcccccgctcagcactacatgtgttcgcccctaggcagctagaagggttgctcttaatgggttgcgctcatacttgaaagaaaaactagatgacatccagttctttttgctaacttaggttcatcagcagactttggtttgtttgagtcaaagcaaagaaccgtctcatcatgatgagcattatgacaatagtagctcagatgacgagcaaaaggaggtatatatcgctgagcttgtttggcccactcaggccaaacttttgacttgctcttctctacaaccagttcagaaaaatcggcaggagaagctaagttcacatttaatgttgctaagtgtgacaagacatttgatgaattacttaagtttggcaacattaaattgtctaatacaattccctcggcagaagaattgaggaggcgtgcttattgtaaatggcataactcattttctcatgccaccaatgattgaaatgctttctgtcggcagatacaatcggctataaatgaagatcatttggtttttcaagaaaataaacttaatagagagtcgttctgaaagggaaatgtgccctcgggccatttctaaatgttttggtgattaagtgcccaacacatcactttgaactaacatgcctcctatgagtatgagcacatggataaagaaagcaaattgaagtgatcaagtccaaatgaggtgaattggaggagtagaagtgcaacttgttcaaaaccaacatggacacatggtttgagtgtttggatacgttgcctataccctcatctatgtttttagcactttgttttggctactaaccttgttatgcaaagaaagtgcattttggacttgaaatggagcatattgcaaatccttttggagagataagaaaaggtatgtgtctagcacttagtcaattattttagtcgctaactatgtttctctaagtgctaggaaactcctcaagtcgagcaaagttggagaaaacgagtatgcctaaaaaggaccaaggttgggccagtctggggtgcaccggactgtccggtgcctggcctggtcatcgggtcaactcccccatggcctatggtggccgtactggctgctctcggtaaaagagccaggtgcgctggctataattcatcagactgtctggtgtgcaccggaatgtccggtgcgctaggcggccaacagatcttgccagcgccaacggttggcgcgcgttcaacgacgaccacatggtgaccatgtcaccttggccaatgttcagcaggctgcaccggactgtccggtgcgccaccgaactgtccagtgtgccatttggctgagggcggcaacgatcggctcggcttgatatggaaggagattgtgcactgttggatgtctgatgcacccatggacaaaaggcaaccaggccttccaaacgaaggagcaatggctcccttggccctttaggctataaataagacccctaggtgcctctacctagtacccaagcatactttgagcacacaacaactccgagatttcacaaccacgttgttgattcattagagagagatttgatcgctttctagagctgtgactctgtcgttttgattcttgtgctctcttctagatttgtgtgcgtgttgttgctgcgattgtgctcttgtgtgggttgctattccctcccttactctagtgttatttgagatcatttgtgtaagggtgagagactccaagttgtggagattcctcatgaccgggatattgtgagatataaggaagaaccatggtactcaagttttatctttggatcacttgagaggggttgagtgcaaccctcgtccattgggacaccacaacat

SEQ ID NO: 43940 - DNA, 2138 bp, Zea Mays
taaaatatagggcacacacttacatgtcaaaatttattattcaaaggatgacgagagtttgcctgcaaccgatctaaaggttagagcgagcggcatgtgatgcggaaaaatgaagtcagcaaggaatacttcttaaaaactgtaaggaatattgttggtgataaaagctgcttcacgatatcaaatgcaggcacaacgaagccctcagacaaacccaagcaactattctttatcaggtcaagtttttggtcagcagactgctcccagtggttctgtgataggagatgaacagaagggatatccatgggcgcacaccatccctatgagacaagctattgccagcactcgaccacctcaattttggccttcctcgtctggccaaatgcggagtaatatggtacaaacaatgcagcatcacatgcagtgaccacaaacatcttcaccagtgtttggggcaaatagtattcatgcacgtccatttccgcggccagttggaggtccaactgcaccatttagaccacaaatggcagattccaatccaagagcacacttgattcagggagctgcgaccacagtatctgggagtgtgccaacacgatccatagtgtctggaaatgcgccagtcaatcaagccttgggatcttcaaaagtcagtgctggcatggaaagccagtcacaacaattgagtgcgcctaagcctttagctgcaacaagcttaagtcagactcaatctcttggcattcaagaagagcctaaaattcaggggaagaaacaactattattcgagagtttgcctgcaaccgatctaaaggttagagcgagcggcatgtgatgcggattacgaactaaacttaaatcaaatacttcagtattggtctctagagaggaagctctgccaaccattactaataactgagaagatgttcgcgtacagggagacggtgttggaggaggcacatcggggcatggagctgcgtgagcactgccgccatatagttgacaacgatgaccgacactatagattccattctctgtgtgtacaccaaggttactgcgaccgtgatgggcatctaggtgctcgaaccattagttgggctaaggaacacggagcagcagcaacaatatcgtaaggagagtgcagacgttggacaaatggtatgccatatcttcagttctcttatgatgcttcagcgctgcatcttcagttttctcggctaaaaagagatcatagtcaatagtatacctatgtgtgaaatactgtcaaacttgcatggtatatggacctcagaaagtataggaaagcgctatgctatttgcatgtttgctgggagaaagaaaagatagatgaagggaagctcatgttcatttcagcaattcagcttcaaccatttggcattcatgtaatatttcataggagttaaagggcacatacctaatcaagtctgtgggtctccaattctgaaatagaaagataatttatgttctcatctttctgaaatgaacaagatgactggcttatgggttaaggtttttttatagagcaccatgacttatcaggtaaagttatagttgtgcacaaaatgtcattttttaatccttaatgcgtgtgctattcacacctgtcttcttttgcagttttgtgaacaaccctaacttatgtggtcctggcaccacaaaaccttgtcctgatgctcctcccttttctccacctcctccatacaaccctacaaccccgatgcaatcaccaggaagtagctcttccactactggagcaattgttggtggagtggctgctggcgcagccttgctatttgctgttcctgctatcagttttgcctattggcggcacaggaaaccacaagagcaagcatttttttcaatgtatctggcttcaaagttagtctttgattattatctttctcgcaacataagggcaaacaatgtttatatgtagcaaacaaatacggtttgcaaacgttttaggaacatgtttttacaataaagatatacttatagtttcaccaatggatggccaaaaaatacaaccttttacatttgtcaaccttttagttaaggaaatatagaacaacagcaagtagattttgataaacccattagaatctcaatataaatataga

SEQ ID NO: 43941 - DNA, 678 bp, Zea Mays
tgcagaacaagattatgtggtggtgcagacatgtccttagtgacatcaggatagcattctgcacccatgatccaaaaatggaacaagagaagctggagaagctcgcacgcaagggccccagctcaggagagcaaccttcgtcgactacagtctctgcagcaagtgatgtgaagactggggctgggccaacagagtcagcgtctgcaaacgtgtctaccgacaagaacaggaactacgctgtcctggcaggcacaattgctgctctgagtggcctgggttggtatctattgtcaaagcctaagaagtcggaggaggttgtggactgaagagggggttacgaatgcgagctgtggatggttggccttatatttcaccatggtttactttctgcgcacaccttctggaaataattgttgaaacatacgctgcagtctgcattacttgttctgaggcctgttgcaacaccgaacattgaagtctgtactcgagacgttccgtagttctctccctcgcttgacaggttgcaaatgttgagtgatgcttgtcctacgtcgttgctggagaagtggagaggtttttttggtactgatgttttgaatgtaaactcgttgccactggccagcacacatgacgaagagcattctgtgataatgagaatgtgttacacgcaaaaaaaaa

SEQ ID NO: 43942 - DNA, 619 bp, Zea Mays
acttctgtatctgctgctcccctgccccttctggtctcttctagcccgccgcagggggagcacacgccggtcaagggcggctgagtgcgcgacagagatggaggctccggtgcccgcgccggctaccatgaatctgggggcaaggtggcagaggatctggaggcggcgattgcgcggcttcgcctgcctgtcttcttgctgccttcttctactcgtgctcgcaccaacaagaggagcaagcatgtagctgatgcccccataaagggaccagagggaaggtgacgccgggagacaggggaggagacgcagtgaccatgtctcagatctgggtgttcgagtactgctcgttgatctggaacccaggcatcacccacgacgcctgcgtcgtcggcttcgtcgggactaccaccacgtcttgtaccaaggtaacctccacactgcttacctgcttgtgggtgcaatccgtccgtcttcacggtcacgccctcaaattatttttccttcagcggtgggtggacagggagtatggaacacaggggcacgccgcagttccccgggaggaccgtcacgctcgagcaccagctcggagcgacttgcggttgatgacttgatgttactc

SEQ ID NO: 43943 - DNA, 2149 bp, Zea Mays
gacgctgatcgtgtcgagagggacaaccacacacacacactgacacaattccctctgccgcacgctccggcgggaaggcgccttctccctccctcctctactcttctgtctttctccaatggcggcgattaccgcgccgccggcccctcccccggcctccacctcatgccgcctcctccgccgccgcgcgccactcacccgcttcgccgcctcctcgtccccgtcctcccgcttccgcccgtcctcctcctccttccctgccgcagccggcagcagcagcggcggcgggggcgagatcctccacgtgtcgccgcctcccccgcccgccgcgcccccgggggttcccgtctacgtcacgctccccgccgacgccgtcgacccggggggccgcgtcgcgcgccgccgagccatgggggcctcgctcgccgccctggccgccgccggtgtcgcgggcgtcgccgtagagctctggtggggcgtcgtagagcgccgcagccccggggagtatgactgggccggctacctcgagctcgccgccatggcccgacgccacggcctccgcgtgcgcgccatcctcgccttccaccagtgcggcgccggcccgcatgacctgccctggattcctttgccgcaatgggtgcttgaggagatggataagattccggacttgtcatataccaatagataccagaagagaaacaaagaatacatatcactgggatgtgatattcttcctgttctgaaaggaagatcacctatgcaagcttactccgacttcatgagaagcttccacaatacttttgaagattaccttggggacacaataacagtctgaagtacaagttggaatgggtccaggaggtgagcttaggtatccgtcatacccaactgagaagctaaatcagccaggcagttcatctgaacttggggaatttcaatgttatgataagtttatgcaagcttcgttgagtgctcgtgcacagatttttgtgttacaacagtggggcaatggcggttcaactggcacagatggttcacagcagaaccttgaagaaacgagtttttttcgcaccgatggaggctattggaatacaccttatggtcacttttttcttaagtggtattcaggaatgcttctcctccatggagagaggttatgcatgatagctgatgcaatcttctctggtactggtgtgaccatctcagggaaggttgctggaatacattggcactattatacttgttcacatccatctgaactgacatctggctactacaatactctattaagagatggctatcttcctatagctcaaatgtttgccaaatacaaagctacattgtgctgcagttgtttcgacctgagggacgcagaaagaacaaattctgagagcagtcccgaaggtactctccggcagcttgcaggtgctgctaaaatgtgcaaccttcctcttaatggtgagaattctgcgacaaggctggatgatgcatcactgaatcaagtgataagaagctcaaggctctactcaggccgtacttcaggaacatctttttcctttaactatgttaggatgaacaaaagcttgtttgagtttcacaattggaatcgatttacaaagtttgttaggcagatgtcagatgccaggacctttctagcaagactgtatgtcaggagagggcagcaatacttgtcttcaatgtcagttgtttgggtggttagtcgggcttgtgcatatacatgaaagttgtcaaaagctattgcggataatctcagccataaatggttccaccactgtggatggaaaaggtttgctcagtatatggctcatttttagttgccagaagggcaggcaggcttatatgctgaaggctgtactgatttcatgcatatgcatgtattagtttcatgcatatgtcatcgctgaacaaaagtttatagttatttgttgtaaagtggcagactggcagtgttttgctgccaacaatattgaatcgcacgagggtcctgtttagccattttagaaataattagatggagcttcatgttttcccgttacaatatgaatgctttcaaactatatctgcctatgaaaatatgtatacttcctcttgtcacaaatgtcaaatataagtccatcttagtttatcc

SEQ ID NO: 43944 - DNA, 1862 bp, Zea Mays
gctacctcattgcttcgaagttcgaaaaacgattgctagaaacatggttttttcaatgatagacgcagatcgagcgctatttaatttgggacctaacaacgtacggcagagctactatagctccctgtgaaacacatgggaatttagaagcacacgattaagatctctcggagaactctagctagctagctaccattctaatctctactgctaattaagtacctattgtaggcgttcacagccaaccgtggtgcacgttctgccacatccaaaccgtccaacccgcatccaacgccgctgccgcatcccgcgtcgctcccccactcgtccctgccgcagcccccgcgatccccttcccacgcatggcgttcctgccgcagcccccgcggtcctttcggtgttctcgcttctagcgacgacggcggcggcccagggaaggtaccgcgcggtgttcagtttcggggactcgctggtggacgccggcaacctggtcacggagggcatcccggactacctcgccaccgcgcgcccgccctacggccagacctacttcggctaccccaccggcaggtgctccgacggccgcctcgtcgtcgatttcatcgcgcaggagttgggcctcccgctgccgccgccgtccaaggccaagaacgccagcttcgcacagggcgccaacttcgccatcaccggcgccaccgcgctcgacaccgacttcttccggaagcgagggctcggcagcaccgtgtggaactccggctccctccgcacgcaaatccagtggctgcgagacctcaagccatcgctctgcagctccgcgcaaggatgcaaggagttcttcgctgagtgcctgttcgtcgtaggcgaattcggtgggaacgactacaacgccccgctgttcgccggcaaggacctcagggaggcatacaagctgacgccccacgtgatccgagccatctccgatggagtcgaacaactgattgccgagggggcaaaggatttgatcgtgcccggagtgatgccatcagggtgctttccggtctacctgaccatgtacgttgaccccaaggaagggcatggctcgcgcaccactcacatgaaacgtttggtcggggagcacgacagctacttacgtggcacgacagggggcgcctgcgtgccaatcgccctcagcggctcgaggttcctcgcacttcaattcacaggtttgggcggattggcaggttggtcttgcgaattgcaaccagcagagatgatattgaagtcgtggctgtgaatgaccctttcattgatgctaagtacatggtgaagacaattacctatcctctgcaatccaactatatgtagagatcgtcatcaaaagaaacctcaggctttgtattcaacaggacctttacaaacgactaacttagatcggcgagagtagagaataaggcaaggatctttgagcagaatgccactgatagtgagtgcaaggtcgatcctaaagtgctctccaagctatatgatccgtgagtgatgccacagaccaaggatgtcgaagttgagtacctcctgcgctgccttgactaatcaccgattagctatagctgtaaattttatgtatgcatggtttcagttgcgctcgaaccaattgtcttgaccttgaatggacattttgatgtttatttcatctgatgtgtcatgtttcatgacgtagactttcgtttcttgtgattgatttatagtgaacctgtaagatgtaaaataacctttatgacagaaccagctgcaagaatagagtattttgaggaacctttgttgaagtaaatgtaatcgagtttcctagcaatcttattcttgctggtatcatatttttttgagct

SEQ ID NO: 43945 - DNA, 2205 bp, Zea Mays
gaggaacaaagtttttgtgcgcgaaaagcaacgttctgtgcacattttatacatacaatgatataaatggcactgcactcttcttagtgacctgtttgatcatgatgtcgtgctacaaagcatattgctggtaccagctgcctacaaaatttcctcgagctgcctatcaaccgattattccacccaatctttacacacccccttaaatgtacacaaaagaataactcaaccagccaccaggaagcagcatttgccacttccgagtttgaacagaacgaccttgtgtactgtacacacaaaaaacatgcacaactcagatagtcagatcaaagttctttaattgtgtcaccaacgattgcatgctctcgagcttttcgctaagctgcctgatgtcctcggcacggttttgatcctcagtgctgcttgcctgagaaatcagtgccatacatttggccttggattcggaaatctcgccttgtaatgaggaaatagttgcttccagtgtggttttcgaactcatgacgtctgcaatggcttgcatagttggagtccgaggagtgcctatgctaccaaaactgttcagcctgctgagcctcctgggtgaaaagatattgtccatgcctccacttcctgttacgtagttgttctatagttccttgcccaagagatttgtcaagtttaaggagacgaagaattccagcagtgatcctccccattgcatcagcctcagatctgcaaagcatcacaaggtgctctagttcttcttttgttgcaaccgcctcgatctgcaaagctcaaatggataaatagttcagaaagcagattcaaatcgacaggtttagacaattgactaaaatgagctcattctggttctttgatagaaaatttgacattatccattgtccatttggcaccctcaatctcgacttcgccaatgaccatggtagcttcaacatcaactccatggtcaccaacataacttgaactattaaaatctctgcccatctcatgattgtttgatggtccttttttattgcactgatctctcagacgaggttttattgcctgcaaaccttcaattccagtcaggaagtaatggtggtgacgtcctgctctcccagccctccttgctcgcaacgaaccaccaccagcagcaattagggtaaacaatggagccaaatttgaaggagtggtagtaggtggggtaggaaatgcaggggccaactatgcagggagagtggtggagcaccatagtcgaatctcctcgtatcattagacaagggaatggtacaacccatttacttggactgctaagtgcaaactatgcagggagtatcgatgccaagacatattatgaagtacaggaacacgagcacaagattattaagggagttctctagataataaataatgtttaagcatgtctagatggcagttctcgttagttcagctctggtgtatgcataacatggaatcgaaagaagatctccaaccgtttaagcatttaatgacgagaccgagaaaatgacaccgcaaatggcctaaactaaaggcttcgagcaactaccaataataaaatatcctaatatcatgttgataaattatggtaacaggacaagccctactacactaatctattcacatgcatagaagctgacaagcccacacagggattggttataaattaaaacatgaaaattacagatcaccaatcagcacaacaatcaatccattcacgaccgctatctatccgaatcatctgcgatcatatagcgcgacctaagtgtctggaacagaatctgatggaacagggcgacaaccaaaaaagccaagggaccaggggcaagcatgcaatgttaacctgtagagctcctcgaaggagaggccgatgcaattgtggttgcagatctcgtggatggcgtcatggagcttacgccacgacttgtcgaagaacttggggtcgaactcaatgtggtgttgaaagcgaatgatatttgggttgcgcctcttctggccgtcgccgctgtttatcatcttcctccattcctccacaaccgccgtcgatggggtcgatgaccccatgctccggcgaggcactggaatccaggcacattcctatcgtgtcatatttatggattaacctcacaaggtatctcaatggttgaagctattacaattagcagaatttgcaatggaatgagaaat

SEQ ID NO: 43946 - DNA, 2178 bp, Zea Mays
tgcaggtgcgctttgcaggctaccaccacgccaatcatttgccacaagcccacaagagtagactagttattataaaagccagagagagagagacgggaacggataggaataggagcgggggagtccgaggataggcaactcattgcttctgaatctctctcctcgtcgcgacgagatcctctgcatctctacttccccggggaagtagctgctagcgtgtgggtctgacctctcctcatcccgagttcttcattttcagagtcttgactcttcaggcccagaggctccgcaatgaactttttggaatctattgcggtgaatggacacagagaccgacagcatggaggcgtcatgagcagacagagcatggtcgccgtggagcagctcaccggccctgccagtgccagacccgctcacacgtgcgctgctcagcctcatgctcaccagctgctcagtgctcgatacgatcaccgtggcgcgtgcgcgtctcaagttgaattaccggaccggatctcgccatccaacgcttccacgttctgcacgagcatgtactcgtcgtcgtcgtcgtcgtcggcggcggcggattcctccaagtcgtgccggcgggcaggcgctctgccgttcctgccccatcctcctaaacgtgagcagcagcagcagcagcagtcatccagctctccatcactgctcgtctgtactgacctcggcaacggtggtcaagacgaggctgaagctgaacatccggctgagctcaaggacttcctgaacctctctggagaagcttcatggagaggcggtttccatggagagagcagcggcgtcgctttcagattcggagagcaggtggagtttcagttcttgtctgaacagctcgggatcgccatcaccgaccacgacgagagccctcgactagatgacatatacgacaggccgccgcaaacctcttcttgtccggtactgtcttgctccgaccaagaagaaggtctccagagggcagggtctcctgttaaagctcagccgagttcatctcgagctgcatcatgtaataacaagccaagactgaggtggactctggagctccatgagcttttcgtgaaggctgtcaacaagcttggagggccagaaaaggcaactcctaagggcgtgttgaggcttatgaaggtagaaggcttgaccatctatcatgtgaagagccatttgcagaagtatcgttttgccaagtatcttccggagacaaaagaagacatgaagtcctcttcagaagacaagatatccaaatcagagatgcctggaagcaacgctggcagaaagaagattctcagaagcttacaagtagcagaagctcttcggatgcaaatggaggttcagaaacaacttcatgaacaattagaggtgcaaaggcagctacaagtgcgcatagaagaacatgcaaagtatctgcacaagatattagaacagcagaaggcaaggaattccttatcagctacgacaagttcaatagaaacagagctttctgaatctacaaaggaagagaaacctgagacacaagcggatacttcttcagctcagttgccaaataaaaagaactcagatactgacatggaatgactcataaccaaagaactcattatgtatgaacaactgaacatgttgactcgccaagcactttccttctctaaccttgtagaatacaaacacttctgcctagatgcttctctcttgtatcatcatccctagtgcttgaaagagttctagctagccattgtatatgatttattttcagatgaaaatgctacaaaaaaaggaggaggaccagccattcatctattccatgtgtcactaaatttatttctgcctgtaaatgacgacagctgttcacagaagaaagaatgactttctgatttctacagtttctgcgtgtatcgtaagaacaaaactgttgcctacacaaactggggatctatgtagaacttcctgtgtaattttctgcatacctacagcagtgggtgtgcttgaatggccccttcaggtgaggaatgctgaataggccagccacttctgttttcttcttcagtgaatcgcaggagctcctcttgccctcttcgaagaggtttctttggagaactagaagtatagtcccatcccatcattgaaggtgctagtttcgaagaggctaaa

SEQ ID NO: 43947 - DNA, 1526 bp, Zea Mays
gaaaaggaaacagaaaaaaaaaatcacaggagaaaccgatttcccccttttttctttattttcttcgtcctcttcgtctcgactcgccgcccagtcacctcaaatcccttcgatccaatctccaaaccctaggcaatccaacatcaaagtattagctgcccccttcgtcaaaccgcggcggcgcggccatggcccacggcggcggcgccgggaaggcgaaggtgacgccgaacctggcggtggacggcgagggcacgcgcacgctcaaccgcactgtgctgcagcgcctcgacccggccgttgaggatattctcatcaccgcggctcacgtcacgctgtacgactttgacaccgatgtcaaccagtggagacggaaggacgtggaggggtcgctcttcgtcgtcaagagataatctagttgaagatctcttgggagattttgaataccaactccaagctccttatattatgtaccgaaatgctgctcaagaagttataggaatttggttttacaactctcaggagtgtcaagaagttgcaaatctttttagcaggattctgaatgctttctcgaaggtgccaccaaagccgaagattccccctgttcaaagtgaatttgaagaggtggaagcagcacctgtgttggttgatggccctctagaaccgcaaacgtcaaatatcatgtcaactactactcacattcaagaggatcctttatctgcatttttcagtgcagctgcaaatgctggtggcaactctgctgtagctgttgcaaggcaaccaattcaactttttggtgctactccggtggctacacatgcagctactagtatcactacaatacaatcgccaggcttgcattatttgcttccttcacaagcctcatcggtttctgggatgcctgctgatgctcatggttctataggaaggtccacaaaccttgtaaatccatcacttttctcaccattgacgtcttcacagacaacaatggtgtgcactaattctgtagtagcaattgctccacctcaacatcctcagactgctcagcagccgcaaagtgctcccttgcttcagccttttctattacctacggcttcaccatctccaccatatgggactccattacttcaaccatttccgccacctaatccatcgccatctcttgcgtctgcaccagtcttgagcccagcactgtctagagacaaagtccgagatgcattactgagacttgtggagaacgatgaattcatagatttagtctacggcgagatcatgaacagacagtaatggattttcaaggtacagtcctctccatcaggctagcttgtgcttggactctgtcattatctgttgtctaggctatttcaagttatcctgtaaattcattgatgaaatccttcggtttgtggagcttgtgctattaatgtacttttgacatttacaaaatctgtgctgtgttcgtggtgcagaaaagttttgttctgagtattatcttgaaacttttgttcaaccaaccttttgagaag

SEQ ID NO: 43948 - DNA, 364 bp, Zea Mays
ctcgtgacgctcggaagcagccaccagacttctttttccttgctctagcgtgtcgtctcgtggagctgctgaacgtcaccgtctctagctcttgcatcaccgtgcctgcgctcggctctccaaagccgttgttgcctactgcacctgctgctcgctctgcagtagtgttagaacttgctcttctgggcaagttgatccaacggaggaatgaaagcaacataaacaaagttttgactccagatagcaatagctctgttaatccagcctttcaaggacactgtacaaagttatttataggtgtctgagtgcctaacgtcttggagtaaggacgcatgtgccctcagtcgcctaagctatccccgga

SEQ ID NO: 43949 - DNA, 380 bp, Zea Mays
tgtaggaggaagaggcttacgcggacgcatcgacgcttgtaggaaagctggagcaaaaggtatttgcaatcctaaatattagaaatctgagtacattcacaacatctgatgtggtaagctggcagtctgattttctacaactgcaggaggtaatacttccacttattcttagagtatacaccttgggcttgaggtccttgatgcacaccagaacgtggtagatgcagtgctgctgccaccacaacacctcgactgatgcgtccaccttgcctatgttgttcataaaaggatacagatacaaatgctctttgaattcttttcatattgtgatgtgtctaggtgcacaatttatacacgttaaattggattgcatggggaca

SEQ ID NO: 43950 - DNA, 496 bp, Zea Mays
atgctgctccggctgaagatcgtcgtcggcgtccactcggtggtgcttccggttcctgttcgaggcggctttggccatggtgcctgctacgcggcactagagccctgttggcgccgcagccggaggccagcgctagcggcggcgggtggcctcgtcacgaggcggccgaggagcgccacggtggtgatggcgctgaaggaggagcctgagggcagccgtcgcggcttcgtcggcagtgggccgagctgtgaccctgggctggagatccaagtcccctcagatccgttccttctctggattaggaaggagagcctcaacgtgggggatcacatctactcctggaaggcgacttgttttttgagttttcaggttgtggatgctaaagttattcatctgggctataacaatagctgcatatttttgtcacttaaagatgtaaagtttcatccaagtatatcagagactacacactacgctttggacagctttccacatg

SEQ ID NO: 43951 - DNA, 2027 bp, Zea Mays
agtcgcccgcgtctcccacccccgcctcccccgccgccgcgctcgccctcccccgcctcccccgccgccgcgctcgccctcccccacgacagccgccatgcgccctatctccgccgtgcttgcgcttcctcacccgcgcaatttgcacgcgctccccccgcgacagtcgccacgctcgcacgcactccctctgcaatagctgtcatgcgccctatctccgtcgcatcccgcccgctcgccacgcttgattcctcctttcaatggtgcccacgccgtccaatcccgcccgcggtccttccccacgcggatcccccacccctcctccccaccgccgccgcaacaaatccgcgcacctcgatctgctcaagtgagcgtggctcaacgagaaggccacgtcagatatcctcagcttcgaatcgcccctcgcgttacgtgtccgcgagcagatccagcacctcatacgctcttctccctcccccttcttgaccacgttcctccactcccccccatagctctgggatctggccatggctccctctcctggtgtcgtgtcacccaggaggcggcgctcgatgacttcgtcgacgatggcgttgacgacctggtggtctcgctctaccagatggacctcgatctcacgctcttcctcctccgctcctaactcctcccggagaagatcaagaagtacacgatgcatatctctagggccacggccgaggcgactggtgaagttgcggcaatctgatgcgggaggtggccgacctcatccttagcttccctgacgagacgcccgtcgtcgtcctctctgccatggggaagaccaccaataacctcctcctggccggagagaatgcggtgagctgcggtgcccccaaggcgtccgaaatccctaagctcgctgtcatcaaggacctgcatcttaggacggttgatgagcttggtttagataagtcgattgtttcagagaaatttttgaagtacttctggtggtgctggaacaagttgaaggagaagactgatgatgatattcccatgccagcctatttcaggttcctcgcgctgctcgcattcaagatattttctgctgagcaggtagatgttgctgttctcgaggttggcctaggagggaagtttgatgcaactaatgtggttaaagcacctgtagtttgtggcatatcttcccttggatatgatcatatggaaattcttggtgaccaaatcctgttcttggtgataaacttggtgtcgataaacgggttgttagttctcatgaatgtcatgttgtctcgaaataaagagcttctgtccgcacctaatcgcctaaaatggaaatgtttgactcattgtttaattcggggggaagctgaaggtggtctgatccggtaagagatcttaatctgcattacacttgttggattttgatgtcgcttctgggagtgtttgattgaattctacaccagttctaggaagagaaagcctgaccaagtcatcatctccaggtttgttattgtttggatgcaaaaatcgtcgttagttaacttttttgtgttgaagtaactgtttggttgagaaaattagttgcctatcttctattttctctgttttgttatagcagcaagctgatttgtgtctaatttatagggacgatgttagcgaaagtcaatttaatcaggtgctgaacattgagttgcaacaaatcatcgatggagactgtcaccgcagccagaaaaccacggtctcaatttgaggagcctttccatctatgtttgttagaaggcatataatgcctatttatctcttgtattcgaacatttggcaattaagaaatagaagattacttccccaatatcccttattcctaatctcacctttcacggcttctggtgaacaatcacttgctattaccgactgacatgtccactcctcatatgtgagatattggggttgatatatatgttgttcgtttccatgtaattattgtgtactaacatttattgaataatttttacgccgtaacaacgtacggg

SEQ ID NO: 43952 - DNA, 2120 bp, Zea Mays
ctcctccccaccgccgccgcggtttcctcgcatcccgcccgcccgcgacgctcctttccatgctcgagcagtcgcagcttccttctatggcgctcatttccatcctcgaccgcggtttcctcgccactgcgctccgtctctcgctcctttccatccctctcctcgcccgacagctactgtgtccgtgcgtgcagcggtcgcccaactcatagcgggacaccagatctcaagttcaccagcatctccagaagatcctatcctgtggcgcgctaattgacggcatggggagctgaactcggcacatcgcaccacattggaacacatcacacacggtggcaattctgtgaagcccaaaggttccaagtcaccatgagaaaattgaaatggcaagatctcttaatctaattgttgcaccttggaaggtctgaaccatcagagtttaactgtatcacccatttacacaagttcctaccatcacagttcaactgtatcactcatccataagcaattacttgtgttgaaatttatgagaagacatatgcctctgttaagtgtcaggatcttttttgctgggaagccaattccttactgatctgagggacaacatttttgtttgcctgataaggtgatgaaggtggctggacaacacgattatgggtattttcttatcgagtgatacaagacattgttctgccactgattacagtaagcctatactagattggcttgagaattccagtgatgaggtagcatagaagtgtgatgccataacatttggtgttctgaagaatcggcaaaaaaaaacttgccgagcagttttagtatttctaacgtgcctgaatttaaatctgaaaaatgcaaatcagagacatggctgctactatgagggataaacttgtgaaagccgcagattcagtttcggtgtgcctatctaaaggtttaggcgcccctgttggattcaatggcctttgttgacaagaaatatgaacaatacctagaggccaaaaatcttcgaaagaccctaggtggtggaatgaggcaggttggagttctgtgtgctgattctcatacactatgggaaagcttgctggtgaggatagaaaggctaaagttgtgacaggtttattttttccctcttctctaaaaaacatagaattggttgtatgctatttaaggcaagaatgttttccattgtctaaaaacgatttattttttccataatatttgtttcctagctttttatcctatttaaaacaaatcgaaactgcctgaaggctgttgttgtcttggtcttttctaattgttctttatcatgcggtttatcgaagttggtacaatggtttccccaaccacttatgctcgacgttgcctgtcatatttgatgaatggcatatgccacatgaggcattgaatgatgcaatgaatgctctgagtttggagcttccaggtgacggatttcatctcactcaatagtctcctcgctcaaggagttcatccaagctcggtgggtgcaagcctgcaaggcacaaagctacgtttacttttatttgggttgcaagaggaactagaaccgtgaatggggctgcctcggcgagggcaccattcaagcttcacactttgttttctgtacggatgagaacaacatacgaggcaaggtgaacgtctctgtggtggatggtagaggcatggctctccctcacgcagcgtcgtgcctcccatcctcatcgccaacgtagctcccgtctggctcaccatatcccgcagttgttctctgtgtgtggccaaagggaagaagaaatcacattttgacgattaacacaagtaattccccttccttggtctccctcagaagtcacattttgatgatagaactttgtatgcttaacattttccttataagtcagagtattgcgtatccagtaaaacagatttcaaaagttatcttctcgtcatggattattgttattctttgttttcatgcaaaatataattttagaagcatgcatgtacgtgcatgctctttgtaatttcaaatttctagagcaatatatctcgtgacctggtgtatatctcttatctcgcatactgaaattgcaaaaaacactagaatctatcaaaag

SEQ ID NO: 43953 - DNA, 376 bp, Zea Mays
ttaattattttcgtcggccggcccacgaaaatacggatgttattttcgtcggcctcgtgaccgacgaaaatgtagcgtattttcgtgggcctgtgaatagtttcgtcggcaggccgacgaacatagggaacttattttcgtcggcctcataaccgacgaaaatgcagcgtattttcgtcggcctgaacccggccgacgaaaatagttcaatggccgaccaatattttcgtcggcctcactgaggccgacgaaaatagtttcactaaatcgtgcatcccggtctccaccttctcgctcgcgcccagcctgccctaaaccgttcccaatcccgccgcagtcgtgccccgccccgcctcgccgcgctcgcgccggcaag

SEQ ID NO: 43954 - DNA, 1586 bp, Zea Mays
caaactcatatgggacattttgaatttcgtgtcatggctttcggtttgactggtgctcccaacacatttcttggagctatgaatgagatattgaagcccatactacgcaagtgtgttctcattttctttgatgacatattggtatatagtcaatcatttgaagcacaagtgttgcatctgcagactgttttgcaactattgaaggatcatcgatggaaggtcaaaatgtccaagtgtgagtttgcaaaaaaatcaagtagcttatctgggatatgttattactgcacagggtgtagctactgatctggagaagatcaaagttattgagaattggcagactcctactaatgctaaggagcttcgtagttttttgggtctcgcaggtttttatcggaaatttgtcaaaaactttggtgtgattagtagacccttattcaacctgctcaagaagtatgccttattcgtttggacccaggatcatcaaacatcttttgacctgttaaaacaagcccttgtgtcagcaccggttcttgctttaccagattttacaaaacaattctgcatctacacagatgcctgtcagacaggggttggagcggttctgatgcagaatggtcatcctttagcttttctcagcagagctttgggacctaagaaccagggtctatccacatatgagaaagagtatatggctatcctactggctgtaactcagtggcgttcatatcttcagttcgcagagttcatagtttatacagaccaccgtagtttgtcacaattgaatgaacagcggttgaatactccctagcagcaaaaagtgtactctaagttggtcggactgcagtatcgcattgtttacaaatagggcattgacaatggagctgctgacgctttatctcggcacaaccagggtgatctccagtgtttggctatttctcattgtacacccgagtggttacaagaggtggttatcgcataccataatgatcctgccactcgcgagttattgaccaagctgaacctgcattctggacacttagagcctttttcactagaccatggtgtcattcgccacaagggtcatgtttggttagcaggcaatactacaactcaatagcgagtgttacaagcttgtcatgactgccataggtggtcactcaggggttcctgctacttacagtagactaaaacaattgttttattggccaagtatgaaagcgacaatgaagtcatatgttcagtcatgtaccgtgtgtcaacaggctaagccagatcgtgctcgttaccctggttcacttcagcctctaccagtaccaccacaggcttggcattcggttactttggattttatcgaagggttacctaggtcaggtcagcacaattgcatattggtggtggttgaccgattctccaaatatggtcacttcttacccttgcagcaccccttcacagcgagtaaagttgccaaggttttcttagacaacatatataagctccatgggttgtctgttaacatcatttccgatagggaccgagtgtttaccagtggtttttggcaacacctgtttcacctgaccgatactaag

SEQ ID NO: 43955 - DNA, 5848 bp, Zea Mays
cagccggggcaggtgggcccagcggcgaccatgagcaagaggagagggaggagcgttcctcacctgccgtccgtcgtcttccttgctcgccttcgcttccctcctcttctctttcctagactagactagacttggcttgccttggattctcatctcgtctcttctttcttctcgctccaatcggcgcggacgtagcccccgcgcacgctaccgcctaccggagagattccgccgcccgttgggtggattccagcgccgttgagcaacaggactctagcgccgcaccggacaccaaccactagacgctgctgcctccctccgccgtctcggggcaccgaaggaggagcagagagatccatcggaccgctcggcggggtgcggccgccctcgctcctcatccaaattatccaatccactcgattccgattggcaactacccttcaccccgcgcgcgcaaccgctagctcctgccgccaagcgcaaccggacgaccgccgccctccctacgccaggaggtgcccaggtgtaggtccttcgccggcgacgaacacccacaagagcaaccgcaagggcatgtgacaagctgccgcctgcctttgccgcaggcaatgtgctccgacatgtcgggtcagcgccaccaccacgcaaccagcagggagaatgcaccggaagataatggttaccatcgcactccccatggtgcggatcatctcgagcagagccaggctgcagatacagataataagcatataaatcatctgtccacagatgacaatgttccctccagtgcttcaggccacaaacatggtgctatcagccgccatccatctacatcttctgttgatgatcgctccatcaagtccggtgatgattctgatggggccgagagtaccagtggcagaagcagtaatacagagatctcatttatgaataatgataccatctggataccacctcaagcggcagataaggaggatgaggcccagagttttgctacgagcattgcttatgacgacgacgatgacgattatagtgatggtataaagtggggccagtcaagtttcccatcccctggtaagcagcatgacgccgacactagcaatcatagggaggaacgagaaaaggcaatgctagaagctatgaatggccagctgaaggtacttgtcagtcggtttctcgcatctgctggcattccatcttccaacgaagagggtagcgatagctggcttgatattgtcacctccctgtcatgggaagcagcactacttatcaaacctgatggtagcatgggaaaggaaatggaccctggctcttacatcaaagtcaaatgcgtagcatctggtactcgccggcaaagtgaggtgatcaaggggttagtcttcaagaagaacactgctcataagcacatgccgacaaattgccacaatcctaggcttctacttctcaaaggagttcttgggcattctgatattggtttgtcatcatttagttcaatggatcaggaaaaggacctgttggagagagctattggtaaaatgatggagatatgcagtcccaatgttgttctggtcgagaaaactgtttcacgaaacattcaagaacttcttctgaaagaagttttggataaaccaaagctgaagcaatgtgactactttcatatcgaaaaatttatcgaggagcacaacaacgccagtgagggtggaaagatgccatctaaaacattaatgttcttggaaggctttccacgtccactcggttgcacgatactgctaaaaggagcaaacagtgaagaattgaagaaagtcaaacaagtaatgcattttacggtctttgcagcatatcacttgatccttgaaacatctttctttgaagatcaaagggtttttctaaatgataaaagtacccccaaagaaatttctgttactgctacagaaggggcatcaccaactgcttatgatgttgctgctcttagtggtgctatccctagctttccttcacatggtgaccctccagcacttagactattccatgccacttctaatagctatgctgatgtgaacaaacctttgacatatccagaaaatggggatgcattcagttcagtatccagcagctctgcaaatgaccttgaacaaggtacaagtatcaggcccaataatgctgagaggttaacatcactagtccaagggccactaagaaaactgttcactgacatgttacgtcaccagaatatttacttacctgttacatcattgcaagaggcaaatgatattagtaaggaagtcagggctgaatcaagtcaagaaactgttattaatggtttccataggccagagatagaagagtctgtggtttcaattgaaaatggagattccataaatgatgcccagaaacaagaaattgctcaagcaataatgccaagaggttcttctgcaaatgataaagatgcagaatcgtctgttatgggagacaatggggcacatagtacaagtatcattatcaaagagaaatatgtcgatgatgatcaagctgatgatgcacttgattctcacagcatactgattttgatgtctagccagtgcccggaaaagcaggttatctgtgagcaaagtcatttaacccgtataaaatactacgggagttttgatgtgtccttgggcagatatttgcaagatattctgcagaatcagaaactgagttgctcctcatgtggagagcctccagagtcgcacatgtactcttacacgcaccgcaatggaaatttgaccgttctagtgaaacatctggtgccccaacaccatttgcctggtgaatctgaaggaaaagtatggatgtggactaggtgctcaagatgtgatcatgaacatggggtatccaaaccaactccaagagtactaatatcagctgaagcgcgtaacctctcgtttgggaaattcctggaactcagtttttcgagccactctgcagcaagaaggctgggctctaaagttgctatgtttcggtactcatctgttgagatctacactacctgcaaaccacaacctactctccagttcgtcaaccccatcagacaggattggtttgaaggacaaaggaggaataacttgaagaatgaacatcctgatgcaataacgttagcaatccattgtggccttgcattccctgttaaggacttcactgaactagaagagttgttgataaaagaaaaggcccagtttgagagttctgtggacaaggccactgatcaaaatggggtaccaacctcttctgtgcatgaactgttgaatataaattggtactatcaggaccttctacttgagctttacatttgggaccgccgtctacatcaattattctattgtaaatctgtcaaactagaaagtgtttctaattacaagaatcttgctgatactgttgatgggatctgtggtgataaattcggtgttgataagaaaattgatgaatttacatatgatgaaactacggcagctttgggggtagccagtaccacagaacctgcaagtaacaaacttgaccatcaatcaggggatgctgcagcatccttacttgatgaaagccaggaagctgggcactcagaaattccttgcaatggaggtagtaaagctgagaaatcttccattgctcatggtcaaataaaggtagatggcacaacaaaaaccggaaatgatccttgcttcgaaatatccaatgataagaaggtccaggtcaatcttacagtagcagatccaatatctatggaacaggagcgttgtagcactctccaacagttcaaatatccttattgggatgacagggaaaggtggatttggaattcaatttctgagtcacaattggcttacaggaatgacattcaaattggatatttggaaaaattcgaactcattaacaattatttgccacattaccttcctcccttgtttgaacaacatgatgatgcggactctccgcatttcgcggtaggtcctggtggtaatattctgtgcataatggaagatgagatatccagcataatagctcgtgctcttgccatatctgacgaacgccgccatttgatagatttaaaatttgagaatggaatggattactccaagggagagcatgctaaagcaatggagaaatcctatagttttctgtctgaaaattctttcacctcatcaccatggtcatctacagattctgaagcaagcttgtcatctctgtcttcattttcatcattttcatctgatgacttttctggttatgatagctcttctttattgtcctcgatgcatccagaaatgactgtgaacgggaaaataactctgaaaggcaaatattcagtcactgttgtatatgacaatcaattctttgcactccgaaaaaagtgttgcccatccgagcttgcatatattacttccttaagccgctgcaagaagtggaatgctcaaggtggaaagagcaaggcctattttgcaaagacaacagatgacaggttcatcataaagcaaatcaagaaaacagagttcgattcatttattaaatttgcacctgattactttaggcatgtttaccattctctggacactggaagccaaacttgccttgccaagatattaggaatatatcaggttaagcagattagacatggcaaagaggtaaagatcgacttgatggtgatggaaaatcttctctttggccacaatatttcacgaatttatgatctcaaaggtgttactttttcgcgacgcgtcactgactcaaatgatcatgatactgtttacctggaccaaaattatgttgaggacatgggtttttctccaatctatattggtggaagaacaaagcatcttttgcagcgtgcaatatggaatgacacgtctttcctcacttcggtgaatgtcatggactattctctacttgtcggagtggacaaagagaagcatgaacttgtgtttggcatcattgattatctgaggcaatatacttgggacaaacaattggaaacatgggtgaagacttctctggtagtacccaagaatgtttcaccaactgtaatttcccccaaggaatacaaaaaaaggtttaggaagttcatggcaaagtacttcctgtcagttccagacacatggagctctgataattcatctaatccatgcaaatcctttggtcagagcaatcacaagttagcggaagtccacaatggtgatagcctgcttcagcacccaaatgaagctgaggggtgtgtctaatcacgtgcaggacttcctggcattttttaagcctatcccattgttgtttggcttttcactttgtaaaatggtgtacattggaggacctcactgttgatctatccaaaagtttgtgtttttaggcaaattgttggacaagtggggtccacaggacatgtacctatacaaatgttcattgttaatttcacaattattatagtgaaattaagaatttgtatgatcattttttggacctatcacttgtgtgactgaagctgtctattcttcacttatgactaactgtccaagatagacatttcctacctctattgaaattaggtcaatttgagtattatgttgtactgtatacccccagtgtacttgttgggatctggaagcagctccatagattttgtgtttgatggatactgtcccttttcggtatgccctttttcacttttttttggttctgcacaatgtacaactttcagatctcctggtatagaacagattgcaagctatgagtttcattgttacttagaatggatgtgatttaagttacttagttgtttgttcagtatgtgttcgtcttctggaatatcattcaatatgcatttatg

SEQ ID NO: 43956 - DNA, 1374 bp, Zea Mays
ttatgaaacaatccaagttcagtgccttggctgggtttgagtgctggcgtgggtcaaaagagcagcaccacgtgtatacctcatgttgtgttggcgcccttggagctctcctttgctgtgttctggccagctcaagaaccactgcatctgccccctataatcagtaccttgggctgccgtattcagtgaagatttcttccttgccctcaaattctagtcaaagttcactgtttgagtgtgcagtccttgtgtactgctggtataaccctctctgcatcctaggtttgcctgtcccagaacccttctccccatggactagatacgctcacttccccatggactagatacgctcactgacacacccctttcccttgcttacatattctgtaatttggggctagttattttggagctcctcactgcccttaaattccagccaagactctttgcatatgcgaggtgttcctgatgttcttaagtctacacagcttcctccctagccaccaaaatttggtctgtacagaggctgggcacaccatcaactgttgttgtggtgaccactccggtcagtttgccgccttgccgtggccggagcgattcaagaagggtcgtgccgtcgtgatctagcactgcggacagcctccacgctggccgagcaactcgcgctttctccagctgttagacaacagccggtaatcaggagtgttctaggtgtctctgtggctggaagatgcttctagtcttgaaggaggattagttaggtttaggtgtgagctttggaagggttctaccttcctagttttgtatgtaagttatgcactttgagtatattaggacttgtaataaatgtaactcttcctatgtaataaccttcatttttagaaatgataagaatattttgtaaagtcttccgctcttatctccgaagtgtgtgtatcgaatgtgattactgtaatatgcatgtatggtgggagatccttgggatgatgagttcaagttgttgaactcatgatagccttgtcaagttacctggtacacgtgcatagccatctgaggccatctgggcaaggattggtgcacgtgggctcgataactcgggagggctgtcacagaatggtatcggagcgatcccccattagcatggatattaaagtaatcctttgatagacttcaaaaggattttgagtccaaattattttggaaaaacttaagaatgaataagcaaatcatgatagtagaagtgcaaatagtatatggttaatactaaggactataatatggcttaatttaagatgctaaccactaacccgcaactataatgcatttttttgcaggtacacgaactaaaccctatgaaagtgcgactagtgatca

SEQ ID NO: 43957 - DNA, 687 bp, Zea Mays
aatgcttcgagattcttgggtaatctttgtggaaagcaaaatgcaacgtcatcgaagttggatatctacatagaggacatccagaaagggaaacatggaagcgattcagggtcatacgacgccgaaggaaggtttgttcctgacaagttcgaagagatattcgccaagcacgccaagactgtcccagacgccctgacgtcggacgagatcgaccagctgctgcaggcgaacagagagcccggggactacagcggatgggctggcgctgaagcggagtggaagaccctctacagcctcggcaaggacaaggacggcctcctccgcaaggacgtcgcgagaagcgtctacgacgggacactgttccacatgctcgcgcccaactggaaatctcccgacgaggaggaggaacaggaactaagcgtgatccgggagagctgaaccgagaggtacaagcaaagtctggttgagagataaggactctgggaccctctgaacatgctgtcaagcaacatgtactactagcggtgtgaacgggtggtgtgaacactcttttcatatcacatcataaaaaaaggtgtgaacagatatttcaatgtacattatcataaaataagataaattcataattcaaataaaaatattctgtgtcttaccaaaacaaacgagatacaaaacaactaaaagaaa

SEQ ID NO: 43958 - DNA, 2245 bp, Zea Mays
tgatcataaccttgtctgtggagtgtggacatatatttctgcagggaaaggatgtgaggaggttctgaacttggaatgcaaccttccaagctccccagaatggcctgtaggtcaatggatagtttccatctgtgcagctcactgtgataaaacaagggcaatgtgcttttgtgggcctgggacaaaatacccagatcgtcctgtggcagaagcttgtggttttaaaacaattttacctgcaaaacctgatggtccaaagcttactgattggaaaacacctgacctggaaaacatacttacaacaaacagcagtaagttaggatggtgtaatgtggtccctgaggacgcatattcatccaaagtgaagtttaaagaagaatgtgattgcaaatatgatggtctctgggggcagttctgtgagacacgtgctgaatgcagctgcatcaaccagtgctctggacatgggcattgccgtggtggtttctgtaaatgtgacagtggatattttgggattgattgcagtatcccatcagcatattcgcttgcatatgactggccctcgtggctccagacaccagtgaatttaccagatctgaaaactttgaacagtaccaccattggtgttaaggccgttgttcagaaaaaaaggccactgatatatgtatatgatttgccagctgagtttgacagtcatcttcttgaaggacgacattacagattccagtgtgtaaacagaatatatgatgacatgaatagaactatatggacccagcaattatagcacttcatgagagcattcttgctagccctcaccgcactcttaatggggacgaagctgattatttctatgtgccagtgcttgactcatgtctaataactagatccgatgatgctccacatcttctattgccgagggacctgcgccgaaggagctaccatgcacttgagtactatagaatggcacatggtcacatagctcagcagtatccttactggaaccgcacttcgggaagagaccatatctggttcttttcatgggatgaaggtgcctgctatgcaccaaaagagatttggaagagcatgatgcttgtccactgggggaacactaacacaaaacataagaattcaacgacagcttattgggcagataactgggatgatattcctttggataagagaggcaaccatccatgttttgatccaagaaaggatctagtgcttccggcatggaaggaacctaacccaggggccatatggttaaaactgtgggcaaggccaaggaacaaccgtacaacacttttttatttcaacggtaatctaggttcagcatacgaaggaggccgtccagaagacacgtatagcatggggattcggcaaaagctagcagctgaatttggttccacaccaaacaagcagggaaggcttggacggcagcatgcggccgatgtgacagttacctatctacgaactgaaaaatattatgaagaattagcaagctctgttttttgtggtgtcctgccaggggatggctggagtggccgtatggaagatagcatgcttcaaggatgcattcctgtaataattcaggatggaatttttctgccatatgagaacgtgctcaactacaatagttttgcagtccgcatacaggaagatgacatcccaggcctcataagcacactccgaggaataaacgatacgcaagtagagtttatgctgggaaatgtccgccagatgtggcagaggtttttctatcgagactctatattgttagaggcgcaaagacagaaaaaactcttctctgaagaggcaccctggtctgttgaggtatcgaaacttcctgatgacgacgatgtctttgcaacgtttatacaggtattgcattataaactgtacaatgacccttggcgtcaagatttcctgcaaacaaaggatactcggctgccgaacatctgttcaagaacttcctgaagcatttagtcaggcagcattgcaactgtaaagaataagcatatattcttaggaacaaaagtacaaaactgtagatatttcttgcattctggacaattgttcttttgactgatagcccaatttaattagaccatttcctgaaaaaaaagaaaagaaaaatgcactgttttcatctatcaaaacatggatagcatacatcgcatttacagctctggtgtttgcaatcccaagctacatcgatttttaccgagaaagaattggattttgtcgtcca

SEQ ID NO: 43959 - DNA, 1083 bp, Zea Mays
gaacaaggcctaattctctcctcacacgacgacctccattttttttccctggtcgcccacttccctggtgctcgcccttgcacttccctggccggcgcctctccatggtcgagctcacccctgcagggagcccctcccatggcgcctagtcctctccccatgtcgagctcgcccaaccaatcgtctccatcgcaggtgctgtgttccccttccctttcctcaagtttggtcctcggcgcccaagcttctatgtccctacagcacgcacgccgttgcccctacccccatggtcggccgacctcgtcagtgagcccctggcgctaccctgcaactcgccctcaagcctagggtctcactgttttcctttgccccacgcggatgctgtagccgggctatgtctctccctgtcgtagcagcccgcaaatgttttgttcgtcgccggtttgtcgtggaagaggaaagtccatttggcgcgctctaggtgtttggcaaaaagcttaaaccagaaatcgtcatcgcccttacacatattgatttggtttatgacatgattggataggagctccgaacgcgagccatagacgggagttgatgccactgggcgatggatggtcgcatcctcaggacctcggcgtgcaacagcagtggctgtcatttttctcatcgcctacttcaatatcctacaacattagcaggaaaaacggatatagagtgataaaaggcattaatctaagtactacataaatgtactacttgtattttttaataatcaatgcttcaaaagtctatatacatgctgactggtgtcagggtttttccattattcgaattgtgtatgcaactactgtggcatatcagtgaccttccgagaagatacaatggcgttgttagtagtaacgctgcttgatttctatagttggagtcatcaaacaactaacatttgcacttgaactgtttggtgaaatgcttgggagaaagaggtcagcaagaatggagtcatggaacatcggcaggaggggagcagcagtggcaaccgatgtatcccttgaacaatctggttttgacaagatgcaaatcaatcta

SEQ ID NO: 43960 - DNA, 1109 bp, Zea Mays
tgtatgggaggcttatgtggcggataaggacttaaggaggcgtcgctcggtgcaaagaatccatggcatggggaggtctgttcttgtgcatgggccgccccacgcaggagcaacagaagtcctgccttgcagccgctggtggcttcaactacgacacagctctccaaggcgccacacgcccaaagtcagtgtctaccttgacctctgacgaagctggtggcgaaataggtgacaaggatcttaccgagcgtggattctttgtgaaccgatcgcgtgttctggtcggctcaggttctgacgcctttgtccatgccaaatctgccctcctctcatggaggcacttggctttagggtgggcgaacgtggaaccggacaccccggtgaaggtaggtacaaggttctgcatctgctacaaggagttgatcccctgggtgacgctgccgcttcagatagcgtatgtgaccgacgtcgattcagacacgtccaaagggtgctcccggtccaagatgtttgccttcggcagcggcactctacagggccatctgctggccggagaggagcggttctcggtacaggtggacgaggaggagagggtgtggtacgaggtgctttctttctcgaagccggcgcacgtcctggcgacgctgtgctacccgtatgtgcagctgaggcagaagcatttcgcgcagcagtcgggacaggcgctcgtcaggcatgtgtccacctgctcttccaagcagaagcagtagtagagctttgtggagatgcactgcacagagaatgctgtatgtattccccctttgaattctattccgacatggcctggtttggcggcgctggggcctgggtgggatgatatatgttcgggcattccgagtggagtttgcccatcccatattttaatttcttcatgatggtggtggatctgttgcagctgaatgaattaagacaggaagatatataaaattcatgcgcacacagaatgaacacgagatgagaatcgagaaggtgcagtgaatgatttatccattatttatgaagtgattaatttagtaattaatttaatcttcaaagtgcgtagttatctaacaaattattagaaaacatgg

SEQ ID NO: 43961 - DNA, 1577 bp, Zea Mays
ccgacctgtacgctagaaatagcgtcccgagacgtccttgaggcctccaacaagatccgctataccctctagtaaaatttaggggtgcgtttgtcgtccgctatctgtagcgtgctagttttgctcgctatccgctgttcactcccgcgctgccttcgttcgttgtctcccgcgccggctcggaaccctctcgtcgtcgcgctcactgtgtagcacatcctctccggtgtacggctccaacgacaagggctcaagatgatgtgtgcggagtcggatggagtggcttcgcatgctggacgttggcggcgttgtgcttgaagttgaagacgttgtggtcaaccacgtcgtcgcttccagaccgaatctggttttgggcacgcagaatgacttcatacaatttgtcttatcaaccatgttatgtatgaactataggcactgatggttctgacttcaatatgtgcatacatgatggttgaaagggaattaggcttacacctttttcctaattgattttggtggttgaattgtccaacacaaataattggactaactagtttgctctagtctataagttttacagatgccaaaggttcacaacaagccaataaaaagaccaaagatgggttcaaataaagagagctaaagacatcccaaagacaccctggtctggcgcaccggactgtccggtgcaccagggcactcgacgctgaacttgctaccttcgggaaaatgggaggtcgctccgctataattcaccggactgtccggtgaagcaccggacagtgtccggtgtgccagcggagcaacaactacttcgtacgcaacggtcgactgcaacgcatttaatgcgcgcctgcgcgcgcagaggacagagcacgcacagaaggcgcaccagacagtctacaggacctgtccggtgcaccaccggacagcccagaggccccaccagtcagagctccaacggtcagaacccaacggccggctgacgtggctggcgcaccggacagtgtccggtggcgcaccgaactgtccggtgcgccatgcgacaacaaccttctaacgaccactttttggtggttggggctataaataccccaaccaccccacattcaatggcatccaagttttccaccttcaacacattacaagagctatagcattcaattctagacacaacaaaggagatcaaatcctctcccaagtccggaatcactccaaatcaaatagtgactcgagagagtgacatttgtgttcatttgagctcttgcgcttggattgcttcttttctttctcattcttcttgtgatcaactcaattgtaaccgaggcaagagacaccaattgtgtggtggtccttgcggggactttgtgtcccatttgattgagaagagaagctcactcggtctaagtgaccgtttgagagagggaaagggttgaaagagacccggtcttggtgaccacctcaacgaagtgaccgtttgagagcgggaaagggttgaaagagactcggtcttggtgaccacctcaacggggagtaggtttgcaagaaccgaaccttggaaaaacaaatccttgtgt

SEQ ID NO: 43962 - DNA, 1221 bp, Zea Mays
cgagcatgcatcctgattgttgcatcatgtttgtcacctatacacccaaaatgcttctctcattcttattccagaaaccagtgattgtagataatctggtgtaatgttgaattatgaacttcgataaaatagctatcctccattctttaggtaatatgtttaggtgctatatgtgtttgctcttgtgcttgatgtgtcgatagagggttagtagtttggttgcttaaacccaaaaattaggccatgttcttagttggtgaaccgagacccaaatttgaatttaccattatccctccatgactaaactcatgtaaatgaatgcttagataatttctttgttggacgtaaagtgtacccaagtttaaaacaagaatctcaagtcatgtctccttctagaaccattcccttgttcagttgatgcaggttgaggtctctattgtatttggcctctccttgcggattaacttatcactttgtccatccaacctaggaaagacatgtccaaccatttttctggaatttgatgcctttggtttccccatacctatcgaaggcataccaacttaatccttgaccttgtaatcattgcgatgggcatagaaatatgcttggggctgaattaacagtctcccgtcgtactcctttcatcaagtttaggttatggccatgtcttgttcatttcatcgggccatgatctatttggctctctacttgtaatcatccttacaggtggagtatctctttgtatattatcacccttgcctagtttatttgtgttgtgcgagatttcttattggttatgtctaataatggtgttatgactaaaaccggtggtgccgtgacgaaaccgagggccttctgtgtgtgcgcacacatggtcgtgctgctcggcacgcgctggtatcactgttagtagttgtaatccattatgagactatgtcaatccgttatcttggcacaatctgtttttgctgcgtgagattcattattggtgccagttttgtaatggtgtcatggttaatgacttatggtgccgcagcaaaactgagagcctcctatgaatgcgcacacagggttgtgctactcgtcggatgctggtatcaaggtctctggtcatgatccattgtggaactacactaatgtgttatcttccgtggacttctcccttggaacaatttttatgttgtttgtcaagtgatcaagcaacatctatcatctctg

SEQ ID NO: 43963 - DNA, 1635 bp, Zea Mays
cgatagcatcatcgcttggtcattcacacaagtgggaataggaattgtgagagcaataaaaatagaattgagcagccatccatttcattgaagacttcattttaccaaaaatggttcatgagataaggaaactaatgtgaccaacgaagccagcatggtgatagtagaactaatgtgaccaacgaagcaatcaaaatcattttaacaagctgcatatcctagagatcgtccacagtaaaaggacattagaacttaagccagaccaaacctacacaaaaagaacagacttctacacaaataaggacgtgattcttgatccatagtgtacacaaaacatttatagttcttgtttagatgaacaagttaacacaagcatgcctcacaccacaaacatcagccaccaacaactaatttgatgcacccctgcaatctctatatcataaaaaggtaaatatatatgaatttatgtatcaaataatatgattgattgaattttagattttcatgtcctatatgttgtacatggacttctctgtgtgtaatttcatattttttcatttacatacaacaagacatggacactccttgggcaaattttacattcccagttctagatcagaaaagcatccaaccagcaggtgcaacatcagttcttgctaagcaggcggcatctcctgatcaacattctcttcccaccaagtagcattctacagcacagaaaattgattattgtaactcgtattgtctctatgatgtgctataatgaaatgtagtttatgcaagcaggcgctttgacattctcttcccaccaagtagcattctgcagcacagaaaattgattattgtaactcgtactgtctctatgatgtgctataatgaaatgtagtttatgcaagcaggcactttgaagctgcaaccggctgtttagctaggataagatgagccatgtatcctcttctaagaaattcaaggcagcttccttgttcttcttgtaaaccaataactctcgattcacctctaactgaataagcccgtacatggactacatcatggattggatagaaacccagctggacgacgaagccattttccctcaacggcttggggctgctttccctcccaacttccacgacgttgtcaagacggtcctgaagcgcctcttcggggtgtacgcgcacatctaccactcccacttccatatgatcgtcaagctcaaggaagaggtgcatctcaacatttgcttcaagcactttgtgctcttcacgctggaattcaagctgatcgagagcgcagagctggctcctctcagtgagctgtcagtactaaactggtgagatagttcgaataggcggcagccgcggcacaccaagtgttcagtttaatgttcgtttggtttcggatggaacatctccatttacacatttggtatcagccgttggcaactcagatgatctccgtatcagccgttgatatctacctattctattactatatcccttctctttattaaaaaagaagggttcgatccaaagttgtgcctctcagaaccttttagcgccataccgctgctgtactggatgattttggcacagacagaagctaatgtcagttctaaattcttttttatagagggag

SEQ ID NO: 43964 - DNA, 229 bp, Zea Mays
ttaaggagtattaaatttattacaacagcatcggagttttaccaaaagtagtgatcattgttcagaatgcagcggaataaaactaacgataaataaatggaaggatggggaagcttgtcccatcactcctcatgctcctcctcaaccgaggtaggatcccactcgactgtccaacccggtggcaagatggacggccaagtcactccagcaaccatgtcctccagagaac

SEQ ID NO: 43965 - DNA, 924 bp, Zea Mays
atgatttggaacaatgtatacgataaaggcttagtcgatgtgatgcatgatcacaaagataatccaaaattcaaaggtcaaaatagttggaatcgtgatggatggaatagtatcactaccaagttcaatgaaaagttccctctagctcatttctctaaacaacaaccgcaagagaaggagagagagcttaaaggatactacaaggcaataagggattcaagaaaagaaagcggggttggtttgaatgacatcatatgcatggtactcgctgaaccataagtttggccaaggctgattcgcgctcacccaaaggtatctaagttttgcaacaggccattccctcttttttacagtttagaagggctatatgaaggtagtgtggctatcggagagttaaatttcacatcaaccgatgttgatcttcctccaccttcagctccatcaaggagtgcgtctggacaaagtctcaatcccttgagtactaattcacttgatttggatggacaagaaaccacaagtgtgttcgatctatctactaatgctcaatttgtcccagtcaatactaatgaacccactgaagctcaatttgtcccatctaatcaagaatgaagctagagagaaggtggcagtgggagaaagcgtaagaaaagccatgttggattagctcttgaaatttatgtggagtttaaaaagatctaaaatacataaacacttgcaactcttaaagaacataagaggcaagaggatcaattttctattagcaagtgtcataaacacttaaaggaatggatggattaacagccgtggacaaatcaatgctttggagcttttcgtatctgcgacaaacagagagattttcttaacaacaatagagcatgatgttagagaaatttggctcaagcacaaaattaggtatgccataac

SEQ ID NO: 43966 - DNA, 428 bp, Zea Mays
tcttgactttttccatgtttccatttttgtttcttggaactgatacgacgacgaggctaaaactgtgtgcaggtgatagtccatccatcaatgtaacactcatgtgcttctttttggagttgggcatccttgtgatgtttcctttctggaatacctgacaatgcattaggtattcgagaatctgctattagttgttcttggggagaccattgtctttttatgccagaaaataaaatccggttcttctgttttgtagtttcattttcgcttgtactgatcgggtgacaaggaattccatagtactcacaacaacaacatgttccaagatcatttgtctattggtgtgcatccttttgtgtctgttcctcagttgtttcatttctagtgacgtttcgacttgccaacacttgttggtatgaggagatgag

SEQ ID NO: 43967 - DNA, 519 bp, Zea Mays
tctgactatcctcacctaacatcaaacaaggttttgaactatatcatgtagtctgcctcacccatacatatctcatcttgataaattctatcttacctttggatattcaccttatacgactagtgatcccaatctggacataaaacaaagatttaaccctgctaaagaattttcggatcataaccaactactagcctattcattctgcttaccaaatacttttcattcaaaaactatcctaccatgtgcttctaactctcatggtcaataccaggaaggaaagattatcaggcaacagcaaacagaaatgaatcctctaaatcctccaccggttggaatctatcaagtggttgccacccaaatgatggtaatacaacaaatggaaaacatggttaccgaactgcaaaatcagataagacaagaacgcgaggaggtacgtcgggaccggttggagatacgtcgagaaataaggcaagcacagttggaaaggcaacaacaacaacgcccactacctccacc

SEQ ID NO: 43968 - DNA, 2241 bp, Zea Mays
cacgggtccattctgatcctgccgctacccctccgcttccgccctctcgctttcgttgtcatgaggagcctcaccgtggcaagccgccacccgggcgccgctttctctacccgccgccgcccccttcttcaccccgccgcagccggaagggactcgaccttccagcggtgctggcgatgggaaaaaactcaggacagctccttcgggagctcactaaggaccagccgccttccaagaactgtgcacggagatattttgaagaatttgctcgcaccaactgctggtgctgtttcagttgagcaagctgaagctattgctgacctcccaaaaggtgaaatgtggtcggtgcacaagtttggtggcacatgcatggggacctctgagagaattcacaatgttgctgatatagtccttcgtgatccttctgagaggaaactggtagttgtatctgcaatgtctaaggttaccgacatgatgtataatcttgtaaacaaggctcaatcaagggatgattcttacattgctgtactggatgaagtttttgataagcatatgacaacagcaaaggatttgcttgctggagaagaccttgcaagattcctgtctcagttacatgcagacatcagtaacctaaaagcaatgcttcgggccatatatatagctgggcatgcaacagagtctttctctgattttgttgttggtcatggagagttatggtctgctcaaatgttatcatatgcaatacagaagtctggaacaccatgcagttggatggatacaagggaagttctagttgtgaatccgtcaggagccaaccaggtagatcctgactatttggaatctgaaaaacgacttgaaaaatggttttctcgatgtccggctgagacaataattgctactgggtttattgcgagtacacctgaaaacatcccaacaaccttaaaaagagatggaagtgatttctctgcagccataattggttcccttgttaaggctcgccaggtgaccatctggactgatgttgatggggtatttagtgcagatcccagaaaagttagtgaggctgtaatcttaagcacattgtcgtatcaggaggcctgggaaatgtcatattttggggcaaatgtcttgcatccacgtactattatacctgtgatgaaatataatatccctattgttataaggaacatattcaatacttctgcccctggaactatgatctgtcaacagcctgctaatgaaaacggtgatttggaggcttgtgtcaaagcttttgcaactatagataaattggctttggttaatgtcgaagggtaagtatgataaatgtaagccataactatctgtagtaatctgtactgattttttggtaccttttgctaataacaaatgagtgtggataagggaagaccttaacaggttagcgtttagcatgtggatgatagaatggtcatgaagcaccaccagatgctccagatttgtgattatctggaataatttcttatatttttataacattaccttaatctctcattcaggactggaatggctggtgtcccaggtacagcaaatgccatatttggtgctgtgaaggatgttggagcaaatgttatcatgatatcacaggtatatactccactcagagggtctaattgttgcttgtattagcctgtaagggataatatcaaaagacaatgattaatacataacttatttaatacaatgtatataactgtaagcatcaaatagcgtgaagacaaatcttcaggtgaagactccaacgccaccaggacaggtgactggttgatcaaaagcctaaactcctctgtactctagcaatctggtaaccatccgggatttttgccaaagtgttgaaactaaagcaagcgacatgggaagtggcagttggaagtggtcgtcccagggcgcttgcaggagatggagcagcagcactgccaggcgtggtggcaggactgcttggaccatctggggcggtcgagtgctgcactggtgggcgacacgtgaagacctggccgaaccgttgtggcacagacggggcgccgagcggtgctgatgcaggagtgccggggacaccaggagagtcattgggagaccctggtgaggtcggcgcgactggggtagaggaaccaggcaacactaggggcgtacgaacgtcgggtactgcaggcgcgtcgagagcagcgtttggagctgttggggcactgggggcagtggcgcctg

SEQ ID NO: 43969 - DNA, 582 bp, Zea Mays
tggtcctgatcactatcattgtcgggacagttagcaataaaatgaccaagcttaccgcatttgaagcacgaacgcttccccttagctttggtcttgcttggttgtcccttgcgacctttaagcgtcgtcttgaatcttttgataatgagggccatctcttcatcattaagtccggctgcctctatttgtgccaccctgctaggtagcgcctccttgcttcttgttgctttgagagcaaggggttgaggctcgttgattggtccattcaaggcgtcgtccacgtatcttgcctccttgatcatcatccgcccgcttacgaattttccgagtacctcctcgggcgtcatcttcgtgtacctgggattctcacgaatattgttcacgagatgaggatcaagaacgataaatgaccttagcattaggcggacgacgtcgtggtccgtccatcgcgtgcttccgtagctccttattttgttgataagggtcttgagccggttgtatgtttgagttggctcctcgccccttatcatcgcgaaccgtccaagctcgccctccaccaactccattttggtgagcaaggta

SEQ ID NO: 43970 - DNA, 1731 bp, Zea Mays
ggacggtctcagcccgccacgcgacaaccgacaatccttcgcagtcccgcaccgcaccgccgcaccgcaccaccgcaccgcggccaaggccaatagcctcgcctagcgctcactcgctcgccccactaccaccgcaccacgcgctcccgtttccgccgatccgagcgcgcagatcgcggaagcccagcggctcagagtccagggggagggagctcgcggcggctgaggaaggcgttcaccaccgtcgcggtgagtgctcccagtcaagcgcctcttccttcgtagtgtcaacaattccgccccgcgcccgcgcggatctgattgtctcgatcgtccaatcgagcggatttcattgaggaagagatggggctctcctttgggaagctgttcagccgcctcttcgccaagaaggagatgaggattctcatggtcgggctcgatgccgccggattcaatgttgaaactgttgagtacaagaacattagcttcaccgtttgggatgttggtggccaggacaagatcaggcccctgtggaggcactactttcagaacacgcagggacttatttttgttgtagacagcaatgatagggaacgtgttgttgaggctagagatgagctccacaggatgctgaatgaggatgagctgcgtgatgccgtgctgcttgtatttgcaaacaaacaagatcttcccaatgctatgaatgctgctgaaattactgacaagcttggtctgcattctcttcgccagcggcactggtacatccagagcacttgtgctacatctggtgaagggttgtatgaggggcttgattggctttccaacaacatcgccaacaagtcttgaagcttttcagcagggctcctagcaagaggaagacgtctgaacaacttatggatgcttttttacattttattacaaagatactccctctgtctcgatttactattccttttgggatagtggttgattcatataatatttgatgtatgtgtttaatagatgtgtctagattcaccatcatctattttaatatggacatagatataaagagctaaaacaaatactattttgaaatggagtgagtacaatctatagtagatagtgtgggtgctgtggagagaaaaaaatctgagctttcttttgagtgtttgctagtgtttaccttcggagatgatatggtaaattatattgacatgctttcgcgtaggtcttcaccgatccagtgctgtggcagctacatttcgttcttagatggttaacgtgtgccaacataaatccaatatgttgcttgtggtacgcaccgttttaaaatagctatggacagaccataattgacatcatcttctgtcgaactagcgttgggcttagttaggacttgggatgtcaatgctagatagctagagctgtatagcatctctaaggggtatttggtttgatgttcgatgaatcatctacatattctttatttatttttatttgggttatgatgtggaataggttgatgcatcaccatctcatatctcatatattagaagataactagcaaagtgtccgttgctacagtttttatttatacttgaggataaagtataaaatataaaaatatgtttgttttattggttatttgagtgtgaatgtaagtttaaagcgaataattgtggttcaaatccaaatttatcataattttagttttttaccgtttaaatgtggggagcatgcatggaaaca

SEQ ID NO: 43971 - DNA, 958 bp, Zea Mays
acaatccacagatacggtcataccgactgctgttgccccccgatttcccgtccgcccgcagtttctgaaggcacaccaaaacgatcagacctgtagacagtactccagtccacgaaatcctcgtacttgtgagttgtgttggctggccctcgactagcgtgttgtagcgcactagcgccacagtaatcgagagtgctttcccaggtcgaggtggtgtaggtgtttggcggagcagtcggggcgttggaatctgaggaggagaagatggtggtgctggtggtggccacgacgtcagacccggcgtccattgggcccgccgccgccttcctcgccatgcccggatggtcccccggcccgcccatcgccgtaagagcatacgagagattctgtccgaaccccatcaatctgatctgatttaatgcccataagcctcgagtcggtccatccggttttgtgttgcgctatctcctattttgtggaggcgatggagagttttactaatgggaatgttcgattactgaagcatgagcgtagcattgtcgcagaggatgatcttgaccagcgatggcaggaagccactggagagtctgtttctgaggtcatattcctcagcaaacacactgcagtctccaaacgtccagcactcacagtgcatccaattggtgtgccacatctgaaggaggatgaaaccccaccccaaggaggaactcctggatgggcagcaattccaagtcctcgaattggaccttggctccggttgatgcaaaagatagctgtagaacaaggccttgttccagagtttgaggttacgcttgaggctactcaccatggaccagttaccagcacacccaccatgtttgttgagataggaagtacagaagaccactggggtcgacaagatgctgcacaggcaattgctctaatggtattatggctgtcaggatcatatagcatgtgg

SEQ ID NO: 43972 - DNA, 1211 bp, Zea Mays
tcccgtagcagctaccacacagtcaaccggatacttccaggtccttggactccttgcatatcggtcagtttgccgtcagaacaaggagaaaaaaaggttccggtcttcatcccttccatttccaaaggacgacgctctcaccattcacgaacggcgactgcggatcgatcgtgcgtcgtctcctgcgccggcctcccttccagtcaggttcaaacaagggacgatacgcatcggacaagaaatggacatcaaatcctccgagaactaaagtcgatgtctgagcacagagctcggaagatgtgcgtatcaaccaataggctgtggctgtgcctgcaagatgccctgaaggacgcgcttcttgaaaagtcagaactgcaaagctttgctgcatctgatcacaatgatctctcagcttgttgtaacatcgtcttgaccattgtccattgcgctcatatcagctacatacatggttgaaaaacttgttataaaaatgtgccatttcaaacacggattcgattgtaatttgaaaagttaatttatactgtattatctgatgcatcattcactggagaatgggggataacaggattcgggctaagaacatccattcttttcaccgtgtatctctttgcaatctcagccattcgatctactatactatccatagaacatattccaaaggagataagcagccggtgcacgccccttgggagccaaaggaatatatctgtgtgggtatatgtagcttttcatctccaatgatcctggaaagggaattgactacattccaatcttttcccctgcttgttcatgaaattcacgatgtcacatgatttaccgccacttagatctgtcaaaaggctgccatttcttcgttcaggtgtatgggcgtggaaggtttgcatccatcggatgtgttggaccagcatgttgtagttttgattcgtgctgcgtgcatcgagccatcaggagatctctgcatcggaatcatatctgcacaaagccgtcggaaagatgcaggattcccactgatattttgaaccatcatccaggaggctaggtattagattttatatatacgtggtctgtattttgattaattaaatcaaatcaatcttatacctggtctgtgttttgtttaattaaatcaaataaatcttaagtttatattaaatgtgatggtgttattacctgtttgtttacccccatgg

SEQ ID NO: 43973 - DNA, 797 bp, Zea Mays
gttgatacttggttcttacaaaggcgaaagctgtgtacaaaagctaaactcccaaatatacaaagctttaatcttctttcaacacttttttggtggcttcgtttagcagtctgttgacaacttcatcaactgcttcattgacaattttaatcgtcttaagcgcttccttcagggctgggtcggctttttggttgtatggctccggtgggggagaaagttcaactgcatcataaaatatatttgttagttccgaagctaaaaatagattacgaagctaaaacctcaataaaggtacctataagcctcacacgctcagtagcttctttagctcttttcgcttcttcttgagcgtcgtcagattcttttcattctttctaatatcttcatcagctatctcacggccgcccttcatccatacctcggagtaaaatttcccgcctaacgcagaagctttggttgaacgatttttaatgtcgtcggctgagaaaacaaattcaggctgaactacaaccttggcatgttcgcaaccggccttttctaagatggacgtggcctcccacgcaccagcaaaggcgcagaaatctcctcggtcacttagaatttcgtcaaaagctttagcttccccgctgatccactgaacaactccatcagggtcgccatggattaatctctgctcagaggaatatgccccaaccctagcaaagttgtcctttagtttcctggcgcattccaaggatatttcataacacttttctttggaagcacgaagcacatcggtgttcttttgtgctcttgac

SEQ ID NO: 43974 - DNA, 559 bp, Zea Mays
aacagttacagtcagactggcaaaagaaagctatggcgaagttgatgggtttacaatttcaaattgtatataagaagggtaaggaaaatgtagtggcagatgcactctcgagagttggaagggttatggctttaaccactgtcactgaagtgcaaccaacctagataatggaggttactaattcttatgtaacagaccctgaggctcaacagatggtgcagagactggctgtgcacagtccagatgaggctgggttttctcttcatcagggcataatcagaagacatcagcagatttgggtgggtaacaattctcctttgagaaccaagattgtctcagtttttcatgagtcggctctcgggggacattcaggcatcaatgcaacttatcaaagggtgaataaaatgttttggtggcagggactaaaactggatgtggattcctttgttaaacagtgtcaggtccgtcagcaggccaagggtgaaaggcagttccctgcaggtttactacagcctttacctgtccctactggtgcatggagggatttgactatggactt

SEQ ID NO: 43975 - DNA, 1661 bp, Zea Mays
ttcggcttcgctgctaatccattcaattgggccctcaggatcgcctcttacgaagttgtcctcgcttgagtatgcgccaacgttggcgaagctattttttattttcttcacgcaatctatagatttttcatagcacctttccttggatatgcgaagttgttcaacgatcttctctaaatgattcgtccactattcgctaattccccgtttagcctctgcaactgcgcacttctctttagcttcggccagttgcttccgaaggtcctcaatttcgcatttctgggcttcggcttgggctttggaagtagctttgtcttcttttattttgttcaccaatgagtttaatattttatctttttcaagaccttcgttccttagttcaattacttcggaatgaaggttgttcaaagctatagtgcatccttcgtctttggcacttttctgcgccctgagggcgttgctaagaatgaggccctgcgaaaggagtgcgatattaagtataagcaaaaaaaatcttttgtttttaagtacaaaaagctcattctcgtacctttaaactattatatgctaagctgtcagccaattcatcttttgatagcaccgaaagctcgttttctagtgtcgggaatccgaagcttttgctcatctcccggcagacagaaatctccttgttgtctgggagacaatacaagaaatcttcttctccgctgccgttgaatatcaatgcccccttcggatatttcagtttctgggcatagtattgagcttctcgcttttcttcttcagataacctttttcccgaagcatgtcatacaatataatcaagaacttcggaggatgcttcaggagtaggagtggcagttttttcagacaaaatttgttctgtagcttctttttccgtttcctcttctctggtttccaaggatttctccttggtaggctctgaaggcccagcttcggtctcggcctggctctttgcagcttcggcttcggttagtcttgtctcagtttgcgtttttgaagcttcggcagttttccctggagtagagcttgaagtctttatcgtctcagcacatctagtacgttgaccatccttttcctcttgggggtcgctgtaagatctttttgtgccttcggcactgtcacttctgccgaaaagcttataacttctaatatctttgttctctcgatctctatcttttcaatattatcggccttcggctcatctaatttggccaatgatgccttcggcattgcagctggctcttcagtcttctgcgtaagcgtaggttctttggcttcagtagccgaagaggtctcaccgccaaattcaggcactgtggccggttcaatgtagcgtggtcggtgagtaagaaccttcaactttttcctcttcggcgcgggctcgcttggagcagctgaagcatcatccttcccgaaagtcgcacttttttttctgcccccgtgacgggtagcggtagtcagggtatatgaacccaatagcatcaaaaactctatttagtcttttctttttccggtacgaaaaccctgagtacggagtgtactttcgcaagtcttacccgactaaggaaaaagactctcaagaatatgctggatttgggaatcaaggaaaggccttggcaagaatcaacattaatagt

SEQ ID NO: 43976 - DNA, 565 bp, Zea Mays
gtcacccttccattgggacttgatggaggaagaggattcctccttgtacttgtgtgcggactcccttgagtgtgttctccccgagcttgcggacttgttgccggtcccgatctctctcatggcggatgctcccgacatcacttcgagcggttaggctctaatgaagtatcgggctctgataccaattgaaagttgcctagaggggggggggtgaataggcaaatctgaaatttataaacttaagcacacactacacgccggggttagcgttagaaatataaacgagtccaaaagagagggcgaaaacaaatcacaagcgaataatagcggatgacacgatgatttgttttaccgaggttcggttattgcaaacctactccccgttgaggtggtcacaaagaccgggcctctttcaaccctttccttctctcaaacggtcacttagaccgagtgagcttctcttctcaatcaaacgggacactaagtccctacaaggaccaccacataattggtgtctcttgtcttggttacaattgagttggaatcaagaaagaaggaagaagaa

SEQ ID NO: 43977 - DNA, 521 bp, Zea Mays
gaaccaagaccacctagcgcaaatcaaccggacctcatggtgtaccctggcatcagctggcctctagacatgaaggaagcagcagtggaagtaatgacccaataggggatttggaggccagagtggagcgacttaggtctgaactacgccatgggagtagggagcgtgcgcgcgatagctgccgcattgctgaattttcaccagaagttagtcgcctgcagcaggaaattgcggaacacgatacgaccattgactgggccataaattcacgctctttcacctgggattgtgaagccaaagctctagcccgggtagcaaaacttagtgcatccctggaaaacctgcaagcatattgcaacaccctgcatgaaaaggtgcacgtattgtatgaccggctgcatccgagcgtgccacaagaagttgcagcaatgggagtcggaccatctggaacagctgatggaggacctgatggggagttggacctttttggggcccctccttccatgaaccttgcagatgaa

SEQ ID NO: 43978 - DNA, 426 bp, Zea Mays
ccgcgctgcactgcacgcaggtgcgcatccaccgtgaaatccccacagctccgcacaccgtatctgcgccgcagcttctgtcgctcacgcccgcgcggagctcccttcctcaaccgcctattcccccacgccgccctcaaaatcgggaggatccatagcacgccgtagttcctctcaaacaggcccgatgccctcctccccactcctccctctcgcccaaccggagttcgcaacgtcgttcatgctggacctgccccttcgctcgttcatgattgcgatctattcctgagcttcgaggaatcgacgatcaatatttggtgaaccgctggtgccgagatcaagttcttcgagttctacggggttgaagaccctgagcatatgtttggtaaaggcaagtgtcctctgacccattatgtcccatttatt

SEQ ID NO: 43979 - DNA, 1364 bp, Zea Mays
atgtactcattgactacatttttcatgtatcctctattgaaatgaaattagttgcagcagtccagtgattagattttatgaatgtagactttgtgcctttaactctcgtggcaactgttcagcttctatgaatatttgctcaaggtctggatccaggggaataaaactgagcatgtaaaacacaataggtttgggactattgtcaacctggtttcataatgttaagtaggcattgcaatttatttgattcaacatggataacaattccattcatgtttttcattttagacaaatgtgggatacatcaatggaaggtctattaagtttaacaaagaaaactacaccatctaattactactacatttgtgaaaagaatggtggctcattgtgtgacaagatggatgaacttgcttgctttgcccctggtatgctggcattaggagcctctggttatgggccagaacaatcagagcaaattatgaatatggcaaaagagcttgctgggacctgctataatttctaccaaaccactcccacaaagttggttggcgaaaattattttttccatgctggacaggacatgagtgtgggcacatcgtggaacatcttgagatcggatactgttgaatcacttatgtacctatggcgcttgacggggaatacaatgtaccaagattgggggtgggacatattctaggcatttgagaagaactcccgtgtagaatctggatatgtgggactgagagatgtgaacactggtgaaaaagataacatgatgcagagcttcttcctggcagagacgctcaagtacctctacctacttttctcccctccatcagtcatatcctttgaggagtgtgttttcaatactgaagctcacccattgagaattgctccagtaaatggtaacaaaggcattggaacatcggtccgtccattcgggagaaaacagggaaatcctgagtaaccttggataaagaccagtggatttttttgaatccgacgtctgagtctggcctccccgatgaaaatgtgttctgacacgagggaactttctgcctgaagcaggaagggttagaaatcacgacaatagattgtttagagagaaaaatcataggtagatcatgatgctatatgcggggcagtgacctccagggtggtatggtcggagctcaagagcccccatagaagcttttatctttggacttgcttacgccccctgatgtgcgttgttgatgtgtagcatacatctaactcactgttcatatgttgttgctttcttgggacctctgcggagctgtatcgtcattatttggcccatagttattacttttttcagatatgatttatatataagttgttta

SEQ ID NO: 43980 - DNA, 1419 bp, Zea Mays
ccgtccacacaacgcacgcgaggtccatcgctcctcctctccgtcaccgagaaaatgtcggtctcctccccggccatggcctcgccccctctcgccgcgcccggcactcaccgcggcccctgcttctcgaccctctgccgcttaccgtcgccttcctgctacccgcctctttcggcttcctcctcaccggctatctccaccgtctccgcattcgctgtcctcaaacacaagcccagaggtctgggactaaggtgccaggccgcggaggaggcaccaccgccggcgcggggtaagacttcgctcaaggtgatgatttcgggagctcccgcctcgggaaaaggaacgcaatgccgcatgatcgtcgagaagaaattggcaagaaagcaaaagaatacatggacaatggaaagcttgtgccggaccaagttgtgacagatatggtggtatcacgactgtcacaaccggatatacaagaaagagggtggcttcttgatggttacccaaggagcttcagtcaagcacaacaccttgaaaatttgaaaataagaccgaatatattcattgtgctagaaatgtgttggaagacggctggatcctgtgactggcaagatttaccatttaaaaaactaccccccggagaatgaggagatttctgcccgacttattacacgttctgatgacacatttgagaaggttaaatcacgtcttgatacgtacaagcaaaattctgaagctattcttcctacatactctgatttgcttaataagattgatggaaactgcccagccgaagttgtttttcaggcgatagatttcctgttacagaagatctgtgagaacacttcagcgagcaagttgaccaaaacaaatggaaaacgaccagattctgcggatacaggttcaaaaaatgagtggcgtggaattccaacgaggttgaataacattccacattctagggaaattagggaatacttctacaacgacgtgttaaaagctacaaaacttgctattgaagataaaaagactcggttgcagatagatatcaatattcctgaacttaaccctgaaatggatgtttaccgcataggaaccctcatggaacttgtaagagaactttctctatcctttgcagatgatgggaaacgtgtcaagccacttgataccaggtctgtgttcaaggctccatggggcaaggtgcatttgctggcatcccacttcaactggcaggaaccagaaaaattttggaattcatggactggggtgactatggggcgaagggcaccttcattaatattggagcagtaggtgtgtatgtgttgcccacttattctatacttcagacaatatcaattatcaaatgaaacgaagcatcgtagctttaggttgaatcatcatgcttgtgtacctaggtcgcctcca

SEQ ID NO: 43981 - DNA, 900 bp, Zea Mays
ttttggtgatttagtgtccaacacaagtgcttaagtgataaaccatgtcaaatgatggataaggtgcaaatcaatacaaaggtatgattctagacttagtacattggtttttgtgtactaacatgtttgtctaagtgttagaatcagagaaaatgcaattgaaaaagagtggctcgaagcagccaagagtttgctcagtctgggtgcaccggactgtcaggtgcgccaggctggcatccgtcaactagctgctctcgggacttcgtcggcggcgtacggctaaaattcaccggactgtccggtgagtcaacagtcggccgggccaacgatcggccgcgaaatccgcgcgcgacgcgtggcaagtgccaacggtcggatggggcaccagactgtccggtgtgcaccggacagtgtccggtgcgccaacggctcccaagtgccaacggtcggcttcgccaaataaggaaagagatctgcaccggacagtgtccggtggtgcaccggactgtccagtgcgccaggcgacagaaggtaggaattgccttcctggaatgcactcaacggctcctagctgccttggggctataaaagggacccctaggcgcatggaggagtacaccaagcattctctaagcattcctaagcaccaaggtttcgattccgcgcatttgattctttgtgatagaacctagagctccatttgagttgtgaactcgccgggttgtgttgtgagctcttgttgtgacttgtgtgcgtgttggaactctgattttgtgtcttgtgtgcgttgcttatcccttccttacttcgtgcttcttggtgaacttcaaagtgtaagggcgagaggctccaagttgtggagattcctcgcaagcgggatatagtaaagtgaaatcaaaa

SEQ ID NO: 43982 - DNA, 2076 bp, Zea Mays
gcacgaatcttatcgtagtccactcgaagtcgcctcccatttcgcgggtcaccggctcgccgctgcgtcaagcgagcgcttccccccagatctcgacttctcgagcctgtcctccgccccccacaggctctgctggatccagaaccttctagaacccctgcactgcgcggctgccaaagaatcagtggccatgggatctgctatcctcaacagcattgcccccgaggagcctaaagtggtcgtgccagagtacggtgagacggctgatatccaggacaaggaagttagtatggaacagctctgctccataagcacctatgatcagtggacgccactctctgtttctggccagcttcccaaaccacgctataagcatggagctgtggtgattcagcagaagatgtatgtctttggtggaaaccacaatggccgttaccttggcgacattcaggttttggacttcaaaactttgtcatggtcaaagctggaagctaaatcacaagcagaaccatcagaatcagctggagcagttccgttttctgcatgtgctggccattcagtgattcaatggggaaataagatcctatgtcttgcaggacataccagagaacctgcagaaagtctcagtgagttcacgtggtggtcagtcagtgacccttgttggagacactctagtggtctttggcggtgaaggtcatgggagatctcttctgaatgatctgcacattcttgatcttgagaccatgacttgggatgaatttgagaccacaggcactcccccttccccaaggtcagagcatgctgctgcttgctttgcagagcggtatcttctgatatttggcgggggttctcattctacatgtttcagtgacctacacctccttgacactcagacagtaagaatattttttgctctaaaactgctatgtaatccttttgggagtccaaatgaatcacttggtcgttacagatggaatggtcaagaccaaagcaacaaggtgttactccagaatcaagagcaggacatgcaggtgtaactattggagaatattggtttattactggtggtggaaatagtaggaaaggtgtctcagatactcttgtactcaacctgtctacgtatgaatggtcagttctcactaatcttgaggcccgtgcaccccctggctcaagtttagtaatgcacacaattaatggagaaaattttctggtgtcatttggaggatatagtggccgttatagtaatcaggcttatgctctcaaggcaagtctcaaaccaagtgtcccatctcaacaaataaatgaatcagatacaaatggcttttctcccttatctgtggcagaaaattctagcaggaaagtcatatttgaaattgaggaacttaaagatgaaaagcctggcaatagggcagataacagcaaaaccttgggacaagtagttatggttgaacaaaacgaaatagaaaacagacttaatcaagagcacttgcagagtctccgcctgaagcaggaactaactggtcttgagaacagaaatgcagaacttactgaggaactccacttagttcaagatcaactttctatcgaacaaaccagggcttccaaatttgagaatgaaatttcagatattcaacaacgactacagaagatggataccctagaaaaggagattgaatcacttcgctatgaactggacagcactgtatccgaagaagaatcttcaagtggcaacgagttgcaccgcagtcggggcttttggaggtggaatgggtgaactcctcgagactcaaggagtgagtattgaagagaatactcttccaaatagttgtcattattttaatttttatgtctttcacaaaaatatatgaattcgtggatggtactagttcggaagcatatagaggatctaagcaaactgcagcaacatcaactgtgaaaagcatcttacagaaagtaaaacgagtatcatgtggcccagaatttcctatgttagaatagtttcttatctgataatgacaccgacaatgatcaccataacgaattattttttttcatacatatgtggtgggatattaa

SEQ ID NO: 43983 - DNA, 1949 bp, Zea Mays
aaaaaacttttttaaaaaaaaatcactcccacgtcgcctcgcccgctgcgacagcgcatacgccaccctcccgttgcgtacaccgtatgtatctacggtgactcggggggcacgcagacgcagtggggactggggagagcgagagcgaccgaccgaccgagcaagggtttcgtctccggcggctgcagcggagacggatctgggagggatggggaaccggataggcgggaggcggaagccgggtgtggaggagcggttcacgcggccgcaggggctctacgagcacaaggatatcgaccagaagaagctgcgcaagctgatcctcgaggccaagctcgcgccctgctacccgggcgccgacgacgccgcggccggtggaggggacctcgaccttgaggagtgtcccatctgcttcctgtactacccaagcctcaaccgttcaaagtgttgctcaaaggggatatgtacagtgttttcttcaaatgaaaccgactcatactgctcggcctacacagtgcccattctgcaaaacggccaattatgctgtggagtatcgtggcgtcaaaacaaaggaggaaaggagcatagagcagtttgaagaacagaaagtcatagaagcacaattgaggatgcgccaaaaagaactccaagatgaagaggctaaaatgaaaagaaaacagagcaggtgttcttctagcagaacagtaaccccaacaacagaagttgagtatcgagatatttgcagcacatccttttcagtgccatcatatcaatgtactgaacaaggaaatgaatgctgttcatctgaaccttcatgctctagccaggctaacatgcggcctttccattctaggcacaaccgtgatgataatgttgacatgaatctggaggatatgatggttatggaagcaatttggcgttccattcagcaggaacaagggcatctagtaaatcctgtctgtggcagctactttcctgtaatcgagccaccatcacgtgagaggcaggcatttgttccggctgctcctctagaaatgcctcatccaggtggatattcgtgtgcagttgcggctttggctgagcaccaggcaccaagcatggatttctcttacatgagtggcagtagcacatacccagtctttgacatgatccgacggccatgcaacatgtccagtggaagcctgtgcggcgccgagaacagttcactggacacctggagcgggatagcgccaagttgcagcagggaagtggtaagagacgagggagagtgctcggccgaccactggtcggagggcgcggaggcaggaacaagctacgccggatcggacatcatggcggatgcaggggccatgcagccgctgcctttcgccgagaacttcgccatgggtccaagccacttccgcccggagagcgtcgaggagcagatgatgttttccatggccgtgtcactggcagaagctcatcacggtaggacgcaggcgcaagggctggcatggttgtaagttgtaacactaattttgacgcttcggtgcccccctgcccccttcctgttgcgctgccgttccacttgccccgccccgcttctctgttttttattatttttttggtgccaccttgtttggcattttgctcttttctttctttctctttttttttttgcatgtgttgcttcatggcttgatatagatcttgctatagccctccattgccattgcttatatgtatgtaaaatggaatatgtggaaataggaaagaaaatgggtcagagttcttttgccggtagaggatggggcagtgtgtttttttcgcatcgcagagcattcttaatatcttgcaagtttgcattgtaaccattctcttccgttgacgtgttcttgggtcctgtaaagatgcttgtctgtatggggaaaaaaatgttctagactcggccgatcgaggctgtttttcag

SEQ ID NO: 43984 - DNA, 4258 bp, Zea Mays
atggaggttgagttgagagcattttgctcaaagcattctgcagttggttacaccagttctgtagagaacagtaaccttgcttccgaactgaatcctagaaaatctggcccagacaataccaccctcaattctggaaaaattccaatactaaggttcacgcgcaaaaacaaggataaattcaccaattgtggaaccagtacctctagttctggtaacctgatcagagtcaagactatagagcaaggtgctttagctaacacagttagaaatgcaaatactcaacctattcaaatctgggaaagaggtactggtcatccctctgttggtggggatcatatgggaagttctggtgatattgctgtagtgcttagaaagctaattgacagcggaaaaattagtgttagtgatatagcatctgaagtcggcatttcttcggaatccttggaagctgctctcgtgggtgaaactaccactttttcccatggtttgacgctgaaaattatgaagtggctccaaaattatgtgcaaatgcatagtgctcaaggagatgtttgtaaagggagctcagaggtggtgcaagagagcaaatcagacagattggtcaccacagatactgtcgatgtgaaaaatccattggtcctagatgatgacaagggtgtaggtgtacttgttgatttgctggattcctctgtaactgaacctgcacaaacaagatctgaaagcaatagtaagattttgaatgaaaatagtgcaacatgtgcaactggtgtgactattttgcaaaatggcaaaaagaacatggttaaagaaggttataatcctgagtgttctgctaaagaatttgcaaacgaatctactcaggacttctccccaatcagcaacaagtatgttttaaaggatgaacatggaatattgcattatcaactctaccaattttttgaacttgtcgcgctccaatttatcttgcgtgagatactgaacgccacctctggaaacaaagaatttggtacttccacagagataccaaatgaaaaccaaggtgcattacgtggaagaaaaattaatgacttaactgatgttgaactgggcccatgcttggagaaaggagtatcttcacatgatcattgttttgttcggggtgataatggtagagatagggtagattcagttgaaaatagcttcaatgctcgtgattgtgattcaaattgctctcatggacaaccttttttcaactttgatgattcacattcttatattcatccattcattcagaaaaagatatctcatcattgggacattactttcaatcagaataaggaagctctgaatcactatatacaagagtcatcatatccttcccttgagaaagtaccaactgattcctcggtagaagtagagggtacagccgatacaactgcaacaggtcaagttttgaaagcaaggtctttaaaaattcttgagcattcacctgatgatgaagtagaaggagagatggtatacttacaatctaggctgcttgacaatgctgttgttctgaagcacagatatgaaaaattgatagcaatggttgtccaaaatctctctcgcgagctggatgccctcagtaaaagaaaatgggatcttatttttgtgaatcagttccttcgtgatgtcagagaagctaagaaacgtgggagaaaagaaaagagacataaggaagcccaagctgtactagctgcagctgcagctgctattgcatcctcctcacggaactcaaccgtgagaaaagatgcaaaggaggatgcaccaaagagttctcccaaacttgctgctggatcttcaagggttgggcaacggacttcattgccacaggctaatgattcatcaaagtcatccaacagcaaaatatcatcggataaaaaatctggaagttttcttctgccaatctcctctaaagaaaatgggttatattgtgatgtatgcatgcgaactgaaacattgctgaaccgaatatttgtctgctacagatgcaaggctgctgtgcacataaattgctacagaaatttggagaattctattgggccctggaactgtgaactttgtgaagatcaagacatttcatcagaagctgcaaccgttagcgataaatcacattgtaatggcaagaaattaccctttgcacagtgtggcatgtgccatggcacatcaggtgcatttagaaagactgtagatgggaagtgggttcatgctttctgtgctgagtggttgttggacaccaagtatgtaaggggacaagataaacctgtagaaggaacggaaagccttgtagagggaaaggacacttgttgtgtctgcctccacaatgttggcgtgtgcttaaggtgtagcagtggggattgcaacattacatttcatcctacttgcgctagaagttgtggtttttacatgaacacaaaagggtttggtactacaccacagcacaaagcatactgtggcaaacacagcgtacaacagaaagaggctgatgcacagcaatatggacctgaggagctcacgagcatgaaacgaatgagggttgaattggaaaaactacgcctgttgtgtgagaggataattaagagagagaaggtgaagagagagacggttttgtgtgatcatgaaatacttgccaaaactaaggacacagttattttctcctaccttgcatgcggagcaagctcagaatctgcaactacttcagttaataacaggtcgtacagtggagcagcacaaagatctgatgatgtcacagtagatagtactatttctgggaagaaaaccataaggttttctctgaataacagaggtgctgatagaaacacagctgacagctcgaggacattgctatcattcaaacgcaagttgagtgagaggggaccacgagctggtaagcaacttccgcagaggccaactattgctgcagagaaattagaagatgaagacaagaagacaactgataagaagataactatgcaacagagagaaatgtttcaaaaggagctcattatgacatctgatcaagcttctacacagaacctacgccttcctaaaggatatgcttatgttcctcgggactctttatctaaagagaagctatggaaacaaaatacacagccccataatccacaggagcctggtggataggatcagttgaaatcaagccggttcatttctatcgaggaaggccataaaaaacttgtgcaagcttgttctttgcaactgaaaactacaagcggcaagcagggcaggccagcgctattgccacaagggtaacagcgaatccgtgatcttttttggaccgaagttgcataatggtgcagactgtgctatttgtgtgaacgtatggtgtggcaccataacaagaaggctgcctcccacccacccacacaccaggtaccttgaatatgaccagcaatatgggtgaattgacctacctgtgctataccaaagagagcgtgccaactgtatatatgagtttaatttgtgcgcagattttgtaaatttgccctgtacattcttttcctttgcatatgctagtttagttgtgcaggaaaaagggaattatgaatccttttaggttggataagaaaaggaattagcttggttctttatcatggttcagaagaaaatgcggtggtgcttgcggacaacattgggcaggagtgttggtttgatacatgtactctgtagggatggtgaaggtgccaaaaataaggtcatgccactgctttaacgcaactatttgttgttggttactgggaagtggtatcgtacaggctgagaaacaatgttttactgttttagataattgtcgccggtggctttccatgtccccttatgttattgggaaacactagtccctttagggctcgtttgatggacatgaaaatggagatcattgcctcattgggaagggatccccttgctattcaattttgaataacaaggggatctccttcatttcactgtccaccaaactaacccgaactggtttcgagatgtcaagatagcaacaatgttgaaataggcctgtaagttctttggtcgagaaggtatggtagctgacattattttttaatttatacatggggtatattgtatctgggacgggctgttttctgcttgccgtccagattatagccttggttaggcgtatttagtaatttgctcataatttagtggttcatgttttgaattcttttgctcgaaatctggaaaggtcgtgtctggtaaatataaa

SEQ ID NO: 43985 - DNA, 1242 bp, Zea Mays
tgggaccgtcagagactcggctacctctcctgcaaaatggctatggcagtggcttccttcgtcgccgcttcgcaccaccacggcagtcacctggccgccggcgtccccttctccgcgcgagtaggcaggagcttaggccgcagtggcgtcaccatctacatgagagcccagaccaaagaggatgacatgttgcgttacaagttggatcgtatcccttttctagaggagaaggtgagaaaagtaagggagaatgggaagatcatatgcctggacattaatcagctgatgttatctcaagagaatagatttgcattcaccatggaggtggctgaagaagctaatgtctatcttgagaagaacaggcatgaatatgggctgaagaagcctatactgcatgttctcagtgaccgcatgaatgaagctgggttttctcggcctgagggttacctttatccttatcctattaagcctggtccttatttcattaaagaggaaggaaattgagtaaaatcacgtgctacttgtaacaggattatcattttcaacaactatagtttggcctgcatccagacaaaagaacatattcaggtatggtattaatggtctagcaattaatatattgcacagaagcaagagcgaatcccatacctgcagatacattgaagagaagaattaaaaggatgatgccaagtgcaaaagtgtctttaggcatattttgttctcttcgactggtatgttattgccttaggaggattcatggggacgagctatcacacttctgccccttttatacatgggtgctggctgagacagctaaagatgaaataagttgtgacattatgtatggtctactagtaataattcctgtacagggttatgatgaaacacgtcacccaacagcacaaggtcaactacattcggcacttggcagaagctactttagaagtcgtactgcctttctagtaactaaggccaaagtaaactaaaacctatcatgttttagtagttgatacaatgccttttgtattatacttttctgatctgtgccagattatgtaatggcaccttagtcttggaatgctacatagcatgaggtgtgcttgtagttctttggtcatgtatgcattaacttatatggatctctattattttttgagcattaaagcatttttctgtaatgatgatgatgatgcaatgatggttacacggcaggcctccatactagtaattgttgcggcagga

SEQ ID NO: 43986 - DNA, 207 bp, Zea Mays
cagcatgtggtattccactctgtttcaatacccatagtccagaaccgtacggattagccactaacaggcctccaaaggttcttaacactgcaaaaactggagttctgaaatcccactaagtcagaatttgaggattaaacattccactttgaagcaacgtttagaaccagttacatatggttttagggctgagtaactcaatcaagt

SEQ ID NO: 43987 - DNA, 3845 bp, Zea Mays
ctggagcgcatgcagattcgacaagaggtatacgaaatcttgagtgagctgtacgtccatttggaagtagcaaagaagcaactcctgatgatgcaactgtaaggacaatctttcttatagctctaaggtatgatacaatggcattccatagaaatgttttcccagttcctccatgtcctgagacaaaatagaagtttggattgttgctaagcacagaactaactatggtatgaaaagcattcttttgatctttgtttagttgtatatataatttgtttgcttcttcttctaagtaatttatatcataactcatttcttcttggattagtctgtttatgttatcaatatgttttgtgtgttgtcgcctgggtaaattgtagttatttatttcctgcccattcttagagaatagctcttctagttcttcaagtaaataatgttgtagttctaattcagagggtgtatatttgatagggtggtatttttggataagatgtttgtgaatgtcatcgaccattgtgtgccatgtggtgttgaaaaattctttttcatcttttatttggcaatatgttagcattatgacaaatagattgcgtagttcaaatgatgttgcccaattagttgcttcttgatatgtgcgataccactcattgtcatcgtctagtaatcctctagctgcgcaagcctctttaaaggtttggtataaaacaccattatacgttcgtatatcttcatagtttttagcacctttaacaatcattagaagcattcttaaatagaatctttcaccttcagcagggtttacataatagagccttccaaatttgaaaccatgttgtcttttcttccattgtcttttttctccatcccaacgccattgtttgggaaactcatagtatgttaattcttttgcatcttcatattgcttatttgcattaaaccattcagttagcattgtctttctatactttagatctttagctatgtctatcaatttatcatttgatttcatcttaattatattcatcaatggtagatgaactggcagtctttctataggtggccaatggtaatgtatctcgtatcctaataatctccaaagagcatcttgctcgcatatatatctgcagtctagatattcttgtatctcatctatagtttctgcttctttgtttacatgtgattcttctcctttttggatttttttgaatataacctttgctctatcaggtcctttgtttacatatttgcataaatatttcaagactgtactcttgtttacatattcaacatttatatgagcttggtatctttttaatagttttaaattatgtggcacaacccatttgttgtctaagttgtgttgttctcttctgatgaaaatcccattgttcctccttcgatatattgtaaagccattttcagagaatgtagtgttttcttcaaaatctttggggtaaattttggagcatttgccttttttcatgcatggacaattccaatttttatctccgcacggtccatgcatcatatgttcagcaacaagagcatatcccaaaggatctaactcgggatctggtatttcagcagatatccacgaatctattgtttctgtagttatttcacaacctttcttgtctaaccaaattaatgtgtgcacatgtggtagacctcgtttttggaattctatagaatatagtagtgctagtacaaggccaaatacctttcctgattgtaagtcatccaaaagttgttgtagtttcatatgaaaaacacggacaataatatcaggtctatcatttggatgctcacctggtaataaacatgttgttattttaggccatttagggttacaagtgcatgtaataaaaagatctggtggcccataggcacaacaaatagcaatgccatcatggtaattttgtatcatataccgttttgatccaacatggctagatggtaataacaccttttttcctattcgactggcgtcatatattcctttttctactgcatcaaaaataccttgtacatattcagctcgtaattttgattgatttctaacaatataatcaagcctgtcttcatcctccattgctcgaccgtctactactacttgttttgataatcggccataacataaccagggattaggctgattaggtctatagtgcacatgatatttcaaaaattcatgcaaagttactctatctcttttggagtcatctctgttttgactaatgtgttgtccatggtatttaatacctagttgaaagcctcgttcgccatatggaaataggagcgggtattgtagaggcatatatgctggatggaaaatagatatcctttgaaggctattttggtgtgtgctaacaatgatgtcccgtttgtagttctcaagtgataaatcacctacaatcagcatagctaattcttcctgatgtggcatctcatattgaattctatcagtttcgtcagcgcctactattctaatgcttacatctatgcctttgtgttcttcgagaaaatcacgagcttggcggaatatttttactaatggattatattcgtcgagcatttttttagccctctcactatttctggatctatgtcttgctcacctggttcttcatttgttagagccctaattctattttcaatttcattctttgtatcaaaaatatatagttctgcaaatttggggcaattgtctggtaagggtagtaatgatcctattcgatgatgtatttggccattgacacgaaacacatatggtccctcaccatcatttatttttttatcaatatttccccccatggaagtaaatgcaaacatgctattatattgtcttattttttgtagaaaatgtttacatcttgtgtccatttttcgttgtattaattcattaagaaaagttgggggttctttatattttggtattctgattttgccatttttgcagcagttcgaatatattggttcctgattattgtgtctcgtcatggatttattgcgttcattgaaccagaaaattgcatcgcagtgtctacatttgtattctagtttaccaagaagagaggtgttttgaaatagaagagagggtacatatttgagcatatgtagagcccaggtacctcgctctacaacatcaaggattatcttgtcattcataagagttaaaggccctttcttcagtctttcactattaagacacaatttcatgttgcaaagatcttcaatggatgatattgatgacgatatataagggatatcactcttgagccacataagcttgatgaagagattgttgaatctaatcttgagcttgaagcagactttgtacaatttaaatatgatgatcgatcacaaaaggtacttcattctgttgccacaaacatgtttagcgacaaggagatgtgctgctaagtctgtttttacatggaagatgggaaatggacataaacagtgaacatgaagaagggtgtgctagatggaaaggaaaccggtcaagctgattgaataagaagaagtctcttaactactataaatccatccatgaaatggagaagattaatgctaagccacttcaagaaaaaaggttgggtctagtcgttgttgtctctatactggcaaagggaatgcggagatacatttcgagaagaaaaaggcaatgatatggaggtgttttgtctttcattgataaaaaattagaaatgagcaggtgatgaatgtcacatgaatatatttagctatttcaaatggaaaccaactttgttattgtactggcttttgttcataataaaaacacagaaggcaatggaaaatctacatgcaaatgttttgct

SEQ ID NO: 43988 - DNA, 1237 bp, Zea Mays
gtgacaatatatttgttgtcaaaatagattcatatatcattcaatcataaacgtttactctaatttacatctactaaaattgcatggcatcatataagttcacgcaccgtttgaataatcagtgtaattaaacaagctcctcctaatcccagatttgcctttcagttctaaaaatacacagaaaatttattgagtgattttaggtatagttgatttcagtatagtgtgatttagtatgactgcaagctgaaaaaaatggtacagtaaattgttagaaactcactcagtctgtaatctagttggtcttatatatttgggtgtggcgtagaaacacctggcagcagtgttgcgcatgcccaggtgtccatcagtttgtgtaagttaatcagaaagacccaagaaaagctgcggccattagcgcaggcaaatgtgtgtgtatctgttttcctgtgcgtctgtgtgagttcgtcgtagtcaccatccttgccgccacatacctcactacagttccgttcattctaaagatgaagcactattttatctgaataatattaagcagagaacagaagttgaacaggaaggaagactgaaggctttgagaactgatagaggtggtgagttcaactcaaccttttttgatgtgttctgcagtgagcaaggcattaagcactacaccactactccttattcacctcagcagaatggtgtagttgacaggagaaaccaatctgcagtagagatgacaaggtgcttactgcaaagcaaaggggtaccaccaaggtttttgggggaggcagtgacaacagcagtctgctgaataggtctcctactaaaagtattaaaggcaaaactccttatgaagtatggcatggcaggaaaccacaagttggtcaccttagaacttttggttgtgtatgtcatgtcaagaaaaattggtactggccttggaaagatgtctgagacaggcacgaagggttacaggttttttgatccttccactgagtggctacatgtgagcagagatgttctgtttgaggaagataagagttggaattgggacagtgaaaacagtactgaacagattccaagtgtacctaaaacttgtgaaatacagtttcagtataatataccagctcaggtaggccatctaccagttatttcagattctggcactgggagtattggacacagtctcagtggaactggtggtgggcattcagggggtgttccagcatca

SEQ ID NO: 43989 - DNA, 1950 bp, Zea Mays
agcgaatcctaagtttcataatggcataaatccaattttctctacaggaaacacggcatcctcgctgacgccggagaagccgaagctacaagttcgcccgtcggagccgcagcacaggcgcttgcaaacgcgatggggagcgcggacctggtgctcaagatggcttgcgagggctgcggcaacacgtcggatctctacggcacggggtgcaagcacaccactctctgcagtgactgcgggaagtccatggcacgctcccgtgcccgctgcctcgtctgctccgcgcccatcaccaggctcatccgggaaaaagaagaatgccgagaacaagtggtctctccataaggagggtctgcaaggccgtcagatagccgagaatatgcgggaaaaatacaacaagaaaccatggattttggaagacgaaacaggccaatatcagtatcaaggtcaaatggaaggatcacagtcagctacagctacatattatttgttaatgaggcacggcaaggaatttaatgcatatcctgctggctcttggtttaatttcagtaaaattgcacagtacaaacaattgacactggaggaggctgaagaaaagatgaataagaggaagaccagtgcaactggttatgaacgctggatgatgaaagcagcggcaaatggaccagctgcctttggttcagacatgaagaagcttgaggccacaaatggtggggaaaaagaaagtgctcgtcctaagaaaggaaaaaataatgaagagggtaataattctgataagggtgaggaggatgaagaagaggaagcaacacgcaagaatagacttggactaactaaaaagggcatggatgatgatgaggaaggtggaaaagatctagatttcgatttggatgatgaaattgagaaaggtgatgactgggagcatgaagaaacattcactgacgatgatgaggctgtagacattgatccagaggaacgggcagatttagctcctgaaattcctgctccacctgaaatcaagcaggatgatgaagagaacgaagaagaagggggcctgagcaagtctggcaaggaactaaaaaagttgcttgggcgcgctgctggactaaatgagtcagatgcggatgaggatgaagaagacgaagatcaagaagatgattcatcgccagtgcttgctccaaaacagaaggatcaagttaaagatgaacctgtggatagcagcccatctaaaccagcaccatcaggacatgctcgaggcacacctccggcatccaaatccaagcaaaagagaaaatcaggtgttgatgatgcaaaaacttctagtggtgcagcttcaaagaaagcaaaggtggaattggatgcgaaagcatcaggcctcaaagaggaggcatcatctttggcaaaacctgcatcaaagacctctgctgcatcaaaaagtgggacaagcgtatcacctgtcacagaggatgaaatcaggagtgttcttcttgcagtggctccagtcaccacacaagatctggtatccagattcaagtctaggcttcgaggtgcagaggacaagaatgcatttgctgaaattctgaagaaaatttcgaagatacagaagacgaacggccacaactacgttgtcctcagagatgacaagaagtaaataaccgaacaaaggcgctgacatcgcaaccgttggctgtactgagataatatgtttatgtaacatgctgccttgaagataaacaagtctgtaacactagaattgtcttctaacccttgtgtacttgaattttattttactattccagattttatttatgcggctttgcactacacacctgttataaatggaaatccattgggagttcatctcgtgaattttggtagattgacataatttctctcgcttaaaataattattagcttatggggaacccagtgcagttgtgaattttgcgttgt

SEQ ID NO: 43990 - DNA, 2186 bp, Zea Mays
ctcctgctgtctgctgccgaagtcgccaactaacatagatcgcaccatttcccgttcacctccccttccgttacatcccaccatttgctgttcaccttccctcccgtttgcctcctctcgctgtctcgtagcttctttcctccggcgacggctgggcgagcggccgccagtcggtcccttcgtcggcgacgagcatccacctgcgccggcgctccatcttccgctccctcccttactcgcgctcggcacacaggcgacggcggcggcgctcaggatcgggctatcaccgacggggtccggcttctccgcccgcctctcgccactcgtcctcgcctccggtcctccgcacaccggccggtgatcctgcaagggttggatgatgggcgagatctgaaggattctgatttctataagcagcaagctaaacttcttttcaagaacttgtcaaaagggcatcatgaagcttcacggatgtcaattgagacagggccctactatttccactacattattgagggcagagtatgttatctgactatgtgtgaccgctcttatccgaagaaacttgcattccagtacctagaagatctgaaaaatgaatttgagagggtcaatggcaaccaaattgaaactgctgcaaggccatatgcttttatcaagtttgatacattcatccagaagactaggaaactgtatttggatacaagaactcaaagaaacctcgcaaaactgaatgatgaactctatgaggtgcatcaaattatgactcgcaatgttcaagaagttcttggtgttggtgaaaagctagaccaggtcagtgaaatgtcaagcaggttgacttctgatacaagaatatacgcagataaggctaaggacctcaaccggcaggtatccacatgcttaattgcacaaggttcatggtttacatttgccagatgaggcgttgattcggaagtatgctcctgtcgccattgtcattggggtagtattgatgctgttttggctcaagaacaagatatggtgattgtacagtacgaaggatactgggccctgttacaacaccggagaagaacagatggagataaaaaccaggtctattctggaacaagaagatgctttggtgacttgtatcccgtatctgcccattcaagcgattacttaagctgcccttttgctcctccctataagctagtatcaaagtgaattcgttggagtgcagacctgataagagcatctccggaagtctttcaaaatttcactctaaattctcattttgagagtcatttgcttaataattgttattatgtttttttcactctccaacagcctttaatatcctgtttgcactagggagccattctctttctatattggactaccgatgaatttggaggagatggatatattcggatagctgtttttaaaaaaagctgttgggggaatcttagcaattaggaagggtatagtctctagagaaactcatattttgtgcatccgttgaactcaatgtaatataatataagagctctagagttctacatcggggttgtggaactcaatgtaatacaagagctgtggagttgactttacatcggggttgtaatttttagggtggaactcaatataaagattcagggtggtctgatgagttgacgaaactcgagcatgctttttatagctgcctaatatgtattgatttaaggtcagagagagtcgtgtatactacagctacgagcagaaccctccgtggcaactggcacccaagtcctgtcctgtccagcaaaaaggttgggtgcgccgtgcgcgtctccacggggtcggagtcggaggtggatgggcagtgggcaaagcctctcgcgctggcgaccgtgcagatacaggctcagtgctcaactgtctcacaggcaaggatggcaatcgggccttattattcgcggataccttattatatccataaccatacccacggataccaaattccaccatacccgcatccaatggataattatccgcggttatttacccatacccatacccatacctattgctatccctactcacaggctcacagccgcgcacaggaccgtgtcggtgtcacggtggagagacgtctcggcgagtcggtggtgccacaatcgcggacacctggcgacgttgctgacagtcttttactacaccctttctaa

SEQ ID NO: 43991 - DNA, 944 bp, Zea Mays
gctagctgtaaacaggcccggaagaatattgcgctcctgcctttacctcgcgtgcgcgacaactagggcgaccgccgtcgctaaacgcccagctgcccaggtcttcgtcgggcccctcgccggcgacgagcactcaacacactcaccaggatggcgctgaggggggtctggcagctccagaagctcgtggtaaactactgcgactggggagggagcagcaggggcatcagagccttcatggaggcacatcttccagcctttaaggaaaagattccacacttagaagtggtgacagagcttgtccgcggtcaacatcctaacttgaagggaatttacaaaccataacgagcgagtggtctgcgtgagaaatttaccgccagaagaaatactcctgcaagccaccaggctaaggaactctctgggcaggaaagtggtgaagctgcggaccagacacgtaacgaagcggcccagtgtccaggggacgtggacgacggagctgaagatgtgaagccaagctagcagtcaaggtgtttcggtgttcttggtggtgtgatcgcagagaaatgtcagctgtgtcaataacttcggtagagagctgccgttatgccagcctatttcgatagccaaactatttacaccttttgttccgactaaggctgcctcgagcagtattcggtaaagggtccggtacccttgactctaacaacacctgctaaggtctagtttgggtactttagtattgaagtgatttggagggattgaagagtatataaatcccaaaaaaatcaaaaactctcataatacatctcaatccactacgatcccttttattactagattacctaaactaggcctaaatgagcctgtaaaatttagaggagcctcgtcgaacgccatatctagagttcagctctgcttaggtgtgctgcaatcaacatgaaaga

SEQ ID NO: 43992 - DNA, 1349 bp, Zea Mays
tcattcacctgcctcttcatctcagcctcacgccacgcacgcaatggctggcgttcgtctcgtcggcgtgcgtccgtcccctggccgtctggagaggtgggtggggagtctaccggacgcgggtagccggggcggtcgccccaccttgccgatacgaggtgtccgctcctatttcattcggtccattccgcctctcggaagagttgagagaggagtaaggaaggcgaggacctcgcgccccgcgatgggcggcgacctgtacgccctcgacttcgacggcgtcttgtgcgacagctgcggggagagctccctctcagccatcaaggctgcgaaggtgaggtggccgtcgctgtttgagcaggttgacgccgccatggaggagtggatagtggagcagatgtacacccttcgtccagtggtggaaacaggatatgaaaacttattgcttgtaaggttgcttgttgagatccagatacactctgttcgaaaatcatcagttgcagatgggcttagcatccaagaaatattggagaactggtcaaaactgaagcccactctcatggatgagtggcaagaagatagggaatctcttgtagatctctttggccgtgtaagagatgactggattgaaaatgatttttcgggctggataggtgctaacaggttttatcctggaacagctgatgcattgaagctttcaagctccgaagcatacatagtcacaacaaaacagatttgctgaagcgctactcaaagaattggctggaatagactttccctctgaaaggatatatggccttggcactggtccgaaggttaaagttctccagcagctgcagcaaatgctgcagcaccaaggcctaaaacttcatttcatcgaggaccgactagcgactctgaagaatgtgatcaaagaaccagcactggacaattggaacctctacctggtgaaatggggatacaacacacagaaagagagggaagaaacagaggctataccaaggatccaactcattgatctaccagatttcagtaggcagctcaaataactaccaatggcgtcgacttgtgaatcttggaaactttgtttttgtttggtatacgtaactaatgaacagcagaaatacttgatttttcgattggatatcgttgttcacatatccgtgtactgattttttttccaagcattctcggtaaactgagacgtcatgccgtgagcccgcgcacgggcttcacagctcataacgagaatcgttgcgggaaaagcacttacctcctcaactacaactagaaaatatgatgtctcgactgtgtttggtttaagaaacgaggtattacattatttactt

SEQ ID NO: 43993 - DNA, 1316 bp, Zea Mays
ccacggtgttaggcgtcaactagtgaacctgcactttgaacctttgcaacacctccgccacgaagcgatgtgctgggaggcaaagaccggcgacgaaaaaggactcaaaaaccatcatttttcgccttcaggcttggggatctcctctgcacccggcacccgcccgacatcgtcaccaaagtatcaaagccgctgcatctccagcacgcagaccgaggaaatcctcgaggtgccgaactctacggtatggccaggatgcaactccatcaccgccaaatcgctcaaagtatcctcggacgatggcgcggccgacgatgcactcgcagcagacgaagaagaaggcattggaacgtaccgtcggcggtggcgcgcggtctgcttgatgcgggccagaatttcgaagcgggagagcaaggagggcatgcgagcagtttaggaaagctagggtttctacagagtgagtggaagatgggaccaggccgactgcggtcgcctttttataggcaggacgcgacgcctcaagaaacacacagtccaacagtaacacgtccatcaacgatcacatttcaaaaacccccgtgggaccacttcgagcgagggcagcgtcttcaccatctagcggcatcttcggcaccagctgacttagtcgaactggttcctcggagggcaatgttggggcaaaggcaaacacgctactcttcactctacgcctttcgtctcctcatcactctaacgaaggctgcatccacaacatgccagaacaagccgagggtgcgacccggacggagaccggtgcgaccccctttgctctggtgtcacagacgaaggccccgcatgatgtctacgggccacccgcgtccccatcgccggggaaggctcatgtgtgattcggcccatagtgatgggccccgcgaggtcaggtctgattagtgtcgtgtctgtaatagggtttaccttaatgactgtctgtaacctcccctcgtgggaatattctggggataaaccgggtactcgagggtataaacgtctttgatagggataggcggcccctcgagtacctataaatacccccgtacagtgccctcactcgggagattaacaaagcttttggcattccgtgctaaactttgcaaacacactttccactcccttgttggatcaatttgccctggtaggcaaaacaccaacaattagattgcaacctcgctgacggagagtacgtgctcattctcgagcaaggagctatccacgaggaagtctaggagccagctctcgagcctgccacagaggatctccccgcagccctagcatttgaa

SEQ ID NO: 43994 - DNA, 2093 bp, Zea Mays
cctctcttctctttttccacgggagggatgacgatgccgctcgcgcgcgacgccgcatcactccctcgccactcgcgcgcccgggctccttcccgccacgctcacgacgatgccgtccccgacgtcctatcttctcctgaatccctccaaaccctcctccttccgccgactctcggccccgcgcctgagccggttccatgtctcctgcgacgcgccacggggcggcgggaggcgcgaggtcatccccgccggtgccagcaaggccaagaaacagatcgtattcttcgacgccgccccgccggtgtcccaggagggtggaggcgccgtgaagaaggcggggagcgagaagcttacccaggtgggcagcggcaacgcagcgctggcgttgttgaggagggcaaccaagatgacactctcggtgctgtccaacctcccgctcgctatctccgagatgttcgccattgccgccctcatggctctaggaacggtgattgaccagggagaggcacccagctactacttcgagaagttccccgaggacaacccggtcttcggcttcatcacgtggaggtggatcctcacccccgggttcgaccacatgttctcctcgccagtcttcctcggcctccttgcgctcctcgcgacgtccctcatggcttgcacctacacgacccagctccccatggtcaaggtcgcaagaagatggtcgttcacacattccggagaaagaatacggaagcaggaatttgcggactcgcttccccaagcatccattcaggatttgggagtcatcttgatgggtgctggatatgaggtattcaccaagggtccatctttgtatgctttcaaagggctagctggtcggtatgcgcctatcggcgtgcacttggcgatgctcttcatcatggctggtgccacgctaagtgcgacaggaagctttaagggctccgtggatgtgcctcaagggctgaactttgttataggagatgtcatgaaacctagaggggtcctctctgttgcgccggatgttttcaatactgaagtccatgtcaaccggttctacatggagtactatgacagtggagaggtctcacaattctacagtgacctctccctattcaaccttgatggtaaagaagtgatgagaaagactatcaaagtgaacgatcccctgagatacggaggggtcaccatctatcagacagactggggattttcagcattgcaagtgaagaaaaatggtgaaggccctttcaatttggcgatggcccccttgaaactgaatggggataagaagctctttggaacattcttgccacttgaagattcagactcgtcgaatccaaatgtcaaaggaatgggtccgtcggccaagctcaaaactgcctattgagatcaatggcaatgaaatactcattgaagatgctattggtagtactggactggatcttaagactgatccaggagttcctattgtttatgctggttttggtgcgcttatgttaacgacctgcattagctatctttcacactctcagatatgggcattgcaagatggaagtacagtggtcgttggaggaaagacaaatcgagccaaacttgaattttctgaagagatgaaccggctacttgataaagtaccagagctgatcagcgccgatgagaatctattagataccaaatcgacagccacatgaaacatttttttgtgtgtttttgtttgggattgctgaagatgcagtagctctgttcaggtgaacacacgttcgaattcacaaaacatggccttcaagaatagaaaaactgttacaatctttcagtagaacttcttagatcacacttcaattgagctctttgtacatctttgaatgaggaaactaaactgatagcttgttatattaccaatttaccaattaccatactttagagcaaaataaatatgtaattttggttctgttactgatttttctagtgaccagcatgagttgcctcctactgatcattttttagacaatgggacaaggttcccgcctctgcgtttccgcacatagcgtccacatattccaaaatcgggttaccggcttgcttgaaag

SEQ ID NO: 43995 - DNA, 1020 bp, Zea Mays
ctctgccacaggtccacgcttccaccagcccactccccgtcgccgacctcacccccctcatggacggtggccgagccgcagccgtcggcggcgacccctctcccatcgctgctccttccaatcccccggcgctgagcagccggcccgtcgatgtctcctcgttcacccataccccgtgctactggttcctctctggcatcagaaagcaggccattctgatgatggatttatttgctgggattatcacgtgatatgcatccaggcgaagcaaagaagttcttgattttgtttgggatctggactccgatcttcctttcccttccccattgatccaatatgtttctgaggcgattcaaccactatcattcggcaattccagatatgcaagactcttccgtgtggttcatgctcctgtgtttcttcaatcgtttgcctcagacagaagccatatgaaggatcctgaggggaactggattcagttacccccaaaatatgaaccgatcgtggctgaagatggaaccaccaataacctcaatgagtacatcatgatgtctgtgggggacgtggcagacagagaaaggatggctaatgatgtttactgcaacaagcatggtgtggtgctaaatgaaacgatcttccctgaattcttcgcccagctgcctgctccacatacttagcaagcgatctttctgttgtgatgggttactctgtacacttcaatagtgcactcacaagattatgaattaaaatatatgggcactattggacacatggtgcctctaagtagcgtttcagatagatcctggcctgttttggaaagcaaaatgtggggatctcatagttctgttagcctagacatctgaaagcttcatcttgtcccaaataatgatgactaggtcatgtttaacggctttagctttctttggtcattgttcgtcgaaacttatatgaacataacacttctatgtgctcgttgttaccttacaagtaaatatgcaacccataaactttaaacttgca

SEQ ID NO: 43996 - DNA, 383 bp, Zea Mays
gtttattccaggcaagccccggtgcattatccccttccttgtgttttaaaatcttttatcaccttgtttgatgcattaggtgataggagttgtgtgatcaaacagttgatgtatttccttccttgattaaacaaccctaatatctgttttatgaaaatttagtgatgcttagctttgcttactaatttaggattgtttttaaaatatgatgtgtaacacgggatatgggaatttatgaaataaaaggacttgtgatgatgaacccattgtggctatgatggtttcatcattcaagtagagtacctctctcaggtatcaagttttgggaaataatatgtaatgtagaccagacgttgagcaggaaagttcgcccgtctgtgtcg

SEQ ID NO: 43997 - DNA, 1314 bp, Zea Mays
tgccaccgctttccttatcttgggcgttggacggacggggcgagcgagcgactcgagcgtaccgccgccgccatggtggcgctcgcctcactctcatctctctgtccctgcggcatcgcccgccgccgcgctgcgtcagccacttcatccaccgccttttccatctcgtgctgcgccgtcgcgaccccgtccttctcagggaaaggaccccaggaatctagaacaccccgaagaaggctgaggaaaactgagggtgctaccaagagcctggaagattcggtcaagcgaaagatggagcagttctatgaaggggccgatggtccacctctgcgagtgctccctattggcggtcttggggaaatcggcatgaattgcatgcttgtggggaattatgatcgatatatcttgattgatgctggggttatgttcccagattatgatgagtttggtgtgcaaaagattataccagacaccacgttcatcaagaaatggagccacaaaattgaagctgttatcatcacgcatggccatgaagatcacatcggtcattccagcactcgattcaacaacaccgatttttgcatcatctttcaccatggagctaataaagaagcgtttgaaggagtttgggatcttcctctcatccaggcttaaggttttaagaattaaaaagagatttcaggctggaccttttgaagttgaacccatccgtgtaactcattcaattcctgactgttgtggcttagtgcttcgctgtggtgatgggataattttccatactggtgactggaaaattgatgaatcaccagtggatggaaaaaaatttgaccgacaagcattggaggagctctccaaagaaggtgttactcttatgatgagtgactcaacaaatgttctttcccctggaagatcaatcagcgaatctgttgttgctggttcattgctgcgacatatttcggaagcaaaaggaagagtaattacgacacaatttgcttcaaacatacatcgaattgggagcatcaaagctgctgcagatttaactggtcgaaaaatggtgtttgttggaatgtcactcaggacataccttgaagctgctttcaaggatggaaaggcaccactggatccatcaaccttggtgaccaagatgaccaaagtattgaaaccttttctcagatctttgtcgagagatgcagcagcctgactccaccatgaacggaacctgctagaagggcagggtggcttgactttgtccagcctgagctccctcaaaatccatgtccaaacctccctggaaagcacacaggtggagaggag

SEQ ID NO: 43998 - DNA, 2262 bp, Zea Mays
gccttttgttttgtttcctatttcctttccttctcgtgtagcttttcggccggcgaccgcgacctgaccgtccgccactgcgcacctgccggcgtctgggcgacgccccgccgccagcctgccaccaccacgacgcctgcaccggaatccgacactgtctcaaccactccgtcgtgcctatccgaagctcaacggcggagcccggtgggatagggcggaggcgctgaggcctgagggggagactggacctgggctgcacgaggtaggctgtgcggtggcggaaggaatcaccgatgagcgatgcgcaggcgacaggggatggtccgcgctgcgttggctgcggcgggcgcgtgaagacgctcttcgtgcagtactccccgggcaacatccgcttgatgaaatgcgataagtgcaaggctgttgctgatccctacatcgagtgcgagttcatgatcatcttgattgatctcgtcctgcacaagacaagggcgtaccgccatgttctgtttaataagctgagcatgggatcatccgttgacaaggtatgaaatatgaatctatgctttctaggccgactctggttgctgtatcacattcctggaaacatcaaattggtgcttggctcatactgcaaacatcgagtaccacctttcttttggctggtctcatagtagtaatgctctaaatctctaatcatttatgcatttcactttgacttgccttacctaatcagtatgaaacaattgttactggagatgcccacttgtcgagtagttaatgtatggatgaagctaaatatggctttgtcatcgttatccatgctaaattgcctggacccaggtgtgctctcctttctgcattaaagcaaagcatttacttcttcggtatcttttctgtttcaattttatctcgtggagtaacacaagcaatcaggaaggtatggatggcattcaattttactcaataattcccatgcttctgcttgaaaaactggaacttttctttctgccttttgctaacgatagcattcctgtttcaccgaaccttcggccttttgtgatttttcgacccttcacaacagcatacaagaaccaatttgacaacaacatacaagaaccaatttggcacaaaaaagttttctatccgtataggttctaaatgaacagtttggcaatcttgttgcaatctgatctcatattgtagtgatttcataccttccctcaagaacatatttggtgggtatgtcttcatgaccatatataatttgattccttttctaaaatgtctgttgtgttctggtttgcagggaatactttaccggtctactttgatacacattgctcttgacacataatatctttttcgaaaggaaacagagctggtggggcttcttccaggagcattttctcaacagtttccaattgcactgaggttgttggcgatgcattattgggaaacatcgtatttatattcatgttactcctgggagtgcgattttttctcaaattatctttcgatattataaggtatagggatattctgttcgctgtcatcatttcaagctacttcaagttgtttcttttcacaatgatggtttgggagtttccgtcatctgttatattcattgttgagatgtttgttctctcatcaaacgttgtagccctgagagttgtctcgcagtttccaagagcccactgtttcgcggtctgcttactagcgcacgcagcaaaatacttgacccagcgatggatccttggaacgccatgagagcctgaactcgtacagatcaatcatcctggtgcttccagcgacgtctataggtatactgtggcctgatgatgagctctggtttctatcgagttctttgactgtgttgccttgtctcctccaccccctctccctgtgactgtgagtactatcttcaatgtacttgcggcgaagacggatatggcatctttactcataggcagtagctgttgagtgttgtgtggttggtacttggtcccttgacccaaccaccggcctactactacgtagcatctgcggcgtctcctgttcacgaaagaatgcagcaaaggaaagacctactaggctattaccatcgtgttcttctttggcggttctgtcaacattacctgtgaactctcgtttcctggctgcagctgcagatgtgctccagtggagcctaccgctacgcgctaccactttgtgttggacacttgaactgcaatgcacatgcacagtcacgggcacagatagtct

SEQ ID NO: 43999 - DNA, 1212 bp, Zea Mays
cacatggcatctagcaaatcatagaagaagctatttgcagaagaagttatttgcacaggaaacaccatgctattgccacccctctccgtggcacctgatggattcgttctttggggaaacattttgttggctaggaaacccacttattccgcgtgggtcaccagcatctcttcgaatttgtaaggcaaggtttatgatttagtgtttctttcaaagtaactacaattgatctttctttgcttccaacataatcatgtcatttattttaactttcttcaattcttctaacatggtaagatatttgtaaagtcagcggttttgcagatacatttatgtgacagaagttggcaggttttgtagttccaccaagtcatatagatggaataaatatatctgaataacttatgctaggaaaaatttatgcagtttaatgcagtttatttcaaccaccttgactttttcttatttttctgttgctccaggaatcaagtaaaatgtcaaagagaaaacttgttctggggactgttcactgaacttagcagattatgcatctgctagataatcctaccattgtctgtgcctagcagtgcaacagacctggtcccatcactccatgtatgcctcttatcaaatatatggctccatgtattgggctatcaagatttattttggcttgtggttcttgttagataactacattatgtggcatttagtgttattttctctttccagcttactttaagcctggcagaagtaagagtatctcaacagtcacctggtgcttcacagcgttttattgctgtcccattgtcaccttcctctgccgactcggttccttctggaaaagattaggtttctatcattaaggtggtcttgagaaatataaaagtcgtaagagatcccgtgcatacacggaggttcagaaagagtcaccaagactatgacgacagtgagatgtattgttttcacatttattgttgcagagttttcttatgacaccgactctcttgatgatgatctggatggcagagtgtaggatgatgagtttgtgtgttcagccatcaggaagtcctttagctatgggtcgctgtagattatgaatgtcggtgccctactatatgcatctaggatcgatggagacgatgagggctaggtaaattacagtcaccagaattccgatgtcagttatcatgatgagtaagtgccatcctc

SEQ ID NO: 44000 - DNA, 546 bp, Zea Mays
ggataattagaatctaagccataaggatgaagtaaccaacttagaccaatgatgccacaattgtataaaaagagggttaaaagcacatctagactattaaaacacaacaatcttcacccgttttttgtttttgaaaagatcaaataccatccgagtactcaataacatgtgtgtatacatgtgcatttatattgtaggatctctatgcatatatttattcatgtataacatcgttatcaatcctatataattgagcacttattcaaagtacatatatacatatatgtaatttgtttagatacacaagtggatacacagggtgtggccatggtgtttattgtatagaaaatacctctttcgaatagaacttacagaatgtgcgattcaccttgctccgattagaaaatagcaggtgaccatgcagaaaatagcaagtaaaaaatgatatatgtggttgtcatgagtgtggaaaataaatagataacatattgtttgttggaaaaaacatacatgttcctaacggaggtcgtaggttgttcaaacgag

SEQ ID NO: 44001 - DNA, 865 bp, Zea Mays
tagacaatctacgtgctggcagtggtgggatccatcgtccgtggcaatcaacaagtgatgagccaagccaaccggagaatggagcgtcgtgcacgcgggtccctttccgcgcgcgccaacacaagtgctcgatggccctgctgttgctgtgctccaggccgcgacgttttgtctcgcctagtcgtctcactcacccgcctactaaacccatccatccatcaatcatcgaacggtacaacctcaatgtgagaagcggtctaggcgataaggttaaagacgaggatcgatcaaaatatccagcctccagtggccagtggagcttgtttcagtcaaatggagttccttattgtccgaggtttgcaagtcgggactttctgaaaacccaacttgccacaggatccttggaccgcaatgcaatgcaatgcacctaaaatgagcaggctctgtcactgacgacatggcaatgattccaactgacagcacacaagcaacagccagaggcccaagctggccaacttgctccctagtctaccattcaaatcaaatactaccccccacccccaaaaaaaatgaggtttttttgcagtcgcgttaatattgacgcttgctcgaaagaactatcactaggtggaaaaaaaaaagatatgttaacagctactgcaattcaatccaattgaagactctgttttttttggtctaaaaggttcccaaatgaattcggctttgtttatgtgtctgtatacctcaagtgccaaactttaaaaaaaaacaaaaacaaaaccaggtaccaaatcccgtgtgcaactcaccacctcagtgccaaaaccagtcacagtccaagaagacttggaagaaggaaagaaag

SEQ ID NO: 44002 - DNA, 515 bp, Zea Mays
ccagaatctatatcaaatggcaaacgacgagagccccttatttgtgacaatggaactaacatgttcaagattccgtagcaaagcatggggcactatttattattgggcagttgaactggaatgctgaaccaaccattttttccttgttatgatgaagatattggatgcaaatcagaaatggggagtctgaaccagaacaaagatgtgattctcactatggtttcaactatgcagtattcaagacgcccagcacctacaaattgttggaggggatgctttcatgtcttcaatgctggagaaaagctaaatcttgttgaatttaaagcctactttccatcaagtgtcatccagagttattgatattgtcaagatgatgcccactgttttacagctggagttattacatcgaatggatgactagccaacatattgccgcttcttcgctacggaccctttgagttgtaagaccatcaatgagtatccgtttgagttgtaagactttgtgatattttctg

SEQ ID NO: 44003 - DNA, 1313 bp, Zea Mays
atagtagcacaactaagacttgctttgcttgtcctaatgatccagtctaggttggttgtgcattaccatctggtgtacgtgactgcactttttaatttgttagatgctcgctaagcttttcttgtgcattgtgtccaccattcaacttgattttcttgggagatgcactagtgctctcgcttggaaagtattaggaacttctattagtctattatgtctttattagtctatcttgtcttttcagatgaatgatcatttggattgctgtgttactcaattcaaagttctgtattcaaattttggggctatattcaattatttacttagaccacaatttcaactcagcacagttcaggtttgtgagttatgaaataacttttcatgtctgcagctgtttgcaggaaatgatgcggatgaattcaatgcagttctaaagcagcacataaccccggaaatattgattacaacatgccgcttcaattcagggaggggacctgcatttatcgatgagttaatgcaagtgataccgaattctcagtatgtaaaaaggggaacatatgaactcaagaaaattatggaatatgcaaagaatagggatttcacctcatttattgttgtccacacaaatcgaagggagcctgatgctctacttatcatggggttgcctgatggcttactgcacatttcaaactatccaaacttgttcttcggaaggacataaagaaccatggcaaccctacgagtcataagccagagctagtactgaacaacttcactacacgccttggtcatcgtgttggaaggatgatccagtctctcttccctcaagaccccaatttccacgggcggcgtgttgtgaccttccacaaccagcgagactacatattattccgccatcacagggcctggtaaaactacacatctagcattttaacttcctgtacatcttcgagacaaaagaaaagaaggttgcttcgaaggacaacaagaaggccaagacatctgaaagcaagagcggatctgagaagcaagtgatttgtctccttcaggaatgtgggcctcgcttcaccctcaagctgctcaccttgcagcagcatgggaccttcgacacgaggagcggggagtacgagtgggttcacaagccggatatgggtacgagcaggcggagattcttcctgtgatggatttgagatcgcggagaaccctgatcgtttcttcctgtgatggatttgcgcgcttcgttcgtttgttcttgtttcggcggcgaggatcgaaggtcgccgtcacgcatccaatccaagaggtggatggat

SEQ ID NO: 44004 - DNA, 1252 bp, Zea Mays
actcttcatgacagctacccaggaaaggaaaagattagaatcgcaaggccagattctcagggtgatatgcacttccatgggcacccgacgacattaaattcacaagaataagaaaccccctccaccttaagggttcaagtaggagccaacgaagaagcaagccccatcgtcatcatggaaggaggaggccatcccacccacgctgacgaggagccaccgaaggagaaggccccaccacccaaggagaaagccgcccaaggaaaccttttcatttcagcttaggggccctgatgctcggggaatcaaggaaatatggcacaactattgtccctggtctgtatgcaccagttcatctacatttctttgttgctcgtatggacatggctgttgattgcaaattgaatgaggttcataaccaggtggttgaggttaatgttaaggtggaaagtgcaggcacacataacatgcacaataatgatttctatgctaaagagaagttgctcaaatcaatgcgtgattgtgatccttcgtctttgcgccattggattttgtggcaacggaagttccaggccccattgcagcactacactgcgctaatggaccttcaggactattctgagaatggaactgtaaccgtggtatatcgagtgatacttaaaggaactgatggagaggcatatagagatgccacgggcacaacacagttccatgaggggcgcagggaagatgctgttgcagccgcagaggaagctgcattcagcaaagcttgcgcatggttcggttttggcctgtatctgtaccaccaggatgaatctcattacgacgaccacttccattgaggctcaatctgcaaaagagttgatcataagttgtaacatgcgttggatatgcccctagaaaacttcgtatctagaatcaatttttggtctttgcgtagtatcatactcataacacaaagaagtgaacctatgtagatgctatttgaaacctttttattaatattataattcttattaatattattgtataattactttttgagtggagagaaggaaggccttttgcagctaccaagtgacaaaggccttttgcaactaccaaatgacaaagccctcctctcttatccatcattctgcccacttgttgacaaatatgtagcggtatatatatctttgatccttgtcatttgttcggggtcgatttatgttaacctgggtggctgtaataaatatttgtcggccttgtgttttgt

SEQ ID NO: 44005 - DNA, 2004 bp, Zea Mays
ttttttttatatgtgccccctctctccctcactgctctcgctctctcctttgcactgctcctccgacttgctcttcgcgcagcaagacggagaaacaagaaccatccctccccctaccgctgctactcatgcacgcgcgcactgcctcctggtgccgccgcgtatgatccagacatgaatagggcgcacagcagcagctccaagctcatcaacgagaagctcgtggaacaccggatctccactgcgaagcactgcccccactgcggcgagaaaatcgacagcaaaccggattgggtggggctgccggcaggcgtcaagttcgatccaactgaccaggagctgatcgagcacctcgaggcgaaagtgaaggatgaaggctcgagatctcaccctctcatcgacgagttcatacccacaatagatggggaggacggcatatgttacacccaccccgagaaacttccaggtgtgacgagggatggcctaagcaagcacttcttccaccggccgtccaaggcctacacgacgggcacgaggaagaggaggaagatacagacggagtgcgacgtccacaagggggagacgaggtggcacaagaccggcaagacgcggccggtgatggtgaacggccggcagaaggggtgcaagaagatattggtgctgtacaccaacttcggcaagcaccgcaagccggagaagacgaactgggtcatgcaccagtaccacctcggcgacctagaagaggagaaggagggggagctggtggtgtgcaagatcttctaccagacgcaacccaggcagtgcagctggtcctccgaccggggcgccgccgccactgccttggcagcaacggcggcagcggcggcggcgcaggagcagcataggagggatagtggcagtggcagctgctcgtctagggaccacgaggtgtcagccacatcgttcccagccggatacacagtcaccacggccgtcgagatgcagcagcatatgaagcagcctgcggaccatttcagcttcgcgcctttcaggaaaaccttcgaccaggaggttggtataggtggtgatcaggtgccatctaatcagcttggacgttcagagccgcatcatgccggcctggggcagcagccacacggcccggtgctcgcgacgaagacggctgtgcctgctacagctttcctgatcagtaggccatcgaaccctgtctcgactatagtgccacctgcaatgcagcacgcatcagttgttctcgatcatgatcagttccatgtgccagcaatccttctccatcaccatgacaaatttcagatctgccggcttggaagaactgataatgggctgcacgtcgtccacaagcacaaaaggagatgcttccattgctcacccccaagagacagaatggccttacacgtactggccacctgacaaccaagatcatcatgggtagtagcaacagggacctggtaaatagtggcgatgtgaatgctgaaggaacactaaccgcaaccactttcactggaatggtttttgtctgcttgaatatgcagcgttgctttcttggagaatgtacacctacaatagtggggaaagaacagagaaaaaaaacgtatctctgtagatctccctcaataaagaaatgaggataaaactagttaacagtgtgagctctccaagacagaagagacaaaatggccaacgaaaagagaagggggaaagaccgatgggaggaaaggtactgtgtgtgctgacattgaagggatcatgtgtggacagtttagatgtattagaacaccttaatcaagtataactataatcagtttacggtttatcacagttttttattcgtgctacctgttagtggcattgtttgcatgtacattaacccttttaatttcttttagtttctaaattgatgctgattttcctttggttagttcatgctaatatgcatcacgaagaaataaagttagtaagaagctcataattccttcctttttttagcac

SEQ ID NO: 44006 - DNA, 4848 bp, Zea Mays
  misc_feature (4848)..(4848): n is a, c, g, or t
ctaaagctactctcgctccatcaaaccaaccctcccaccatcaccaaagatatatactattactacatagttaacaaactttatctgcctcctgtcctgctaatctatatatcccctctccactactgctaccttctctcgcgcgtctctgctcaaagaataatgtcagcgtagcctagctagctcatagggattcctctttcatccctcctgagatcgacgatctcaccaattaagaacacacacgcacacagcagctacgtacgtacctagctagctagcatgatggaccatcagctgttcgacgaccccttcgggagcagcatctcgtcgctggaggcggaaatcttctccgccgccgcccagctgccgccgtcgccgccgtggccagacatcgacctcgacgacgactacgacatccacgacctctccgcgccggccgccaacgccgctacgtcctcgggcggcggctacggctccggcggctccggcggccacaggaagctcagccacaacgcgtacgagcgcggccgccggaagcagctcaacgagctctactcctccctccgctccctgctcccggacgccgaccaaactaagctgagcatccccaccaccgtgtcccgagttctcaagtacatcccggagctgcagaagcaggtggacaacctggagaggaggaagaaggagctgaccaacgccaactgcaagccgggagttctgaaaaccaccaaggccgtaactcccattgtttctgctacctgcctcaacgacacggagatcatggttcaggtcagcctgcacagcgatgtggccgccacagctctccctctctccaagtgcatcaaggtgctagagaacgaaggccttcatctcgtcagctcatcaacctactcctccgcctttgagaacaagacattctacagcctccatcttcagttccaagctccgaatcctcaagcaagaggtgtcactggatcactgagcatcagtagaatcagagaacgaccacaacagacaaaataaatacagacaggaaacaaatgaactcatcaaactaattaaatatgcaaacaagctataagcatgatcactatgattaaatctagaaagaatccattgagtaagtacaacactaaaccaaaagaacactagtttaatttcaaatttggtaaactactcattagtgattgaggttccacttaccttttgaagatcccaaacaatcgaccattttacagcacatgatgcttagaacattcacccaacatctagattatgcaaatataattaaaatgcccaaaatttccttccagaagactagaacaaggtttggaaactcgactcggcacgaaccgagctcgcgagttggttcggttcgtgagccacaccctgataatataattgaattataaaataaattaaaatatataaatataaaacataaaattatcattcaatattatgagtaatctaaattatgaattgtcatatactccctccgttataaaataacaccgttataaaataatattcattttagcctcatatatcattcaatattttagcctcatatactccctccattatgagtaatctatattcaattggatgatgatgaatctagcctcatatataaaacacatacaaaacacatacatcaagtgatgtataaatctattaatttactaaaataaaatttttaatttaggacagagggagtattcatcatcaaaagctaaacaagcctattatctgtaaatttatccaatatttattattatttggcatattaattagtttggcgagccatcttggctcggctcgctgctctaatgaactcaaaaaataggcacggctcacacgaggctcgcaagccgctctgagctcgagccggctcacaagcctcgaccttttttaagccctaactagaacgacgtagaatatatgaatccaacattacattaacttggtacaaattaatcacaccaaatattatactacttagtatcatatcatgcttagagatacatttcactaatatacgtccactacacaagaactgcaagaacatatctctatcatctgcctcgaatatctatacaccaatcaactaaagctattatcgataaaaaattattatgctatgcacaaagaacttaaaactccatagcttagggatctgcaataataatcaggatctggagacatgaagcagtcgatgcacctagtaagagtgtgccctaacttacagaagccccactatctcgctcaggtgcaccaccgctcaccactcttgcgcgtcgcctatcgcccgtctacacgcaacccactcgcgtcacacgtcgttggactcatcactggttactattgtgctctattttctaaaccgaccatataccttcttatacgtgtcatgcctcgtgccatggcctaggcggcccgaggcccaaatctatccatgtctgtctccattaaccttaaaagaactagcccgaacgtccaatctagcccaagcttaggtcctgatctaggccacacgtcgttaatatgcgtaacacagacatccatctacacacgatcaacatcgacaacatatatttgactgtcgccatcatcaattcacatccatcatcattgatctacatgttgtcattattgatctacatgaccaagccatcaatctacatgccactgttgttgattcgcacgctaccactagatctgcgtgggaggttgagagagagagagagagagcacaagtagatgagggataaagatggaaagggaatagatcttacctgcttttagggttgataatggtctttgaccagtggcgaagctagagtaaattaggggagggtgcatataccttgagggtgcatgataacaatttacaggtggtgcatatatggtgaaaatttggtccaaaccactagatttccaatttttcgtgggtgcatgtgcaccccctaatttctacgtagctccgcccctgtctttgacatgtcaacgagaagggttggagggtgtgtgtagggcaaaaaatagctcgaggcttgcaggccggctcaagctccatacgactcgctcggtttatagtgactcacaaactctgaccgagtctatcatgtttctcaagtttgatccatgacttagccgagtcagctggctgtggctcgtgaactaagtccaaactggcataacagagaacaagagcctaagatgttgtctaactagacaaagcccaagacagacccaaactagcctaacaaagcccaagactgaccaaactagaatttgtatgcaaagtaggatgtatcgtgagccagagtcgagtctctatctcgagctcgtacaccaaaccgagtcaagcatgtctcttctcgacttgtttccaccactaggtgtgtggtgacaacctccatcagtgctgacctcctcgcattctttgcgacccatttaggcatagatcggcacaggtggagggtgtgctcacagctctagccttaagacttcttgcgctctttaaaactgtgtccaacagatcgtgtatatggtcgtgcaaaatatattttttgcactagagatataacacaatttgtagaacgaagtttaaaacaggaggtgagatagataataggataggagtgcttttgggcacaatatccgtagactccagcaaggatgtagagctgaagactatgatggagaagaggggcggatgcgtgatagagaaagggccacgatgcatgagggagggagaggctcaatgtgtggcagagtgtagctagcgtcgggtgcagagtgggtatgagaagagctagggttcatcgtctcttataaattctaggttgatttgggtcaacgactatttatttaagaggcctatctccgttaattgattttaagagacaatcaagttttaagtgtctttgtaaatggtttgtctgtctccaaaaaatcaggggacattttagaagacagtgagattttatgtccacctctgttaatcaaatcgtttgtcttccaaaatcatctatgtaatagtgataatatgataatttattctattgagctaggctcatataaatttagtcaagtatgcttaaatatttctcttattaatatgcaaagtggactctatttgaactcatctaaaatcttcgtattccggttaaaaggttataacacattataatttatttttttttgtaaacgctctaatgtgtttaaggaaaaaatatggctacaactgaagttttattataggaaaattcaacgtcctgtccactgcagtggaagccaaaacacttgtctacaccactctttgtaactaggatgcaggacctaagagcatgtacaatctagatattatgttacggttctctaagcactaatacatctaagaaacttcttcatacaattcaatgtatacaagtcttctatcttattcactagaatctcttaacatatggttcatttatgtgggttgtatggatggaactgtatctaaacttagagaaccgtgctagagacgttcattcaccaaaatatatcttatgttttttacacttatctccttagtaactcttaaaatacagatcatttatgtgggttatacattgccctaacacctatatcttaatgacatccaaaggaaggcatgtaataagaggtacaaacgagctctaaggttttagcctaccatgcatacgaaaaacacaagtatatagatatgtagttttgggcttatttaatctggaacgatagggaaaaaaatgttgtccaacgtaaggattttacttgtaagaaaaaaaaaaagacactgttcatatccacaaaatn

SEQ ID NO: 44007 - DNA, 2882 bp, Zea Mays
gttcctgctcaatcttccccttcgtttattgctcttctccggtccttctccgcaacccctggccctgtcaagcagacgcagggtgacaccaggcagcagcccacctccacgcgaacacgccgcaccacaccatcaccggcaccgcagcacggcagccagtcaccaggactccaggagtgatctttgatccccaccaggccgccacgctactgtcgcccttcccgcaccactcccaactcgtaaacgctgtgcgccaacgccgtcgcccttccggatccgtcgtccttccgccggcgccgtgatggacccaagcgattccaactccgccgcaggaggaaagacacaaaatgtttcagtaccgcctgttgaaggtgtagctggaggaggaactagctatggatgggtggatggaggtttgcggggtacaaatattggtgctggtgtgattgatcctacaaaagtacactcagatgatcttttgcacgtctggtctatgcccagcacagcaaatgttagccagcaagaagcgcctcggcctctagagaaagtcaaccttttggcagcaagaaatgaaagggaaagttttcaaattgctttacgcccaaaggtttcatgggcaacttcaggtattgcagggtctgtgcagatacaatgcaccgatctctgctcctcctcaggagacaggtgtaccagatgcacttgttcctattgatccactcagtcctcaaataagtattcaaccaggggagacagctgcagtttgggtatcagtaaatgttccatgtgggcaaccgcctggtttatatgagggtgaaatattcattactgcagttaagacagaattagattccagaacagaatctctaccaaaatctgaaaagtgtaggctatacagagaattaagaagttgtcttgacctcactggacccagagactactcgtcaccagaggaaatggagggtgttggataatccagcactccaggactgtcaagagaataatggatttggagacatgatggatgaagatgttataaacaatatttcagttcgcttgaagttaagccttactgtttgggacttcactctcccagtgacaccttctttacctgctgtttttggtatatctgaaactgtcattgaagatcgattctgtttggagcatggcactgaaggatggtatagtgcactggatcatcactttaggtggctcctccaatataggattagtccatttttctgcagatggggtgatagcatgcgcattctagcatacacatgcccttggcctgccgatcatccgaaggctaatgaatattactctgacccaagattagcagcatatgctgtaccctatgcacctatcctatcgtgtacggatgctgcaaaaaattccctgaggagagaggttgaaatcttaaaatcgaagcctcattggtccaaagcttacttctatttgtgggatgagccattaaatgtggaacagtatgacatgatatgcaacatctctaatgagctacggtcatatgcacctgatgtgcgaattttgacaacttactattgtggtccaagtggctctgaactggctccctctacatttgaagcttttgcaaaagttccaaatgttctgcgtccgcacacgcaaatcttttgcacaagtgaatgggttcttggcacaagagaagacctagtgaaggatattgttgctgaattacggcctgatcttggtgaggagtggtggacatatgtttgtatgggtccttctgatcctcaaccaaactggcaccttgggatgcgtggaacccagcaccgggcagtgatgtggcgagtgtggaaggaaggtgggacaggatttctttattggggttccaactgctatgagaaggctatgatcccaagtgctgagatctgtttccgacgcggccttcctcctggcgacggtgtcctgttttaccctggtgaagtgttttcttcgtcacatgaaccagttgcttccacccggctagagcgcattctcagtggcatgcaggacatcgaatacctgaagctttattcttcacggtatgggagggaggaaggcctggcccttatagagaagactggcatgtaccttggaccggatcgatatacgctggatcatggaccggtagatgtgatgaggggtgaggtgtaccgcacctgcaggtcttagtgtagcaatgcctgccagatgctgtccttccagtctagggcgtctgttgtattatatatggtggtatgtgatctatgtagcgaattaatctacccttggtgatcgatcagatcatcaaacctggactaaactagtcctggtgcatcttttgaatctggctcgagagttgcatcaagtcgggagaaaaaaaacccaagagatctggccaagagatggagcgacccaggtccggctctggtacaaggcccagttagctaccggaagtgggccctatctgctgcaacaggattgagacgagattggcattgtcctctcgattccatgacgctgtgcccgcatacagctgaagctgaaatattctcctattagctgttaccttccatttcctttctgcgatttgcaccgcaggttacaccctccaaaggcgcattcgtttctaccgtgtgccgtgacgaggattcccgtctcagcaacggacgctgccgccgcgatgccctgtctctttcgaggtcggtagcgccatggcctaacgcggagctgtgtttggttggaagggaataatgcatgcgatgcatggtgaggaaggatgagtctatcccgagctctgtttggtccagagacatgaaaattaggtccagactgttaagtaaccctagttagggttatgtgggcaaatacctgctttgtccctg

SEQ ID NO: 44008 - DNA, 3989 bp, Zea Mays
ccccatcctctctttctccctcgcgcttgactcccctgccaccccttcccgtctccaccccgacgccgaccgcactccgctccccgtccaccatcccagcgtgatggctgggaggaccgcgcctgccccctcccctccttctctctcacgccctactccctcgccgccccttcatcccagatctcgtcatgggcgctaccatgaccaacagttcggtggagcaggcgccgcacgctacgccatgggacggagcccgtccccacccgacaccgaccatctccaccccgagcccgtccgagaagtgagtgatttccatttcttcgattggatggcgtgcggtcgggcctccgcacctccctgtccccctcccctcctgcggcgatagcttcctcgaggagatgagcgtgccgcccccatgatcggtctacctccgccgcccccgcgcgcaccgcaaccaccacgcccctcgtgcaccttctcgcccgagaaggtggtttcctttggtgtccccacgtgtttttgtcgttgcaagttgaactcgccctttcatgcctgatattttgctcagactgcattggagaatggctacacaaagatcatgctgccaacatgtgcttctggaatagcatgccctatgctatctgcaactataaaggctaagctttaccagccgatgtcctgtatgtcgatgcacgatgggaggtacttgtggttcttcaacttcatggttgtctggcctagccgccatccgcccgcgcaaacgcggtacagctccactacagcagcaggaggcggtgacgtcgccaaaggctggcagatacttgatggctcttgataagaagcctattgcaactaaaggccaccacctttgttgtcctcaccctagccgaggacctcatctcccagattcagtggcgacaaaatggtccattagtggaaacaccaagcatcatggagagctgtttcgtcaggagcttcgaacgcgagccatagacggggagttgatgccactgggcttatgggctcttcttttgggcaccaaagcaaagagcagtggataatatttggaatggtcataagtcaaactagacttccctagcgacagcgattcaacgaataagaaccaggccaacatgtagtgagaccgagagcatgaggcttcagtacctgtctactaacatcagatgcattagttgatgtcttgattagttgtagcagggaaccagcttccagtgcctcttgtaccgatcatcagcaagggagtgctagaggaggaggttatggtgagttttgtcgcgactaatggtgagcccacgactacggccacatcaaagctggtctggtggaacctcgtggagcagatgacgatgacgccgacatcctgcacctctgctgcgacgctgccgaccaggacgcgggcccctccgtcgcgcgcgctctacaagtctggatccatcatcgtgctcggcaagactgacttccttaggccagacatggatcccataaccagatggacagccacaaagaaaagtggcctgattagctacaagaagctcttgttccatggactcgatctctggaccgcactatcgttgcctcaacccctaggtcgtgctgccctctggcctcctcatcgtacaattcaccaacatctccaacgtaagtgcagcaggttcagtaatgaactcaaaagtggcatcagaatactctaagagttttttgttctttttgcctggatatataccgagggcaatgcattcaaaactcctatagatgacgaatcccatctctccctcttttcccggacatcgatcccagtctcttcttcaagcaagagatggagctttccttggtcgggctccaaaatgctaggaaaacatcacttgcagcagctcgcagcgacacccccgcctcctcatcatggaagctacaagaacactttgagtaggtgaagaggatttgcgacactaccacattgtctttggccatgcatcatctcagtgataagataacaagccaactagatatttcaaaattgactgacaagctacagtaagggaaggtagactcaactgcattgacaccaaaggagaagtatgaaacttggaaggagattaaaattatgagtttcagaaaaatagtttctccaatgtgggcaatgacattgcttagcttgtatgttagagttcatgtcaccatattaggcagaatctgacgcctttaatgtaaatggacacaagaccttcgttgcaatggatgattatcttgtcactgacaaaatcactgcattcatagtgcaaacgcaacatgcagcaactgaagtccttaaagaaaagcaaccaaaagactgtatgaaatggaccaagtattgcagacaatattacaaatattggacacgttcatggctctttctgaagatactcatggagaaattatcttgtacctgagaatcccccttatttttgcacaattgatggttgtgtcctgtagtggctttgataattcatcactcctaaacgattttagaaagctataccaactaatgtgtggaggacctgggcaaggggtggtagtcgcgctggttcgctatccacggcggcaagccgcctactcgaagatcccacctccgaggacgccgctacggggaggacatgggcactaatcttgaactaaaactaggggggtgtctatgtaagttaatactttctctcacatttgcatcaaaatttgttttccgataatcaacagatcttgacatgtttctatgtactttctctcacattgagagttttttagattcagtgcaagccatctttatttgcttaatgagtcatcgatcttgacacatttttcatattcatcatagtttttactcattctttacatgtttttgtccttttcagattcagtacatgtaagctttctttgcttggacaatctatttctctttacttggatattttcttttagattaagataggccacctttatttgcttaacgtgtggttgatcttgacatgtttttcagattaatcatatttttattcattcttgacatgcttttgtctgtttttatattagtttttattcattcttgatatgctttcgtctgttttctcagattagtttttattcattcttgacatgcttttgacttttttgaaatttagatcagtacatgtaagctttctttgctcgtacacctgaccccacatgtgttagcagtctctaggtcatgttcatattattcatccatctctgttatatagatagtcgacacatccatttatatctttttatagggctaatcattgagatatctcttcctcttggtcctcgtgaattttttgttcgttctatgatgagaaatcacaaattcatatctttttttttattttgggggcttcacttttttaaaaataaaatgtaaatatttggaccccgtacgtcgcgatcgcatccaggacggctggttccgcctacaaccacgtggacaacttcttgcccgacatcatctcccagcttgttccacctacaaccgcgtggacaacttttcacccgacatcatctcctagctcctcgcattcgccaacaagttctgctatgagggcttgaagccaacctacgacaatcgggtcacaaccatggtgttggctcttgacgacgcctgatccctcatcgacatcggcctctaggaggcctcccacctcctcgtcacctcgtgcctctagcattcctatgggagcccccaaagtcactcacccacctagacatcgcccgtgttgttatttggtggtcagtatgtcacaatatagtcagttttttttgcttatgttgttggtactgattttattggatgtgaatttatttatcctttcattgtatattggaattcatgacattatctacatatgtacatgcttacatatctattatatttttgtataaatatttttttgatagtttttaatttgtatggcaaagcaagg

SEQ ID NO: 44009 - DNA, 2911 bp, Zea Mays
aaaaaaaaaaaaaaaccaaacgtgttattgctgcacctaaggaaacgcggccgaggacgagagtgggccagcggggtcgaggaggtaaagaaaactaatggcagcgaaggagggaggcagtggggaaggtgggaagcggctgcccaaagccacctccaccaccaggccttcttctacccccatcccaacgcccaggccacaccagcgcagcgagctctctcctcgtagcggagtcccagcccctcacgccctcccgatcgcgctcgtcggcgcccttgtcgactcgagcccgcttctgggccgatcgacagcgagagcgagagcagcggcgcgccgaggagagctctttcggtgctgctgtataacgacgacgacagcaggcggcagataacacataaaggcgcgcgatgtgcgacgcggcggccgtggcggctccgcggtacaggggcgtgcggaagcggccgtggggccggttcgcggcggagatccgggacccggcgaagcgcgcgcgcgtctggctcggcaccttcgactccgccgaggccgcggcgcgcgcctacgacgtggccgcgcgggccctgcgcggcccgctcgccaggaccaacttccccgcgctcacctcccgccctcctgccaacctgcccgcgcccacgcccacgtgcagctcaagctccaccgtcgagtcctccagcgggccccgggccggggtgcccagggcgggcaggcgcgctgctgggaagccgcgtgccccgcggcaggcggccgcgcccgccgacgccgactgccgtagcgactgcgcctcgtcggcctccgtcgtggacgacggcgacgacgcctccacggtccggtcgcgcccggcgctcgacctcaatctccccgcgccgctcgacgtcgacgatggtcatgacctcgagctttgcacggacctgcggctctgaataggcgaccggatccacggacggatcgggacgaagggagagaaggcggtttttgctttggtcttcttttcttgatcagattctgccttgctttgacttgtcgtgctcgagggagcttgtaccagtgctgcactgtactactcgatacgaatggcaatagaattggatgacgattcctgcaacgctatgcagactgcggatccgttcagagaggctccgctcggcgctcctgacaccatcggccatcgcgcttcgcgcccgcaactgctcgaccgagccgggaccgggcggcgcccgttcgttgcgtatcccgcaagttggccggcctccctccgccttgggaggggaaagcggaggaggaagagggagccaagcggtcaagccggctcggccgatcgcctcccaccaaaatacccccgaatccccatccccaagcaacacccagaaaaggcgacaagtgccgaggtctggggagcgatggttgtgcggcggctgggcggcacggggcgcgcgctgctcacgctccccaacatccggaggcgggcgtccaactcctgggccgccgtctgcgacaccttcttctccaccaagcaagtgttcgagagccaccgcatcgtcttcaccgtcggcacctcaatcgcctccgtcctcacggcttgggccggttattcacttcgccatgtgcaacaattaaagattgaaaggaggcttgagtcaattgaatcatctctgaaggataaccacaaagttgaacatgaagagataaaaaagatcgtcacttccagcaatattagcgctccaggctgtgtagccacggcgatgaccacaatggttgttgggtacgcgttaggctggcgaggcggtgcttggtacgctcgaagggccttcagaagagagcagcaaaagctgatgatgggtcacatgaagtcgtcacagaacaggtggcactggcggcccttcaacaggctcaggaacagcaggaggaggctccgcgtggaggcgatcaggacgcagcgaacggaggtgcccgtcgaggagtccgcccccgccagggacgccgccgctgccgcgcccctggacggaaacggagccggagcggacggctccgtggttccttcctcggacgacagctgggttgtcaagctcgagcagtcgttcaacattttcgccacggattcggtgattatggtactcaagggcgtgtacggtgatcggtactacgccaggttctttgcgctggagacgattgcgagggtgccgtacttcgcattcatatcggtgcttcacttgtatgcgacctttggatggtggagacgagctgattacataaaggttcactttgcgcagagctggaacgagttccatcacctcttgatcatggaagaattgggtggcgactctttgtggtttgactgttttcttgctcggtttatggcattcttttactacttcatgactgttgcaatgtacatgctgagcccacgaatggcatatcacttttccgaatgtgtggagagacatgcatattccacctatgatgagttcctcaagctccatgaagaggaattgaaaagactaccagctccagaggcagcattgaactattacatgaatgaggacctttacttattcgatgagtttcaggcatcaagaactccaggttctaggaggcctaaaatagataacttatacgatgtattcgttaatatacgagaagatgaggcagagcactgcaagacaatgaagacctgtcaaacacatggaaatcttcgttctcctcattcaacgccgaactgcttagaagatgatacggaatgtgtaatacctgaaaacgactgtgaaggtgtcgtagtatacaaagtataaaattttgatgatatcctctcttttttctatgtctcattcaaagtaaaatccaggtcatatatcacagaaaccaatttaaatgcaggatcaaatatctgctccctcca

SEQ ID NO: 44010 - DNA, 1667 bp, Zea Mays
ttggcccaaaactaacttgcaaaattggccgtatcaggccctacgcgtctaccgcaagtagggccaaggacgacaaagaagaaacgaatccgaaacctctccaagaatccatcgcagccgccatcatgtccgccgccggtggccgaacccttggccggagcagcttctcccgcgccacatctaaactggtggcgtcctcatccggctctgctggcgttaagattggcccgaacggtgcttctttcgtctcctcgggcattcccgacctcgacaggattttgggtggtggattccttcttggctcagttgtaatgatcatggaggacactgatgcgccacaccacctcttgcttcttcggtgcttcatgtctcagggtgttgtgcacaaacaacccctgctcttttcaggagctatgaaagagcctgtgttgttccttggtacactacctgctccagtttcatcttcaaaggaggatggacgacacagagcaatgggtcctgcagcaagtagtgatggacgagcaaatgatgagggtttgaggatagcttggcagtacaagaaatactttggggatgacaagacttcgcgagctgaacataaagacaataaacaggaattcagcaatgattttgatttgaggaagcccttggaaaggcatttacttaatggacagaatattgaatgtgtaagcactcaagatgctgacacactcagcagcctccaggattgttgttctgctttcgtatccaagcttccaagaaaagatggtgggagttcaactgctgggagaattgctatacaatcactctgtgcaccgcagtgcagatactttgaaaagttctgtcaaattcgttctgtaagagatggcagcacctggcggatacactgctgtccatcaaagcaattccagatgaggacaaagacttggcaaaactcctcacaggatatcaagatatggttggttttttgcatgtccacaaggtggcacaacctaacagtcaggtccctgtgatcttagaggcatccacgctctctctaaagctgcgaaagaggaggtccctggtcttagaacggttgaatcaggctccagtcgatgggtcaagtgggccttcgtctgctgcatcaagcagttgctcatcgcaaggttcacagcttgatttctaattggtatggctggatttccttgagaggagctcagaagtgctgtgtactagttactcgtggcagaatgcagcttttggaggtttaggttttagataggagtcagtttgatggttcactgttaaccatcctccctcatgtaaccccactttcaacagtattagaaccgtcgaaacttgtatatttttcgggtagttgtccaagtttgttgaactgccttgaacaggttacaaaagtgtggggttttcttgttttgtctgttccaaatgatcatgttttttgcgtagaacggaaatggttgagttgctgatgcaactgaagaattgttggtcttcacgaagatggagctctgtcagacaatgcagcaatcttgctatgttaatgtcaaagatgcagaaggcaattgtaacaacgggaagtagatttttgtaatactggcatcggcattcttgagcttcatggaaatggcagcgccaagcacacaattgcatttgtggcattataa

SEQ ID NO: 44011 - DNA, 1719 bp, Zea Mays
gtagaattttctgtgtcgtaaaaaaactttaagtgacactgttagagtccggatgggaagtatcttgtcttcatctcagcgaagagtgctgtagatagtggggcacacaatgctacaaattcattgcatagaatcgaatggtgtacagatggaaaactggatgggagccttggagttgctgacgtggtgcccattgtgctgtgccccaaagataactgttttcctgggctatactgctttggcttgcttagggatccatggcttaccgatggacaaactatgattatatcttctgtctggggaagtagggaagtaatactttctgtaaatgttgtgagctgtgaactttcaagagtgagtccccaggactcagattattcatggaatgttcttgcagttgataagaacaacattcttgcagtttccagcagccttattacactccctcagatgtactatgggattaaggtttctcagactgaaagcaattgggagtggcagggagtttcaactcctttcccaaagccatctgataagatcagctccgtactagcagagcataagttcagcatactcaaaatcccaattagcaacccttctgacgaacttgccaatggggctaagcttccttttgaggctatttttgtgtcgcataaggattctgcaagtaatccaacaatcgttgttcttcatggtggaccacactcagtttatccatcaagttattccaaatccttggcttttcttttttcgcagggatataatcttcttgttgtgaactacaggggttcattaggctttggggaagaagcactgcaatcccttcctggcaatattggttctcaggatgtcaatgatgtattgacggcattggaccttgttataaagagaggactaatagatccatccagagttgccgtagttggaggttcacatggaggtttcctgacaacacatttgattggccaggctccagacacatttgttgcagcagctgctcgaaacccagtatgtaacttatcattgatggtgggtacctctgacatccctgattggtgctttgtcgagatttatggaaaagaagggaaaaagtacttctcagagtctccttcagtagacgatctttgtcaattccaccagaagtcaccaatttcacatattgcaaaggtcaagacaccaacactctttcttcttggagcgcaagatctcagagttcctgtttctaatggcctgcagtacgcaagggctttgaaggagaggggaatcgaaacgaaaactattgtcttcccagaagatatccatggaattgacaagcctcagtctgatttcgaaagcttcctcaacataggggtttggttcaagaagcacatgggcaaataaacattagtgcttcccattacattcatgatttactttttcattgttactaaatgcctgtaaccgggtcaaagtatacatgatttgcctgtccaatctggtgtttgccaagatggaataattcttgaagacatatagaagcccgtgtttattctagtgtggattctggaataccaactgtagctagtttatataataatcttctaataaatgatgcttatgtgttaatgtgaaacggtgcgtgcttttgaattgtattcagaaaaaaaatggcccagctgaccagctcactgttgtttagttcatactaagactgtctccaacaggtcctgtaaaccctcc

SEQ ID NO: 44012 - DNA, 2016 bp, Zea Mays
agggacggagcaaaggccctaccgccctacacaccaccaccacccacacaaattagaggattggtgccttgctccctcccccttcttgtcgttgctccaccctctcttcttttattattgggttctttttttctctctctccccttggatttgcgcttgtgctcgtctggccgcatactagtatccgcaccagagaggagacacctccgactccgacctgctcttgcatatagattgggcagagagtgagagagcgcgcgcgcgctcaaggggtgccaaaaggagattttttttttaatccagcttcttagcctcactgtctttgatcccggagagcagccgccagcccaactaatccttgctgctggcgcgccggggctccgattgcgctccagatctgaggcacctgctcggtggattccaggaatccgagcaccaactcgacaggggagttctcagggtaaagaggctgagagcgcgttggagatttggactataagagcgagcgagcgagctgggtgccttgctgccttgaggacgccgtcaagaaaccgcgtggaggggagggcgatgagatgagggatgctggccgcggtgatggactacttcagcacctgctggggcccgcggtctcgtgcggggcaccggggcaagggctccgacgccgccggccggcaggacggcctcctctggtacaaggacgccgggcagctcgtcaccggggggttctccatggccgtggtgcaggccaaccagctgcttgaggaccagagccaggtggagtccggatcgctctccctggctgactacggcccgcagggcaccttcgtcggcgtctatgatggccatggcggcccggagacgtcccggttcatcaatgaccacctcttcaaccatctcaggagatttgcaactgagcacaagtccatgtcagcagacgtgatccggaaagctttccaagaaactgaggagggctttctttctctagtcatcaaggaatggtctttcaagcctcagattgcatcagttggctcctgttgccttgttggtgtaatctgtgctgggactctctatgttgcaaacctgggcgactcgcgtgcagttcttggaaggcttgtgaaagcaactggagaggttctggccactcagttgtcagcggagcacaatgcatgctatgaagaagttagacaagagctgcagtcatcacatcctgatgatccacgtattgtggttctcaaacataacgtttggcgagtgaagggtctcatccagatctcaagatctatcggagatgtatatctaaagaaaccggagtataacagagaacctcttcacagcaagtttcggcttcgagaaaccttccagaagccgattcttagttctgaacctcaaattactgaacaccgaatacagccaaacgatcagtttgttatatttgcttccgatggtctatgggagcacctcagcaatcaggaagctgttgaccttgtccaaagtagtccccgtaatggaatcgctcggagactagtgaaagccgcgatgcaagaagctgccaagaagagggagatgagatactcagacctcaagaagatcgaccgtggcgtgaggaggcatttccacgacgatataaccgtcgtcgtggtgttcctcgactcggatgccatgagcaaagctagctggagcaagagcccctcggtttctctccgagggggcggcgtcacccttcccgccaagtccctcgcacccttctcggctccggcacagttgaacggcacccactgaagctgctactgctcttgaaaagaagggcacagtgcagatctgctagagatgatgagagaagcagcaatcaagtgtagctgttgctcgtacacctgctgtgctgttgctgtttgcaaagctgccgtcttgactccgcctggtaattagtgtactgatagcgaggtggctgtaaatttgtccagaacatgttttccctaatagcccatcatatcccgctctttttcttaaaaaaat

SEQ ID NO: 44013 - DNA, 3736 bp, Zea Mays
tccagatcgaaatttctctcttcaccaaacacacgctctctctccccttcccatctccttcctcccgccccagatccgagcccggcgcccgagttcatggcgagcgacagcgacgtcgacgaggacgagctcctgcagattgcgctgcaggagcaggcggcgcgggacctcagccaccagcgcccgcccgccgccaacaagcccgttgtcaacctcgtccgcccacccgcccccaatgctcgcggcggcaacgccagggccgggggcgccgcagcgaaggcgcgccagcccagccgcggcggcgacgaggacgacgactcggaggtcgagctgctctccatctcctccggcgacgaggacgacaatccccgcgcccgcggcccgccgccgccccgcgggggcgggggtggacgcgccggagcgcggagggccgcgtcacgggacgatggggacttcgacgatgaggagcccagaagctggaagcgcgtcgacgaggcagagcttgctcgcagggttcgagaaatgcgtgaagcaaaggtggctcctaacattcaagaacttgatcagaaagcagcagctgctgctgcagctgctgctcgaaaggccctcacgagtgtacagactttaccaaaaggagttgaggttttagatcctttgggccttggtgtcattgataataaatccctgcggttgatcactgacgcttcagtaagttctccaatttcaagggagaagtctcaaggtttggaccccaatatgcgagacaaagttatctattcatctccaaattttgatcccaaagttttcctttcgtgggtccacaaagacacgagcgctgctgacttagaggctggtgctctcaccttgaaaactgatctcaaagggagaacacagcagaaaaaacagttagtcaaggagaacttcgattgttttgtctcgtgcaaaactacaatagatgacattgagtcgaaattgagacagatagaggaagatcctgaaggtgcaggcccaagctgaaaagatcagatctgttcagggaatgcttcaaagattccgaacactatttaacctaccaagtgcaatccgtgggaacattagaaaaggagaatatgatcttgctgtcagagagtaccaaaaagcaaagtcaattgttcttccttctcatgtggggatactaaaacgtgtactcgaagaggtcgaaaaggtgatgcaagaattcaggggcatgctttataagtccatggaggatcctcatcttgatcttgctgagattgagaacattgttcgtctattgttggagttggaacctgaaacagatccagtgtggcattatttaaatattcagaatagcaggattcatggattgtttgaaaagtgtactcaagatcatgactcgagaatggaagttttgcaaaataaaattcgcgaaaaagtgctctctgattcgaagtggaggcagctgcaacaagattcaaataaatctctggaagttgattctaccattggtgattctcctcgagttgatcagttgtcaacaaactttatggctgaggaagctgatagtttaagggccacctacattcgtaggctaacttctgtactgatccagcatgttccagctttctggagattagctttatctgttttcagtggaaaatttgccaaggcagcttctggtaacgtagtttctgattttgatgtgaatgcaaagccgactgcaaataagaatgatgaaaaaggtggagaagtaaagtacacaaaccacactcttgatgaagttggtagtatggttcaggctactatatcggcttttgacactaaggttcagagtaccttccgtgattttgaggaatgcaacattctttgtccatacatgagtgacactataaaagaaatagctaaggcctgtcagactcttgaagggaaggattcgtctccaactgctgtaaaaatgttgcgcacacttcattttgaaatgacaaagctttacattctacggctttgttcatggatgcgggcaacaacaaaggagatatcaaaagatgagacttgggttactttatccacccttgagagaaacaagtcccagtatgcgatttcatgcttgcccctggagttccgtgacataacagtttcagctatggaccgaattgatactatgattcttaatctgatgagcgagactgcgaagtcatatgacatttctcaaccacttcaggaaatcaatgagtctgttagacttgcatttttgaattcctttctggactttgctggttatctggagaggtttggaggtgaactaaccgagaacagaccaaacaaagaaaacaattatgtctcaaatggatacataaatggtactagagaaacatttgttaacacagatggagatttgcacaaaaagctgctggttgttttgagtaacattgggtattgtaaagctgaactttcagaagaactttacagcaaatatagacacatttggtctccagtcaggaataatgaggagcgaagttctgacatgcgagacctgaggacttctttctctgcacttgaagagaaagtcctggaccaatatacttttgcaaagtcaaacttgatcagaagtgctgcacaaagttatcttttggattctgggatttattggggagcagcgccaatggtaaagggcattcgagatgcaactcttgacttactgcacatccttgtagcagtacatgcagaggtatactctggcgctcggcctctgttggagaagacaatgaaaattttggttgagggtttggtcgacatctttcttagtgtttttcatgagaataagaccaaagatattagattgttggatgcgaatggtttttgtcaactgatgcttgagcttgagtattttgagactgtactgcacacgtacttctcacctgaggcgcaacaggctatgaaatctttacaagagaatttgttggaaaaggcctgtgaaagtgttgcagaagccatggaaaatcctggacaccaacgtcgaccaacccgtggcagtgaagatacagcatcggatgacagacagccatcagtatcacctgatgatttgcttgtgcttgctcagcagtgcagtagtgatctgctgcaaggggagttggagaggactcgattgaacatagcctgtttcatggagtcgacccttcaaccaacagctgcgccagcaggcccaaagcctgccgcacattcttcttaccaagcacagcatgctcccgtccaaacgtcctcgcctagttttagaaggcagcagactggtacaagttcccctgtagtctccaggcggcgccggtgagcttagtgcatctttccatcattggcgtagcctcttcccggagtttccttccttttcccccctcacatgtgtgctttttttaatcacttgtaattgtcatcctgttgtcatgtgttacgaatttcgatccattcttttggtgttgtataagatgaaaaggaggagtacagtactggtgctgctgcacgggatcatggaattgtataatatcgacgagtcaaatattattgctgcttgaagataccaccacagctttatgtatatggaattctggagttgtcggtctgcgccaacttccttcctgcggtcgtcaccgcatgtttgtacattcgtcgcttggacagttttatgtatcccgagatttgttaatattgtatcagttggttcgtgattgttgatatgtctgcatgcttt

SEQ ID NO: 44014 - DNA, 1045 bp, Zea Mays
atggatcgtagcgtcctctacgatcaaacatccaggagttttgctagggttctcatccttccgccaccgcccctgcccgccgctagcggcggtgaggatgacgcggcgtgggtgcgcgccatctccgccgccaccaagtccacctcggcgcccaagaccctcaccctcgatggcaccgtcaagtcctccatgggcggcctcccctccgccgcgctcctcgagcgcttcgccacctccctagaggaactctccatcgcgggggtgcgcctctcctcgctcacgggcctgccacgcctcccggcgctccggtgcctctccctccctgacaaccgcctctcggggtccgccgccctcgccgccgtcgccgagtcatgcggtgccacgctgcgccacctcgacctagggaacaaccggttcgcagagtgccccgtcaccaaggtcaaggggtacagggaggaggtcttcgcgctgattcccagcctcaagtaccttgatggcgctgacgctgagggcaacgagcgtttggagacggatgacgacgaggacgaggaggaggacgacgagggagaagaaggggcggagggagaggaggagggcgatgaggatgatggagaggaagaagatgacgaggacggtgaaggggacgaagaagaagaaggtgatgaggaggtgactggattctaagcgaggctactcatcacctgtaactttggaagtatttacaagaaggcagaaaatgatgcaaaatctacgtgtccttttggatctcaccaattgtcagcacgtctgcttataacgaagttctagagaaggaaaagatggaatgaaactcaaattttggtggctgcataagtgtggagacttgaattcatatatacttagttaggctcaacgttagcgcaaatagttgatgaccaagtttttccattagtattttagtttggatttaaagtacacttatgtatgagttatttgacaatgcttatttatgagatattgaatgatacttatctatattatattaattataatgttattaaatata

SEQ ID NO: 44015 - DNA, 3015 bp, Zea Mays
ccgacccattgctatcctacctgccagcgaacctgtctcgtctccttgttgcccacgtggcctcgccgtcgccgcgagctccaccttcctcagctctgccccgagcgcgatgtggcgagcgacgaggcggtctccgccgttcctgcgatggctatcgtcggacgcagcctcctctaaggcgccgcggcagcgcgtagcggcgctgtgggggaacggtgactacgggcggctggggctgggctcgctggagtcgcggtggagccccacggtttgccccttcttcctcgcccgcgccgccgacccgcccgcctccctcgcctgcggcggcgcacataccctctttctcacccagaatgggcgagtgttcgctacagggctgaacgactttgggcagctggggataggaacctctgttacacatatgctggagcctgttgaaatttctggatttcacgaaagagttgtagaagtttcagctggcaaccatcattcttgtgcagtcaccggtaatagaaaataattagattctcttaagtgcccggttttattcactataatatggtgaattcgttaaatgataagagcagccggaagggaaggtgccatcttcatcttctatgttactgtatatttttaatggagcagcagatacttcatgcttctcgggtgtagaagttagtgattgtgattccttgcttcttgtttgtgtgggcctaaatacacaacacaagtatgggttgaggaaacattttttttgcctttctggttggttgaatattgatctagtgttgaatgttcatttcaagcaaatttccctttatcgcatgggaaactacatgtgtatggtgttgtaatatgttaattataatattttttattatggccccaattactctactagatattgacaatgggtttgataaaccaaaatacatattgggtaggttgcacgttcaaacaaaaagggccatatggaattatggatttgtgcactctccctaggcctatgtgcgatcacaacttaattgaaatatgttattgctcatttgctaattgagatgtcatatgctctgtaaaatgtattaattttgtaaggttattgtcactgaatgctgcactgcagcatacagcacattacaccataataatgttttactggtatctggataagtataacagaaaagaagtgtgataaccatctcttctatttatttataaaattgatttgtgctgcacatatgtgcattataacaattgtattatcaattgttagagtggacgcactaaccaatcaaacacaaaagcttaagctgttaggaaaaagtaggcaatctacttatacacttcaatactctcactcacgtgcaaccagagagaaaggtgcaaacatgtaaataaaggggcagagacacaaataaagcctctaccaggatttgaactcaagacctctggctttgatactatgttagagtgagatgcactaaccagttcaacccaaagctcaccatatcaaagtggacacactaatcagtcaaacccaatagcttaagctgttagaagaaggtaggcaatccacttatatatttcaacaccaatctccactaaatttttgtatttttactttcttgaacagcggatggtaagctctttgtttggggcagaaactcaggtggccagcttggccttggtaaaggggcaggtaaagtagtttctaccccaacaaaggttgattgtttgactgacctcagagtaaaaacggttgctctgggatcagagcattcaattgctgttacagaggaaggtgaagtcttgagttggggagctgctggttctggtaggctcggacatggccgtcaatctagttgctcaattatgtggtattgtaatgtgagttttgggtaaaatgctgaatggcatagatatagaagttcgaaaatttgaaggcttctgcttatcttacgtgaatatactccaagattgatcaaaaactttgatggtatcaagattaaaaagatagctgcaggaatgttgcactcagcttgcattgatgaaaaaggtactttgttcatatttgggcagaagactgagaagaccgaacgaagaattcagaccaaatattgttgaagagataccattttcagaagaagttgcttgtggaggttaccatacttgtgttgtaacagatagcggtgatctgtattcttggggttcaaatgaaaatggctgccttggtctgggaggtacggatatggtccgctctccggaaattttgaaaagttctctatttaaacttcctgtatctaaggtatcttgtggttggaagcacacagctgtagtttcaggtgatgacatctacacatggggttggggaggcgccaatgggacttttttcgaagagggccattcttccggtggacagctgggacatggaaacgacgtagactattttgagcctatgatggttccctttggcacgaatgcaagagccgtccatgtatcgtgtggcttcaatcatactggtgcaatttacgagtgctccgaggactttgactgacgtgccacctgcagacagcagatccgcatgtcttggagacttaggttagttatcaaattatactcgctagaagtgcatataaacagcataaataagctctgatgttggacctgcatttatgtgaagagaaatatagaacaagtgataacacccctgagagggggatgtaaattaaacagaataagggatgaactggatgcattttgtgatgcatcagagttacttgccagtgtatagcatttcttcatttattggctggttctgtattattttgccaggtactaagaaatccattgcctgatgtctcagcaggctgtttgtgtacattatgattgcttgactgcttggtgtcgatgcttgctgtgttttttgtgtgtaaataatacatgaatcagttaatcgtgcttgtacaattaaatatgtacatatatcagtgcatcacttattatatgtacatgatt

SEQ ID NO: 44016 - DNA, 1836 bp, Zea Mays
gaccgtccccgcgtcggcgcgtcccgcacaccgcgctcccgctcggccgctcctgcctgcgcgctgcagcagctcggctgctcgcggtcgcttgtcccgtgcgcccggcggccggctgcttgccccgccgacctattcggctgcttcctgcttgagtgcttgtcccatccggcggcccggctgcttctgcttgtgagtttgtcccgcgcttgcacggctgcttgtcccgctctgcacttgatttccaccgcgataaaggtgttctatgaaccacctgcagaactactgaaggactcagaggttctgggcaagcatgtttgttgcgttgggtgcttgtgcatttgttctgattccagtagaatatttcctattcggattagctgctgggaagcttctggagcgcgtacgatcacttgattttcaaaacgatcaaagtttaatttgttctctaagtttgatgtggataagcttgctcgactcgcggatatatatcctgatgatttttcttttaatgattgcaagactataaaagattagataagaacttttattattcatgtacgaagaattgaagagtacaaagcttattgtgatcttgctacaaattgttttaaactatgtcataattttttttaaactgtgtcataattttttttcttcgttgcgtcagcaacacttaaattttttggcgtcctccgccactgtgcacggccggcactttctaggtgcagtgttggccctccctctcccacatccgattgaagcttcaagtgcaagctggttaataggggtaaaaacggtgctgtactaaggttagactgttaaataaataacagtgagttaatctagcgagaaacatttagctattgataattaaaagtattttagctattgacaatgtaggagcatctgcaagtgactcttcatttttacctctctatttaactttctatttcttttttcataaagattacattttatatgtagcatttcactccaacatgccatatatctagtttcgctagttagagtggctagccaaatttgactagttaggggatcaatttgaaaagttagatagattgacgggttagatgattaatctgttgaaaagttgttttgctgttgagtatttaaaatttaaattaacaaatcatttagctagtctattgaagatgctataaacgagcggcaatgtaccggtcgacccaaataagcaaatttgcccagctccgggcccaactgagtccaaacgtccaagtggacgcgaaccactcttctgaaccctaaaccctcgcgctttcgcctcccataccgccgaaactgacaacccatgaccacctcgcttcccctccttcctcgtcctctttggttggactgaggtgtggattcatccatcgctggtgaggacgccgggcttgtttttgttgttttttccctttctcttttcgtttatcgattttgtgggtcttcaaattcaatgtattgtttattggattggcgcttcagtttgtggcgggtttattttcaggttcgcttagtatcaatccaggctctgatttggtggctgaagctctgtttctccatggcgcttcgtttcgagatattaggaagattcaatcgcgcccgcgcagctcgcttaactcttcccccactttacttgtcaaacaccactttttatgcctgttggaactcaaggtttcgttgctgcatttggctgatattactgaggaaggagttacgtttcagtcacctgttgatgggaagcccatgctcttgacacctgaggaatctattcatattcagatctgcaccttcatatatattgaaaatgaa

SEQ ID NO: 44017 - DNA, 1021 bp, Zea Mays
ctcaagtcaggcacggtgacttgacgaggcccatctaagcacactacagcaccgggcgaggcggctaggccccctcaccgtccaccggcgactgggccggccgtcgctgccgccctgcctctccaccgtcgccggcgacgagcaccactagtcttcccttacctgatgtgcgaaaccgtgcgcccaaaccctaacatactatctgtattcggatctgaaggtgtttttgagtctgttgcgagtgttgtggccatgtccatgttcaataggatcttcgggaagcccaaggagcaggccaactccaatgctttggccactctggacaagttaaatgagacacttgatatgctggagaagaaagaaaaggtgctggagaaaaaagcaaacgctgagcttgagagagccaaggagttctcgaaagcaaagaataaaagagcggctatccaatccttgaagaggaaaaaactttatgagcaacaaattgagcagcttggaaattttcagttgagaatccatgatcagatgatcatgttagaagcagctaaagctacaacagagactgttgatgcattgagaactggagctgcagctatgaaagcaatgcaaaaagcaacaaacattgatgatgtcgacaagaccatggatgaaattaacgaacagactgaaaacatgaaacaaattcaggatgctttgtcagctcctcttggagcttttgctgatttcgacgaggatgaactggaagctgaacttgaagaactggagggagcagagttggaatctcagcttcttgagcctgttgcagctcctccggtgcatccagtgcatgtcccagccaacaagcaaccagctcgccctgccccacagaaagttacagctgaagatgatgaacttgctgcactgcaagcggaaatggcattgtgatcagaaattctcttggaactacacttaattagtccaagtttatggtgttgggagtagatggctctggaataatctccaaatgatattggtttctcggtaa

SEQ ID NO: 44018 - DNA, 405 bp, Zea Mays
aagcgaagtcacacatcgttcacgtgggcgagaggttgtgcgctgtctagacaccgcttatcaccatccacgcgccacgatgccaggccacagagagacacgagcaacataagcgtgaaatgatttcaaatgaagtttaagaaaccatattcgatttccagaattaaagtttaggcaagacgttgatggcttaacccaaacgatactggattcgatgttccgaaaattaccaaagtctgaatttttgcgaaataatttaggacaatttaaacagatggagacagacacgatatcaaaatcgtgatagacgaggataattagaacttagtggcctttacattcaccaatatcccgtgcttaagtctgtactcgttgtcgagcagacgataaacacctggggtgtta

SEQ ID NO: 44019 - DNA, 591 bp, Zea Mays
ttatgtttatagcatatgaatagtggaaagtattaaaaagtggttatgttacacgcttatcacaaactgttattatctgtttacaaactgttgtcaccatgtttggaaaacttaatttagtatgtttttctgtacttgtgacaatgttgtctctatattcagattgctaaaattaatcagggtatgaaattgctaccttctatacaatgtttaaccggactaaggtatattggtgtggtactgtctttcatttttattgttgcccctcattagcaactctgttatgcttttgaccttttcattttcataccatttattaggttggtaaataccaccttctagtgtgtggaactacaccttgtatgatttgtggttcacgtgaaaacgaagagtcgttgttgcagcaccttagagttaaaacgaaatggtttgtattactattcatggtactttatcctattaactaagcattctattttttggttggttactaccaacaatgtcctctgagcctgagcttttcttgttctcggcaaaatagatgacgtttttattgccttcgcagaggtgacaagtgaaacatacatagcg

SEQ ID NO: 44020 - DNA, 1411 bp, Zea Mays
gcttttggattctggtttctctcgtctttctcctccctctcctgacttttcttctagacatctcgcgggtcttatcgactccaacaagaacacactacacaccagccagcgagatagcgaacgctaggaacccagtggccatctttggagcggccatgacgctggatcagaaccatgccatgccgatgcagcccccggccctgcagcccggaagagcatatggagcagagggcagtgctgtggtgcatggttccatcagaacagaagaagcgacctcgcagatcacgagatgggcctacgtcagtggcagctgtcatccagcggtgggctgagcgcaacaagcatttggagtatgaggaatctgaggaggcaaagcgaccaagaaaagcacctgcaaagggttcaaagaagggctgtatgaagggaaaaggggggcctgacaatactcaatgtggataccgtggagtgaggcagcgtacttgggggaagtgggttgctgaaataagagagccaaatcgtgtcgacagactctggctgggtaccttcccaaccgcggaggatgcagctagggcctatgatgaggcagccagagcgatgtatggagacttggcacggactaacttccccggacaggatgcaacaacctctgcccaagctgctctatcatcgacctctgcccaggctgctccaacagctgttgaagctcttcagactggcacgtcatgcgagtcgacaacgacatcaaatcactcggacatcgcatccacctcacacaagcttgaagcctctgacatctcgagctacctaaaggaaaaatgtccagctggatcatgtggtatccaagacggcacacccattgtagctgacaaggaggtctttgggccgttggagcctatcacaaatcttccagatggtggtgatggttttgatatcggtgagatgctgaggatgatggaaagcgatccacataatgcaggtggagccgacgctggcatgggacagccctggtatcttgatgagctggattcgagtgtcttagagagcatgctccagccggagccggagccagagccagagccattcctgatgtctgaagaaccggacatgtttcttgctggcttcgaaagcgctggtttcgtcgagggtctggagcggctaaactgaatttctgatgtttgaccgttgatcctcatcccacttcatgtctgagcttgtgaattcggaggcaaacattggcagaacttataagctctagcaattctaggctttacattcctctgtgatagttctctatgcatgggaactgggtttgcttcacaatttttgtaagaccagaagtgatgtaaatagttcccaccttgtggaaggacaagaaaaaaataaataaaaagagtgcttgctttcgttcctt

SEQ ID NO: 44021 - DNA, 4616 bp, Zea Mays
ccctctatcagatttttatctgccgcgccttctgattttttttccaccgtcggaggcatacgtcccctgccctcttcccatatcggtgctcatctcctgggttgaagccgccgcacagccttcatctccccgcccagcccctctctctggcgagcttgacccggcgtcgagctctggcggtcctcctccgctgccactcgttggaccttgcccctgctgcgccgtcgatagctcaccacaccctctcctccctggctcccgagcttcaaccatggagcttgtcccctctctgctcgtcggtgacctacgtcttctccagccaagccgcagccaagctcatctccatagccgacgcccctgccctcctgctcgccatggctggccatcggacgacgcacagcaacctcgccgtttctgagcccgaccccgccatggagctcacggcgcctactgctgctcagccttgggtgccgtcgctgagctcgccctgctccctggtgcttcctgctcgccgtctctggcgagctggctgtcctgcccgtcatggtggcgcgcgctccatctcccatggcgcccggccgcccctctttgctcatcttcgccgtcgggctgggatattccttggtgctacaactgggaggtgctcgccgagccctgtatcactggttaagcgtgcctgcccacaccgtcgtctttgatctctcgctccggtctccttgttcttcatcgcttgccaggtgttcggtaaaatgggtgaaccggtgaacgtcgttaattttatgttttcgagtcaaattactatctggtgcttatgggtgtttttgtgtgtgagattggagaaaggagatcctcggattttgtggatgatgaagtaagatccatgtgacgttcgccaagtattcggtggattgctcgaactaggattcgttgtcgttttcgtgaattcgtgttgttttgatcatgctccacgtatccatccagcgccctgtacctcaacaacaaattctttcacgccgccgcaattgaatcaagaggcagcagcctccctctctcgtgacatcgccggtggtaccaatttgggcgccattgagggtgactacgccacctcgcctgtgccctcgcactcgcaggtaattgcggtggtgccaatttgggcggcagtgcagctggtgacgcctccctcgtagctccacccacaggttactgtcttgctcagatctgccctcattatagaagcaacatcgacttgcgtgcccacgacacaagctcgtgtcagtgctactgccaccatccctccacagcacagccacgctgcctgcctcatgtgtcactactgcgtcctatcctgccacaccggatagaacttctacaagatggatagatcttggatcaaagacagactatttagcgatgcacatttggatggggtcaaagagttcatgaatttggtttcacaaagatttgataagaatgaggagatgaatatattggtatcaatgaggatgacggtatgaacgagaatgaagaagatgagcctgataatagaattcctgatatgattcgggagttgtacccaactaatgaccaaggtagagggaaatctatgtttgcagctttattagaagaaatgaagcatgaactttaccctggagcaccttacacacgtttttcttttttggtgaagttacttcatatcaagtcattttatcgaatcagcaacgttgcattcactgcaatactaaaactattatcatcagcattcccagattgctctcttcctgcatcttaccatgaagcaaagaatgttattaatgcgttaggacttggatatgactcaatccatgtctgcccaaacaattgtgttctatttcgaaaggaatatgcaaaacatgatgaatgtctggtttgtggtgcatcaagatggaaagatagtacagatggaaaaaaacatattcctgagaaagtactacgacattttccaattattccaaggttgaaaaggttctttgcttccaaaaaaatatcagaggagacacaatggcatttattgaagaggaaggcattggagaatgaactaagccatccagctgatggtgagacatggaaagattttgatagaaaatatgagtggtttgcaaaagatggaaggaacattagacttggtcttgctactgatggtttcaatccatttggcaaaatgaactcttcatacagcatgtggcctatatttattattccttacaactttcctccatgggagtgtgtggagcaatccaacttcatgatgggactactcattcctggtccatcatgtccaggaaaggatttagatgtttttttggagccactcattgaagagttgcaagagctttggaaaggtgtctctacttttgatgcgttgacaggaaaagattttgatctacatgctgttgttatatggtgcattcatgattacccagctttgagtacattgtcaggtcgagtcactaaaggttattatgcttgtgtgcattgtgacaaaaatccatgctctagaagaataaaaaataagatatgctatattggccatcgacgtttccttccatgggaccatatatggaggacaaagaaatggtttgatggtaaggaggaccatcttgaaaaaccagaggaatttagtacagacgagttgatgcagcagttggagagggtcaaggatgttaggccgggacaacatcctcaaagtaaaaagagaaagcgagaagtagatggtcaatgttggaaacgaagatcatcattgtgggatttgccttattggtcaaatttgaagctacgccataaccttgatgtgatgcacattgaaaagaatatatgtgagtccattattggtacatttcttggcattattgggaagacaaaggacactattaatgctaggcttgacttggaagaaatgagcataaggaaacatttgcatttgaagcgtgatggaaattcctacactgttcctcatgccccctatgtaatgaataggagccaaaagttagttttttgtgacttcttgagaagagtaaaatttcctgatgggtatgcttctaacttagcaaaatctattactagtgatggatgtaaccttcaaggattgaaaactcatgactgtcatatcctactccaaagaattttacctgttgctatccgaggaattatgcatagggatatatacgaagcaattgccgaattaggatatacaaggaagagttagcggatcaaggaactccttatgttcaaaaaacccatgataagcaattttctttctggtttaagaagcatattgcaaaactacgttacgtggatggagaagacattagtgatgacctatttgcattgtcatgtgaaccggaccttcgggttcgaatattttcagcatgtcttgtcgatggggttcgatatcacactattgaccgtgaaagaaatagaagaacacaaaatagtggagtcatgtgtgagggttgccatggtgacgaaaatatcgaattttatggtcaattgaaagaaataattgagttgcgttataactcagatatgtccaaatgtcgcacagtggttctatttcgttgtgactggtttgacacttatagcaagaaggttagaatgaaagatgatggatattttagaagcatcaaccatggtagttgttggtacaaggatgatccttttattctatcaacacaagcaacaaaagtattttacttggatgacactaaacactgtgaaagctggagaattgttcaaaagtttacacataggcacttatggaatgtcactgaaaatgaaaatgaggaaacacccatgggcttgggactatcataccaagatgaaatatgtgcaggttttcatgtacaagtgaatgaaggaaatttgaatgatgaagtaccggatagtgaagattgtcaccacgtcaatacaagtttagttgatgagtttcgtaaaccaaggcaagacaatgtgcaaggagacgggacaagcgatgatgaagatgaaactatatggcaatatgttagtgatgatgaaagtccaacaattcttgtcgaggatgatgatgatgatagcgatgccgagtaaagactagaaagttgatggtggaagcgttgctgacctatatggatcttggtcatgaaaatggtgacccacatggatattgggtcactatgataggatggtggcaattagtgtgtgctaggatattaaattttattctagattttgggatgtcctaggtcttttagctcggacaaagtctatgcttgtgtcaaatatttttatctttctctatatgtctacagacgaagaaattataatatgtcagaactataatatgaatgagcaccaattcattgattttattcagaaatcatagtatccctttttcctgggcatatgtttcacttaatattgttttagtgtaggctgagtgaggaattgaggatgcatgcagtatgaatatgtgtaggcaatctgaaattctgaatatgtgcacgcaatctaaaattctgaatatgtggagataatctaaatatgtgtaggcaatctgaattgattttagtcttctggtgatattcacttgtgccattgaatat

SEQ ID NO: 44022 - DNA, 303 bp, Zea Mays
cagcaatcgatcataataagcacaaggaaggtagcacatatatattcacagcaagcaaccatgtcgggcatatcgactacggtgcctaagccaaaaggatcgcaagcagaccatcaaacggaataccagaggcccaaagttcatgaccaacatgctcctcctcctcgaggcagtgatggtctgtcaagccctgcgctagcgacggcgggatcaaggaagaagcagcgacagcaggagccgtacaacaaacgaccggatagcggagaaaaagcaggcccaaaaggttttggtgtgtgtctataa

SEQ ID NO: 44023 - DNA, 3089 bp, Zea Mays
cgcctccgcaaggtgctacgagtagaccaccatgttccataacaaggtgctcatccgcgccgccgctgcctcctcctccacctcttcccccacctcctcgctgcccccatttatcctccgccagctctcggtctcagccgcggcccctgtacccgcagtagacctcgaaatcctctgctgcagggtctcccgccgccaccgcctcgcgtgcctaccccagccccccgccgacgccctcctcgtcttccagagatgccagtccctagtggcggtcgaggcggtctccgagatcgcggccgccttccttggcgcctcggtgggtgaagaggaggctctggtatgctcaggttcactggtcgcagaagcagttcggtgtgagttgcgctccatgatgcttgaccatgggtggaggtgtctgggagagaatatttacgtggactcgaagtttgatcagaatgatgggaggactgatctgtgcgctgtgaacgtggaagttcgattagggagaaatgatgattttgaatttattgtctcacctgatgcatttcggtacactatgcataagaattctgatgttgctagttccagtatggtggaaacatttcatcacagcaatgaagtagttttggatacctctaacattctaacatcatgtacaactctgcctgcacttcaggagggccgtgtgattggatatagcaagatgctcccctcagaacagtgcttgggcaggtttatggagctttgtttattaaagcatgggttagatacaaactgcaattatcatgtagcagtcaaactcacttatggagcttcatgggaaacaaaatggtggccttcttcattagttctccaaggtccagggcttcaaccagccttaaaatctataagagtatctaaggcaatgtctgccttgcaatcctttgtagaattattgaaagcttggagtttctttggccataatagtctaaccattaaggaacaggttctactgaactgctcatcaactttacctgcttgggataaggctgcaagtgacctgccaccacacagttcaagaactgttaatactgagaatcttgatttaggtcatactgatgttatgtccaaacataaatcatttattctagactttcgcaccccaaaacctgctgtcatttgttcgttgagtgcaaaaccgtggaataccaacgttcacaagatagctcattctttggatgacaatgaaaatctcagtgaattaagtcctataagcttcagatttcaagcacaacagcttgctacaaacagttcatataaataacaaccttatactgataattcaaaaaaatcaagccatcctgatgctgtagcaaattgtgccaatcatgttagttcatcaagtgcaattcttcacatgcccgtcattcaggtttctgaaaatcatggaagaaagcttgcagagttgctgaagatcagcggtaaaggaggtggaaggattgcagaaggtataattaatcccaaaactgttctgtcttcacatataattataagaaagtacctaatcttccttatttaccatgcagtccaacagggttatttagaaacaaagaatttggacacaggaaggaagataagtcatttttatctttttctctatgtcatcagccaagctgttaattgcaatgaataatatagtttgcaaaacactttacaagttaaatttcttctcttaaaaccaattgagataagagtagtatcttagacttcatagaaaattaacagtttacggtgggcgctaatgttgctcacctgcttcgattcctcgaggggatcaaaacagagcaacacaattagagatgtcgaaccttcatccctgtaatttatctcttaatgtgaaataaattacatgaagatcattataattatgatttcaagggaacaagataaataaacacaatcatagaaatttatagctgctatactccctttattactcttttccagttacaaatgataacaattgtaccttcggatgttgaaacaagagttcagaggtgaaagtgatgtacaacagctttggatgttgggcgatttcacaaatgatctaaaggctcaatgtgccctaatgcatggcactgtacctcaatttatagcggtgactcggtacacaacttcgtacaaaatcacaaacatgtccttagtactcatacaagattacatgattctctatgggtgttatcgtcatgtctccttgggacaacgatgcatgcgctggcgagctccttcatatttttttcgagtcgtctccttcacctagagaccacaaagccgaagctcctctatcttcactcgcattgtcgagaagaaggtctggaacggaggagattccccttattccttcgggatacctaaaatatacttagagacaagtaacaacttaacgttttgaggaccttcggcagaggaaggcccccaacaataggtatcttgcaatttagacaaaccatgcaactcaaatgtactccataaggggaagtggtgcaagccaattgactttgttgctttggttttattctttcattacggttcttttttataactcgtgaccgtccagttggaatatttaacaaatttaaaatttaggctttcttaaacttttggaactagctcaaaatagggaaagtaaccaggcccctaaaatatggcggtcttggagtttctaatttacaattcaaaagttgggctttacaggtgtaatggttatggctgcaaaaaacggatccgtctagaccatggcatggaatgaagcttcctattcagcagcaagcaactgactgggggagatcactagcctagccttcaaactcgtcgaagtcttggaactcctagagatctgctccggcagcttcatctgagcaagggttgcaccgagggcaaccttgtgtctatataaaaagcaaaggccaatcgtcttgttaagcagagtctggaaattcaggaaactgtggctttgtagctgatagttcaaaggtccaatcaagccttccaagaaacactcttggcgcttctgatcagtgtcaacttcctccggtgcatagcgagaaagt

SEQ ID NO: 44024 - DNA, 384 bp, Zea Mays
gtttggatggagagtgaagtagcatggagcggttccatccacaatatacggttgtttggttagggagcagccggagcggagcggttccaacaagcgaatatgctccaaagatgctggaccgcgagagacctccaaaatgagcggaccgagcggctccgtcccgagcgcgctcgcgtgatttctcccgcgcgtctgtgccttctcccgcgcgctgttcccgcgcaacgtctcctcccgcgccgccacaggtcttctgcgccttcattttggtccaagaactttacacaggaacgcaagatggacaatgacaatgaaattcttgtgtatgttgcggctgctcacatgatgctttgtatgatggcgatggttattaggtctacaaat

SEQ ID NO: 44025 - DNA, 802 bp, Zea Mays
ctcacggcgagggctcgccggagacgagggggacgaccacggtgggctctagggtcttagggaaatggttaggcgcgttcagggcgacacggcgaacacaatcgtgggcatcatgccgacgtgggagcaccagaggccgcagaccgcggcgaaaaggtctcgtggcggcgcaaacttactccggtgagcaattatgcgacgaccagtgcaataaacagggaaatagaggcgtggggaggttgcttaccaggagcgcaaacccaggagtgcctagaggacggcggggaggcggtgaagtctcgggtcgacggcgggggactccggctgcacgggaaacactccggtgagcgcggaccgggcaaacaaaaggggttgggggcgaaccgaggggcgtcccgagctgctgacggtgaggcagaactcgccggggcaacgaacgcgacgcgggcgcaacgagagtcacggaacggcggcggtccctggtgagcggcggcggagctcggctggtcgcgtgcacagggtgagagagggggcgagagagctcggttgagggtgcaaatgagcagggggaagtgggcaagcagggcacatggtataaaggggcaagggcgtgtagaggtggccagagaacgcgtggtcgtgggcgcgtccacggcgggggaacgtgggcgagaggttagggacgcggagggggctaacgggtagggtccgcgaggcagagagaaagagtgcgcgcgtgggaaagaaacggcgctgacaggtcggccccacagagcagcgagagagagggagagagcgcgtg

SEQ ID NO: 44026 - DNA, 352 bp, Zea Mays
caccacattatctacaatcactggttactggaataaggatgagagaagcaatttggatatatataggtgacaaacacaatgcaacaatcaggatgcatgctcgtcctatacgtcctcactgattttgccatcatactgtggcaataacgttctatatcggtggcatacttacgactctcacggtattttgctagtcgtcagctacacatacgttttcgaagttagtgtacctgcagaaaaatccattgcagcccaatttcccaatgatgcagttcacacatgatagtttatcacagtttatactccatatatttctatatggaggccagctcatcattaagcaccgagccac

SEQ ID NO: 44027 - DNA, 804 bp, Zea Mays
caagaagctactagctagatctccttctccacgtgctccttctgctcttgtgctaagtagctagctcacaacagaagaggacgagaggaagcaaggcggcggcggcggcggcagcaacaacatacaccgctggccgtggcgccatgggcatcctggaccacatgtcgcatgtgtgcagcatcacggagacgaaggaggcgctcaagctcaggaagaagcgaccgctgcagacggtgaacatcaaggtgaagatggactgcgaaggttgcgagcgtcgcgtgaagagcgcggtgaagtcgatgcgcggcgtgacgagcgtgacggtgaacgcgaagcagagcaagtgcacggtgaccgggtacgtggagcccgccaaggtgctggagcgcgtcaaggccaccggcaagaacgccgagatgtggccctacgtgccctacacgctcaccacctacccctacgtcggcggcgcctacgacaagaaggctcccgcgggcttcgtccgcagcgcgccgcaggccatggcagaccccagcgctccggaggtcaagtacatgtccatgttcagcgacgagaacgtcaacgcctgcaccatcatgtgatgcatgcatatgtatagtctctcgatcgtatcatgtgtagtagtacgagctagctagtgcatatcgatcttcgtactgtatcatatcgatcgaaagaaccttaatagccaatacaagaggaatgtgaattaagcaatctatatagtatattacaaactaaaacttctaataatatcagtctattaaaatacatataataagcaaa

SEQ ID NO: 44028 - DNA, 1098 bp, Zea Mays
cggccttataaaacgggagcaaggccgcaggtcgtctgtccactgcgactgtgagcttcgttcgttcagttcatccgtgttcttgtttgcgaggtcgagagagagaggatgtcgtgctgcggaggcaactgtgggtgcggctccggctgcaagtgcggcaacggctgcggagggtaagccccgtccagtccgcgttgcgctctcggccggagtcagatctgacggcggatgaacatgtgtatatatatatatatatatatatatatatatatatgtggtttccggccctgatctgcacgccttcctccatggctggctggctctgcttttcgtcttgctgcatgcgcttcgattcacgtccatccatccatccacggatcggaaccgaacctttgctgcctttttttctcgtcatgctcatcgttatcgatctgtatgtctgtctgtctctacatgtatgcaggtgcagcaagatgtacccggacatggctgagcaggtgaccaccaccacccaggctctcatcatgggtgtcgcaccatccaaggggcacgccgagggcgggttcgaggcggccgccggagctgagaacggcgggtgcaagtgcggcggcaactgccagtgcgacccctgcaactgcggcaagtgagctaggtgctccaccctgcaggccggccggaggaagctagctaattataaagcttaataaagtatagcggcgtcgctgtgtgtgtttcgagtcagtcagtcagttgcgtgccatggcatgctctgagtctgagatgatgatgatggctgatggcggcgtcgtgtcctcccctggcctcctggggcgcttctggcgagcagtgtgttgtgttgtgtgggtgccgcacgctagcaggctagccatgtgccctgctgtgttgtgtcaccatccatctataatcttatccataccccaccttttgtgtgatgcgtgtaccctttcctgatgtctgttcccgggagtataaggggggtgtttggttcctctcctaatttttaatcgcgtcagatgtttgaaggctatttttaagtacattatacatgtatactaaaaatcttaggagagcttttag

SEQ ID NO: 44029 - DNA, 880 bp, Zea Mays
agccgattcactacttttactattgatttttatgatcttgaaataagacgcttagtttgcgtatgaagtttaagtagaaataccagtgatgtgaggtgtgtttcgatgagtttagttgtcgagtatgtttaaactagttctaagtcgtagtgtgtggtatatcggtagtgtgtaggttaagtttagtattttaagcaattatcgataagtctgttgatgctaattgtgttcagtgcgcgtaagatgaagtcgatgtcttatgttatgatcatcatgttatgtctagtgatcggctagatatcttgtataggtagtaattgccattgtgagtatttaaataagagttctattaatatgttgatttcaactgaaatctaataatttcttagtagaaaggatacacaagcgctttagatatttaatctgttgagtttgcagtttttcggaaacactatcctttttataatgctttacagatagatcgaatagcgatatccttcacatgataatttagtatattaattctatagctaaatgaagttctacagttcgttattttaagtattgggcgtttataatagtaagtctgagttttagatgttaagctctagtcaagagatagagtgcgtatgaatggttcgttatgtttgctgttagacttggatccagttaagttagaatgtcatagccatagttcttgatgtgagatcgacacctaatgttttcgtatttagagttggtgacgtcttgcaatgcgtgtctaattctcttcggtagcaattatagtcttgtactattcttgtttatatgcattcatgtgcattatgcaaatcatttaggtacgtttattgactacgtgatgcggagaaccaaagctgag

SEQ ID NO: 44030 - DNA, 1735 bp, Zea Mays
  misc_feature (1734)..(1735): n is a, c, g, or t
cctccctccccagtcccccttccccaccaaggcagcaacccgcaaatcaaaaccctactccgcgcgcgctctctcacccgcctccatggacggcgcctcctccagcctccctctcccccaaccaccgccgcaggtctacctccgccgccccgtgccgccgcccggcccgccgcttcaggctgctcctagggtccagccgttcagcgcccctgcgcccatccccatcttctcctcgaagccccgcgccgctgtgaggtccccgattcctcctcctcatcttcctgctgctgttacttcagctcccgctcccctggcggccacagcggaggctccatctcggccgccgcccgcatccactgaccagccgccccagcagcaaactggtgcgatgcccccgcctccggctccagcaccggcggggaaggggggacccaagcccaaggcacagttgaatgagcaaaacagtggagaatattctcaatctgaaaacaacgtagtagaaactgcacaagggcatgataaggagactacccctggacctgtaaaagctacaaagaggataaaaaaactaaaggcttctaaacacaacttgaacaacacaaattctggagcaattgaaggagatgctgatccttctttatcctcattaaaccactgccgctatgacagctcactaacttgttaccaggtctgctgacgaagaagttcatcaacctgcttcaaggagctgaagatggagcccttgatttgaataaagcagctgagacgttggaggtgcaaaagaggaggatatatgatataacaaatgttctagaaggtgttcatttaattgaaaagggacttaagaatatggttcgctggaagggatttgacatatcgaagcctaaggatatagaacgccaaatttcttcattgaaggaagaacttgaatctctttatgatgaagagttaaggttggatgacgaaataagggaagcaaaagaaaaactacaagctctcgccctagatggggataaaagaaagtcgttatatcttttgaaggaagatataaataagattcctcactttcagagatccactatgatcgctataaatgctcctcgtggaacttgtgttgaagttccagaccctaatgcggatcagtacatgtatgggaatctgggtttgcaggagaagcactacaaaattgtcctgagaagttcaatgggtcctgttgattgctatttgataagcggtgaccatgaggatatatttaaccagggccagctggtggcagcagacagattaaaacctgcagttgctactgatagttctcaagatttgcagcagatggattgtgatcctaatcaggcaagtaatggtggctgcatgcatgcagcagaaccatccagaaagcaagaaattggcattttgagaatcgttccatcagatgccgacgctgatgctgattactggcttgcttctggcgttgacgttagtatgacagatgcttggggcacgtagtggatggatcctcggagttagggctcttaacctgccccttagacagacaaaatagaatgagtctgcagtgcacaattgcattggggctggatcagtaggatacctttagtctccatgctctaggcccgttaactaacaaatcagagggtacatggtaggcagtagatcttgtacattggcggcatgattgtagttgttactctgtttcatcgacagttaagatagaatcann

SEQ ID NO: 44031 - DNA, 4702 bp, Zea Mays
gtccaatactgctatagtagcttctccaagttatgacactgttaggaagatggttcaacttctctcgaaatgaagcttctgtcttcctatgtatagacaagttgttcagttaggaggtctagattctcttaaaatggtgctatctacgagttaggaggtctaggagcacactgaatgttttagaggttgatgaaatcgttgttttcctaaaaaagcattttttctgctttgtttgaaattgtttgggttttcctccccaactttcataattacctatttctattgtatgtttgatcatttggacttctactccatccacaattttggtttattcagtgaggaactatgtttttaaccactctatagtttgtatagacatgcaacattcatctcagggtcaagaaagaagctcaacttggcatgcttcctgtttaaagcaaggcaagaaacatccccgccagatctctgtcgccaaagcagggctggtgaagaagttgtgtttccctcccggattgtcactactttcatatttgttcatttatgtttgttccaatttatgttggttttttacagttacagaatatgtttgttccagttgagttccagtttgaaaactggaacaaccactagcagatgcaaagttcacaaagtagcttgtcaaataatgtgcatgaactggaacaagcaacttgtgcacgaatgagcattactggaacaagtagcttgtgcatgaacgagtaatactgtagatgattggacatgtatgtctattttagatttttaatatttaatgttatatattcagctcataccatacatgaatttgcatttctgtactatactcacttaatgtcctacctgttttgttagcttcaactatccgctttaaactgacaaaaccagaccaaacatatgcaaatctcatatacctgtgaaagcaacaactgatttgccagattggttaattaaacgtaacaataaatagccccgattaaatggcttataaatatacttggatctgttcatttttcacatatcagctattaatgaagccttcactgggttcattttgtactactccattacttatttacagttacaagtattctaagaaacttaatatttcatcatcaaagttgtattcagacagtttcatttacattgctctgattttttgtactaggagctactgacaatggaaagcaacgattagagtaacttgatgagtgaggactattcattcagttgcttcgatcaataagtgaactaatggatgcatgtttcttttgataagtgagctaactactttagtcacaaagttcgtgttgatttctaaacatggtatgatggttttgtcatcctattcgattgagtttgggaaaaagcctgcacattctgaaaacaaacagactgcacattgtgtggctgataaggttgagtgggtaaataagatcaaagctattatttagacatactgaaaatatagtgaaggaagcgtaagcaatttttctgctatatttatgcattgtatccttgtaaaattatcaatattgttctgacttgtggggaaaggtatgagagtattcatttttttgcctcttttctgtttgcattccttcttcagtataatgtttgttagaataaccaggtgaatttacaaatttcatatccatatactttcttcgatgacaaatataaatctacctaggtttgtcataactcataggtcaatcattctaacttcaattgacattttttataaaaagtatcataaggaaaataatatattatcataaaagtgacgtccatctatatcaaattttagatattgatggtggtcagagttaaaaaacagtttgccttaagacaaaccaagatgaacttgtatttacaatcgaaggaaatattgcacattgcctagacatttaatttattagataaattcttttgttagttgttcaactttgtacgtcttataagtcacaggaacaatgtttatctagaacttcggtctcaaattatacagtagtgttcagccatacctgccatgtcacaagaaagagagataaaaagtatttaatagtagacctaatgatgctcatttgtaattgtagatattcgtatatcctttttctgcaaccttgtgaaacatgtgatggtttgacttggaacaaactttgggtctgatatagtaaaatgcaatgtatgtggagggaagtagtagaacaagacagaacaagtgccaaataaggttatatagtagaatacaatgtgtggagggaaatagtagaacaacacaaaacaagtgccaaataaggttacaaggtttatagtagcgattgcttagctgctacaacgacactcatagattagcctggcatttgcaatgtcgctcttgtatttgccataacctcacttaaggtcacacattgcctctgggaccttgacctccgctactgttgtcgcctggccgcgtcgacttcaccaatgccggggtgtccaacctcatcagcttcaccgtcgtcgactgctcccacacaaccgagctgtgggtcctggtaccggtcgcgccccgcctctgctccttctgcttcagcgagtggcagactatcgatacactcgatttcaattgttttttacgctatttactgtattgcaatgggacaatggatgattaggatttgttttttaagactggcccatgatttatcgtcgtatactatttctttaatagattgttcgctacatctactgatctacatgttcacatgtttcaacttctgtcagcatccgtagttactatatgaatgctcattctgtgtcaccttttaagtttacaaatgctcttttccaggtcacatatggaaagtgaagaacccaaatgatttcttcacaggaaggtgcttacatcttgcttccatgcctcggtagtttcggtcactattagttttgctatgcctttcctacataaataattttgctacctcaaaatgcttctaaatatgatgatttatgctggagactgctaaccttcacacatctaataagatgaagcaacaagctagaaaatgtggaatttgtcatatgtccggatgcaaaacgggtaacttcatgctttccacaatgtgtgtcgacatgatgcttgtagagatgcttggaccaatcttcaactcatggggcgcttcatcctcggcctcctacgcatgcacttctcctgcttctcctgctggtcatcgcccaaggtgcacttttcctccctgttctgttcacgtgcccatgtgtcattcttgtttttcactgtttaggatcgtgagggtgttattgcaataatagctgatggagaaatgagaatgattttcaaatgatgacaggattggcagaatgagagcgacaaaggaatgagctaaatcttttgaaatatgaagcaatatgatttctttccagtgttatatttttttatttcctatgcatttcttaaaagtgctattacatgttcacctactaatacccttgtttttcttgcatctcaaggatgaattgctgctcttgaccatagggattggagcagcatgtagtttatactttatcctggttttctctctcgagatgttgcatggtgtcagtgtgtcagatgtgccgtaacagatgactccaaaatggattgcatgctcttcaaatagctacagataactatcttcacataaaatggagagtacaatgtttataaaagaaggaatatggataaggatccagattctcctatagcatatgaagaggcaaaggaaatggcaagccaaagctgcacaatttctgatgatcactcgttgttactgttatccattatctcctcagaggcattgcttttaaattcaacagcagacatggcaggtgcaggtcctatcctatccattatctacccctgcatgtgtgccagctattctactctatgtttcaatagtttggaaataattcagagctaaggttttctgatacagcctttcaagatttggcacattgacataatgacatgggttggtcacggattggatgtcaattttgctccctgtaccttgtagattatcggttatgtcaattttcgaaatttctatcgtgatggataacatttgaataaaacatagttaaataaacatgactactgtttcagtctttcgaaattctgatgctatagtgtcagtatactatgtcattttagggaaaatatatgtcatgtttattttgataaaattatatgatttctcactcaattcttgtcggtggcttcaggatttgttattttgtatatcgatctgtgtcatttgacaaagtactttgacttggtataatatgagtgttacttcgaccaaaagagcttggtaaagtgtgagaaactccgcaaacttcttctgcagacgatgactagcaacagttatgacgagggtcaagatagccgccatacatgatacattgagtacaacatcaagataaacactccctccccacacacaacttttgccttccgttcactctgtatgttgtgtttattacggttgcatatgttgtgtttattatggcatcaacacgttccattagaaaatataactattgtttgtcaagtacaaaatcataatcacatcagcttgtaataatattgcatcactgttttgtaccaaattgtaagttgttgtagcaacgcacgggcacc

SEQ ID NO: 44032 - DNA, 5493 bp, Zea Mays
atgtcgtcgtcggagcccgatgccgagggcgccctcggcggcgcctccccatccgcccgcgtgctcgcccgcgccctcgacaagatcatcaagcactcctcctggcgcaggcacgccgctctcgtcgccgcctcccaagtcagcgctcgatctcctctcctcctccccagctcctgatgacgagcccgagacctcctcgccctcccccgtccccggcctcccagcgcccgccgcggaagccgccctcaccgcacttctcctcgcgctcgacccggcgtccccgaaggtagccgagcccgcgctcgagtgcgtcgccggcctcctctccctgcgccttctcctcggcgacgtcgacgcggctgacccctccctgatctcgaaactcttcgccgcggtgctctcctgcgtctcgctgggtggcagcggggacgaagcgctcgagctgtccgtgctgcgcgttctcgtcgctttcgcgcggtgcccgggagtctccgtcagcggggagtgcctgggccaggtggtcaaggcgtgctacaacgtctacctcgggagccccagcggcggcaaccagctctgtgctaaactagctctcgcacaagtgctggtcatcgtgtttgcgcgcgtcgaggctgacgccatggacgtccgcgtgcgcactgtctccgctgccgacatgatggacctctctgaccgcagcctcaatgactccagcgttgtacaggcggcacaagtgttcataaacgaggccatggaggggagcgacgtgccggaggaggcaccacatgtagatgaggcgtcagttgaggcggaaggcgctggggaggatggtggaataagcaagataagggaggatggcctggctttgttcaagaacctatgcaagttgtcaatgaagtttggtacgcctgatagcccggatgatccaatgctattgagggggaaggtgttatcgctggagctggttaggatggtcattgacaatgcagggctattctggaagacaaatgaaaagtatcttgaagcagttaagcagtacctttgtttatccttgttgaagaatagtgctttgtccgcaatgagtgtcttccagttattgtgttccatatttatgagtctaatatcaaggtttagatctggtttgaaagaggaaattggaatgttttttcctatgcttatcttaagagttcttgaaaatgttctccagcctagttttttgcagaagatgacagttctaaacttcttggagaaaatgtctaaagaacctcaggttatcattgatatctttgtgaacttcgattgtgatgttgatgcaccgaatatttttgaaaggattgtcaatggacttttaaagactgctttaggtgtccctactggatctacaacaacattaactgttgcacaagaccaaacatttaggcttgagtctgtcaagtgccttgcaattgttgttaagtcgatgagtgcatggatggaccaacaactgagaattggtgaattttcaccaggcaattctgaaactctaagttcagctgataaccataatattcataatggagaagaatggagcggaatagattatgaactgcagtttgacactagtagttctgacataaccgactcttcctcacttgagcagcgacgtgcttacaagatggagcttcagaaaggaattaccttgttcaacaaaaaaccttccaaaggtattgattttctcattcggagcaagaaaataggcaattctccagaaggtgtggcatctttcttgagaagtactgctggattgaatgcaacaatgataggcgactatttgggtgagagggatgactttcccctcaaagtaatgcatgcttatgtggacgctttaaacttcgaaggcatggactttggtcaggcaattaggttcttcttgcaaggtttcaggttaccaggagaagctcaaaaaattgaccggatcatggaaaagtttgctcaaggctactgtaaatgcaatccaaatgcttttattagtgcagatacagcatatgttcttgcatattctgtgatcttgctaaacactgatgctcataatccaatggtgaagaacaagatgtctaaggcagattttatgcgcaacaatcgaggaatagatgatgggaaggatttgccagaagattatctgagtgcgctgtatgaccagattgtcaacaatgaaatcaagatgagtgctgattcttcagttgcacaaaccaagcaatccaatagtgtagggaggcttctaggcttggacaacattatcaactttgtcaattggagaccagcagaagacaaggcagtaggagcaaatgacttgctcattaagcacatacaggaaaaaatcaaagcaaaacgtgggaaatcagagtccacgttttatgttgttgctgatgcaaccattttaaggttcatgatggagtcctgttgggcacctatgatggctgcattcagtgtgcttcttgatcagtgtgatgataaggctgctacatcacagtgtttaaagggattaagattttctgtgcacatcacttctgttatgtgcatgcagacacagagggatgctttcttaacgtccatagccaaattcacatctctccattctgccgcagaaatgaagcaaaaaagtattgattctatgaaggctataatatctatcgcaatcgaagatggcaattacttgcaggaagcttgggagcatgtattaacatgtttatcacggtttgagcatttacatctgcttggagaaggggttcccactgatgcatcctttctgacagttcctctgattgagtcagaagaaaaaactaagaagtctacttctgttctatcttctaagaagactagtgctcttcagaatcctgctgtgatggctgctgttagagggggtacttacgatagcacagtggcaaaaggcagtgtgtcagcactggtcactcctgaacagatcaataatttcctatcaagcattaatttgttggatcagattggcattgttgagttaaatcatatctttgcccatagccaaagattaaacagtgatgctattgttgcttttgtgaaggctctttgcaaggtctcaatgactgagctgcagtctccaacagatcctcgtatcttctgccttactaaaatagtagagattgcgcattacaatatgaatcgcatacgtctggtgtggtcacgtatttggaaggttttgtcagatttttttgtgtctgttgggttgttggaaaatctttctgtcgctatatttgtgatggactctctgaggcagctggccatgaagtttcttgaaagggaggaactggcaaactataactttcaaaatgagttccttagaccttttgtgatcgttatgcagaggagcaatgctccagaggtacgagagctgattgttaggtgcgtctcacagatggttctgagtcgggttaataatataaagtctggttggaagggtgtttttatgctgatgatacaagaagtactgtcctattggcatttgagacggtggaaaaaattgttcgagattattttcatcacataactgaaacagagacaacggcatttactgattgtgtgacttgtcttattgcatttacaagtagtcaatttaacagcgatgccaatctcaatgctattgcgtttctgcgattctgtgctgttaaacttgctgaggaaggattttcttgtcaagatagggcttttgaacaacccaggaattcagccatggtgtgtggtggaaatgccactgtgcaaaaagatggtcatatttccctctggatgcctctccttgcaggtttagctaaactgacaagtgattcaagactgaatatcaagaaaggtgctgtaggagtactttttgacattttaaaggatcacggacacctgttctcgctgacgttttggaccgatatctttgaacatgttgtttatcctctatttagcaatgaaaggtcgacacccagtgaccagatttcaacatcaaattctgcagagtataatttacctgatcttgaaacacaaacgttggcagtgaaatgcttggtgggtttgtttgttaatttctttgatgtgatccggccagaacttggtagaacagcatcaattgttacatctttcatcagaagcccctacaaacattgtgctaccattggtgtatctgcaatcatgcgtttagcagatggggttggtaacaaactttccaaagaggaatggaaagagatattgatcttctttagagaatcagtgacgcataccttcatcacgttttctaaaattgtaaggatgatgcaagatattgatatcccagatagaattgattcttattccgaaaccgagcaatatttggatcatgagatgtatgttaacgatgaagaggaagcgaatatggagacagcttcttatgctattgtcaaactgaagaatcatatggctctactgctcatggtgattcagaacattatcaaactatacgaggagcacagcaaatatcttcatgccgagcatattagcattcttttggagatgatgtcagctattgcgatacattcaagtgaagtgagctctgagttatccttgcagtcgaaatttcataaagcatgttcccttttggaggtatctgagccagcaattgttcattttgagaacgattcctaccagagttacctcaaacttcttcaagctctgcaacatgattatccatccttgtcagaagagatgaacatagagtctcaagtgcttgatacctgtgagcaaatattgcaaacatatctgaagtgcgcaggacacaaaccatgtgatggggcgtcccaaagaaatccgcctttacattgtgcagtgccgctgagcgcttctaagaaagaggaattggctgctaggactcctctggtccttcaagtgatgaaattgttgggtgatctggagagagattcctttaggagaatattaccctgctttttcccattattggctgatctgatccgctgtgaacatagctctggagaagttcaacatgcactgtacaatatcttccaatcagccattctccccatgataagggtttaataacagattgtgacccaccaattgtacagtttttgttaccccactttggtgttgtaattcagttcattgtggcgtcattccattacgaggggttgtatacctatgaggatgacgtataaaaatgctgcagggtctgtcattcagcttaaggactatggagcatctttttaatattcattttaccaatgatgttcatcatatatgctgggatcaggaagaaagacacggatatggaatcatataagtcaggtgacctcggcttctcagagccccatgttaccatttgcccattgccatccccaggatcgtgtttatatatatagcactagagctacgaaccgttttgatgttactactggctttgctacgtagattgtttttaattttatacaaaaccataaactagagttacatgcc

SEQ ID NO: 44033 - DNA, 971 bp, Zea Mays
atggggaagaaccaggcgtacaaggcggtgcagcgggcacgactggggtcctcgtacggcacgccgggcgccgccgacgcccccgaagacagcatggtgatgtccatggccagtactctgatctcctgaggctatttgattatggtggctatccgcctcaggccaactaccttttcttgggtgattatatggatcgtggaaagcaaagcctagaaacaatgtcttcttttggcttacaaggtcaagtacccggagaacttctttcttctaaggggcaaccatgaatgcgcatcagtaaatcgcatctatggtttttatgatgagtgcaaacgcagattcagtgtaaagctgtggaaaacattcacagactgttttaactgcttgctagtgtcagcattgatagatgaaaagattctctgtatgcatggtggtctatctctggagttgaacaagcttgagcaaatactcaacctgaatcgccccacagacatgtctgatactggattgctctgtgatcttctttggtctcatccttccaatgaagcaacgggctgggccatcaatgatcgaggggaccaagttatggttatcgaggcagagtgatgcttgcttttgaagataatggatcctcaaaaattggagtccgatttgacaagcagatccctgatggctgttatatttccacagctgaatcacttcgcccagacttttctgctggtgaagaagttgagaggctagctatgaccgagctaatagaggatgaagctctacttacagattggaagcagcagttggatcgtggtgttgaaacccttaaagccaaatcaaacattggtagcattcgcacgagagaggtaggaacaacaatggtcgttgttgctgcacaaacaaaggctattgctggtaacttttacttgttatattatttaagcatattatatagactagacatttgctactttgctttctga

SEQ ID NO: 44034 - DNA, 1831 bp, Zea Mays
ataagatcccagatgtgctttttctgtgaacaaggtctcctgaacagtcacaatctgtgtagccgactaagccataatcttaagctgtacccttgtattttaccccaaaatcaagtgtaccagccacatatgtaacaatcagcagcagcagtccacagactcctgatttttcccctggagttcctttaatgtacagaactttgagtgatctaatggatgcaactcaggaggtgcatgatttcgagtatagtgcattatgtttgctggcagcagatgaactaatcagtgttgactcagctttgacagagaagtgttggagtgaagcaatggcatctgaactgaaatcaatagaggaaaacaacacttgggaatggtctgtgttacctaaaggacataaggtcgttggcctaaagtgggtctataaagtcaaaaaggatgcagctgggaagacagttaaacacaaggctaaactagttgcaaaagggcagccttgtgctaaaattgaagaaagccttatatggtttaaagcaagctcccagagcgtggaacatcagacttgattcagagctgatctcactgggtttcaaaaaatgtgttgtggaccatgctgtatataggaaaggagcaggagaatcaatgctgctcgtgggagtatatgttgatgacctgatcatttgtggatcgattgttattaatattaacagttttaaacaacaaatgatgtagacgttaagtatgagtgatctgggactcctcacttactacttgggcatggaggtcagacaagatgtgaatgagattacaatctgtcaaaaggcctatgcatcaaagatagtggagaaatgcaacatggcaaactgtaatcccacagacaccccaatggaacagaggatgaagcttagcactgctgttaaagggactgaagtagatgtaactagatacagaagtattattgggagtctgagatatcttgtaaattcaagacctgatttggaatttgcagtaggtcttgtgagtaggtttatggaggctcctgggaaggaacactggattgcagtcaagaagattattagatatgtggctgagcatgctcattgcagacataaaggctgaaagtattcagaaattcagactgctggtggacaatatgtcagctattgaactgagcaagaatcatgtgtttcatgataggagtaaacacatcgacacatgttatcactacattagagattgtgttgacaagaacgtggtggatgtggaacatgtcagaactgttgaccagcttgctgacatactcacaaagccgttgggaagagtcagactagcagagctgagatcaaggcttggggttggtagagtccaacaagattaagggggtgatttgttagaaactcagtcagtctgtaatctagttggtcttatatatttgggtgtggtgtagaaacacctggcagcagtgctgcgcatgcccaggtgtccgtcaatttgtgtaagtgttaccccatcaaacatatgtgctgcgcatgcccacttcgatccggaaaaaggggagatcgtggggcatttcgtttgacggggggaactggcatcatgcctagttaagttaatcagaaagacccaagaaatgagtatgatgttgagcagtgcaaaggaaagcaaagatcactatgatgttgagcatgtgtgtgggtaagtgtaaaagcgtcgagacaaggaacatcaagtaattcccctcccaaactacctcatatgatcaaattaaaagagaaagcaagaagtttatactttattccttatgtacacatccaatgtattttttagtaggctgcca

SEQ ID NO: 44035 - DNA, 556 bp, Zea Mays
cggaaatcttattaccaaattttataagttacatcaagttttacaatgtacatgatcggagtgattacaaaagtgattcaaagaaataactttgaactattataaattatttgtagttttgaaatatatgctagcttaagtgaccatccttaataagaagtatagaagggttacttagacttataagaaggtcgtgtccaccggcgcttaacaccaatcacaatcaagtgactcgtaacctgcagcaacaatgggtaaaaccctaagtacacaagtactcagcaagacttaaccgactaaagaaaatactctcaaggatatgctagttaaataggaatcaaggaaaaggctttaacaagaatcaacttagatacttttgcagaaatagcttactaaagtgagtccttactttcaacattttaatgctagattaagtattaatagaccttgtttgcatctagtctaatttcaccatcacattaatcaatccaacatgatttttgctcattaagattccatccatgacttagattgcagggcagtgaccaagtcttca

SEQ ID NO: 44036 - DNA, 936 bp, Zea Mays
agtactgaaaagcagcaatttgttagcaacactcatcaatgaccatgaatgcaataatagccctttcctccttgcttttggaaactgagcttactcctgagcagcgtctaatggtggaaacagtactgaaaagcagcaatttgttagcaacactcatcaatgatgttctggatctttccaaactcgaggatggaagccttgaactggagattaaagcatttaatcttcatactgttttcaaagaagtgatgggtttcattaaaccaattgcatctatcaagaggatatctgtatcggttatgttggcaccagatctgccgttatgtgcaattggtgatgaaaagagactcatgcaaactattctgaacatctctggcaatgctgtaaagtttaccaaggagggacacatcacgcttgtagcttccattatgaaggctgactctttgagagagttcagaaccccagaatttcatccaactgcaagtgatgaacatttctatttgaaagttcaggtaaaagatacaggctgtggagttagtcctcaggatctacctcatgtattcacaaagtttgctcatcctcaaagtggaggaaaccgaggggttaatggtagtggtcttggccttgccatatgcaagaggtttgttagtcttatgggagggcacatctggatcgacaacgaaggaaccggaagaggttgcaccgcaacattcgtcatcaagctgggcgtgtgtgacaacacaaacacctaccagcaacagctgataatgaagtgcatctgagcatttgaaacaaatctagattctagctctagctaaggtgggctgtcacttgggatcgaaaaggataggacatctactgtcgccatggggtttgtcgatgactccaaagggcatgttgtcgctactagaggtggagcgagtgcccaacctcgac

SEQ ID NO: 44037 - DNA, 551 bp, Zea Mays
cacaactcctaagaggaggatggcaaatgtgctagatgttgtattagaaacagcaaaaaccttgaatcctgctcctttcagaaaaactgccgaagcttaaaaggcgcaacccgaagctgaaacgaaacaagcagaagttgaagctacaataattcaaactgaaaccaaagctgggcctttagagcccgctgagatagagcctaccgaaattaaagaaaaggcaaccgaagaaaaggccatagagcaaattttgtctgaaaaggttgcaactcctgctcccgaagctttaaaagagagcattgattgcatcattcgccatgcttcgggaaagggactttctcaagaagaaaaacgagaagcacaacactatgctcaaaaattgaaatacccgaagggggcattagtgtttaatggcagtgggaaagaagattttttgtactgtctcccgaataataaagagatatccgtctgccgagagataggtagaagtatcggattcccgaagctagaagatggcctttcaatattatcataggatgaacttgctgata

SEQ ID NO: 44038 - DNA, 936 bp, Zea Mays
ctaaacaaggcaccaccaccaggcaccaggcaccaggcaccagccgcaccatcgcctattcgcctcctctcgggctcgctcgctcgcccccactctcgtgcttctgcttccccacccagtcacctcgacctcagcccctctcgccctccctaatctcgactccgatgccgccgccgctcctccaggcgcgcgactacatgggcgccggcgccacccctctgtcctgctcctccagcggcgagggcacggggccgcacctcgcgctgcggctcgggctcccagggtccgactcccccggccgcgacgcggggccggagccggaccacgcccacgtcgacgccgcgctcaccctcggccctgcccccgcccccgcccccgcgcctcccagggtcggcgcaaagcgcgggttcgccgactcccgcgaccggtgcgcgaagcgggacgccactgctgcggatgacgctgctgggggagtgaccggggaggagaagcgggtaggtgcggccgctgccggagctccgccggctgccaaggcgcaagttgttggatggccgcctgttaggagctaccggaagaacacactagctatgagtgccacaaagacaaacggggaagatgaaggtaggagtgaggcgggatgctgttatgttaaggtcagcatggatggagccccatacctaaggaaggtggacctcaagaccttttcgagctatgaggacctttcgcttgctctggagaaaatgttcacctgcttcatcactggtcaaagcggttcgtgcaagacttcaagaagggagaggcttactgatggttctagggctgatgcccttcaggaccaagaatatgtccttacttacgaagataaagatgctgactggatgctcgttggtgatctcccctgggatggaaaccgatacgattttggtgcagcggtct

SEQ ID NO: 44039 - DNA, 3339 bp, Zea Mays
ccggctggattcatcgcccccgcgacgtgcgccatttctccagcacacacgcaccggacgcgcaaggaaaacaagtcacaaatggcacacccggggtcccattccatcccaagctcggatctcgctccccgttgctgcgcgccgcgtgcgtgacggtgcggcaccagcacaccactccgtcggcgtcgatccagccatataataatctcgctcgcccgatcggatcggcttcacttcccacgatttggcttccttttctaccccgcaggccgcggcgcgtagtcttctgctctctagctcaccatcaccgtcgtcatcaatcacggtgaccttgccctcgctgctcgactggaaccgatctgccccgttccactccccgctgttggctgttgctctgctctcatcgtcttcggccgggaaaggacgctgctgctgctggtaggctgacagcgaggaggacgagacgagggggccatggctcagatcttgctccacggcacgctccacgccaccatcttcgaggccgagtcgctctccaacccgcaccgcgccactggcggcgcccccaagttcatccgcaagcttgtggaagggatcgaggacaccgtgggtgtcggcaagggcgccaccaagatatatgccaccgtcgatctcgagaaggcccgtgtcgggcggacccggatgatctccaacgagcccgtgaaccctcgttggtacgagtccttccacatctactgcgcgcacatggccgccgacgtcatcttcaccgtcaagatcgacaactccatcggggcctcgctcatcgggagggcctacttgcctgtccaggacctcctgggaggggaggagatcgacaagtggcttgaaatctgcgatgaaaatcgtgagcctgttggggacagcaagatccatgtgaagctccagtactttgacgtcggcaaggaccgtaactgggcgaggggtgtccggagcaccaagtaccctggtgtcccttacaccttcttctcgcagaggcaggggtgtaaggttactctgtaccaggacgctcatgtgccggacaactttgttcccaggatccagctcgctgatggcaagaactatgagccgcacaggtgctgggaggatatctttgatgctataagcaaggctcagcatttgatttacatcactggctggtccgtgtacacagagatcaccttggtcagggacaccaacaggccaaaacctggtggtgatgttactcttggggagttgctcaagaggaaggccagtgaaggtgtccgggtgcttatgctggtgtgggatgacaggacttctgtcggcctgcttaagaaggatggcttgatggctacccatgatgaggagactgcaaattacttccatggcacggatgtcaactgtgttctgtgccctcgcaaccctgatgattctggcagctttgtccaggatctgcagatatcaactatgttcacgcaccaccagaagatagtagtagtcgaccatgagatgccgaaccagggatcccagcaaaggaggatagtcagcttcattggtggcattgacctttgtgatggaagatatgatacccagtaccactccttgttcaggacgcttgacactgtccatcacgatgacttccaccagccgaactttgagggtggatcaatcaagaaaggtggcccaagggagccatggcatgatatccactcacggttggaagggccaatcgcttgggatgttctttacaactttgagcagagatggagaaagcagggtggtaaggacctccttgtgcgtctcagggatcttcctgacattatcatccccccttctcctgtgatgttcccggaggacagagagacatggaatgttcagctcttcagatccatcgatggtggtgctgcttttggcttccccgagactcccgaggaagctgcaagagctgggcttgtgagtggaaaggatcaaatcatcgaccggagtatccaggatgcatacgtaaacgccatacggagggcgaagaacttcatctacattgagaatcagtacttccttggaagttcatacggctggaagcccgaaggcatcaagccggaagaaatcggtgctcttcacttgattccgaaggagctctcgctgaagattgtcagcaagattgaagctggggagcggtttactgtttatgttgtggtgccaatgtggcctgagggtgttccagaaagcgcttctgttcaggcaatccttgactggcaaaggagaacgatggagatgatgtacactgacatcgcacaagctctcgaagccaacgggattgaagcaaaccccaaggactatctcactttcttctgcttaggtaaccgtgaggtaaagcaggagggagaatatgaaccagaggagcacccagaacctgacactgattacatccgggctcaagaggctaggaggtttatgatctatgttcataccaaaatgatgatagtggacgacgagtacatcatcattgggtccgccaacatcaaccagaggtccatggacggtgccagggactccgagatcgccatgggcgcgtaccagccgtaccacttggcgactaggcagcctgcccggggccagatccatggcttccggatgtctctttggtacgagcacctgggaatgctggaagacgtcttccagcggcccgagagcgtagagtgtgtgcagaaggtgaacgaggtcgccgagaagtactgggacctgtactcgagcgacgacctggagcaggacctcccgggccacctcctcagctacccgatcggtgtcactgccgacggcagcgttaccgagctgcccgggatggagaacttccccgacacccgcgcccgcgtcctcgggaacaagtcggattacctcccgcccatcctcaccacatagagtgcacactgcaggcagcgccatggctgctctcctctctggcctcaccttggtgtccctgtgtttgtgtttgggacactggaggttcagattgcagtgttgatattatatcccccctccgtccagagggattcgacgttattgagtcataataaaatgcattgtgcacggtgggagactgggaggataggaattatagttgtttattacagtacgactgcttactgcatccagattgtgttgtcccttgtctggtgtagcttctgttgcttgctgcgttgcagtgccggaagtgactccagatttcagaacttaaacatgattgcttgttcaagtgtgtgctgctaaatgtcaaactgtcgatgtcatgctacaacaacaatattgataatctctcatctttctataaagacctttaaacctggt

SEQ ID NO: 44040 - DNA, 1131 bp, Zea Mays
attactcggccacgacttgccgactacgatgccagcgccaagcctccgccgcccagctaaaaatcccccaggcgttcctgagcacccgtttatcatcacatgaccggagtcggccagaatttgccgtagctctcgcccccgctcgccgtgcgcttctcgtcccattcccccgggatcgtagattctcgagctgagctgagctgagctgagctgagcgatggatcgcgagctcagccccaggggcaatgctccagggagagggagcggcggcgcgtcgtcatcgaagcacaagaacggcggcggcggcaagaagccgatcaaggtgctttacatcgccaaccccatgcgcgtccagaccagcgccgagggtttccgcgccctcgtgcaggagctcaccggccaacacgccgatccctccaagtacagccccggcgaccttgactccggcgctgccgcacagggtctgagccccagggccagggtcgcggacgtttcgtcggaaaccatcgtcgcaagccacagccctggcagtaaggccgcgccgcacggaggggactactacgacgtcgaggaagacgaagatgacgtcttcaggtcgcctcacatgctgctggagaacaattatacggtgttctcgccgccgacgctactatatgaccatcacccgcacagcaaggctacttctgaatcggaggctgggttcgcagcggagcatgacaatttctggtccaaatgaagctgaacaagttaatacgactatagctacgaatggtttcagacaacactggtacaagagactataagcatgaatacgaagatggctacgtacggcaatggtggtgaaggctacgacgaaaggattgcggcgatattacggttgatgaatggcatgatgtataattttcttgatggacaaaaggatatatacacctccgatctgttttgtccattgagcagcaatctatgtaatcttatgcctaatgaacaggctaaggatgttttagacacaactactctagttggcacaatgttggattcggaagggaaacattgtaaaacgttggttgcttccttgtgtacatgttgcgcgcagcattatattatatgtctattgtttgtcatggtggcata

SEQ ID NO: 44041 - DNA, 2205 bp, Zea Mays
atggcgacgatgtctgcagcgtctcatcgctgctgtgcttcttccttgagagctttaacggtgttatttgtgttggcagctcttgtttcagatgttggcgggcgacatcatcatcatgtttgtcctcattatttctcctgtggtggtttaagcaatatatcgtatccatttcgtcggcaaggtgatccatctgggtgtggtgtccaatcgtacgagctggtttgcacggatacagatgctacaattcgcatcggcagtggaacatacaaggtgcttagcatcaactccacatattctcacttctgggttgttgatgccgacctggacatccagagcagttgcccccttccccggtgggattaccatgctcgttggatcaatctcaacttacatcgttggtggattgtgtcgagccaatattatttctattcttcttctttttatatggattcgtggcggtgggctatctttgtgaattgttctcagccaatagagaacaatgatactgataaatatcatatatatgagccggtgtcttgcttgagcaattcttctttcatctacttggtacctgactactggcatgcaggtgccctcgaatacaagctatccagatgttgttaagttcatgaggagtggatttgcccttggatttccctcgtatggtgataacatcagagaatgtctcgcaaaggatatgcgtactttccataaagaaccaagaaatagtacaggcatcaggcaacagatcttggacattcttacggtcgtcgacatattctgggcttgtgttatctatcaacttcaatcaactaattataatggtgtcacaactgttgtcatcggcatcattgaaacgatacaatatgttagcggggtcctggattatacagctggtgtttgcaggttcgtattaatgccgctggcagtattcgtcttcctagtctataaatactggaaaacaaggataacagtagatgcagtcgagaagttcttgcgaacgcagcagatgctcgttccgatgagatatgcatacacaaacatcattgctatcaccggccatttcagagacaagctcggacaaggtggttacggttctgtatacaagggggtgctacagccaggtgaagttcatgttgctattaagatgttgggcaactccaactgtaacggagacgagttcatcagtgaggtcgccaccattggcaagatccaccatgtcaatattgtgcgcctcatcgggttttgctccgaggaaaatagcagagcacttatctacgagttcatgccccatggatctctcgataagtacatcttctcgtcggagaagagtttctcatgggtcaaactcaatgagatcgctctgggcattgctagcggtctcaactacctacatcatgggtgtgatatgcagattgtacacttcgacatcaagccacacaacatccttcttgacagcaactttgttccaaaagttgctgattttgggcttgccaaactgttcccaagaggcgacagtttcgtgccactgagcgctatgcggggaacgataggatatatagctccagagatggtatctcgaagctttggtgtcatctctagcaaatccgatgtgtacagctttgggatgctactattggagatgacgggtgggcgaaggaacgcagatcctcatgcaggaagctccagtcaagcatactacccatccttggtgtacaaccagctgagccagggtgatgcgaacgggattagtgaaggtgttaatatgcacgatttagagaagaagctatgtactattgggctttggtgcatccaaatgaagccgcaagatcggccgacgatgagcgaggtcatagagatgcttgaatctggtgtcgatggcatgcaaatgcctccaagaccatacttttgtgatgaagagggtgacagttcttactctataatctctgaactggatacaattgaagagtaataattgtagtaaaatacacttgtgtctatgtgatcttaatgtattagactactaataatgcaaggttgtcataagctaaggtactggttgtatacttttattgagagtgtggtaatgtgttttgatataaaatacctccatgaacctatttttacaaagaactcctcaagaacatttgtttgcctacaagcagaggatcagagtcctagccgttctatcttccaaaggttgca

SEQ ID NO: 44042 - DNA, 1407 bp, Zea Mays
gtatgcgttcggcgacgcgacgcgcacggcgcaccattccgcggccacgaagagcacaatcctgttcgccacgccatgcctctccacgcccgcgcaccgccgctccgccactcccaccttctactcaccgccgccaccgctcggctccgcccgtgcgcagcgccagcgaccaagccccgccgccgctccctcgtcctcgtccgcgcctccagctcggaccctccgcagcagcagctcaacctctccgtgctccgcttcaccctcgggcgctgatgctgccagccgagtgccgttgcccgaggggagcatccaagtattcgtcatgtctgagaacctgtcagctgtgcagaaggaggacatggcgtgggcgtcgtacgtcctgctccggaacacaaacaccacgtctgtggtcatagcaattggggatctcttgtgcgtacgaggatactggaatccacctgcaaatacttcaaaatattccacgatcgagtggttcaaaagtcagatgcagcaactaggacttgttgatttgaggggtgctttatacttccctaattcgtcaggaaagtttctcttacgctgtcaatcatgctactctgaccagattctcagcttgcgaagattctgccagatgggattctttctgtgctagcgcaacctattctgagtcctgatccagctaataatgaaacaaaaactgaaggtgtcatcctgttggcctgcaatgcaaattatgcatatagtgagaaagatagggcttggataagaacagttgcagacaaatttcaacgtgcttaatttagaggtaccaaagaaatgttgacagtcaggcagtactggaaaatggaccgggaaagattggggagtgtaaagtagactgactggtccaagaaggatttggagtcttggcaacgtggactgagcagaataagagagttttgcagttgggaggaaatcagcattaagctactgtttattagggttggcgctagttgaagcaaaatagtccagcaatagtttgttcagttggctagagactatgtggtgatgtgtttggtttgtctctgtgcctcttgctttggtatgtatgtctgattggatttggcattgaagcagaaaggctgctccagagattagtgacatgtgcaaagtagcaatgctgtcataatttacgcatactccagcccaattgaggcagttgatcacctggctgcatttatataagcagtaaaagcatttttagttcaaagtgttgtcacatttaagattgcaaatactgctgatcaatcacattccttcatatatgtacctagattttctattgcaggcttgcagctagtgaccttttcagttgctattgctagtatacacaaacttaacagacaagggaaatgtttgaatcttctg

SEQ ID NO: 44043 - DNA, 1963 bp, Zea Mays
actcccgtcagccactcctctaccggtgacgcacgcacccaatctctgatctgatctctccccctggatctcgacctccgcctggctgctccgctctgcgtcgctcgccatggcgtcctcgacggggagcttggagcacggcgggttcacgttcacgccgccgcccttcatcacctccttcacggagctgctctctggggcagcagcggacatggtaggagccgcgggcgccgatcatcaggagcggtcgccgagggggctgttccaccgcggcgccaccaggggcggcggcgtaggcgtgcccaagttcaagtcggcgcagccgcccagcctgcccatctcgccgccgccgatgtcgccctcctcctacttctccatcccgcccgggctcagccccgccgagctgctggactcgcccgtcctgctccactcttcctcgaacttcttcgcgtcgcccaccaccggcgccatcccggcgcagaggttcgactggaagcatgccgccgacctgatcgcgtctcagtctcagcaagacgacagccgggctgcggtcggcagcgccttcaacgacttctccttccacgcgcccaccatgcccgcgcagaccacgtccttcccttccttcaagcagcaacagcaagtcgaagcggcgaccaagagcgccgtcccgtcgagcaacaaggccagcggcggcggcggcggcaccaagcttgaggacgggtacaactggcgcaagtacgggcagaagcaggttaaggggagcgagaacccgcgcagctactacaagtgcacgtaccacagctgctccatgaagaagaaggtggagcggtccctggccgacgggcgcgtcacgcagatcgtgtacaagggcgcgcacaaccaccccaagccgctgtccacgcgccgcaactcctccggcggcgtggcggcggcggaggagcaggccgccaacaacagcagcctctctggctgcggcggcccggagcactccggcggcgccaccgccgagaactcgtccgtcacgttcggcgacgacgaggcggagaacgggtcgcagcggagcggcggtgacgagcccgacgccaagcgctggcggaggacggtgagaacgaaggcagctcaggcgccggcggcggcaagccggtgcgcgagccgcggctggtggtacagacgctgagcgacatcgacatcctggacgacgggttccggtggcgcaagtacgggcagaaggtggtgaaggggaacccgaacccgcggagctactacaagtgcaccacggcggggtgccccgtgcggaagcacgtggagcgcgcgtgccacgacgcgcgcgccgtgatcaccacgtacgagggcaagcacaaccacgacgtgcccgtgggccgcggcgccgccagccgcgcggcggccgccgcgccactgctgggctccggcggcggccagatggatcatcgtcatcagcagccctacaccctggagatgctgagcggcggaggaggagggtacggcggcggctacgcggccaaggacgagccgcgggacgacctgttcgtcgactcgctcctctgctagagggagaggctagagctggcgagggggatgcggagccggtccaccaatctcggtgcggcggcggtgtctgtagcctgctgtacgtgtacggcgggggtatacgtagcgtgcacgctcgccttcgcattcagaattcagatacgtgcagtatacacacacgcacgcacacacaacacgctgtgtgcaccggatctaggttagctaggaatgggaatttgttgattcgttggaggccttcctgccacgcgcgcacggcacggtactcgtacagacagtcatacggttgtgtcgttttgtagttgtagcaacggtgccgctaacgcctgtgtggaaaggccctataccgtatatatagtgtgacaaagtcaataaagctgaaaagatcgcgttattt

SEQ ID NO: 44044 - DNA, 2922 bp, Zea Mays
ctcctgaccacggccccgactggagactgctgttcccctcgaccctcgtccgtccgtccgtccgtcacctgacggctcccaaaccctaccccgcagatccctccccttcctctacccccgcctcgccgccggtcttcgtcacccgtcgccgtgcccgtcggcgcggtgttaagggtccgctacgctgcacctcgcggggagaaaggggtgggcctcggggacctccgccctccgcgcaaggagcgtgaagagagacgcaagagactaaagagagagcagcaggatgatgggtcaaggctacattcccagcagattaggaatgattatgctcctcaacccaaaagacatagtcgcattaaagaggcacctcagggctggctggactgccctgcatttggggaaccaatagataaaatcataccatctaaagttcctcttgacgaaacattcaatgagtcagtgcctcctgggaagcggtactcctcaaagcaactagttaacaaacaaagaaaagctggccgcgaaataggtctggtgattgatttgacaaataccacccgatattattcaccagcagaatggacgaagcaagattgcatgcaaggggagagatgctgtacctgacaatgaatctgttaataagtttgtctatgaggcaatgatgttccttgatcgacaaaaacaatcaaagaatcctaaatatattctggttcactgtacccatggtcataatcgtacaggtttcatgattattcattaccttatgcgcacacacgtctcttgtgttgctgaggcgattagtatatttgctcaaaggcggccacctggcatatacaagagggactatattgaagcattgtattcattttaccatgaggttcctgacaatatgatgatagcatgccctccaacaccagaatggaagagaccagatgatctcgatttaaatggcgaagctaagcaggatgacgatgatgacaatggtgatcctggaccactgcataatgaatcagaggataaagtcatcaccaatgacgatgtgttaggggatgaagtgccatatgaccagcaagaagctttgcgtgtcctatgttatcggttgcttgaaatgcctcttggaagggggcatgcacactttcctggatcacatccagtttctcttaacagtgaaaatctgcaactacttagacagcgatactactatgctacatggaaagctgacggaacacgttatatgatgcttataatgagacatggttgtttcttgattgatcggaattttagctttagaagggttcagatgcgctttccccataggagcctccaaggtctgcaagatatgaccttgattgatggagagatgattatagacacagtaccagattcaggcttgaagagacggtacttggcatatgatcttatggcgcttggctcagtgtccaaaactaggttgccattttctgaaaggtggaaaatgctggaagatgaaataatacagccgcgtaataatgagaaaggccttgagcgtggtgctaagagcaatccgttgtacaaatatgacatggaactattttcggttaggagaaaggctttttgggtgctattaacagtaaaaaaggttcttaaggtgtttattccatcgctatgccatgatgctgatggccttatatttcagctagaacattttgtcgtggatgtgtaattggtggaccaaattttaaacggtgctggatatggaactcctctccctaggctgggatgatccatatgtaactcgtactcatgaaggtcttctaaagtggaaataccctgagatgaattctgttgactttctgtttgagcttacaaatgataatcgtcagctggttttcctatatgagagaggaaaaaagaaacttatggatggtgctcggatatcatttactgatgatgtagatccatcttctgtcgctgggaggattgtcgagtgctcttggaacaaggaagaacagtgttgggcatgtatgcgtattagatctgataaatcaactccaaacgacatcaacacataccggaaggatcatgctctctaagacgttcacttcagcaattctcagtgtcagttaaagctgttcacagctgatcatcattgttttttttgttggtggttgagcatcatattttgcctactgttgaaaaccactgcagtgttcttacagttcattttcatggtctgcaggtgatgaggagtatcacagataacattaccgaggagaagcttctcgaagagactgatgagataacgctcctgccgatgtatgccgataggatgaatgttcgtgttcatacaaagatggcacaacacaggcgaagattgccaccacagtgctagtctcgttgctagagtgctgggtcgctctcctagccagcggctggcttctgtagctgtgtaattagtagaggtttcagtagcccccccccccccccccccctatgatgatggccagccaactaattctttgcacttcatttgtgtcttgtcccctgccctcacacctacctgtataggcttccctgtaaattgtgtgctctatgttcctccatattctcccctatggttttatttttcatgggtgtagaatagcgtttaacaaggcgggtggtgttctatgtaggcgttgccatctctcggtgctgcctcgtgctagaataatgtagggtgtactggcgataccatgtggttgcgatatatggcttggttttagtgttttggtttgtgcgcacctgatccgatcctttgtccaacgaagattttttccccttatttttgggtaaaaaaggacgtcaatgttaccactctatggtatagtgcttttttgttcacatggttagatcatgtactgcgtggtccattttttctctttagtgtccgccactttgtgg

SEQ ID NO: 44045 - DNA, 478 bp, Zea Mays
ctccgagcagctattcagggaagcagacctctacatcaccgccgacaaacgagctcaggacctcatcggaggagcaaagtctacaccaccggcaccacgacgcaacacgaaccaacaacccgacaagcgttgggagaagaggcctcgcgaagaaatccacaccaccagaccacccgcctttcgcgcccaaggagcaccccgcggaggcgaacgtacattggatgacatcctcgatgcccaatgtctgtaccataaagacatgtgccacaccctccggaactgcagagactttaagcactccatcgggaatggccgacccttccaacctctgccacctcccccaccacaaggaggacccggagaacctcgacaacctcaacagcaggaaggggaggaggcggagcattcccatgcgtcgacggagaagtcaacatcatcttcggcggacatgggtcgcaagaaagcaagaggcagcaga

SEQ ID NO: 44046 - DNA, 1972 bp, Zea Mays
aaaggattattgagtatttggctgttcgtaagctcaaacctgatgccaggggtccagtgctgtgttttgttggaccacctggtgttgggaagacttctttggcctcctccatagcaaaggccctgaacagaaaattcttaagaatctctcttggtggtgtaaaagatgaagctgatattaggggccaccgaaggacatacattggaagcatgccagggagacttattgatggactaaagagggtatctgtgagcaatccagtgatgcttctagatgaaattgacaagactggttctgatgtacgtggtgatccagcatcagcactactggaagttcttgatcctgagcagaacaaagcattcaacgatcactatttgaatgtgccgttcgacctgtcgaaagtcatatttgttgcaactgccaataagatgcaacctataccccctcctctgttagataggatggaagtcattgagctgccaggctacacacctgaagagaagttaaaaatagccatgaaacatctcataccaagggtattggagcagcatggcttgagtacggcaaatcttcagattcctgaggctatggtcaaactgatcatcgagaggtacactagagaagctggtgtgcgcaatcttgagcggaacctagctgcattggcccgtgcagctgctgttaaggttgcagagcaagttaaaactcttagacttggcaaggaaatacaaccaatcactacaactcttcttgattcgaggcttgctgatggtggtgaagttgaaatggaagttattcccatggggcatgatatgtcaaacacttatgaaaatccatctcctatgactgttgatgaggctatgctagaaaaagtacttgggcctcctagatttgatgatacagaagctgcagatcgtgtagcaagcccaggagtatcagttggccttgtctggacttcggttggtggggaagttcagtttgtggaggctacagccatggtgggcaagggtgacttgcatttgactgggcagcttggtgatgttattaaggagtcagcacagttagctttgacatgggtgagagcaagagctgctgacctcaatttgtcacctgcttctgatatcaacttattggagagccgtgatattcacatacattttccagctggtgctgtgccaaaggatggcccttctgcaggcgtgacattggtaacggcactggtgtcactttttagtaacagaaaagtcagagcagatactgctatgactggagagatgactctaaggggcattgtattgccagttggtggtgttaaggacaaggtacttgcggcacatcgttatggaatcaagagagtaattttacgtgaaaggaacatgaaggacttatcagaggttccatcaccgattctctctggcatggagattctgcttgtgaaacacatcgaggacgtactcgaccatgctttcgaaggcggatgtccacttaaatcacgctccaagttatagcatccaactcgcctttgctatggatatttgcttcggaggatcatcgtcaacagtaccacgaatggtcaacagtcagaataagagcctagctctcttgccagcacaggtcttgacacgcccatttttgttaggcttcgcatctgaatgtgtatactggtcagaattcggagagcagtcagaagatctgctcgttcacctgctgggactcattgcatagtttctcgacaccagctgttgatgtttatgcacagatgcaacagaaatcagggaggaattacgctggttggtttctctgtcgtgggtgtatatatgtatgtatgcatgtaatctaatccagggaaatatagctacaacaaggttgtcaaaactaaagacatcgagaaacatcacacgtcctttgggcttgggtgactttattataaatgtatgtacatataacccaaaatgcgcacgtgcgtggtcctgca

SEQ ID NO: 44047 - DNA, 450 bp, Zea Mays
cccaaacctacgattcaaggacctaggtgtcgtagatggcttcaacacgacgcccgatgccggtagcagcccggacgaagcaccagtgtccaagcattcggttcctcactgtcgcgccgccacccccataggaggaggcgaggatgtcgcactacaagttcaagcactcgaggcacggttctctcagcttcctccctaggaagcgatcctcccaccaccgcgacaaggggtctcggcctctcgggcgagctcgccgcctcctccctctgccgcgtgcggggcctggtcgcgctgagcctcgcgtccaacggcttcgagggccaggtgcccgtcggcctcgcggcgctcggcgtcatcctccaggtgctcgacctcggggagaacctgctctccggcgtgctccacccggcgctgttcggcaacctcaccagccttttgaactgttattaa

SEQ ID NO: 44048 - DNA, 1506 bp, Zea Mays
ttttttcagaggagagtgtagagtactcaaaaccggaagcgactccggtagtcggtctcggtcagtccactccactccactccactccaccacgcctgacccgcccactctaccttcttccctcttcagtctcctcgcgccaacgaccacatcccaccgaacaccgatcaaggtaaacctgttcgctgctccgccagaagccgaggtcgagctgttcacggcagcgagcatgcaccacgatcccaaccccttcgacgagggcgccgacgagaaccccttctcgaatggaggcggaggagcgcgtggcggaggcgtcaagccgcagtacgggttccggccgacggagcccgcggggttcggcggcggcaggggcgatgcgaccaccgacatccctctggacaccatgaacgattcgaagggcaaggcgaaggagctgtctcagtgggagtcagatctcaggaggagggagtcggatatcaggaggagggaggaagctctcaagagcgctggggtgcccatggaggacaagaactggccgcctttcttcccaatcatccaccatgatattgccaatgagataccagcaaacgctcagaagttgcagtatcttgcgtttgcgagctggcttggtattgtgctttgcctcttttggaattttattgctgtcatagtctgttggatcagagggggagattctaaactatttttcctggctaccatctatggtatgcttggcatccctttgtcctacttgatgtggtatagacctctgtaccgagcaatgagaactgacagtgctttcagctttggatggtttttcctttgttacctgctccatattggtttttgcatatttgctgccattgctcctgcagttgtattccgtggaaaatcattaacgggtatactggcagcgatcgacaccttttctgatcatgcaatagttgggatcttttactttgtcggatttgccttgttttgcttggagacacttgtgagcatatgggttcttcagaaagtatacatgtacttcagagggcacaagtaggctatggaagcacttgcaatagtcaaccaactaccatctcatctgattgccatgtggttttgtatgttaggacaacgtatatttttccgtttgcattgtggagggtaagtacgactatatgtataattttcggtttgcatggtggagggtaaatacgactatattgtagcgtctctctcgactgatctgtttttaaccccaattctttgctcatatacaaattgtgctttgtatgcaagaaaataaacatgtaatatagaaataggttttttttaccgagaataagcaatagattaagggggtgtttgatttctagagactaatatttagtcccttcattttattcctttttagtgtataaattgctaaatatagaaactaaaataaagttttagtttctatatttggtaattttggaactaaaatagaataaaatctagggactaaacattagtccc

SEQ ID NO: 44049 - DNA, 1679 bp, Zea Mays
caggggcgaggacgggcagctcggccacggcgacgcggaggaccggctcgtgcccacggtgcttagcggcttcgacgcgcccgcgatcacgtccgtcatctgcggcgccgaccacaccaccgcctactccgaggacgagctgcaggtctacagctggggctggggagactttgggaggctggggcacggcaactccagcgacgtcttcacgccccagcctgtcaaggcgctgcaggggctcaagatcaaacagattgcctgcggggacagccattgtcttgccgtcaccatggccggagaagtgcagagttggggccgtaaccaaaacggacagctaggccttggaaccactgaagactcgctgctcccacaaaagattcaggcttttgagtaactgaagacggtgacctctacggatggggttggggtcgatatggaaacttaggtcttggtgaccgtaatgaccgtttgcttcctgaaaaagtatcttctgtggaggcgtggtgcttgagccgccaaacaacagtcaggtgttcctttctttccagaccatccacctgacaagcaaaagcagggagtcaaaatcacgctggatgttgtcgtcttgaaacatccctcggttaaaaacagtgtcagggggtgagaagatggtgcttgtggcatgtggatggcgccatacaattacggtttctgactctgatttcaggcggctggaggcatacgatggcacttacatcagagggaaagctttacggatggggatggaacaagttcggacaagtcggagtcggcaacaacgacgaccacagctcccccggacaagtcagttttccagaggatcagaaaatctcccaggttgcatgcggatggaggcatactctggccctctccgagaagaaaaatgtcttctcctgggggaggggcactagcggacagctcggcaacggtgaaatagtcgacaggaacacgcctgtgctgatcgatgccctgagctcagacggttctgcctgcaagaagctggagtcatccacggcagccccattcgcagccaaagtttgggtgtcgccgtcagaacgatacgccatagtccctgacgagaacgtccgtaaagcaggcggaggcacggcacgaggcaacggcgccgacgcgaacgtgccggagaacgacgtgaagaggatgcgcgtgcagtcgtcgtagtaggtcttctactaccgtccactccaccacccccccgttaaccctactagtagtaagtactacgaagacgaaccggtgccccatctagcggcgcccgatttttgtgcgttacgttctgcctaaaagtgctttccgtcgacggacggacctcctggtgttgagatggtagcggtagcactgcctcgcggcgatggtgtgtgtcgtgacgtgattcacctcttagagtagagaggtggctagcccagtcgacctgtgttgtgtgtgttgttaagatgtgtcctggatcttttgtgacattgcatggagggtacaataagcgcttcgtttctcgtttcttcccacttgttgcatgatagccaactgaaaccaagtactccgtgagacgaaagcaacgagcacacaaagactattttgcctatcttcatcatcaatcttcgcatcgcatcgacggtcacaagatcagcaaccaattcattgatcga

SEQ ID NO: 44050 - DNA, 1418 bp, Zea Mays
attgccgaccaggctccctcgcttctgttcgtctccctcctcgcgttcctctcttccgctcgccgccgccgccgcatccgtcaccttcacactgcgctccctccatccctccctgtctgcggcgactgggtggtctaccgctgccctcgctttcgcgggcgaagagcgcccaccagatgccgaggtggacagagaattctgcttccaccaaatcagctgaattggtgaaacaacaagaccgtttggagtttgacgatcctgatgaggtagacgaagaggaagaagttgagtatgaggaagttgaggaggaggtcgagtatgaagagacagaggacgagtatggacagactgaagctgtacgccaagttgatgctaaacatgacagtaaaatggtggatgctgatacggatgagggtggaaaagggagtcatgatgaacttcttgctcttcctcctcatggatccgaagtttatgttgggggcatcgcctctgatgtctcttctgatgatctcaaaaaactctgcgagtctgttggggaagtagtcgaagtgcgaatgccaggaaagagtggtaggctgtatgcctttgtcaatttcagaactaaagagctggcttcaaaggccatccagaagttgaacaataaagatctaaagggaaagaagataagagtttcttcctcacaggctaaaaacaggctatttatcgggaacataccctataactggacagagaatgaatttaaaaaagcagcagaggaagttggccctggagttttaaaagttaatctcgtgaaggcaccacattcagatacgaacaagggttatggatttattgaatactacaaccaggcttgcgcagagtatgctaagaagatgatgtctaccccagaattcaaactagataaaaatgcccctaatgtcagttgggcagatactaagaatggtggtgaatctgcctctactgcacaggttaaatcactatatgtaaaaaacctgcccaaggctgttactcaagagcaactgaaaaaactatttgagcaccttggagaagttacaaaggttgttattcctcctgcaaaagctggtcatgaaaatcgatatggttttgttcacttcaaagaacgatccatggctatgaaggctctggaagacactgagagattcgaacttgacggtcagctgctggattgttcacttgcaaagcctcttgctgataagaaggacgatacatcagcacctaaaggaggtccattgctcccaagttataccccagttggatatggactgatgggagcctataacccactcggaaatggcctggcagtggcaggcgcttacaatccgtatggaaatggactggcaggtgcttatggtgtgcttggtgctcatgctgcacagctcgagccagctgtgcgcgcg

SEQ ID NO: 44051 - DNA, 2462 bp, Zea Mays
catccatcccatcccaagccagcaccagcagttcctccaccaccagcccagccctcgccccgtccgttcgtccgcccgcgcccgctgctgcttgcctgcttcccacgcacgcgagctctgttccgtgctgcagcaaccgcaaccgcatccgcatccgaatccgcacacgatccccgcgccacttgccccgtcaccccccacgcggcccgcgcctccgcccgctcgtcggccaatgcccggcgcaggccagctcggcgagatgagatgacgccgccgcgcggcggtgcccggcctcccgtcgctcacgcgcgccagcaccagcaccacccggccccatcgggattcttcatcccgtcctccacctagcgcggtagcgccgcatttattccctcccccgcacaacggtcacgtttccatcgcccccccgtcttctctccctcgtcgcatccggcactcctcctcgtctcctatttaaagcgcgccgggctgggagccagcgatcatgctattctctaggaggcctctcgccgccgctttccacctcgcgcccctttcgcctccgctgctcctcttcttcgcatccgcgtcctcgtcctgctcgcccgccgcctccgccgccgccgcgtcggtctccggctccaggggttgcactgctgcaaggatggacagcggtgcggtggagacagcgtccactggggcagtatggtcatcaccttcggcagaaccgagaagcatttctgtcgggaaggaggtattctgcaacaggtcactcaacatgaggaacatcacagcagtgggatttgatatggactacactctggcacagtacaagcctgaaaccttcgagtcccttgcttactatggtacaatagagaagcttgtgaaggatctccgctaccctgaagagctgttgacttgggaatttgattggaaatatatggtcagaggactagttctcgataagaagagaggaaatatcttgaagatggatcgacacaagtatgtaaaagttgcataccatggttttaaggaactatcgaaagaagaaaaagttgctgcttatgggagtacattgataagagattcatttgatgaacctgattatgcccttatagatacacttttctcactgggtgaagcttatctatttgctcagcttgttgatttcatagacaagaatcctggaaaagtacctgcaggcacagactatccacttatgtacagagatgtgaggtctgcggttgacttgtgtcatcgtgatggaactctaaagcggatggttgcgaaggatcctgccaggtacatcaatgaggacttggcaattgtaccaatgcttgaaatgatcaggaaatctggacgctcaacattcttagtgacaaatagtttgtgggactacaccgatgttgtcatgaactacctttgtgggccatacacttcaggtgtaggctctggtctcaatcacaagtggcttcaatattttgatattgtaataacaggcaggattgtttgaagttgagcctgattctggaaaacttctgaatgctgatattcagatcggaagcccaagatcaagtcatcaacactcaacaccagttcagaaagtttatcaggggggcaatgttggtcatctccacagattactttctgttgcttctagttcacagattctctatgttggtgatcacatatacggagatattctgcggagcaagaaagttctaggctggcggactatgctggtgattccagaactagaacaagagctgaagcttctctcagaatcaaagtctactcgaaaggagcttagacatcttagaatggagcgtgattcgattgaagacaaaatccatcatcttgaatggtctcttaagcttgatgatatctcagaaaaccagaaggagaaattgttctctgaacatgacaatctgctgaaacagagagggcatgttcgtggtcttcatcaagaagctcagaggcaacatcatcagaagtttcataaggtgtggggacagctcatgaagactgggtaccaaaattccagatttgctcatcaggttgagagatttgcttgcttgtacagcagccaggttacaaacttcggtttgtattctcctgacaaatactatcgtccgagcgaagattacatgccccacgagtttgatgtgcttgggctgtaggagcagcccctactgctggtcggagttcctcgttgtaattgatccatagcctaggaggggacatcgtagttgccgtattatataacaggaagcttcacccattgtgaaggagagaaggtttataactatagtagctacatttctacttatcagtaagtttacctgtatataaatatgtacataactgatatatgatgcgtgttatttgtgagcacgcgataagtagtactgactaagtcctgctggtgtagtcattggtttttttatgatggattagcatgtaat

SEQ ID NO: 44052 - DNA, 1168 bp, Zea Mays
tcccgccgttcgagcttctccctggtcgcccctacggccgaacgctcagcaactcctctacttcttccctgcgcacagcttcctcaagtcgtcgtgtgcccagctcgcccagtctgcgtgccgagctccctcatggcgacttcctacttgccagcacgccctctcggctcgctcgactttaatccccatcgcgtcgtcgacctcaccggttggcgtcgttcgtcgtctcgtcgtgtgtgcagtcgccccagatctgcatagcctcgccgcgcctatataaccccagttgcgatgccatccacccctccggtcattgacgtcgtgcctcgcatctcgcctattcgataaaacacccaaacccataaactgtcgacacactgctgcgatacgcggctgtctccgtcacttgcgtcagctcgccagacctgcagctctatatacgtcaccctcctgtatcgtcatcgagcccatcgaaccccgttcttccctgctcaacctcgtcaaaccccgaatcccgaacgttaggcaaaaataagcgaagtccatgtgcatctcttatcaagtgctcgatcaaagacttcaatcgagggtcatcgtcgttccgtacgttatcaagaaatcccaagagatgggcgaagacgaagctagcagcgtgatattcgccaagtgctcgacaaaaagctcgaacaagtcgtcgatttcgtgggtttaagtcggatttaatggatggtaagtggattagttattccagtcgactagatataatatttattagactgcctgagtcgtttacggtgatttgatcggtagtcgtacatgttgctgatcccttgctttatagtagttattaagttctatgtggtttgcttgggttattagtttcgagtaatttaatattagtacggtatttgacgtgtaatcgacgaaaaacctggattcgtattcgttaatcaatgtagtgaatctgagcaaaatttattattggcgcacaagtttgttagccgaattgttagatagattaaataaatatgtgtggtgcgaaataaaattaaattagttcttggtaagcaaagtggtatagtttataaagcgagggataaggttagcatttaatcaattagctcatgagttgtgtaggctaattgtgtttaatgtgtatagtttgttg

SEQ ID NO: 44053 - DNA, 2239 bp, Zea Mays
gtctccgcctagtcgctcgccatactacctcctcagacaccggcggcggccatgccgcctccgcgtccgacgcaccccccacttccctctcctctgccgcccgggccgcctcccctaagcgcccgtcgtctccctctcccgcccaaccgcccggcccccacgtctctcctcctcgcgccgccctcctccccagcccgtgccctcgcgcttctcttccccgactcctccgcccatctcttcccgtccctaccctccgtctcccccttcgccacctcttatcccgctcacacccccgtcccatcaccactcgccgccgccgcctccttcgcgctcctcctgccgtcgtcacacctcatcttcctatccgcgcatccgtccccttccaactcctctgtccacctccgcgcctattccctcgctcccgcgcccgctttcccgcgctttgcgcccgcctcgctctccttcaagcgccatgcctcagctgcaggcctgccgctccaggacctacccttcggcattggcgtccgcctggccggcggggtcaacgccgtctcgctgctctcactgtccaccggccagatctgggtgctctctccgaagctggccgcggacggccggacagtggagctgcacaagtgcgcggtcgtcgagctcgagccggcgcggcccgtgtacgcaatggaagtcgcaatgggaaggctgctgctcggggaggttggcggtttgcgcgtcttcccgctacggggtttgatgaagggtggaaaggagagggatgtgaagaaggaagttgctgtggtagtaggaaggaagggctgccacaagaagaatgggatgctgaatggcttagttgtgccagttaatcgtgttagctatgggggcaatggtgaaggtgattttgtttcgacttgtaagctcacaactctgagggtaaaacagagttcaggaagctattgttctttttcgttggcatttcaaaatgatgatcaaaagtcagaaggcagcatggaattgctgaattcagtgaaagctatttcgatccatcctctttccaataacaagtttttggtactggattcatctggagtgttgcatgtcttcattttttcaacaacacaaatggtctcaagaggtgccatcaagcaatgttctgaaaatatccatacatatcgcttgcattatcccatgaaagtgcaattatctgctgtcttttcagttacctctataaatggtggacatactgtacatgttatgtccgcagttgagactgaatcccctaacggtgataatggagacgttactggagaaagagagttagcacctatcaagctttcagctattgaagcaatctttacaagcgaaagagttgaggacattgtatctatctccaaggattcagttcttatccttggtcaaggcaacatgtttctgtatggaacttcttgaatttggttctttatcatgcatgggcatggttcaagactttgcagctttggatggtcttttggctaaagacaggatgagttttggtgattttgaagatgaacttatccaccagtccttgaagtcgtgagctttactatttattaatcacagtaagcagatgaaaaaagctcatgttttttcagaggacagcaagaatctgaaggtgacgccagattatggacggaccacgccgtaatgaccctattgctctgcatgcgtactttacatgcaaagactggcacaattcttgttgatatgacttggaaagagcaatgctgccaaatctattcccagtctcagttgtcgtggaaagtggatcaccatgagggccattcagctatggaataatacagctggtgctagactgctagtgtaattcagggactggacttgcggtgtggtggagtcgaggtttgggcatgttacttactgcatactacctctgttcttaaatatttgtcacccgctagtcatttttgaattaaacggtgacaaattaaaaagaacggagggagtatatcaaaaaaggaataatgtagtactcttgtaagagttaagatggaatgttgaaaggcgcgactttgagccattcttatcattggttttttattgctgtattttttttgtgacattccactattccggtatacccaaatcattcctggttggttgtgtaatcacgctttaggctgtcctcactggtaagtggtggaccccccattttagtgagtgctcacaacttgacatgtttattgga

SEQ ID NO: 44054 - DNA, 640 bp, Zea Mays
ccctctgcagcctcatcacgcgtttccctcctcccgacctcgccaccatgtctctgtcgtccatgttgggcctgaccatcgccccgcctcgaggccgcagtcgcgagtcccactcctcctccccctccgactggtcggacccgtccgagtccacgtcgtcgtcgacgagcgcctggaagaggcgcgcgaggaagctcagcgatgagttcgaccgcatctccgcggagcagcagcaccagctggtcgtggagaagaagcggaaggcgggtgcggccacgccggtgaggaagcaggcttctgcacccgccgctggggcgccggcgagggcgtcgctgaagaggaaggccgctgcgccctcatcggcggctggggcaaggaggacctcgccgaggaacaagcactgagcgtagcctacacaaatctggagtttgaacacacaacagatgatgtgcttaaggtggatggacagtttgcttatcttttgtggattgaagtggacctgcgcttgtagtttgctgaagtctatgtgcataaatgtgtggattgcatcaaccatgctatggttaccagtaccatgtatatacatcccaccgtgatgtgtccctacgtacggcacataatgtagacttggatcatatca

SEQ ID NO: 44055 - DNA, 366 bp, Zea Mays
gggggtgtggcgaagtggagatggaggcagagagcaccgcccatcgccctctgtgcccggccacgcctgagcgagccaaggaatctacgggaacaaacaggcacctacgacgacatgggaggttatcaggctctcgcacccatgcccgatgttcttgtcgacgccgctatcgttcgcgtctgcatccgtccccgccaactgcaccaccaaatggatatgctgcaaaccttactgcgactccagcatccgtgattcaaactgaggcattattgacaaatgatatccttctaagtgatgggattcagagtccaagtagtgtttctgcaaaattagaagatcgtactaaccacaagaatattgaggcct

SEQ ID NO: 44056 - DNA, 3426 bp, Zea Mays
gctagttcctatgctagttatgttagtgccggcggtggtgatgatgggcttagatccaacaattcatcttttagttctcggacttcaggcccaaatttgctgcaagggagtactccaaaaacattttcgaatgacctttctcagttatctatgggggcgtctgactcatccaaagattttcttgaagctgctgaagaaacaattgaggagctccgtgacgaggcaaaaatgtgggaacgccactctcgcaagttgaaggctgatctagagatgctgaaaaaggagtgttctgaaaaatcaaagcaacatgctgaactagcagttgagctgtctgctgcacaagctgaacgggattcatataggcatgaaatagaagaattaaagtcatccttacaagatgtaaacacacgacagacaattacaggaacacctaaacgttcagactggatagacctgcagaaggaacttgaaggtgaggtgaagtttcttaaagaatcgaatacagacttaaccatacaactaaacaggactcaagagtcaaatatagagcttctttctattcttcaggaactggaggaaaccattgaagaacagagagttgaaatatctaagatttcaaaggtcaagcagactgcttatcctgagaatgggctgttagtaaaaaaagacagagagtgggctaagaaactgtcaatgaaagaggatgaaatcacaattccgagggagaaatcggatcgtgctctcaacattggaaatgcagatggtgcagcttccaatgccatttatcttgatttggagaaagaaaatgaaattttaagggctaaaatacaagagcttgagaaggactgctctgaactaacagatgaaaatttggagcttatatataagctgaaagaaaatggtctgacaaaaggtcaggttcctcatattgcaaacaacaatgagctgcaattcaaaaagcttacatcccggattcatcaactggaggaggatcttaggaataaggaaatgttaagagatgacagtttttctgagtcatcaatgtctaatgcagatgagatacagagaaaatgtgctgaccttgagctgaaggtgctaaattttaggtctcaaacctgtgagctagaagaaaagttccgaaaatgccaagaggagctggaacaaagaaatcttgagttatctgcgctgagaagaaagataaatggtttacattctaatgaactggaagtttgtgaatctggtgcgacatggaagtaccaagctagaatagcagatctagaggatactgaacctgagacagatacacttaaggctaggtttgaactgcagctacaggaaaatgatgaccttcgtcgttccaaggttgagatgcagaattttatttctgagtttcaggcagagaagagtcagcttgaggaacgcctgtccgcgtcgcttaaagaaagcagcatcacatctaaatgtctggatgaagtgcggaaagatatccttgtgctttccagcagtatagattcccatgtttcaaccaataaacttcttgagaggaacttagttgagctagagagctgcaaagctgaactagagttgcatgtatcggagctggaacaggaaaacatcgagttgtcagaacggatatctggacttgaaacacaactgacttacgtgacaaatgaaaaggagtcaagcgagctgcagttgcatgactccagatctctcatcatcaatctcaaagataaagtagagtgtcagcaatcagagatggaaactcaaaggctccagtttaagcagaaacaacaagaatctcaaagaagattgtgcgaagcacaagatgattctgaagttctgagaagatctaattgtaaactacaatctacggttgagagtcttattgaagagtgcagttctcttcagaatctaattgctgatctgaaaaggcagaagttggaattacatggtcatcttacgcaaaaagagcaggaattggatgagtcgaaaaaaaagaactttgagtttagcaaaacagtggagttccttgaggcaaaacttttgtcactacagaaggacatttcttctaaagaacaatctttattgtcagaattggagaatattttccaggagcacatggaacaagaagaaagaattaatcgcgcacatttcatgctcaataagatcgagaaagaaaagactcttgaagtagagaatcttgaaagggaggtcgtcagcctcgctgcacaggtctcctccacacacgaggagcgagaaagtgccactctgaatgctattcaagaggtatctgtcctgcgagcagacaatgctaaacttgaggctaatctccaagatgttagtgaacagctgagatgttacgagtctcaattggaagaccttcgtaaggagtctaaaagtaaaattaaaggattggttgattcccttaatgcctccaaacaaagcgaggaaatgttgacatcagatgctgaacatatgaaaaagttgatggaagctgctaaatccaatgaagatgcactaaggaagacttctaacgaactagaactgaagcttaaatccagtgattatgtgaaacaacaaatgctggaagaaatatctggcctgaaacttcaggttcagaaaataatgaatcttcaagatgaggtttccaaacttcagagttctcttgatgaggccaagttcgaaaaagggaaacttgaggagtttgtgcgctcggtgactgaggaatgtcaagaactaaaagcacagaaggctatgctaacagataaagtttcttatatgcaggagaccttgagaaatggtgaagaagaaaaccgaaacagaatagctatgcatgcaaagctcatgaggttggagagtgatctaacagcattagaagcatcacatgtacatgaagcagaattaaagaacgaactcagtaggatcaagagatcaaacagtgagtatcagaggaagatacaatctctcgggcaggaaaatgaggatctcactaggcgagttcaaattatggaaaagggttttgagcgaatgtcccacgctaaagagaaccttggaaagcaggagattggaggagataaccaggaagccatccagtcaacaattcagttactggaaattaagcttgcagaggcattggaggaaaataagatatacagagctcaacagaagagttcgatgtctgaggggcaacctgctggtggagatggcaaggagggcaataccgacaggattttgcagttggaaggagagctgagagatatgaaggaacgattactcaacatgagcttgcagtacgcagaggtagaggctcagagggaacggttagtgatggagcttaaagctatcaagaaaggcaggtggttttagcaggatgcggagttgttgcctgacataaaacatgaggctgacaccacagaactacat

SEQ ID NO: 44057 - DNA, 980 bp, Zea Mays
tggattctacccaaatgcatgaccttttgctaacaagagtgaactctcaacccttggcttaccgaaggtactgagagaatttgctcaaggtcaaaagtagttcaacaagttggttttactaacttgtaattgcccaatgaacaaaggttgagtttagagatcgttttatcaagttgtctaaactcacttttgtacaacccctcttaaggaagtgtttataaaaaatcaagttaaatcgactgataaccacctaatgatcgctctagtcatgcctcgaacgcctcacgtgtgcttttccagcatgtgtgatcaagtcgagccatgcccagtgattgataaaatggattggttacgaaggcagtatctgcctatcccttcgctggtgattttgcgagtctatcattttcttggacttggattttctagctagccacgagttaaatgtgatgttattcgacattcacacccgtctcgtgtgctatgaacttaccgtgaccacttgttggtaaacctctttctgtgtgttttacccaagaggttgcatctggttctgtgtgggtgaaatcacgtattagtcgctcgctcaacagactcagatagtatagtgtcatcagaaaaagcaaactgcacacatggaaccttatgtgttcctctggcagacatcgtctctactggtggacatctctaaattagcctaaggcgatacatgttatgtccactagagaaacgacatcctgagacactcgcctttatttggaaatgtctcacgattatcgctgatatggacatgggttacatgcttctctactcttagaagtctttcgttctgaatctcgggacgagattcttttaaggggggagggttgtaacaccccaggtgtttatcgtctgctcgaccacgagtgcggactttaacacgtaatatcagtggataaaacggatgctaaattttaaacatctttgtctatcgcgattttaat

SEQ ID NO: 44058 - DNA, 1924 bp, Zea Mays
ctttctcacactgttgagatgttggtgtcattggaaatttggttcattcatcacctaacatcaagaaggaggttcttaatgcaggggcactgcaacctgtgattggattattaagctcatgttgtacagaaagccaaagagaggctgctttgttgctagggcaatttgcttcagccgactcagattgcaaggtccatattgtgcaaaggggtgcagtccgtccactaattgaaatgctacagtcggctgatgtccaactccgggagatgtctgcttttgcactcggcaggcttgcccaggacacacataaccaagcaggtattgcatataatggtggcttggtgcctttgtttaaactccttgactcaaaaaatggatctctgcaacataatgctgcatttgccctttatggagttgcagataatgaggactatgtatctgacttcattaaagtaggaggtgtccaaaagttgcaagatggggaatttattgtgcaggcaacaaaggactgtgtggcaaaaacattgaaaaggttagaggagaagataaatggacgagagagcaatctgtgcaaaggcgtgttgctctggctctcgcacacctttgtgctcctgaagatcaaagggcaatttttattgataataatggtctcgacttgcttcttgatcttctgatttccatgagcccaaaacatcaacaagatggctcagcagcattatacaaattggccaacaaagctgcagcactttctcccatggatgctgcccctccatctccaacacctcaggtttatcttggtgagcaatacgtgaatagttcaacactttcagatgttactttcttggtagaagaattgctttgcttgcttcttcggatgcatttcgtgcaatgtttgatggcgggtatagggaaaaggatgcaagagacattgaaattccaaatatcagatgggaggtctttgaactcatgatgagatttatctatacagggtcagtgcagattaacagtgaaatttcacaggatcttcttagagctgctgatcagtatctcttagaaggactcaaacgcttatgtgaatatactattgcgaaggatgtgaatctagataatgtatctgacatgtatgacttgtccgaagcctttcatgccgtgtcactgagacatacatgcatcttgtacattctggaacattttaacaagatctgcaccagagccggagatccgcaattttctaaccaaggcactgaattcatcaagaagtccaagtccaagcgacaggaactcgcagacttgatgagtcccaattcattggcaccgacgccgtcatctgaccaaagttgctggagatcctgtacagtaaaatttctggcgctgagcgttcaatggtatctattttgggtacatggtggcgcggtccttgaaattaacatcagcaatgtaacaaaattttctaagatctagttgaggataaggataaggagaacatatctcgtactcatgcatcgaccagcttacactgggataggctatagttggatggtcctggccgtaattcgtcggtctcagctttgattgagtttagtgttgtttccactttccagttcacagttcagtgtatgcccgcatctgtttatttaaagtattaagcgtgaacaagttagacattaggacatgtacaatgatatcttgaggtgtctaaagggtttgcaaaaaaaattatggagccgtctctccgtgaagagacgccttctctgactcgtaacctaagtagcaatagatgcctcatttcttattgtacgaattcgtcgtatgttttttcattcggcgctgtataagtgtatttacttttgtatttattaatagactatatttataaacactattatataatagagtcttttagttgtctcttgtgttgtttaaa

SEQ ID NO: 44059 - DNA, 2765 bp, Zea Mays
gcgattgaggttttgttccgctttctcagggttttctatcgtctcgtctcccatcgtcgtcgtcgcccgccgctgctaggtttggggtttccggtggccaggacccaagccagctccgtcgggcgccgtggggaactgctgggaggggcggtcgaccggcggtgcctctgcttcgggttctccgtaccggcgtcggaggggatcggatggcataagttggagcaaatctaagtcgttaaattgagaatagtccaaggaaacctaattcatcctattttggcccaagacgacgctttccactagaatgaaggtggcaaatgggttgtctttgaggaaatctaatggtaggtttaaatcaaagcttatgatggaacttgttaaacaatggcgagaacatcaagcaaatatgaggtgcatgaatctatccaagcgtaataacaacatctatgttggggcagaaggagccaacataacttctcccaacgatagcaacatttggccaacgagtgctttagtagcaaagaatagcaacccaagatatgtgctagcctcaaagtgtgcaagccagcctcctacaatgtggctagagaatagcttgaatacttcatcgggtttcaagtgctctaagctctctatcgttaggaatgcacttccttcgaaaacacctaaggcgtctgtctcttggaagtcaaaggatgattcgaatgccataccaagacacctagagcaatctcactgtaaaaagacatctagagcaactcgaactcacttcaaggcgatgccgaatttgattcacaaggcaaagaatgttgatacctcaaatctaaacgatggtacctcgggttcaagttggaggggtcagtcggattcatataagggagaggacataaatatcgggaaggaatgcactaaaacttcagagttgttgaaaagtagagaagcctcaagaaaatcaaacatcctagtggtagatcggaaggatcctaacaaagatgagccagacaaagtgaaaggaatccaagatgaagttatgaccaaagaagagggagtgaaaggccatacctgtgaaggtcgtgcgacgtgttggagttgtcttaagcaggcgaacaccacaaagacaaatgatgctccaaatttaggttcattgttggttggtaacgaacacatgcaaggcctcatgagtaatttgagagataattcatcccatttgtttgaaaagaatcattcaagacaccaaagggatgatccatgtgaatatagagaaacaaacttgaagtttcctaataggatccaatcagttggaggcaatgggaaaaccaatgatgtcacatctaggaggaaacgactcttgttagaagaaaaggctagcgcacacgtgcaaaatgatcttacttatggaccgatgaagaggcggaggtacatagaagccaacgaagatgaagaagagcaaaatgatcttacttatggaccgatgaagaggcggaggtacatagaagccaacgaagatgaagaagagcaaaatgatcttacttatggaccgatgaagaggcggaggtacatagaagccaacgaagatgaagaagattatgtcggcgaccaccatccggtgcatattgaagatgctaccactgaattgacaccgcaggattctatttcaaagcattgcgttgagcgacaatgctattgttgctcaaagcctattgacatacctagatggaggtacagtagatgtgaagttttcttttttacgatctgaaatgctagtctttgtatgctattttttttcttttctgtaaacagtggaacctttaagatagatggaaaggaacacatatcactggctggacatttgtcatccaaatcttgtgagaaagtgtggaaattgtcatcattgccgaaggtggttcaagtgacaaaggttcctagaatggcagtgtggcctaagatatttaaagcatcagaacccagtggtgacaatattggcctatatttcttccctcctgaaatgaggcatgatgaagaactagatcaactagttaatgaagtcatggataaagatttgatcttgcgagctattattggtgaagctgagatgctgatattcccgtctgttctactacctgaaagatatcagacattccaaaccaaacactacctatgggcggccttcaaagcaaaggaggataaaggtgatgcaattgtagagcaggaggttgagaagggaaattgcgtttcaaaccagccagacaaggtacagtctgataatgcttcatttccttcaaaccatggactggaccgtccaagcatggaagctccccctcaaagcagtagcagtgtctttggtattgttgtccgacaagctccaaatcttgaaccagaagtgaagcgatttatccaggagatggaacgcaaaggtgcgttggtaacggttatgaggggggaggcaattggtggagggccatagccaagcaacaccacgaccactatgcattagttgtagagagagtagagagtaaaccatgtcaaactatgctgtagttgtatagagtctgacacataacgtcgtggacttgagctcttgttcagttttttttgtaaggtacctacaggtttggtcatatgataatttctccggaacggcataccttagcacctgttttctaaatgcttgtcatttccccagttgcaattgtgtctacgtgccatctggattctggttgtttttcctagactcttagagctaatttgggaaccatatttttcca

SEQ ID NO: 44060 - DNA, 4065 bp, Zea Mays
gtagcagtccacaagcgcgcgcagattccagcacgcgcgcgccagcaagctccaccaccaccagtccaccgccaccatggacgcgacggctagcagagccggcggcggcgacctgaacggcaaagaaaatgaggaggacaagaagggcgcagcgccggccaagaaggtgtcgctgctcggcatgttcaggtacgccgaccgcctggacctgctgctcatagcggtgggcacggtgggggccctgaccaacggcgtggcggaccccctcatgaccgtcctcttcggcaacgccatcgactccttcggcgacagcacctcgcaggacatcgtccgcagcgtgagaaaggtcgttatgaatttcgtatacttgggcatcggaacggctgttgtctcatttcttcaggtgtcgtgttggacgacggcaggagaacggcagtcggctcgtatccgttctttgtaccttaacgcggtcttgaggcaagacattgcctacttcgacacagagttgacaacaggccaagcggtttccaggatgtccagcgataccctcgtgattcaggatgctcttggcgagaaggcgggaaagcttatacagctctcgtcgacctttttcagtggttttataatagcgttcacaagaggctggctcctcaccctcgtcatgctaacatcgctaccgctaatcgcagtcgccggcatagtttcttctcacttcctaacaaacatttctagcaagaagctggcatcttacggagatgctggggacaccgttgaacagaccatcggagctataagaacggtagtttcctttaacggagagaacaaggccattgcagcgtacaagagcttgataaagaaggcctacaggactgacgttttggaaggcctgatcaacggtttcggcatgggatctgtcttctgcatcctgttctctagctatggcctagcgttctggtacggcgggaagctagtcgttgacaaaggatacactggtgggaagatcatcacggttctgttcgctgtgttgactggtgcaatgtctttaggcggcgcaacgccctccgtgtcttcaatcgctcagggtcaatctgcggcgtacagactgttcgaaacgattgggaggaagccggagatagattcgggtgacaccagcggtgtggttttagaagacatcaagggtgacgttgagctgaaagacgttcgctttcgctaccctgcgaggccggagcagctgatactagacgggttgacgttgcgagtaggcagtgggacaacaatggccatggtcggagagagtgggagtggcaagtcgaccgtcatcagccttgttgagcggttctacgatccacatggtggtgaggttctgatagatggcgtcaacatcaagaacctaaggcttagttggatcagagagaagatcagcctggtcagtcaggaaccactgctcttcatgacctccattaaagacaacataatgtatggtaagggagacgcgacagtagaagaggtcaggagggcagccgagcttgcaaacgcagcgaacttcatcgacaagttgccggatggctatgatactatggttgggcagcgtggcacgcagctctctggaggacagaagcaaaggatcgcgattgcaagagccatccttaaagaccccaagatactcctgctcgacgaagcgacgagcgcgttggacgtggagtctgagcgggtagttcaggaggcgctgaacaggataatggtggaaaggaccacgcttgtcgttgcccatcgcctgagcaccgtaaggaacgttgactgcatcacagtactccgtcaagggaaaatagttgaacaaggccctcacgacgtattggtgaaggatcccaacggggcatactctcagctcatcaggctacaagaaacgcgtgctgacgaaaggcgcaagacagcagactctgggtctggggtcccagatcactccagatcaaagagcaccagcctgtcgcagtcgctcgccaggcggtcactactgaacaaagactccttcggtagcagcagcagcaacagatactccttcaagaaccccctaggattagcggtcgatttacacgaggacaggagtaccataggcggggagaaaacggaggagctctccgacgttgtggtggtaccaaagaaagcacccatcggacggctcttgaagctcagcgtgccagaagcgccggtccttctgctaggctccgtggcagcgtcggtgcatggcgtcgtcttcccgctgtttggtttgctcatgtcgggcatcataaaatcgtttttcgagccgccggataagctgcgagaggacagcagcttctgggcgctgatagccgtcgctctgggcgtcacgtgcttggtcgtggtcccagcgcagtacttcctgttcgcggtcgccgggggcaagctgatcgagcgcatccgtgccctgtcgttccagagcatcgtgcgccaggagatctcttggttcgacaacgcctccaattccagtggagcgcttggtacgaggctctcggtcgacgcgctaaacgtccggcgcctagcaggagacaacctggcccttataatgcagtccatagctacactggtaactgggtttgccatagctttcgcggcagactggagacttgccctgatcatcacgtgcgtgattcctctggtgggtgcgcagggttacgcccaggtgaagttcttgaagggattcagcgaagatgctaaggagatgtacgaggatgcaagccaagtggcgactgatgctgtcggcagtatcagaaccgtggcgtcgttctgcgcagagaaaagagtggtcgcagcgtacagcgacaagtgtgaggctctgaggaagcagggcatccgaagcggagtcgtcggagggcttggttacggcttctcgttcttgatgttgttcttcacgtatggcctttgcttctacgtcggtgcgcagtttgtgcgccaggggaaaactacctttccagatgttttcaaggttttcttcgcgttagttctggcagctattggagtctcgcaagcgagtgcgctggcttctgatgcgaccaaagcaagggactctgctatttccatcttcagcgttctggacagggagtccaaaattgactcgagcagcggcgacgggatgacgctggaggttgtcagtggcaacatcgatttcagcaacgtcagcttcaagtacccactgcgtcctgacgtccagatattcagcgacttcaccttgcgcattccatctggaaagacagtggcgcttgtcggagagagtggcagcggcaagtcgacgataatcgctttgctggagcgtttctacgacccagattccggtagaatatccctggacggcgttgagatcaagagcctaagagtgagctggctaagggaccagatggggctggtagggcaggagccggtgctgttcaacgacacgatccgcgccaacataacgtacgggaagcacggcggcgccacagaggaagaggtggtggcggtagccaaggcggccaacgcgcacgagttcatatcgggcctgccccaagggtacgacaccatggtgggcgagaaagggatccagctgtccggcgggcagaaacagcgggtggcgatcgccagggccatagtgaaggacccgaggatactgctcctcgacgaggcgaccagcgccctcgacgccgagtcggagcgcgtcgtccaggacgcgctggaccgcgtcatggtcagccggaccaccctcgtggtggcgcaccgcctctccacgatcaagggggccgacgtgattgctgtgctcagggaaggcaagattgtggagagaggaaggcatgaagccctcatgcgcatcagcggcggagcctatgcttcccttgttgagctccgctccaagactgaatagcactggtgtatctttatagagtacagtttgtgcatttatttatacaagtatactgtttttccgcaacccaattgttcgtaacttttacaagttgaaatgaaaattacgcggtaggtgaagggaccgtattcaaatgcgtcacgaataaaccataa

SEQ ID NO: 44061 - DNA, 2199 bp, Zea Mays
ccctgatattttcactgtgccgccgctccctggacttctctccctccccttttccctgttgcgcgcatcggatcccagcttgtggagctcccttccgctcgcagcttcctctgccggcacccaagcttctagtccttcaatctgcgtcgcgcccctctctgctcgccctccccagccatggaccttcctgcgcgcgcgctcctctgctcttgcgcgctcccaattttccatggcgctcggtcgcgcaaagccttcatcggccatgaggcctcatcgtcgatgtccttgcttccctgcatctcggtcatgatctccatcgggcgttctgttttcgtgtgacatggggagcgagtctttgtcggtggcgaggttgttgggtgtgtgatttatgttttcctgcacttggacagggccgtgtccctctctgtacgtgcctagacctcctcggcatcctctccttgtttgggtgctcgtcgccggaatttttggtgataagccacgtctccctccatttgtggttgtggcgggcgaccttattgtgtcaagccggtcgtcgtccttgcctgcggctatttccgcttgtccctcgcgtcgctgccgctcaatacatgtgctatgccattggatgctggtcgaactagggacatgcttccttctccgtcatcgcaacagcagcccccttgcttctcgccgtcgcgccgtcattgcttaccatgtcgggacacctcccctcgtgctcagacgctcgtcaggggccccgtcgtcgacaactttggttcaaggtcgccgggtccgtgtttcagatagcaggaatttgagtgaaaaagtggaacccgcggggcgcttgtcaggggctcgacaggaggcatgaacaagaatcgtcaacgttggcttggaattctagttgaatcggtaaccgttctctagttcgctatttttataattaattgagtcgatggattgaatagatatattgatcgcgacgattatattgattgaagcataaacatgtcatagttatattagatggttgccaaaatatcttgtcgcatgtgaggacatgattatggcgtactagtgtcgtaggacataggtttaaaatgctagttacgtaggagtacccgagaggacgtgtctgtcgaatgtgttcaaattggttttacttatgaagtatgccaaattagtggcgtgaagaatagatttagtattttaagaaattattcgataagtttgttgatgttgattgtgttgaatagtgaggtcaaaagccttgccttagtaattataacgttgtattatatcgattgttagaatgccctagtggaatataggttagttaaattgttcttgcaggtactataactcaggtgtccaacaatgggagtttgaatattgttagcctttcggtgctatgcattagctaaggaaaattgaggactcgcacaaggtttaaggtttcttaatgtatgagctatctccgaataggctagaaaagtgtaattattataattagtcttatatcgctagctggtacttgcttgtgattgattctaatgctttgttatgagtgtttcatcatcttcagcgtagattatttatcttatgctattcctctgtatattcataaatgtgcattgtgcatcccatgaggtacgttaattaatcgcgtgatgcggaagacgagccaagtcgaccccaagcgcgggctactccgcatggtggtgctgatggacgaacctgcctgatcaagtgctaggacaaggatgattgtcaagtagtcggcatctaacaacactaacgtagtgttatgtaggcaagccccagtgcatttgccacctccttgctgttttaaaatctttatcaccttgtttgatgcattaggtgataggagttgtgtgttaaacaactgatgcatttccttccttgaaaattgattacccttccttgataccctttttgaaaaggatttttatgatgcttagccttgctttagaaaaacaaaatgttttgttttaaaaacaaaaggtgatgcttcacagtggatgggaatgttttcaaaaataaaacttgatggtggatccatcagggccatgatgggttcaacataggaaaagatgtacctctgccaggtaccaaactttgggtttaaataataaagctgagaccgggcggttgacttgcacgagaaaggagtctcgg

SEQ ID NO: 44062 - DNA, 1836 bp, Zea Mays
aggtctccttattctcgagttcatgcggggaacagcaagtcaactttgcatggtcctattgaggagatagcttggaaagaagcgggagaagctgaaacattgcttcatgacttgggaattgcagtacggttctcaggcctgggaaggacgtgcatatgactatgggatggacaacctcaagagcatgggttttccagtagatgaccttaaatttgaccctgacctggtcataagaggtcttgttattgataaagagaagggaaacttggttaaagctgatcgatttgggtacattaagagggccatgcatggtacccaaatgctttccactcgtgctgtgagtgaaatatatggaagagaattggtggacctgcggaaagaaattcgatgggagttccttaatacccttttctctgtttcagaagctgtcatgttcatgcagatggttgacaagttagatcagggattggtgccagctgaacttgggccactggattacaaaggactgtacaatgctgtttccaaagcactttttcgagcacatgtagaaggccaacttaagagagaaataatggctgagcctgatcggtttgtagagcctgatccagaacttcctttagctcttcttgatcaaaaagaggctggaaaaaagttgcttctcattactaattcagatttccattatacaaacaaaatgatgaatcatgcattcaatcgctttcttcctaatgatgtgggatggagagatctgtttgaaatggttatagtctctgcaaggaagccagaatttttccagctttcacatccattgtatgaggttgtaacagatgatggactgatgcgtccctgttttaaagtaaattcaggtggcttatattctggtggtagtgctcagatggttgagaaatcactagacattcatggggatgagatattatatgttggggaccatatttacacagatgtaagccagtcaaaagttcatttacgatggaggacggcattaatctgcagagaactagaagatgagtttaatgcactggtcaaaagccatgatcagaaagaaaagcttgttacacttatacaacaaaaagaaattgtgggggatcttttcaaccagcttcgcctggctctgcagaggcgctctaattcacgtcctgcacagacgcttgctgcaacttgtatggatgaccaggagcttacggagagtatgcaaaagttgctcattgttatgcaaagattagatgaaaagatcgggccaatgctagaagcagatggagaacttttcaataaaagatggggttggttgtcacgtgctggtctatgggataagagtcatcttaccaggcaaattgaaaaatatgctgatatatacacatcaagggtttcaaattttctgcactatactccattcatgtatttccaatctcaagaacagacacttgcgcatgatgcccattcctattctggaggaaaggacatcaaagttcattgagcatccgttcgtcacaatctggagattaggcaggaaagagcgaacgtgatcattgtgattatggctgcgatggctacacaataacaattgtcgttttgaacaaattaattaatacaccttgtaagattgtatttatatataagtaaatctttagctatagcatgctgaatgattgttctgatagtcagtttgtttgtcgtggcctacctagagtttcatattgggaggcacagtacctgttttggtgtacctgctgctatttgcattgtatatgtgaaatgcgaagtgaagtatgacaaggtaacgataagtgacaaatcacgtcatttgatcctgcgcaa

SEQ ID NO: 44063 - DNA, 672 bp, Zea Mays
caaatatttagaccaagtcggtctcttttgctgaccccctcatatctgttgtttggtctccagctgctgtaggcgagctaggtggtgaaaaaagtatgaaacctgctagcagatcgacccccatcgacctggaagttcagcaacctctttttgctgctccttcaaagcttgcgaggcatttctctaggcctcttaccaaggaacaaatggaggcaattatggagctagcaactcaagggaaggaaaaggaagggatcaagaagaagggcagcaaggtgacacctctcatggctcctatcatcgaggctgctgagatgctctgagttgtattatgagatgtgtgggtagttctagtgcatcatgttatttcgtcggtgtacttgcctatgggtcgcccaggatcttttgttggctgctttgtgtagcaggctgttgtctgggcagtggtgtttgtttctttggctggcaatgactgtgtttctgtctatcttagtttctgttgtaagtcgctggttgttcacttctggaagtgtgttatagacggtggaaggccggttggttcctgttttcctttcctatcctatgtaccacatgtgtgacattatttgtttaagtaggggagctgtttttgattaatgaatatcaactgttgtattctgtcttggaatgtga

SEQ ID NO: 44064 - DNA, 472 bp, Zea Mays
cgacaaacacaggtcaagtattcctcgtcctctttgctcctcatttttcgtctagctctccactcacgaatacaggcgacagttagttagggtttgcccatctgccatccgccgtccatccgcctgactccttcccaccatctccgaccatcctttcctccatctctagccgacgatttcgaccatctccggcggcttcttcttctccggccggcggctggacgcaggtgctagaccaggcgatggccagtttctgcttccacacgatgttgttcttgctgcctagaacaagacccctgttgctgcttccacacaacgtcgtccccgctacaagaagacatcattcgtgctgaaagatgttgttcctgctgcatgaacaagacgcctcttcagctgttcctgctgccaaacaacacccggttcaggtgcagaacaagagtatggaaaatacaagcacactgtggaactctcg

SEQ ID NO: 44065 - DNA, 434 bp, Zea Mays
ggaacttgtatgagtagtcactactaagatcaaagaaaagaaaccacatatgaaagtggtatgcccgttggatccaatagagatgatagatgttgcttgatcacttcacaaacaacataaaaattgtttcaaggaagtagtttacggaagataacatatcaatgtagttccacaatggatcatgactagagacctcgataccagcatgcgccaagcagcataaccttgcgtgtacattcacaaggggctctcagtttcgctgcggcaccataagtccttaatcatgacaccattaccgaactggcatcaataatgaatctcacgtagcaaaaacagattgtgctaagataacacattgatatagtctcataatggattacaactactaactgtgataccagtgcgtgccgagcagcacaactatgtgtgcgcac

SEQ ID NO: 44066 - DNA, 1226 bp, Zea Mays
atctatcaaaaaccctagcaaagccacctcaactctcctgctggtccggcgcaggctccgctccgttcccccgctgtagttcgagtgttcgacccggcggccggcggcgacgcgctcgtggtttccagcgatgtcggcgcaggcgggtccagggacgtactccccggcggcggccgcaggagacaggcggcgggagaggaaggaggagctgcggcgccacctcgccgaagacgccgactggccgcgggccgacggccgctccttccacgactgccggccagcgtttatgcagacaggaccaactactgctgcatcagggtctgcttatgcagaatttgggaagacaaaggtcattgtatcggtttttggaccaagggaaagtaagaaagcaatgatgtacagtgacgttggtaggctcaattgcaatgtgagctatacaacctttgccactccagtgcgtggacagggagcagacaacaaagagtattcatcgatgcttcataaagctctggaaggcgcagtaatgctgcacacttttccaaagaccactgttgatgtttttgccttggttcttgagtctggtggcagtgatcttcccatcattatatcatgcgctagtcttgcattggcagatgctggaatcatgatgtatgaccttgttacatctgtatccgtgaaagaacatcatcatcgatccaacctcagacgaggaagcatggcaagacggaagccttgtggtggctttcatgccagcccgcaaggagatcacgcagctcacgctcactggagagtggagcgatggcagaataaccaatgcagtagagctctgtatggatgcttgcagcaagctgggtgacatattgcgtgaccgcttgaaagataccgctaccttgacgtgtgaatgacgtgttagagagagcactggcaacaacagatgttcttagctgtacaaattctgtaggcaggggaggctgatcggcctgatgtttgagtgagcatgatgcatggttatgatgatggtctccttcacggcaaaagctgtcaaaccgggaagaaattgcagggcagtgtgtatttggcatgtaacgtacttctgactgacctttgccttcatgtagcatctgtatctttctttttccgcgtactgtaacacttcttactctaccaggagctggaatttttttggttcgggtgaaaaaacattttgctgctctcagcttttcacc

SEQ ID NO: 44067 - DNA, 922 bp, Zea Mays
tggaatccggtgtcgcttcatcgtcgtgtatccgagttggaggcgactaatgcgggttagtgcccttcttcttcttccttgcctttattcgtagattgttttaccttctgacctcatttcgtttgattacctcttgataggaatgactcggcagattgcagttcttgaggaaaaacattcccgagatcaagctgaaatggctcaacggtgtgctgacttcgaggagaagtattctcagagccagactgaactaaatcaggtctccgctgctttggatgacgccaacgctctgaggtcttctcttcatgctcagcttgactctgaaaaggtaacttacaaaaccgtgcttcgcctaattacatgcttggattctgaatgagttgatttttgtttgtaggaagaaaaatgtatccttgctgcctctcgcgacaatctggacagattgtatcgggactctagcaactcgctaaccatcttggagaggagccaccgttttacgatggaagaactggacaaccagcgtcgcaggctgcaagaatccgcagacgaagtgacccgcctcacgcaattgatatcagcaaaagatgccaccatcaagggactccgagcttctaagaaatccattgctcaggagttagaagctgctcagctggctgctagagttgccgaagaaactgctgtcactctcaaagctcagcgtgataaagccatggacaaggctattcgggcgggacgaatcttgatgagaagacccggcgtggttgtccctgaagacataagagccgatgtgaatgctgcccccgattcttcgaatcacccttcttcgtcagtcgttcctgagaaagacattggaaaatagagaaacatttcgcgtgctatgagcgcgcggttagcatgatcaagtactcgttaggggttatca

SEQ ID NO: 44068 - DNA, 1943 bp, Zea Mays
cagaggacgagggtcttcgccctagtcgcctgtgcgcagcgggcctagaggcagcgactgagatatccattccactcccgtcaataattcgtcatgaccactgaccaggttgccttcacggagccgaggaagaagatgacggatcgtgcaaataaggagccgctatgcccgcggaagaggaagaagcgaataagcgatatatctgcttccaaaaggctagaagctggaattccattcagacacatgtcacaagcaacatgatttggacatttcaacgaacacgtcgttggacgtagcagcagcagcaggaaaaggaaaacaggatggtcatcactccataatgacttcggatgctatcaaactctgggagggtgagaaaacaagcacttattttgcggtgttttccttttcacaaataagaaatggtacagacaaattttcaacagaaaacatgcttggagaaggggggtttggcccagtgtacaagggccacttaccggatgggcaagagattgctgttaagagactggcagcaaattcagggcaagggttaactgagtttaaaaacgaagtcctcctcatagctaaacttcagcacagcaatttagtccggctgttaggttgctgcattgaagaggaagagatgctattagtgtatgagtacatgccaaacaaaagcttggatttcttcttatttgaaaaatcaagaagagctttgctagactgggagatgcgcatgaacataatcgaaggggtcgcgcagggtcttatctatctccacaagcattctcggctcagggttatccatagggacctgaaagcaagcaacattttgctggacactgatatgaaccctaagatctcggactttgggatggcgagaatattcgatcccaaaggaacgcaagccaatacgaaaagagttgtaggaacatatggctacatggctcccgagtatgctatggcaggcaatttctccaccaagtccgatgtgtttagctacggagtgttgcttctggagattatcagtggaatgagaaacgctggacctcgaaggcatggcaactccgttagcctccttggttacgcatgggaactatggaacgaaggcaggtgccatgagctcatcgataaaccattacgcggcaggtgtcctgagaacgtagcgttaagatgcatccatgtcagcttgctgtgtgttcaggagcaagctgcggatcggccctccatgactgaggtcatttcaatgattaccaacggaagtgccacgttaccagacccaaagcagcccggtttcctctccatgttggtcccaaacgaaaccgatgtcgctgaagaaacatgctccctgaatggtctctcagtcaccatccttgacggaagatagcactagttcaaatcgccgcctttctttgcttggtccatgcatgcgcgttaccattgcatcactttgcatggtatttcccaaaagttatattacgggagcctgaaagttttgttctcatgcatccaggctaatggtatataagcatcgccgcatcattgagtccttgtccttagaggaacgtatggttgttgatggtgccaacctggcattatgactttctgatttcatcacatattttcatccaggctatatatatgctcgcttttattctgttcggtcaagattcaacacgaggatttaaacgacaatgcaaatgaactggcataaacatttcatcggtggggattgctttctctcttttcctctctctatctacatgatggagacaatgtcagtcgctgcatagtcgcggcatgttcttatgcatggctcgttcatcatgacttttgattggtttggcgagctcaggctggcacacagttgtaaaaaaaagtaagcgttctgatgtgtgacagttgcccaaatcaatctttgtccgttgcgtgacaacgatggt

SEQ ID NO: 44069 - DNA, 1269 bp, Zea Mays
atggtcccgaggcttttcgaaaagctaaaggatgagtctccgaggagaaggaacacaattgtgactagggtgccaaatattgcgagagaagtctgcgtactttccattcgtaaaattgaaatgttccgattacaattaaatgacatgggaaccgctacgaggagtgatgatatatctggagatgttagagcggcggaggccaacctccgtaggcaactggagcaaaccctcgccgctgaaccctccagcccgctccaccactacaaccttggcgtcttcctatgggaccgcgccgaggcagagcaggagggtgatggggaagaggcgcggaagctccgcgcggaagcgtcggagcattttctcgcggcggccaagctgaatcccaacgatggcgtccccttccgcttccttggccaccactatgcgcgcggcggtgacaatcaacgagcggtcaagtgctatcaccgtgccgtgaccctcaaccctgacgactctgaggctggtgacacactctgtggcttgctagatgttgaagggaaggagagcttggagcttgctgtctgcaaggaggcagctggcaagtcaccgcgtgcgttctgggcttttcggagacttggctatttacaggttcatcagaggaaatggtcagagggtatacaaagccttcagcatggaatacgaggttacccaacatgtgcagatttatgggaggcacttggtctggcataccaccgtttgggcatgttcaccgcagcagtaaagtttttgccggcagtcatatggacgagctattgaacttgatagttccagggtctttgcattgatagaaagtggaaacatccagttaatgcttggttactatagaaagggagtggagcagtttcgttctgctttggaaatggctccatgtaatcattcagcatactttggccttgcttctgcattgcttgcatgggcaaggaattgtgtaactactggggcctttggttgggctgctagcctgttgaagaagcttccagaatttgtacttctttgactggaaacctttcatgcgtctggaaattgcatggagatgttcagctcacacttgcgagatgctttccatgggtggatgggaaaatcaaaagggtcatggatgcacagatgttcaaaaattctgttcaagagtggagaaatacatgtttgttagcagcaattgttcaaaactctcatatcaacgtgctttgcatcttactacctgacgaattcaagctgaatctccacaggtaa

SEQ ID NO: 44070 - DNA, 1627 bp, Zea Mays
gtcagagtcagagtggcctaggcgctagccgataagccccgcccaccgcgcgcgcgccgcggcaccataccgggatgggcgccatgggcatcgtcgtcagagcatgcgcgcctcccgctcccgccgccgcggccgcgccggcaccctccggctccagggacgccggtcaggcccagcggaggagcaagccctcgaggaccggccgtgtgcgcgtgctcggcggcactggccgtgtcggaggatccacggccaccgcactctccaaactctgccccaagctcggcatcctcgtcggtggcaggaaccgggagaaaggcgagtccattgcagccaagcttgggggccagcctgagttcgtccaggtcgacacccgcaacgcaggcatgttggaggaagcgctgcaggtggtagctgttcgcggagttgccaaaccggaggcagctgcgacgccggcgaggcgctcgcgccccatccctctggcttccgtggccgtgtggagtctggttgccactggcgccgcaaatgctgccgagctatgggaccccttggccctggactcgtcttggctgaccttggtattggagattggtttgggggtttgctgttttcagctgggcagcaggctaatgaggctgtccaagatcagttgtctgctcttagtttctctagcctagcagttatttttggtgctggacttgtaactagtttatctccttgtacactaagtgttctaccactaactctaggatatataggtgcatttggctcagggaaaggccgatccgaggttgttgggaattcaattgcattttcactaggactagcaacaaccttagccattcttggtgttgctgcttcttttgctggaaaggcttatggtcaggtaggacaagggctcccagtggctgcttccggtttggccattatcatgggattgaaccttctggaggtacttgaattgcaacttccctcatttttcagcgattttgaccctcgagctgctgcagctaacctcccttcaggtgtacaagcataccttgctggtcttacatttgcattggcagcatcaccttgcagcacacctgttcttgctacccttctgggatatgtcgccacttcaagagacccaattattggaggaagtttattgttgacatacacaacgggctatgttgcgcctcttcttattgcagcttcatttgctggagcactgcagagtttgttgtcattcagaagatattcggcatggataaacccaatcagtggtgcatttttacttggtggaggtgtttataccctactggacagggtgtttccagcaacatcaatggtcatgtagaccatggttggacaagaattgctaggcaccagtctgtttggcgtgcgaatgatatttggatgtgaagtagtgaaatgatggcaacaaagtttagccagatctctcagcgttgtataggcacgcaggacattttgatcgggacaagcaaagcaccttgacctaagtacagtagtctgcatcactgtatctgtatgggcctcgatacttggggccggtctaccctactaaaatgtatttctgggacagattgaaagagtatgaaatttatataagaccttgttcggttaa

SEQ ID NO: 44071 - DNA, 2326 bp, Zea Mays
atgtgcactcgataagttttcctggtgtccggtccggctacccctgttccctctcgcagtcgcagacttctcttctcgccaaaccctaatcctgctcctgcctttctcgtctccaaccgttggccgagcagtagcggtggcgatggagggcaaggaagaaggtcggatcttcgtgggcggcctgtcgtggcaaacggacgagcgcaagcttgaggacgcctttggccgcttcggcaaggtcgtcgacgcccagggttaagatttgcatattggtatgttatacaatatattcagtgatcatttatggacacttgaaggaccaatgctgggtgctggagcagaaaattgatgctagcctcaccagtgtggaccctttcagccagctccatgcgatgcattgcagttttgggaagacaaactgggtaactaggagcccagcttaccagcagctcagacttccactgttgttaccatggaaatgcaagtcgtttggctttaggtttgtgcattggtttaaatgatctggtatgcaaactagagaatatggcagtggacatacctgctacattgtcctgtcaccagaatatgctgacatttttgagaagttagttcatgtcggtaacggtaaaattggttccttgttggaaatagcccagttctccaaaacatggttcccagaggctctatagctttgctccttgtccgtgttaacgagctttgctgtcttgggactagactttttcatgaaggtagttacagctagatgcatctgtgtcaggattatgatttgttcttgaattaccgagatccaggaataacctaatctcagtgcttctcttctgagatcatggtggagagacacactaaccgccacaggggctttggcttcgtgacatttgaagatcggagggcagttgacagcgctattaaagagatgcatggccaagaaatagatggccgtaccatctcagtgaacaaggctgagcctaagatgaatacagatgacacaaggtatgccggtggtggtggacgaggagagtatcgtggtggtagaggtgatggtccaccccctggcaattgctttgagtgtggtcgtcctggtcattgggtccgtgactgccctagtgctgctggcggtcgttctggcaggttcccatccaagttcagtggtggcagtggcgttggcaggggagaccgcttttctggttcagataggtttggtgatcgttacatggatgatcgttatgatggtggtcgctatgggtaccgtgatcaagctgatgcaagggacaggtatgctggtggccgagatcgctatgccaatgaccgttacccatctggtggcgatcactttggtggagacaggtatggaggtggtccggattgttatgtgccaagtggttatggtagggagcgagaaagaagctacgagagagatggagttcgtggtggtggtggcggcggcggcggctatgataggagtggcccaaggggtggtggtgggtatgacagggatggtccacgcggcggtggaggaagtgcacgctatgatggaggaaattacagggagaggcctgggccatatgatcgccctagcaggggaggacgttttgatgatcgctactgatgaactgcctgtagactcaagctccttgtcttggtagtttaatgtttgcagttttgcatggccgaatgcttaatgggctatggaagatgcttaatttatccctcttcggcactttaatgtctgctctttatttcaaccagtactggggcactggtttgccttgataagtttatccagctgacagtttttgcatgagatgagtcatgctctgggctattaccctgcctgttggatatttcagtagctgaggtttgcagtgatcgattgtcattgttgatctgaatatctggtatgcgtggactatgtttaaagtgattgcctgtcatcattggtctatatagttggtgagcatatatatgttcagtgtcggtgcttgtcattgttgttggtctggatatctaggcttgcaaggatatatttgcagggctgagttgcaagggcttaacagaacaatagccaaagtaccttatattttagtagctggagaccatgttaattatgctataattagctggagaccatgtaaatttagcttagtttttgtcggcggtctgacttttggtgggattttatcttgaacaaacaccgtccctgacatttaagagtgtagagccgactaacagtagtcaatctctatttcacatttgtctaggatcgacttcgcacttgagaaaaacgattatattgataagaaaggaa

SEQ ID NO: 44072 - DNA, 2889 bp, Zea Mays
atcacattccgtgccactaatagcattccaggacaactgatgtaactcctccacacacttctcctcatcttccaacttctgcaatacctcatcagtcaaaaccaggcccatatcttccacggtcagattatgcagttgagttaccaccctcttgggacattttgcttgatggcctggctcaaatttatctccacaaataaaacacaacccattcgctcttctatattctctcaactgtctttccttgctcaactcaggatacaatattcctgccctattctccccccttactcctgcaacctgagttttaagaacttgtcccttttggtttctaactctattcttctctgcaatctcctgatacaccttggccaacctcttcgccttatccactgtcttaggcatccgagccatgacttgattctgaatttcaggtttcaaccctttaatatagtgtgtcacaaacagggtctcacctaactcaggattatgcagggtagcaacatatctaatatcatcaaaagcttgagagtactcctccactccttgctgctgagtcacattaaccaaatctctcatagcttgagggtattcatccactccaaactgctccctaactgcttgtgtaaactgcccccaatcacccaatccatgtttcagcttatacacttgtaaccacttcgacgcattcccctccatgtgcatagaagctgaactcgcccacaaccactccggcacctggtaaacagtgaaataatcaacacaccgatcaaaccagactcccggatcactgccctgaaacttgggaaatgtccacttcggaaatgggcctgtcctattctctcttcctccaccccactgctctctacgatctcttccacgctccattcctccaccccgatcatcccctcgaggaacacgcagctcgcgctcagagtttgtgtcattaccttcctgctccttcgcttgcaaatccaatcgcagctgcgcaatagttctctcgttctcctccatgtgtcgagccaacagtgctcgatcttcctctgccttcttctgcccgatctccatcgcttccatcttcccggtcaaccgttccaccgccagcatcatccgctcccagcgctcctcccctttttgctcggtccccgccattgcttccaggatcagccgcgtctgaacggatggcttcgtggaaggcgccgtgatgcccaccctccgaggatcaacagctctgataccacttgtgatgacccgtggccgcggctagggttcgccgggcgtgagtcggtagcagaccggcgaaaagaacgaagccaaggacaccgaatgttgcatttgacaaatgactactctcaggcctgcaaactgcacattacaacgtgaagttggttattgaaaggcacttgcaatgtcaatggagggtggtgcttcaggatctgcagctgtgactgactctgctatggcagaagctagtgcagttgaccctgacttagcgttggctcatgactcatatgctttcttgataaattggttggaacggttcccacagtacaagcatcgtgatttctacatcactggagagagctatggaggccactatgtccctcaattgtcttggttagtgtaccaaaacaacaaaggaattaagaatccaaccttaaacttcaaaggcttcatggttggaaatgcggtaattgacgattaccatgactacatgggcacatttgagtattggtggacacatgggcttatctccgatgaaacttatgcaaagttgtgggaggattgtaaaaatgatgtgtctgagaacccctccgaggaatgccaaaagatttatgaggttgctgaggctgagcaagggaatattgatttgtatagcatctacacacctacttgtaagaagacttcattgcaaaagcgcagactaataaggggaagaatgccctggctgccgagaggatacgatccttgcaccgagctgtacatcacgaagtactgcaacttgcccgaggtgcaggacgccttccatgccaatgttactggaataccatacgcctgggtgggctgcagtgacccaatatatgagtactggaaggattcgccgaggtccatgcttccgatctaccgtgaactcatctcggcaggcctaaggatatgggtcttcagcggcgacaccgactccgtcgtgcccctcacggcgacgaggtactccatcgacgcgctgtctctgccaacgatcaccaagtggtacccttggtactacgacgaagaggttggtggatggtgccaggtgtacgagggcctgacgctggtgacggtccgaggcgcggggcacgaggtccccctccaccgtccgccgcagggcctcaagctgttcgagcacttcctgcggggcgagcccatgcccaagcctgtcgagagcgtccagtcgttctagatgagcttgctgccgcgcttggctagttggctttgatgaatagtaaggccggacatgtggcaagccatctccactccacatttcttcaccacgttttcaataactggcgctggccgaaataataagagcagaacgaataaaatgccgctcgctagaatgatctggctgtgcgtgtttgctttcgagttatttttatataccacctacacactttcacgttggaaaatcgatagtggtcgctacaaaagttccaaggataactggataagtttggcaaagctatactccatgctaaattcatatgggtactgacatactgtcaccgggaaaggctataccttctgcgaccgtcaagatccattgtcatcgtccgaaaagtgtgtttagttttaatccgtatcggcttctgttgcttctaatgtgtttttgtgtctgtagattacaactgcaat

SEQ ID NO: 44073 - DNA, 3895 bp, Zea Mays
tttttttctccctgtgaagggagggaacagcgtcgtcgtgagggagaaaattcgtcgggttgatgtcagaaaaggggaagaggagacagacgacgggtggagagcgagagaagtggggaaggcgagcagagcaacaaatcaagtctgtttcatttcagcaatcagcaccaacccccgtccaatcgctgcggctggatgattgggcagtgtcagcctcgcgttcgttcatttaatgtttctggtagcggtcaatgcgggatggttgggtggcggattggtattttgggactccatgtactacttcctgtcttcctccaccttcccggagaagcagcagaggaagggagggtgaaagaagaaatggtcgcaaagaggtggagggaaggaaagggtcaatgctgctcggtgtccctcaacctcaacacgggcgcccctactttacttgcttgttcccggtgtccctatcactctcagaggtggacgatggatcgtccctttcacatttcacacaccctccgttgccatttcaatattatcctagtcgccagcgtaagctcgccgtagctacctgctctgctactcgaccgctggcactggcgcgtttctttattgcttcgtccccttcatccggcaactccactgtcagcgccctattcggctcaatccatccctctgcttggcgtcctctctgctgcttgatttgctacctgtacctggtgctgggaatggattctgctatcagagggatcctgcaagtgtgaaatctatatattctggacaaatggggcaaaatatgttacagccacaagtgctctgcctgtgctccattatcctcacgttattttttacccttttgcaaccgaccgctgcacagatcactgcaccatgggaagttgatgccctcaaggctattaggggcagcttgatagatccacacggaaatcttagcagctggaaccgaggagatccatgcatgggaaattggtcccatgttatctgttacaatgcaacaggcagtgatggatacttccatgtaaaagaattggattttatgtggaattcgattggcgggaccatacctaaggaggtcggaaatatcacttctctggagttaatgctcctgaatggaaaccaattgaatggctctttaccagaggagattggcttccttcctaatctgaatcggattcagattgatcagaaccatatatctggacttatacctaaatcatttgctaacctgaataaaaccaagcactttcacatgaacaacaactcattgagcggtcaaatcccacctgagttatccagattaccttcacttgttcacctattattggataacaataacttgtcaggctacattcctccagaactatcaaagttgccaaatgtgctcatcatacaactggacaataataatttctctggaagtacaattccttcatcttatggcaacatctcaacacttctaaaattgagtttaaggaactgcagcttggaaggacctgttcctgatgtcagtgggataccccaacttggctacttggatgttagctggaatcaattgaggggtccaataccatccattcaattttcgagcaacataactacaattgatctttcccacaataatcttaatggttccattccaggaattttctctggccttccttatctccaaagactgtcacttgacgacaacaatttgactggttctgttccatctaatatctggcaagatattgatctaagaggaaataaaagtcttgtactggatttccagaacaatgctctcaacaatctgtcaactcctctttcgccccctcccaatgttaccatcctattacatggaaacccagtatgcattgggcaaaaccaactgaatatttctcagtattgtcagtcaggaacatatgttgcacgtggaggttcagcagataacagtacagtttgtccaccatgctctagcgactttccttttgaaagaataccgatgtcaccaataccatgctcatgtgtcgttccagtttatgtgggttaccggcttaagagtcctgggttctcaaatttcattccatacgaatcccagttccagcagtacttaacatctgggctttcactgtcatcgtaccaattagaagtttctacttttatgtgggaagaaggcccaaggctgaagatggacctgaaaatatttccaaataacactccctttttcactgtaagtgaggtgttcaggcttaatggtatgttcacagcttggcagattgcagactctgatatatttggcccatatgaacttatcagcttcaaccaagggtggtacaacacaataataccacagggtacaaagtctggtctgagtacaggtgccattgttggggtggtcatggcggcatttgttgcagctgccattctttcatccctcgttactatcatcatattgcggagacgctcaagacagtcttcttcaaataaacgcaccgcgaaaagaatttcaatgaaaattgctggtgtaaaagacttcacttttgatgaattgtcacattgtacacatgactttaatgattcaacactaattggccaaggagggtatggcaaggtatacagaggtgtgttggctgatggaatagtagtagcaataaagcgagcacagcaagggtctcttcaaggttctaaggaattcttcacagagatagagttgctatcgaggctgcatcaccgtaatctagtctctttgctcggttattgtgatgaagatgatgaacagatgctggtttacgagtatatgcccaatggaaatctgcgtgatcatctttcagctagagctaaggtgcctctagatttccccatgaggctacggatcgcgctgggatcgtcacgtggtatcctgtatttgcacacggaagcagatcctccaatataccatcgtgacatcaaagccagcaatattctactggactcgaagtttgtcgcaaaggttgctgatttcggtctctcacgccttgctccgctgccagaaacagaggggagtgcccctggtcatgtctccacagtcgtaaaaggcaccccgggttatcttgacccagagtattttctcacccataagctcacggacaagagcgacgtgtacagcctgggcgttgtgttcttggagctgctgactgggatgcagccaatctctcatggaaggaatattgtcagagaggttttggcagccaatcagtcagggatgatattctcggtggtggataaccggatgggctcgtaccctgctgagtgcgtggagaagtttgctgcgctggcgctgcggtgttgccaggacgagacggactcgaggccatccatggtggaggtggttcgggagctggacatgatatggcgcatgacgccggggacggagaacattgcatcgtcagagtctggcgtcatggggatgggctccaacagcaccagcacacccacagcatcggggtctcggatggatgatcactacatttcgtccatggaggtctccggtagcaacctgctcagtggcgttatgcccagcatcaatccgcgctgacctgctagtatatgttgctgttctagcggtgtgtattatagtttggactcaccacgacgaggatgtaggctacttgtgagcaaccaaacatgtattcattctcttatcgggttcaattttattgttgtcacacttagactgtgaaagtttcattccttagacggtctctagcaacgttctctaaatttcatccattaaaaaatatatataattgcactctaaaagattacgtcatttatatcttcatcatccccggtagtctcttttaaatttcatcatctatatcctatcttccatattatcacaaatcctgttattagaaatttt

SEQ ID NO: 44074 - DNA, 3053 bp, Zea Mays
ctagtagtaggtagtagtagaggagaacagccactcagccagccccctttacttgcacacaatagacaacctcgaacagaaaagaagcagttttgccgtccgagatgagccgccactgtgtgactctccttgtgatcatctttggattactgcagatggctgtggctctctactctaatccaagttcaacgcacccgaactgcacggagagatgtggcaacgtcagcatccaatatcctttcggcttcggatccggctgcttccggcagcccgatttcagcctcacctgcgacggcggcggcggcggcaaccagccgcccaagacctttctgcatgacggcatcaccgaggtcttgcccgattccggtgtcacggtgggtctgtcaaggcttattgatgtagccatttcccacaccatctttatggcacctggtattcctagttacaacttctcgtggaatctcagttctttcactatgttggatggctcattcaacgtaactgggtgtgacttcgatatatatcgtcaagaaccgggcaagaatggttccataccgcggtgtacaaatagctgcccccaaaacatcaccgagacggtggccagacagaactgcaatggaaccgggtgctgccgtctttacgttggagaagttgttcctgatttccagctgaaatttgtgctccacaataatgacactagaggtgatcatgatgctctttctaatggaagcaccctgtggaatacaataaacattaccagcaactgggcccaaatcttatgggatatagatgatcaaccgacatgctccagagcgaaggacaaaaatataaactacgcatgtgtcagcaactacagccattgctttgacgctgaactgtttgatattggttatagatgtggttgtaacagcggttacgtaggcaatccctatgtagttgatggctgcaagcgtgacgaaggatatagtccaaatcaactgaaggaaaactgctcgaggtcctgtggtaatatcagtgttccatatccctttggtttagaggaaggttgctctgcaaggaagctatttaaactcaactgcagaaatgcgacagcgtctatgctccaattcgatgacgaccgtgttgtggcgtttataaatgttgcagagagtctcgtgggcatcaggtttacctcacatttcgaagatgatcagcttgggatatatgtaccaggtgaacccgatctctttatgggtcttggggaatcagtggtctcaatgcactgggcagctgccaatcttacatgcgacgaggccctgaaaaataaatcacaatatgcatgtgtcagttcaaacagcaaatgtttaggagtcaattcaaaggatggttatattggatacagatgcaaatgcttagatggtttccaaggaaatccatataccatcagtgatggttgtgaagttgtccgtctcttcgtcagccgcgcgagaccctttgtcctttagctgcccgtctcctggcgtgccgcatgcgacccttctcctttagcttccctctgcgagaggttaaatagaggagaacccctggcacttggtacacgagaacagaaccattttcagtcacagtccagccgcaagtgagagtattcccatctcgtgactctgcgcgcacagagcagcgagaggacaggtgcctccgaagcccttgccgttcgagaccttgcacaggggatcggcaattaggtttttggggagcgtctacgcgactgcccaaaacatcttcttcctggcgacatgacaagggaagctgaacaaggatctagatcatcagagcgcatgggaggaggttttgctgctgtgctaaagcttgatccttttgatggtaaaaacttcttgatttggaaagctaaaatggaattgtggctaactgcaatgttatgttattatgtcgctgagggcaagcctgccaacttacctcctgaggatgaagctaagtttaaggctgatgacaacctcttttgaggagcagtgattagcgcacttgacacaaaattccagaaaagctatatcatccttcccacagggaaagagctgtgggatgcacttgttggaaagtttggagttactgatgctggtagtgagttgtatctcatagagcagttgtatgactacaagatggttgagaaccgatctgtagtggaacaggctcatgagtttcaggcactagctaaggaactcgagctttttccttgtcctttgcctgacaagtttgtggctggcggtataatcgccaagttgccaccttcttggaaggattttgctacctctctcaaacataagagaaaagagttcaatgtggaagagcttattggtactcttgatgttgaggaaagagctagaacaaaggacaatggaaaaggtgttgagacctctactgctaatgtggtgcagaagagaaactttcgcaagtttaacaagaagaaaaaccagaacaaacaagagaatacaaataaacctgttcaaacagcacaatttaaaaagaagaagaacaacaacaagggaaagggaggatgctttgtctgtggcagtgatcaacactgggctagagagtgccctgatcgcaagttcacacaggacaagaaatcagctaatgttgtaaccactgaaactggagatggaacatctgggtatggtaattctttaccatttgttctctcagtttgtaactcacctgagtggtggatggacaatggtgcaaatattcatgtgtgtgttgatgcctctatgttctcctcctactaggtcgggaggtctgatgccttgttaatggaaaatgggtcgcgtgctcatgttcttggtgttggtacggtcattcttaagtttacctcgggaaagacagtgccattgaagagcgtgtagcatgtgccctctatcaagaagaatctcgttagcgtttctatgctatgttgagatggatacaaagttgttcttgagtctaataaatgtgttgtgtctaaacatggtatttttgttggtaaaggatatgactgtggaggtttgttccgcttatcactg

SEQ ID NO: 44075 - DNA, 3801 bp, Zea Mays
gacgggaccaccaaaaaccactctcttgtgcgcgagcatcgttaaaattggccacgccgccgccgccggccggcgaggagccggtactgtctgcttgctcttcttttcaccgaaccaaaacgcccgccggaaagggtcaaaggggaaacagagatctcggtttgcagtgatgaagcttcgctgatgagctggcgcccgtccactcgcaacgacgctggacaaaagactagccgtcccgtcccgtcacggcccggcgacctggcaaggagaactgcagcgacagcgacagcgacctctggacaatcggctgtgacggtctttctcgtttgttttatagataggaaagaaataaagataagggttaaagctttctcgtagcctcctcagaacatacgggcgattgtcttttcgccggtgagccattaattccgtcgagctgatttcttcttgctggttttgccggttttatttttttcttttattggtaattcttggccgtggcgactgacgattccttttggcgcttgtaatagcacaagcatagctaaagtcgtcccgtttcctcctggtttcaatctgtttggaacttttgttagttccggtccatagggggaatcgtactatcctgtggtcaaaattgtcgcttctttcttttgtcgctctctctatacacaccaaaaagaaggaaaaaaaaccacgattttttctcccaactttgagtaattaccgagtgtttcttcaagtcggagctcggctctgtgcttagccgggaccctatacttggggttttggcgggtccatcggaatggtcagcgggaatctgctctaccggaggaagcgctcgtggcgtgccgatgagttcgtgagccggagcacgctgcaattgctcgactttgatgatggctcaccaccagagcatgcatggagaaggaaactaagtagtcatgctaatagattgaaggagttcaatgtcacattcagagaagcaattagaatgatgaaacttggtctccgactttggtcatacattcgggaagaagcttctcacggaaggaaagcaccaatcgatccattcactagagagggcaacaagccctcagcctcgcaaggagtacctcttggagtggtagtatttcaagaggctttaggggagaattcaagcattggcagataactcctggttcttgtgaaatgtcacctgtgatggccaatcaattttcgatctttgtcactcggggaggaaccaagaaatacgcttcagttttgtcgcctggtcaacttgatggtttgaagaaatctactgatgatggtatatcatcctgggactggaaattaaagggtgatcgttcaacgtatcatgctttgtttcctcgagcatggactgtttatgatggcgagccagatcctgaactgaaagtatcctgccgtcaaatatctccatttattccccatgattaccaggagagcagccttcctacctctgtttttgtatacactctagtgaatactggaaaggaaagagcaaaagttagcctattgatgacttgggcgaattctataggaggactttcacatcattctggggatcatgtaaatgagccattcgtagggaaaaatggagtttctggtgttcttctacatcacaagacagccaataataatcctcctgtaacatttgcaattgcggcatgtgaaaatcaaaatgtaaatgtcacagtattgcctgtttttgggctttctggagaaagttctgttactgctaggggaatgtggggcacaatggttcaggatggttcctttgatcaagataatctcaatactggtcctagcatgccttctttgctgggcgatacagtttgtgcagcagtttctgcttccacctgggttgaaccacatggaagatgtgcagttgtatttgcattggcttggtcttctcctcaggttaaatttaaaaaggggagtacatactacaggagatatacaaagttttatggaacttctccaagatcagcagtaaatttggtagaggacgctttgatgaagtataaacattgggaagaagagattgataagtggcagaccccggttctccaagatgagaggcttccagaatggtacaagattacactctttaatgagctgtacttcctagttgctggtggaaccgtttggattgatagtggatctttggtgtctgatgctgataacaagtcgaatccagaggaaagtaatttgtcacatgagatcgatgacaaagaaaatgttgggaaatttttgtaccttgaaggaatagaatacttcatgtggtgcacctatgatagctgttttgcgggaagataacagaagagtcagatttcttgctgatggtacctggggtattcgtaaagtaatcggtgctgtcgcccatgatcttggagcacatgatccttggcatgaattgaatgcttacaacatacatgacacaagtagatggaaagatcttaatcccaagttcgttcttcagatttacagggattttgctgcaacaggtgacaagtcatttggcaaggatgtctggcctgcagtctgtactgctatggaatacatggaacaattcgatcatgatggtgatggtatgattgaaaatgatggatttcctgatcaaacttacgatgcttggacagttcaaggagtaagtgcatattgtggttgcctctggcttgctgcccttcaagctgcggcagcactggccggaagccttggacatgatgactatgctgagaggtgcatgacaagatttgtgaaagctaaaactgtatttgaagccaggttatggaatggttcacacttcaattatgacagtggtacaagttatagtagccgttccatccaggcagatcagctggctggacaatggtatactgcatcgtcaggtttgcctcctctatttgatgaggataggataaaatgcacgcttcagaaaatatttgactacaatgtgatgagggtgaaaggaggacgtatgggagccgtgaatggtatgcatccaaatgggaaggtagatgaaacctgtatgcagtcaagagaaatctggacaggagtaacatatagtttagcagcaacgatgctgctccatggaatggagcatcaggccttcactactgcagaaggcatttatactgcaggatggtctgaagagggctatgggtactggttccaaactccagaagcatggacaattgatggccattacaggtcactaatttatatgcgcccccttgcaatctgggcaatgcagtgggccttgtcgcctccaaggtcgatactggaggcgccgaaggtaaatacaatggacagagctcacatttctccaggcaccttccaatttctccaggatagcgttagaaagatgacaccaaaaaacggttgttttggaaacactgtaattaacttggattgctgatgtgacggtagcacttgtatctcgcactgtccaatgtatgtttacggagcacctcatttagaaaatgttgagtgtgaaacgggtgctatattctgttcagcctttgcagttatgtggtgtacctctctgatgtaaattgcatctcacagtgggccggactttgtaaattgttgtacagaaaacgtacatatgataatgccgtgttaccctgatattcatgacaccgtttaccacaaaaatctgtacagtttattgttcatatagtattttagaacgagtacttgtcagattggcgtaagacaatgtcctcttagcgctgtactcttgatggtatatatagatgtacatgtgaatgattt

SEQ ID NO: 44076 - DNA, 4576 bp, Zea Mays
cagaagtgggccccgccgcgcagcgtcacgagagagggggtggggcgcttgccagtaaattgcgtaggcgtaacgacgaatccggcactcgcaaccaccgcatccgtcctcgtctggtccggttgcctactcccctcccactgccccgctgctgctgcctccccgcgcaatggcgccgagatccccgcgctgagcgagcctcccgggggtcgacctccgaaccggcgctgccgtcccgcagtgcacttgaagaccaggcagctgttctctactcaaggaagagatggcccatgtttcgttcaaaagcaaagatgtggacagcggcatgtcccggtggtctgaatacctaagtgttgaagagccaattccttccgcaatggcaacctggaggaacatgagcgctgatgcgccgcaaggctcttctgctggtagccacaaacatcttcagatggagccggtggttcagctgtccaaggttgcggaaggcttgctggccaaaatgtaccggctgaacagcatcctggactatccagatccaaacacgcacacattctcggatgcattttggaaagctggtgtctttccaaatttccccaaaatttgcatcacgatgtcaaaaaaatttccggaacatcctaacaagctgcagctagaaagggtagataagtttggtcttgatgctttaaacgagaatgctgaaggttacatgcacaatcttgagcagtggatcctgttgcttcttgatttgctggcatttcgtgaacaagctttgcgacttattttggatttgagcagcacggtcataacattgctgccacaccaaaactctttaattcttcatgcttttatggatctgttttgttcatttgtccgagtgaatcttttctctgacaagatgccaagaaagatgatcctccaggtttataacatcttgcacataatgctaaagggtggtcgtgattgtgagttttatcaccgactggttcagtttgtggactcttatgatccacctatcaaggggttgcatgaagatcttaattttgtgagcccaagaattggagaggtcctggaagctgttggcccaattatatttctttcaactgatacaaaaaagttaaggaacgaaggtttcctcagtccatttcatccacgttatccagacatcctaacaaattctgcccatccaatggttgttctgaaagagaacttaatacttcctctgttcagagatgagtacatcttacttcatgaaaattatcaactttatgttcttccaaaagttctagaatcgaagagaatggctaaatctggccgaactaagcaaaaggaagctgatctggagtacaatgttgcaaagcaggttgagagaatgttaacggaagtgcatgagcaagcactggtgtcatgtgatgctatgcatcgtgagaggagaattcttcttaagcaggaaattggaaggatggttttatttttcactgatcaacctagcctcctagcacctaatattcagatggttttttctgctcttgctttgtctcaatgcgaggtgatttggtacttccaacatgtggggattgcatcatcaaaatctactcggttgaaaactgttgacattgatgcgacagacccaactattggtttcttactagatggaataggcaaactttgttgcctggttcgtaaatacatagcagcaataaaaggttatgccttatcatatttgttatccagtgctggaagaatacggttcttacttggtactccaggaatggttgctcttgacctagatgcgacactgaaaggcctttttcagcaagtcctccattgtctggagaacattccaaaacctcagggggaaagtgttcctgacattaccgctgacttggctgatttgcgtaagcactggctgtcaatcttgatgatagtcacatcttcacgatcctcgataaacattaagcacttggagaaggctactgtgtctactgggaaggagggtttggtgtcagaaggcaatgctgcatataattggtcaagatgtgttgatgaacttgagagccaactctccaaacatggaagccttaaaaaactctacttttatcatcagcatcttaccacggtcttcagaaatacaatgtttggcccagaaggtcgtccacagcattgttgtgcttggcttggagccgcttgcagttttccagaatgtgcttctgcaattattcctgaagaggttaacaaaattggcagagattctatctcttatgtggagtcccttatcgagtctatcatgggtgggttggaaggtttgataaatattctagattcagaaggtggatttggctcattagagatgcagctttccccagagcaagcagctcttcgcttaaataacacaagagcaaagggtgtttcaagcttgttaactccaggatatgagagctatcctgataacagttcatcaattaagatgctggaagctgctatgcaaaggctgacaagtttgtgttctgttctaaatgacatggagcctattggtgttctcaaccatgtttttgttctacgcgagtacatgagagactgcatcataggaaatttcaggagaagatttcatagtatgattagaactgagaactgcattcagcgaccatcaatcatagaatctcttctaagaagacatctgggcatcatccatctagcagagcagcatattagtatggaccttactgaaggcatacgtgaagtgctgctagctgagagttatactggtccatttcccaatcttcaaatgtttgagactccagtggggacacaaggaggggggtctgccgttgagatgatatgcaactggtatattgagaatgtagtaaaggacgcttctcgcattggagttgcttttgatgcaatccaaaattgcttcaggagctcacagcctattggtggtggatgtttggctgaatcatttacagataaaagagaaatgaaatcacttgttcgtctttttggtggctatggaatagataaaatggataagatgctaagggagcatacgtctgcgcttttaaactgtatcgattcagcattgaggtcaaatcgtgatgccttagagggcctagctggaactgtaaattccggcgataggattgaaagggatgtgaacctgaaacaaattattgacctcgaaacactggctgacctctgtattcaagcagggcaggcaataactttccgtcggctgttggttgaggccgtcggagcagtccttgaagagaaagtgcctctgatatattctctgctcaaaggattagccttgcagttgccagacgaggtacctgataaaaatgagataattagattgagaaaggttgcgagcagtgttggtgttggcgacaaacatgatgctgagtgggtacactctattctggcagacgctggtgcagctaatgataattcttggatcctacttccatacctttgtgctgcattcatggtgtccaacatttggaacggtgctgtttatgatgtcaatataggtggactcagtaacaatttgcactgcctagcaaggtgtgtaagtgctgtgattgggggaagcgaatacactcgggtcgaaagggagcagcgaataaattctctttcaaatgtgcatacagatgagctgcaagaggccgagttaccgagccgtgtctcagcagaagcaaatatcaaatcttgtatgcagatctacgtcaaactgtctgcagggatcgtcctggattcatggaacgacacaagcaggcagcacatcgtcccgaagctgacattcctggaccagctctgcgagctgtccccgtacgtgccaaggagcaccttagaagctcacatcccatacaccatcctgcgctcgatataccaccagctgtacggaggctctctgctggcctcggaaccggcggagcagtccccaaggcagtcgcctctcatctctctggcacacgcgtccccgtccgcaaggcagatgcagaaccgaccagagacaacacccaggtcccacaccttcgacccaggctactacagctcgtcggggtcccagcacgacgatggctacgacgcggataggaggaccggacggctgctgcggagcttgaggcgctctggaccgctcgacttcggtgcgagcagaaaggcgaagaagttcgtcgagggctccagctccgggagcagccatggagctggctcgctgcagaggttcgcagtgtccagatctggccctctatcgtacagatagggccgcatgtaatgtaaactctagagagcagtagatcttcctatgcgtgctggtttacgtagctagcagtagcaacagcagcagctagttgtgctgtaagtaaaacccattaattgcttaatttgtgttgactgtcgttaggcaagtgatttgaattagctgttgctcgtttggtttgtgtatcaacaatacaattgttcgttgatttttcttgatagcaaagtaaagtaaaccaaccttctcttgaaagaaagaaatagagagaaagattagacggaggccgattaagcagagatgaattggttctgagtgtag

SEQ ID NO: 44077 - DNA, 1427 bp, Zea Mays
tctgcgctaccctgctaggctcacacagtgaggacatggatggcaagtaccactccactctggggtgacttcttccttcatcatgtcccatgccctccacgacaaatgtatttttgaagttcagagatgataaaggagatatcgtaacaaatgatgcaaggtgtttactgaggatgtacgaagcggcacatgttagagtgaacggtgaagaaatacttgacaatattctcattcacaccaagagacaacttcaatgtattgtagatgatctcgaaccaacactgcaagaagaagttagatatgcattggagacacctcttttcagaagactcaacagagtacaggccaggcaattcatctcaacatacgagaaaagcactacgcgtatcaatatgctcctggagttctcaaaattagacttcaacatcttgctcaccctatactgtgaggagctaaaagatcttacgctgtggtggaaagagttccaagcacaggctaacacgacaatctatgcacgagataggatggtggagatgcatttctggatgatgggagtcttctttgagccccaatactcctattcacgaaagatgctcacgcagttgtttatgatcgtgtctgtactcgatgacttgtatgacagccattgcaccacagaggaaggcaacgccttcactgcagcattacaaaggtgggatgaagaaggcgtggagcaatgcccaacatacttgaggactctgtatacaaatatacgtgccaccataaaagccatcgaggaggacttgaattttcaaaacaacaaacatgcaaagttggtaaaaggactgataatcgacatggccatgtgctataatgccgagacagaatggcgtgacaagaaatatgtgccagccaccgttgatgaacatctgaaaatttcagcacgcagcagtggctgtatgcacttggtgagccaggggttcatttcgatgggagatgtggcaactagcgaggccctcgagtgggcctctacctatcccaaaatcgttcgagctgtctgtatcattgcacgcctcgctaatgatataatgtcgtacaagcgagaagcatcaaacaatactatggtgtctacagtgcaaacttgtgcaaaagaatacggcaccaccacagtagaacaggccatagaaaagatcagagagctgatcgaggaagcgtggatggacatcacccatgagtgcctcagacagccacagccgaaggctcttctagagagggcggtcaacctggctcgtacaatggattttctgtacaaagatgcggatggatacacagattcacggagtatcaaaggcatattggattcattgtatgtgcatctaatagactaaaatagttcggaaaacactgttggctatataacccacaggatgaacaattcaatatacccg

SEQ ID NO: 44078 - DNA, 1013 bp, Zea Mays
agacaacatcagccagaggaacacataaggtttcatgtgtgcagtttgctttttctgatgacactatactatctgagtctgttgggcgagcagtagatatgcgactttacccaaacagaatcagatgcaacctcttgggtaaaacacacagaaagaggtttaccaacaagtggttacagtaagttcatagcacacgagacgggtgtgaatgtcgaataacatcacatttgacccgtggctagccagaaaatccaagtccctgaaaggtgatatagattcgagaaaattaccagtggagggatctgtagatacggactttacaaccagtccattttatccagcactagtcacagcttgacttgatcacacatgctggaaaagcacacgtgaggcgatcaaggcacgactagagcgatgactaggtggttactaatcgacttaatctcgattcttgtaagtactttctttagagtgagttgaaccaaagtgagtttagacaactcgacaaaacgatttctaaactcaaccttcgttcacaatgcagtcacaagttagtaaaaccaacttgttaaactacttttgacattgagcaagttctctcagtaccttcggtaagccaatggttgagagttcccatttgcgagcaaaaggtcatgcatttgggtagaaatccatttggtcatgttgttcatctatttctttatgcgagatgaatcatccacttggttagagaatacttggattaaataagagggcgaatgaacaaactcctgcatctcagcagcagggcaaagtcaatctccaatttgagagctaatcagttgttttccaacactaaaaagctccaaggcttcacctttacaagaaggatgtaaagggaacttgtataagtagtctctaccaagatcaaaagaaaagagaccacacataaaagtggtatgccccttttgatccagcaaaaatgatagatgttgcttgatcacttcgacaaacaacaccaaaatcgtttcaaa

SEQ ID NO: 44079 - DNA, 796 bp, Zea Mays
ccggtttgtcatctttcactacctgtactcatggtaagtacaaccactcgagactgtgtgggcagtcactcaatccgaactcatacggtccaaccccagggttatgaaggctggggagcaccgggaggataaggagggggaatgttttgtccggtttggacatggcggtggcctgactccttccggtataaccgttaaggttaggacgtgcaaggaaagaaagagattcggattcggatctcactagctatgagatcgcagagccggactagtgggtaaagtgtacacctctgcgcagagtttgaaaacctattcgaatagtctgtgtccacaggaatggacgagtctggtatggtatggcaattaatgttttgtttttcaaaaaaaaagagatgcttttgaaaagtggtttttaaaaggtccggcggttgagccgtgagctatggtggatgggaagtccagtagctgtttttgaaaatgaaaaccagtgggaaactgctgagatacgtggatggtttagtccaggggattttgttctaatattgaaaaacttcctgctccttttggagaggatgcgctttgcaaaaatacaaaatgtttttcaaaacaaccctgcataaaatattactatttctgcaaaatatcctgagctccacatattccatgcattatatctgatttccccattccgcgggtgaaggtgggctgctgagtacgtttgtactcacccttgcttatttgttgtttttcagaaaaaggagatcaggtaagagttacgactgttcccaaccttgca

SEQ ID NO: 44080 - DNA, 3476 bp, Zea Mays
ctcgtgcccccgcccgtgatgcgcgccgtctcctcccccgcgcgacccctcccgtgatggccgccgccgcctaccccgcgcgacaccagccgccacctaccccgcgcgacaacgcccgtgatgcccgccgccgcctaccccgcgcgacaccaccaatggtgcccttccttccccggcacccgcaacccgccagctccgcgcgagccgccggcgggatacccgcctcccccgcgcccccgccagctccgcgcgaggcgccagctccgcgcgtccgccgcagtgatgccgcgcgatgaaggccgcacgggagagacgctgggaaagccgctccttccggcgttgcagtgggggcgtccacagctgtgccatgcccccgccccgtccgagacgccgaccacgacccaggattctcgcttcccgtccacgtccgtgattttcccagcgaagctgaccacgcctccctgtacgcacctcccgacatcctcgccgacatgctcgcactcctgtccccgtctgagatcctcgcgtcggcgccttcggtggaagtccggaatcgcccggctctcctccaccgcgccgccagcctcactgagaagagttcatctgcctcctcctcaacgcttgaccccaccgccgctggatccaacaccctgccctcgtccttcttctccgacctactcaccagtgacgacgtgggcaccctggccagacgcacgccatggacagcaggtgggcaggaacaccttctacgtggatcctcttctcccgtgctcctcgacgcacgagagcgagctcggactggatcctctcctaccgctccatgcaggtgctcctccgcccgatcccaatgtaaaacctacagttttgttagatgttgctgccactgtttggagaagactcgcgctagaaagcggtactgggtgaaaactgcagagcgatctagagctcgcaagcctgccattgctctctgtagcaatagaaatcccccaacccacccacccacacaagttgcaattgccctcttacatctattttttggtggaacaactaaattgacattgaagaagttttttggagtgtgctcgttctgcaattagaagacttctgtaagatcattcttctctttgtttttttcatttagaacctatgttggttttctgattttcatggaccacataaatagttatgtattctgtttcatagattcatgtctatataacaatttatttgaaaggcatttatctgtgcagggagagttctataattattctggtttgtagtccgtgaatttatagtggattgcttgaggtacaaatttgtatataacttctattaagttgctcctaatttccttctatcgcttgtcattctattagatgatgcaattttttgaggtatagatagcaatttttgtattcaaacaaaacaaagaaacaagttatctttaattgacattctatcattgactatcagtgtttaagctatatatttgtgaagataaattgtttatacactaataactgagtttgatgttgtagatactgggtaacaggaatgcatgtttatgattttcgttttgaccttgcattgcatctacaatgaccagaggatgcagtctatggatccagttaatgtgtatggaaatccaatggaaggtgacatgattacaacagggacacctcttgttgtcccaccacttattgacatgattagcaatgacccaatttttgcccattgctgaagatgggatgcaggaggcctctatcaagtaggtcaattacctcattaacagggacacctcttgttgccccaccacttattgatatgattagcaatgacccaattttttggtaatatatgaacatgattggttgttaaatatgcagagcagtttgtataataatcaactgcctcagcatattgtaatttcttggttcttgttctcactacttcattgtatttatagctcattgctgaagcatgggatgcaggaggcctctatcaagtaggtcaatttcctcactagaatgtttggttagagtggaatgtaaaggtctggacactctatgaattcgatgatctcgagagcatcattgataggacactaaagcgcgattttgacaccgaggaagcactctggttgcttaagataggtcttgtgtgcatcccggatagccctaagatcaagccctccatgtcaatggttgccaagatgctgcaaggtgagtgtgctgtgagtgacaggatcatgaggcctggcctgatcacagacgtcatggacctgaaagtcaggatggtagagccgatttagttcagcttgacatcatgctcgagcactgccgcaccggaccttgttggggatttcctcgattaaaatataagctccttgatatggttctgtaacatagttctgcaatgctcctttatttagttctttactttttttgttaagatatgaggtgtagcgatacaatatgtctactaacagcgtttgtgttcttgatagttcatttaggattgaatgaagttactggtatgaccttgtcgagactgaagtaaggagggatagagctaaaaactctcttggcacaactataaagttcaagctatatgggcgtgtttggatggcagcctcccatgcaactgcctggcaggcaaatgatcctagccacaccacaggcataggaaatcgaacggtcggcattgtttcctgggccagctgataaaatccattgaagtgcaagaggccgataaacttaggcgtatagtgctggatgctccatccactggacatacacttaagcttctgtcagtttctgattggattgaaatgttccttactttgagcattaagacagttccaccacattctggcgccgccttcgtctgatcctggaggcaattggagccgctgcaagtcggatcctggtggatgcagcgcaacacagatcgcaaccctccaaggactgagaagtggaatgttgacatctctgagacagtctgaaagcaaaccgaaggcaggggtgttcatcaactcctgcttcgcgcattgctagagtgagctacaggacacatggttcgcaccaaattctccatccatatataacaagaaaattgcagaggtggtaggtgattggtactttgaaagaggagctgacgtggagattgactgcgcctatccctgtgattcacagtcttgtcgcaaccttataccaattgataaggctgaccatcctagattaaacttcaaagaccggtaccctgagccatacagagattctcatccgactgcccccgttgctgtgcatggatgtcaggtgtcattactgtaatgtagtggtgaaataggtagattaaaacaatgaaatttatatgtggctaggatcataaatgaattgcaaaattttttctcagaacagtataacacatatttgtacataagttgttgtgttattatatgtttccgttgcaacgca

SEQ ID NO: 44081 - DNA, 2413 bp, Zea Mays
gacgtagcttatcgtagctattctcgtgtccctctcccagactcccaccaccacacaaactgccctcgcggcctcgcccgtcgcccctctcgatcacttctctcccgacactctctcactcccgtgtcgtgtctagcgccgacggcgttgctaccggagccggccagcggccacgatgcctacaatgcacgcgcttcgcctatgcccgctgctctccaccatccgatccacaccaccgcgggccactgccgcagcccgccagggcgcgctcttcgtcgcccgctgctcctccgccgggacgccgtcagccgcccaggcgctcaagttcaatcccgaccaagccagttgaggggcagaagactgggactagtggcctgaggaaaaaggtgaaagtattccagcaggagaactaccttgctaattggattcaggctctattcaattccttgccccctgaagattatgtgggtgcaacccttgtacttgggggtgatggccggtactttaacaaggaggctgctcagatcatcattaagattgcagctggaaatggagttcagaagatcatagttggcaggaatggtctactgtcaacacctgctgtatctgctgtaattcgtaaaagaaaagccaatggcggctttatcatgagtgcaagccataatccaggtggaccagacaatgactggggtattaagtttaactacagcagtggacagccagcaccggagacgattactgatcaaatttatggaaacacactatcaatttctgaaataaaaacagcagacattcctgatactgatttgtcctctgttggagttgtaagctatggtgatttcgccatagaagtgatagatcctgtttcagattaccttgaactaatggagaatgtgtttgacttccaacttatcaaggatttgctttctcggcctgatttcaggttcatatttgatgcaatgcatgcaattactggtgcgtatgccggacccatttttgttgagaaacttggagctgatccggactgcatattaaatggggtgcctcttgaagattttggaaatggccatccagatccaaatctaacttacgctaaggagcttgtttttactatgtttggaacccatgcccctgactttggtgcagcaagtgatggtgatggtgatcggaacatgattcttgggaaaaggttctttattaccccatcagactctgttgcaataattgcagccaatgcacagacagcaattccttatttccagtttggtacaaaaggactcgcgagatcaatgccaaccagtggtgctcttgatcgtgttgccgagaaattgaatgttccattctttgaggttccaacaggctggaaattttttggcaacctaatggatgcaggaaaattgtctatttgtggagaggaaagttttgggactggatctgatcacatcagagagaaggatggcatctgggctgttctggcttggctttccatacttgcacaccggaacaaggataagaaggtcggagagagattagtgtcagttgaagatattgctatggagcactggaaaacctatggcaggaatttcttttctagatacgattatgaggcgtgtgaatcacacagtgcaaaccagatgatggatcaccttagagatgttatggcaaatagcaagcctggagagaaatacggaaattacaccctccaatttgctgatgatttcagctatactgatcctgtagacggtagtacggtatcaaaacaaggacttcgatttgttttcactgatggatctaggattatcttccggctttcgggaaccggatctgctggagctactatccgcctctacatagaacaatttgaatctgatatctcgaagcatagtctcgatgctcaaacagctttgaagcctttaatagacctggctttgtctgtttcgaagctcaaggacttcacaggaagagagaaacctactgtcataacataggccctgtttgtttcggcttttggcagcttctggccaccaaaagctactgcgtactgtcaaacgctcagcttttcagccagcttctataaaattcgttgggggcaaaaaccatctaaaatcaaagaattgaactgatggaaaatatgtatcattaggacaaattccgccagaataagttgttcctcggaagtgttttgagcacctccagcatcttccaaatatatctccaataagatattagtgggataacatatggcagatgttatcaaataatgtaaatatagatcgaacacgagacatgttttacgtggagaactcttgtatgaaaaaaaaatcatggatgctaactcgtgattttcattgtattcactatactagtaaagttcacaaaacacggaagatgagtagtcgactcttgatgtgcg

SEQ ID NO: 44082 - DNA, 256 bp, Zea Mays
aattgaactcgctgtgaagatgcagtgtacccgcggcaagacggaaagaccccgtgaacctttactatagcttgacactgaacactggtccttgaggtgtaggataagtgggaggctttgaagtgtggacgccagtctgcatggagccttccttgaaataccaccctttattgctggtgttctaacgtagacccgtaatccgggtgcggacagagtctggtgcgaattagactggggcggtctcctcccacagagt

SEQ ID NO: 44083 - DNA, 330 bp, Zea Mays
ctatacttgccattactgtacctcatctgacataataaatggctagacatacatatccatattaaaaaattcccaaaaccaaatgagaaactaaaattttagaccaaacttattgtatcccttttcttacaaatctcgaggacgagattatttgtaagggggtagaatttgtaacaccaagaaaatcctattttgtgatttctaaatatttctccaaaagattaagaattaaaatgactattaatatgagttcctcacttttaaagttatttcctcctaaaataaatagccagcaatactaaaatgttgttagaacctaaaacttttgaa

SEQ ID NO: 44084 - DNA, 2402 bp, Zea Mays
cctacttagttcacatgaaatttattgtcggtagagaaaagataatacacaggaggaactgtgcatatttgattttgatgagcgtgtgtatagttatacccttgaattcagccactagaaaattgtcataagagtccatccatggattgcagccattgctgaatgctaaatgaaattggttgtggtctaagtcttaacacacttttgaagtagcataaaaaagtatcagttcattcagagtatttttgttgcacctatattaccactgtagaaactatcacaattcacaaaaaaacattttttaatcacccatttccaaaaactacatacttgttcatattcttttcacaaaatgacacatccataacatgaaatggaactgaaatgatagacttgtctgagttactggatctagatgaatttgacattctagatgtgattgcccttccagggtgatatatttccctgttcctcgtgtcacacataaaaacaggtggaataaacacatggatcaaaacaataagcatgatggtgctcttacagaagtgcagttttgtaaaattatgcataattatacataatgctttgaaacatgtgcttaaatgtgtggttgtgatatttcttttagaatgacagtagtggtttgctatgaaatttactctctctctttctctctctctctctctctctctctctctctctctctctctctcataaaatggatgactattcaggtaaacttctcatgtagtttcaggactcacagccctataaaattttcatgctgggggtttggggctgtattgcaaagttatgtatttcacatatccatgcctgtttgcagatattatgtggtcataataatgaagtttggtttgtaaggttctcaaataatggaagctacctggtgtcatcttcaagtgattgcactgccataatttggaagtacatgttgctaggtggaaaatgatgatacattgaccaagaagcactgcctccagggtcacgaaaaaccaatttcctttgcttcctggagcccaaatgacagaatgctgctcacttgtggtactggtgaatcattaaaactgtggaatgttgatactggtgaatgtaaccttaaattcagaggctcagcagactgcatcatcagttcatgtgcatggtttcctaattcggagaaaatagtatgtgccagctcggagcctgcaagtgctccaaataggatcttcacttgtgatctagaaggccaaaatctggaagtatgggctggagatagaataccaaaagtcagtgatctcgctgtgacacctgatggccgacacctaatctttgtatcttgcaacgatatctggattagggaacttccaagggggcgggaatggagatttcgtgagaagcagacgatttcatctctttctctctcaggtgatgggcagtcactcattgtgaaccttaacagtcaggagattcatctgtggaaaattaatgaaagttgtactgtgcctgaaaagttcatggggcacaagcaagacaagtttgtgattaggtcttgctttggtggttcaaactcttcgttcattgctagtggcagtgaggattcacaggtctacatttggaagaggcacgtggagatgccgattaaggttctacatggccacacgatgattgtgaactgtgtaagctggaatcctgcaaggccccacatgctggcttctgctagcgacgaccgcacggttcgaatatgggtagggcgcaaaaatgcaacaaagtaaacgctgttgaagtgtgaagttttgtatgtctgtgtaaatagttgtacatctggactgcatccacaaacctgtttgggacaatgctctgttcttcacccctgatgaatatgtcgtcgtagctatttgttcagaaataaacctgcaacagccataggtagccggtgctgctgtgtccagatgtgtgcctggctaaccggtgagttttgacatgtgtacaggacaaagatgcatcagaactttgtacatcttgttagtatatgccttggacactcgaagtgctgaaatatgccttctgttgctgtggatctagtgttcgtgtccttttatctttttcgcttggttcatgtgctatcttgctttttgtttagaataccccataacttctttctgatgtccttttcaggtgactttgcaacctttggcatggtcaacaaatatgtataagatttgtaacagcattataattggctagaatcgtgcactagcaaactgtccagcacctcttagcacattttatgtacttgtagttttgctagacagttttggggtgatatcttttcacccttgagagaggggatgaatagatgatattgtaaattttgctcaaaacaacacaaacttggtttataa

SEQ ID NO: 44085 - DNA, 3891 bp, Zea Mays
ctgacccccatttcgttccttccagatctccccgcccccgcatctcgcccgccagctaccggcgagtgggcgcgcgcccgccgccgccgcgatgtacctggcgtacgggtggccgcagtcgatccctctggacccggacgactcggaccgcgtggtcctcctccgcgtgctcggccgcctcctcctcgccgtctgtccggcttcgcttcacctctggtccgccgcccaacaccgggtccgcctagcccgctccgatcgctccccggagtccctcgccacccatggccacaacgcgcacgccgcgtggagccccgacgccaggaccgtcgccgtcctgacctcttccttctacctctacgtttacaaggttcagcactcgggaaagcaactgatcgtcggtggcaagcaggtcccggggctttgcctggctagtatatccctaatcatcaccgagaaggttcctctcgccaatggcgttgctataacgagcaatttcgtgtgtgacagcaaaagcatgctcctcggactatccaatgggcatgtgcaggtcgtgtcctggaacgctgagttctcagacagcttcaagcttggttgctatgtgtgttcatctgagaaacctactgctgccgtagatgcgttggtgtttgatcctcccagtttgcgagaaagctctaacgcaaggcctgctccttgctgcacaggcaattcttctattgtccatgttgagctgtcggtgaagctgagattgctggttgctttgtactcaggctgtcgcattgccctctgtactattggtaagaagggattaaggcagcctggcagcaccagagtggagagatggttggacactgatgatgcgatgtgtacttctgtggcttctgagcaacagattcttgctgtcgggtgcagtagaggtgttgttgaattgtatgatctagcagaaaacacacgccatatacgaaccatttcgttgtatgattgggggtattcagtggaagataccggtcctgttgcctgtatatcttggacgcctgacaattgtgctcttgcagttgggtggaaatttaggggacttactgtatggtctgtgtctggatgtcgattgatgtgtactattcgtcaaactggttcaaattctgcctcatctcctatggtgaaacctagcgctctaaaatttgagcctcttatgggaggaacatcacacattcaatgggatgataatggatataagttatttgctgtcgaagaaagcttgtcagaaagggttcttgctttctcatttgccaaatgttgcccaaacagagggctttcaggcacaacatattcccaccaggttctttatggggaagatcgaatccttttggtgcaaccggatgatgccgatgaactgaagatattgcatcttaatgttccaatttcatacatttcccagaactggccagttctacatgtggtggcaagcaatgatgggatgtacttggcagttgctggctctcacggactagtgctatatgatttgcgaaataaaaggtggcgtttttttggtgatgttacacaagagcaaaagatccaatgcaaaggcctattgtggatgagaaaaattgttattgtgtgcaactatgttgaatcgtcaaacacgtatgagctcctctttttcccaagatatcatcttgattatagttctttactctaccggaaacaactgcttggaaggccaattgtcatggatgttttccaggattatatattagttacttacagtccattcgatgtacatatctaccatgtggtggtctcgggagaattatctcctgctagcaatccagttttaaagctttcaacattgcgagaactttcaatcatgagtccaaaaagcccacctgtttcaatgcgcttcattcctgaacaaaatgacaaaggagcgctgacagaagatactcatggattttctgatcttttgtcccagcaaccatcaagatgtttgatcttgcggaccaatggggagctttctgtgcttgacatggacgatggacatgaacacactctcacaaattcaattgaactcttttgggtcacctgttcgcagtttgaagagaagggtagtcttatcaaggaggtttcatggcttgattacggtcatcggggtgtggtacccatcacatggagcagatcgttttaagcaagaggattttttgcagttggacccggagcttgagtttgatcgtgaggtgtatcctcttggtcttcttccaaatgttggtgtggttgttggtgtttctcagagaatgtccttctcaactgcggagtttccatgctttgagccttcacctcaagcccaaacaatattgcattgtttattacgacatctccttcagagggacaagattgaagaggctttgctcttggcaaatttgtccgcagaaaaacctcatttctctcactgtttagagtggcttctgtttacagtatttgatgcagatatatcaaggccaagtgcttcaaaaaatcaggcttcacaaaaagttgattctcccaagaaatctcttcttgagaaaacttgtgacctactacggaattttcctgaatatatggatgttgtagtcagcgttgctaggaaaactgatggacgacactgggctgatctgttctctgcagctggacgatccacagagatgtttgaggaatgcttccaacagaggtggtacaggactgctgcttgctacatactggtcattgctaagctggagggccctgcagtcagtcagtattgtgcactccgtttgctacaagctacacttgatgagtctttgtatgagcttgcaggggagttggttcgcttcttactaagatctggaagagattttgagaatgccacttcagactctgagaagctatctccaagatttctaggctattttctgttccgttcaccttataagcggcaatcttctgatttgaaaagtaactcaacgaaagaacttagtccacatattgcttctgttatgaacattctagagcgccatgctagctatttgatgtctggcaaggagctttctaaactcgtcgcttttgtcaaggggactcaatttgatcttgtggaatatctacaacgagaaaggcaagggtctgctcgtctggagaattttgcttctgcactcgaactgattggacaaaagctccaaatggatacactgcaaagccgacttgatgcagagttccttctagctcatatgtgttcagtcaagtttaaggaatggatcgtggtgctagctactttgttgcggcgtacagaggttttggtggatctctttcagcatgatttgcgattgtggaaagcatatagcattactctacagtcacatgatgtattcagggaatatcttgaccttcttaatatcttggaggaacagctttcgtctgtctctgatcttacattgcagaatggaccattgtcatgaatgctggacggtgacactgattgaaaaaaacaactgaatacggcgttttagccttgagttaattaacacatacggcgggaccaggaatctgatgtaaatagattattcagggtgtttttctctttgagcaacaccccgaggtgctatggcagttttttgtacagtgatcagctaagcacctattgttgtatcattagtttgttgcagcggagttgagtctgcattcttcgccttactgtaaatatgtgctgcgcccttaacattgtaagccatataccattctgagcagcaagttcttttctctgttccatagaatcgtgtttaaagctagaagcctagaacatgtagatagtcttcacctgatgtttgtagactccgagatattattaaaactgacactatgatttcttaattgcattttttccatggcata

SEQ ID NO: 44086 - DNA, 430 bp, Zea Mays
ggccgtcgttgctcctatgtgcgcgcgtgcccaggttccagctcgctccaaaaaaaatctcgtcgtcattccgtgtgccatcatgaaatcccgagatttgggtgaagaagcgattctcgcgtggcgctcgtcaaatattcgacgatctgcttaaacatgtgatcgtcgtagtttctgcaattccaagtcgaatttaggtaagctgcttcactattttttattagctgactaggttgatgaatcaaatagaattgttgaacacgataattttcttgatttagtatacgtgggttgaagtcagcattttagatgcgattcatatgcagggtaaatggtagacatatctaaattatgtgaccaaattaataatacaaattataggactagtgtttctcatgtctggcaggtagatgtatttcttcgatggttg

SEQ ID NO: 44087 - DNA, 3109 bp, Zea Mays
gcctattgccttgcctgccccttccatcctccttccccacccctccttccatcctcgcccgcgcgctccacacgtccccgccgtcgcgctcgccttccatcctcctccccaccccctccttccatcctcgctcgcgcgctccgcatgtccccgccgtcgcgctcgcctccctcctctttgttgcctccgcgtcggcctccaccccgctctccgacacgcttgccgtcgtcttggatttctggtgcactctcttctctacgacgcgagcaagggcggcgcttgccatggcatcgacgggaaccaggcatcactctccctatctcttgggtacgcgtttatttcatctctagggtctagagtttagtagcaccgccgccaacatccccgccgttgcgacaagcaccgaccgctcgcttccccctccctcctctcgtcggcgccaacgagccgcatgccgtgtgtcgtgtgggtcggctacccgggtatcggcgccagcgagccctcgccccccatccccctgccaatctcggcgtcggcgcgccgctcgccatccccgcaggccacgcccatgcccccgcctccatagtccctgtcatcggcgacctcagatccaacaggatggtacaggcaggaggatcaggccaccgtcgaggaacgcgctcttcgctgtgttccagcgagaagatgagggatcgagggcggcgcaggtggcgagctcgtgggcggaacagactggtgagagcaagaggatggatcaggagcttgagccccaggaggggagctgtttgagcggatgcccaccaggaacaatgtttcctagatcacgatgtttgggccacttttggaagaggtcagggatgacatgttttcaagcttggaggacatcaccaacgcaccatatgcagatctgctctctattaattcaatgaggaaaggaaaggggtcatagaaattagtcttggcagatggaggggaacgtctcaatgactgagagacatgccagtgaggagcagtttagtcggttcttgctttatgaagtggatgcaattagaaagacgtacgagcgggccaacatctcgcggtggctcgccttgggcaaccggacctgcccgaccacgatgcaggagctctaggacgacgccctcacccccaacgccactctccgacaactcatcgccgcctggttctcccgcctggtttctgcattttgttttcttatctgtcaatcatgtttttccatattactgcaggtgggtctgattaattatttaaatgtagtttatcttagatattgtttgaacgtatgggatgttggaggacagaagacaatcatgtcttactggagaaattactttgagcagactaatgggttagtttggtttgctgatagttcagacataaggaggcttgatgattgccgtgctgaactccacaatctcttgaaagaagaggataaaggtttacctatctaggcagtgttctattgttgatttttgcaaataagcaagacatgcaaggagctctaaaaccaactggaatcgcgaagattttacttagttcgatgtgggagcaaaaggatatgccaaattgaatgtagtttcatcagttatgctctattatggatgttcagaggcatccaatttcagtgtgtactgcaatacttgggtccacctagtcactctccgacagctcatcgccgcttggttctcctgtcggtacacaaggtttaagaagcgctacgcggacttccacggccgcgctgccgatctcgtccacggcctccggggcacggcgatgcccaggagacaggccctcgaggaagagcaatgtacagaagagaaaggtatctcgactattccaaagcacaagtatgcatccaaagcctgttccccaaaaggtgcgtgaactttgttcttgattttgtcagactaaatgtgggtgaactttgtactgcagtttttgtttaaataaactttggactgtttaaattactgatgcatccaaccactgtttttctttattgtttgttgatacacgaccagatgcccagttgagttcacccaaaaggtttattacaacacgaaaaaatctgagataaaatgttttttatttaaatgaactttgtattgcagtatttatagacatattttggcacccggtcgtttactatttttgttttattaatacctcttgtgtttccctttcacttcctttgtataaactgtatgcctctgttttcattctcaggaacctttatctgcagctctctctgcgcttactcttgttgtgcaatttaatgggtggctatcatttttcctcttgctttattataaacttcctctgcggccagaaactcacaagacatactatgaatacactggcttgtggcacatctatgggctccttgccatgaattcatggttctggagtgccatatatcacagttgtgacacaatttggacagaaaaagctatatttttcatcagatgctgcctttctaggattaatcattctggaacttgtactaacaattgaagcaagtggaggcatagcaccaattgtgtctgtgctgcagctctggatgtcagtagacaagaggtgtatcagagagaagcacttcaaggttaatttgttgagcaaattggagatgctggattttgtattttggttgctcatgggtggtgaatgatctgacgacttcagaagaggatagatctgagattacctttcatgcatgtcaaggaagttaagtagctgatgccatcaaagcaatggagaaacgtcaggtgaaccgcgagcagaattctgtggcgcatttgttagcgcagttagttaggactctgttcatacaactgttcgattaagccaaatacctaatttagttttatattggttgttgtcaaagaatttgtgaaatattgaggttgataatatatgtggcgttcgtttttatgtaatcattgttcactaatattttgtcgaatattttatattatatagacattactaagaacgtaaggggtcgctcgtgctctgtaaaggtacaaacaatcatgattgtggaggagcgtgacggcgagggtcgattggcgtccgaccacgatttgca

SEQ ID NO: 44088 - DNA, 2987 bp, Zea Mays
cacacagcacacaggaaagcacaccatcttctgtctccataaacaagctacctgcagcgatgtgctccactgcagtgctgctagttcgcacatgcgttgtgcttgtgtgtttggccgccttggcgcgagcgccggccaaggtccatgctgcctccggcaccggggatgggctccttgctatccctaccaacgcctccctgtcgcactgcccctcttggtgcggggatgtccaaatctcgtacccgttcgggatagggccgggctgcttccgtcaaggcttcgagctcacctgcgatcaaacagctccttctcccaggctcttcttcgtgtcgcggaacagctcgatccaggtgacttctctatatgtcggcagcagtgtggttttggcttcagctgttgggttcaacgtcaccatgagcgcaggcgtggacacctacaccaagtcttgggaggcccctactgccactggtgtcagtttttatgcagatcataattttctgtacactgttggatgtggtgtctacgtctacgtgttcggtgataatatgacagatatcattggttattgcacgagtatttgcacagataacagagagatcatggagagcgttggtgcctgtgaagggttaggctgctgcagcattctaatgcgtggcggccaaggcttcactctcaaactaggtcgcctcaatagtaccattccacagttcggtgaagcgctctccagtgtcaagattatcttttcggaatactatgaattcgttactgatgatgtttatgcaagttgggtgaatacaagcaatgttcatggcatagtacttgacattgcaatcacggaccaaccaagctgcgcgagtgcccggtcccaagagaacaaggatacctacgcatgcactagtgaaagcatctgcgacgacgttcaaggaggctacagttgcgtctgccctggtcaaatagagggcaacccctatattaaagatggctgcatagaggcaccgagtattaggaactgtacgagattatgtggaaacataagcgttccatttccttttgggatcgaagaaggctgttacgcaaatgataacctacgactcaactgcacaattaacgacactactcttattcttgatcgagggtacgcacagtattgtgtgaccaatttgtcacttgatgatgggcttttgatggttacaaacatgctgaatgccacaagcttcaacaatatggagagggtagtcatcactaactatgacggttactaccagaacggcttctattcaaccgatgaggacgttgtggatggtaattatgatttctctcaggaggatacaacaataaaatggtttatagcaaacataacttgtcagaaagcaatgcaaaataatgctacatatgcgtgcgtaagtgacaacagtatatgcaaagatgtcatgcgagggaatatacgtgacgggtaccgctgcaagtgttccgatggcttccaaggaaacccataccttcaaaataattgtacagatattaatgagtgctttattccaaataaatgcaatggaatatgccacaattttgatggaggcttcaattgtacaagttgccctcatgggaaagagtatgatccaaaaaatcaaaaatgtgtcatgtcagctaagcagcgtattctaatttttgggattgtaattgggcttgtttgtggtcttggatccataagttttgcacttggtgcaattgtactcaccggtaagtggaaaaaaggtatccaaaggagaattcgaagagagtacttcaagaaaaatcaaggtctactcttggagcaactaatatcgaatgaaaatgctacaaacaaaacaaagatattcactttggatgaattagaggaagcaaccaacaagtttgatgctactcgtgttctaggtcatggtgggcatggcactgtttacaaagggattttggctgatcagcgtgtcgtggctataaaaaaatctaaaatagtggagcaaatagagatagatcagttcatcaatgaggttgctattttatctcaaatcattcaccgcaatgtggtgaagctttttggttgttgcctagaagatgaggtacccttgctagtctatgagttcatatcaaatggcactttgtatgacattcttcatgaaaatattgcaacaaaatgcttgttctcatgggatgatcgaattaggattgcaacggaagcatcaggagcacttgcttatctacactcagctgctgcaataccaattttccatagagatgtgaagtcttctaatatactcttggacgacaacttcactgtaaaggtttcagattttggtgcttcaagatctctatcccttgatgaaacacatgtggtgacaattgtccaaggaacatttggttatttagatccagagtactattatactggttctctaactgagaagagtgatgtgtatagttttggagtgatacttgtggaacttttgacaagaaagaaaccaatttttatcaatgaatcgagtgccaaacaaaacttatctcattacttcattgaaggactacaggaaggggctctcatggaaataatagattctcaagttgtggaagaggcagaccaagaagagattaatgatatctcctcacttatagaaacgtgcttaagatccaaaggagggcatagaccaagcatgaaagaagtagatatgagattgcaatgtctaagaacaaagaggctacggaataaaacacatcttttgattgaaaagggtggagaaatggaacctttgttatgcgtagaagctcagcacccacatgaacgtatcaatccaatttataatgaggaacatttaacaattccaatgatgtctgggtgctacagtttggagcaagaacttgcggcagcatccagtatggttcgctaacttggtatttgcttggatgttggacacatctatagtaaccatctattttcagagaggaactatatggtatat

SEQ ID NO: 44089 - DNA, 1696 bp, Zea Mays
agaccccctccccattgtcagatcgatccttcatcgccccccgatgacaacggcttctcggatgctagggcacctgccacccacccatctccctcccatcccagatccctcgcgccatggccaacgcctccccccagtggcttacgctagcgcacctgcccacctccctccctctcccccgcccagccatggccatcgcctttgactctccgacctcctcccccgctgaaattcctgctctgaaatacgctcgcttctgctgcctagatctggtacccctgttgtcaccacgtttttgccaccaccgtcaccagctcagagctttccctccattgcttcctcctcgtcgtggtctcctctgtgtcactccgctcgagctcgccatcctcttgccagcgcgactccgtggagcgtgcgagacagtgccggtggccgcggagacccgccacggggacatggaggggtaggtgttgccacagttcgtagatttcaacgcctggtacacacacgcgatctccactaccgagctcgtggactacagactccaaaactaaatcaacaagttggagatcctccttcctgcagcgcagaagcacagctggttctttcaggcgcagcaaactctgttcagataaaaatttgtgttaactgatgctcaaattactgaagaatggaatagaggagctgcaccaagttcacgcttcatattcgcagagaagaatgcaaactatgttctgcttacctgaacaataagtgtcttgagaagcttcttgtaagtgaggtgatctctacttatgcgcagtagctctttgcttgctgacttcaacatatctgttaccaaatcatcctgagcttgaaggactttaattctagaagcattgagctgcattgagtaatcactgcataagaccacacacagtaatatcagtgaattgatattttttacacaaaagaaaaatagtatggtcaccggcatatgctaaagtggggaaatatccataatggcccgtagacaatagtagctatgaagtgtgacataggtaaaacagaaacaagtcacaagaatgggaataagaaattgagttagaactgctatttacattttcttcttgatgccaataacttgctagctggattccaccgtggtcaagccttgtgatgaaatcagatgatgatgacgcaattggcttctgtgacctacaattatgggcatgctgatgctacctagaacctcactacactggatgacagggcgctactttttctagtgtagcatacaagctccaatcggttggctttggtgacaatggagggaggagggaagggtagtggagtttggtatatagatccacccagatggagtggagtacagtacaatgatagacagtgaagagacgagaagattcaattttatttgagttgagcctcaaagttatctacaacagtccactctacagtactatagtgggcaacaaatgtatggacatatgcacgctttgttagtcaaaaggtttagaaatttaggtgtgggagaaagaaaaaaaataaccttgtgaactgcgaagttttttttctcttaaatctcatgataacatttagccatatacagtgactgagaggtgagagcacgctacctgcttggttcctggaacctccttgacgtggagcgaatgcaacaggttcctcaggatgcggg

SEQ ID NO: 44090 - DNA, 3128 bp, Zea Mays
agatctggggcagggcaaggagagggcgaggtgcgacaggagaggtagggaggaaccactcacaactcgattgcataaaaaactcgggtccggaagctggttcctgtctgacgacgctgtactcaagccacacgtcgttcgagctgtggcggactgcccgtgaagcgcggggagaagctcaaactccaccgggttttaataaaaggaacagccacggactctgagtctctgacgctgccttttgctctccccttccaccccgtctgcccgcgcgcgctgtctcgtggcgacaactgggcgaccgccgccgccgtcgctgccgccgctacgccaagaagctaggtcttcatcggtcccttcgtcgagattttctccggagacaagcacccagcaggggactacaagattgattttgatggattatgacaagtctagaagaagtaactccaaaaagaggagacattccaattctgatgacggaaagaggaaacggttgagctctaggcatgatgacacatctatgtcctctgagccaattgaaaccatctacaggatattgtgcccggcaaaaaagataggcagtgtcttgggaagaggtggtgacattgttaaggcccttagagaggaaactaaagccaagataagggttgccgattccattcctggtgcagatgagagagtaattatcatcttcaattaccaaaatcaacctgaacttactgatgaagcagctgaaaaacaaattagtgatggcttagggaacatgaaaccccattgctttgcccaagatgccttattgaagatacatgataagattgtggctgatgaaatttatgatgaagtcgctcatgatgaaagttctgatgatgtcactgctcgaattttggttcaaggcaatcaagttggctgccttctaggaaaaggtggctccattatacaacaactacgaagtgatactggtgctgggatccgtgtcttgtcatctgaaaaccttccccagtgtgcacttcaaagtgatgaactggtgcagatatctggagcaccatctcttgtaagaaaagctctatatgaaatatctactcgtctccatcagcatcctcgtaaggaaaatagacctcttgaacaaataatagatgcaagcacacaaaggaaacacgagtctccaacactgcaacatgaaaatccaatgttgccgcacctgcatagtcatcatccacctccaatacccctgcttgacccatacagaagtggacctcagtatcctgttagtgaaactgaagagttttctatcagaatcctatgtgcttctgagctcattggttcagttattgggaaaagtggggctaatgttaggcgggtagagcagcagactggtgctcgcattaaagttcaagagattgacaaagatgcttctggagaaaggctgatcattgtttcatctaacgagataccaactgaaccaatatccccaacaattgaggcactcattttgctccacgataaagtgggcaggtgattactgaaatgagaagacgaactggggctgaaattcgagtttactcgaaggcagataaaccaaaatacttgtcttttggtgatgaacttgtgcaggttgcagggcctccagctattgcaagaggagccctcacagagattgcttcgaggcttagaactaggactttgagagatacaagtactgccaataatcctccaccttttgccccttccgatgatcctactgtcgatatgcctagcagaaaattaacactatatggagggcctaccaatgatacaccgtatggaaggcctgccaatgatccactgtatggaaggcctgccattgatccaccatttggaagacctaccaacgatcgaccatacggaaggcctgccatcgttccaccatttggaagacctaccaatgatccaccatatggaaggcctgccaatgatccaccatatgaaaggcctaccaatgatccaccatatggacgaccttccagtactatagcatatggaagaccaaacagaagtgcacctcgtgatccttcagatgcatatcctgtagactacttctctaaaagagaacatcctagtggaggccctatgtttactagtaatgccccatcagctgcttatgagagatatgcagcacccacacactttcctactagagaacctccctcaactttcagtcatcgttcctatcgtgaccacatgcctactgatagctactctagtaggggtacacagaaattagacatcacgagagatggaaattcagatgcttatgattatacagaggctgctggacaaattcatggactggaggactatagaggactgccaagtgcttctggaaggttctcgagcactattgaactaaggattccaaatagttctttggagtctattgttggtgttggcggggtcaatttagcagagatacgtcagatttctggtgcaagactgaggctacatgaggctcatgctggttcttctgagtctgtggtggagatccagggcacactggaccaagcaaaagctgcgcagagcctcctggagggctttatcagcgcgaacagcaggcagcagcaatcccattcttctcgcatgccactttacccaagatggggatagcttctggttgtggcaggggaaaaccgagtcagcagggttggctggagttatctcagactgcagattagatgcatcgatgatgttaatggtagctgtttaaattgaccgtgcaagcatgataacttatattatgccataggacaagtaatgctgattctctcatgaaatactaagtgacaagctgtctctgtagttgtatttgtttctgaatgtttgaaccctactgttacaacggctgctattttaggtcagatttcagaggccggataattatgttatctgcagagttgggccaaaaaaaaaagctcaatctggttgagactggcttcacccatgccgtttcatttttagaagttacagcatctctgcaaaatatatgggtaaggcctcttggaacgcatgaatttcatagaaatcagtttattttctcagaaaaaacatgggaaacaggggaaaaaaatcccacgttccaagaggcctaaagtttg

SEQ ID NO: 44091 - DNA, 209 bp, Zea Mays
gtcgcactaaggaacatgtccattggagacgtgtgtcctaaggaatccgaagagcctataaaagcacaatatcaactgtcatcttccatgcaagcatctccaccaactcaagatgaggatcaggctcaagacaatgatgatgaaaatcaagaagatgagccacctcaagaagaggacaatgatcaagggggagatgaagttgatcaaga

SEQ ID NO: 44092 - DNA, 960 bp, Zea Mays
ttttggttgtggagtttggcaaggttcagtgtccttgggcagggcatgcaaacctgcgtggagctgaagacaggccacgtatgattggtccatgcgttgctggcacccttggagtctctcttcctcatgctgtggttgagctcggtgacacctgctccttattcaatgatataaaacttgattcagtgaggatgctccctgtccttaagtctggtccgtgtttatcaccagagtgacacagctcttgagttcaagtcgatatacatcctctccccagccaatagctcggtctgcccttgtgcttagcgctccaacactcagtctggtgaccacgctcacccaactgctcacctcaccgtggccgagacgcttggagcaattgcatccccgggtaaggagtgttctgcgctctccataataccatgaagctcactgaagaagaattgttaactctaccattgtcaggtggtcagaacagtgccacgctgccgcagaacagagtcgtggacagctccaccgctggctttccaatccatgttgatctcgaatgatcttgtgcgagcactgaaggtaggtcgtcgacgtcgtggccagcgagggcgggtgcttggctcgagcatgaaaacattggagcttgttaacatggacgtgttttgacggtgattatgatgcgcctgaggtgatgaggagtattcaaggagttcctgaagctaggagggcgtttccagttctgggggaggattagttaggtttgggtataagctttggagggttcctaccttcttgctattgtaataagttatgcactttgagtatatcaggacttgtaataaatgtaactcttcctatgtaatgaccttcagttttagaaatgaaaataatattttgtaaagtctttcgctcttatctccgaagtgtgtgtatcgaatgtgattactgtaatatacatgaatgtgggag

SEQ ID NO: 44093 - DNA, 1131 bp, Zea Mays
tctacatctggccgccgctgcgctacaccccgcgcgaccgtgcctatggccgccaccgctacgctccagcgcgccaccacctccgcgtactatgtctggatctctgagcccacctccatcgaggagcgccgccgtctcctgctccaacggcttcacctacccgtcgccttccccgactcacagctcgcctctacctcctgctccagcgacgttcaacgctgccgaagatgtctcgtcctggataactttgggaagccagccatcatagccccagacagcataaacccatggtggtcgctccttgaagaagctgtgaagagtgctggcaacaagcttggcaagttagagatattcccagcctctactaactcttgctacttccggcagatcagattaccagcatttggtttttcatctatgacgaacaccccgatactgctccatgagaccatgaccataatgtggtttgtgtcattggttttggtttggccttctgacgccattaagtttctgagcaaaaacgaatacctcaagggaattgggatatatgagcccattatttacaggtctaatcttttaattctgaaggacatctttaggactgcagtgacgcttcagatacccacagattcagataaaacatggcatatgtagtcatagtgctctccttctatttcctgtcacttgatgacctgtttcacaaagctcaattcatattaaaaaggatactctgcattctcctcatctttaagtacggtgatccatatttttataaacattgtcttggaaagctggaaggtgctatacattatccatgtgttaggtgggcaagtcatcttacgccaatgagaagcttaggttgaagtcaatgccttggcacaactaatgacatggaaaacaacggtctaggttaacatgggcttcagattgcattgctgggaaagatgaaatggaattcaaattttggtggccgcacaagtgtgaagacttgaattcatatatatacttagttaggctcaacgttagcacaaacagttgatgaccaaaattttcaattagtattttagtttggatttagagtacacttatgtataagttatttgataattgcttgtttatgagatattgaat

SEQ ID NO: 44094 - DNA, 1177 bp, Zea Mays
tttgcatctcgcccggattcaaatcccagatttttcacttatttgggtattctattggttaaagattggagaaggaaaaatctaaatttttctcttatcttctccaccgctctctatctttgatttttttctccatcagtcttatccacacctctctgtactctaatcaaggctgataattgtatttttgtttatgcttttggattaagaaaaaggtgtaagaatcccgtttttcttttactctccacgcgtctgtatctccttagccttatcgcattggtcacaggaaccaaatcccttcacgtcattttctccaaaggacaaagccacagagtcttttctccatgccgctttcctactccctctccctgctgatctcgcggcgaccgtcttggctcctcctagcccccagtgtcgaccgcccctgctcctctccatccatggctgtgctcggcctccacctcaagccgtgccctaggatcgtcttccagcacccccttcacacccttgcctccagctcgccagcaccctccgttcggccggccatggccacctcgccgaggccccagccacgacgtcatcccccggtacgttaattgatcacatgctatggaagacgagtggaattgatctccaagtgatgctgatggacgaagctaaaatggatgaatcaaccaagtgccaggatagaagatgctcaccaagtggtcgtcaattaacaacactaacttagtgttatcccaggcaagccccggtgcatttgtcacctccttgttgttataaaacttttatcacttatatgttgcattaggtgataggagttgagtgatgaaacaattgatgcattgccattccttggaatttgattactattccttgattcttgtttataaaagagaactaaagatgcttagccctgcttagataattaaaagttgtttcttttaaaaagatgatgtgttacacgggatatgggaaattgttgtgaaaaagaaattgggatggtgaatccatatggccatgatggattcaacatccagaaaaaatacctctgtcaggtaccaaggattgggaaatggtttaactaaaatgagaccagacgttgagcaggaaaggtcgcccgtttgtgtcgattaaggaccgttctgattgttggcctgctgatctaggacccttt

SEQ ID NO: 44095 - DNA, 766 bp, Zea Mays
cctaaatcctcacatcctctcctcactccctcccatctagcggcggccgggcggcgcctccgcacgctgccggcgttgtgcctcgcctctacgcggctccatcagtcctgcgtggccgtcgagtagatctccgtcacaggcgcgagctcatcaccgtccaggcaagcgcgctctagctcccaagccgcgcgctccaggccgcacgtcatccaggtgtcgagctccaggtcgcgccacgccgcgcgccgtctaggcgtcgagctccaggccgcgccacgcctcgcgctccaggccgtgcgctgtccaggcgtccagctccctaggccgcgcgctccagcgtccagacacgccacgcgctccaggccgcgcgccgtccaggcgtcgagttccaggccgcgcgctccagcggtccagccatatcgccctcagcgtctcagccacatcacgtcgaggcgtccagtggctccagcgtctcagcgtatgataagccatgggatatttgttctcataatgaaggaaacaactcagacggggttgattggttggaagataaatcgggtggtgatgtcggcaagaacaaatcagattacactgaaggcggaggtagtggtagtagaccttggtgccagtgcgtctgctcctgctagggctgcgcccagtcttccacaattgatccatattcgtctgagatcaattagaaaaaggaagccaatacataagagtgtctatgatctatgaaaggtttaccctagagcgatgtggtttc

SEQ ID NO: 44096 - DNA, 2340 bp, Zea Mays
gcaaccaaactttttgtggtgtgttcctacactatgtagacctacatgtatcatttgtggacaattttaacagagttttcaatcgttagtagatttagttcgtttatttgaatttcttcggaaaatttagatttgaactgtaggtcagtcgaaacttgaaaaaccgtgcatgcaaaaatgatattcatgttacttagcataagttacgaccgattccaggagcggaccggaaacttcgagcaacatgctcactaaacatgaccgtgaacttgccatacacatgtttaaaaattgtataaaacacaaacaaagtcagaaaatcctgaaacttgtccacttgtcatgatatcatatgtacaggctgtgataaaaattttagaatgtttggagaaagttgtgggacactatgtgtagaaacctaagagaactacattgaaactctaaacatgaccgaaacaaggctaatttacaaaaaaaaaaaaaaaagttggtgctgagcagacgctggctgcacgggcgctcgctgttgacaggcacggcgctggggcgggaggcggaagggccgttacggcctagtatggcccgcgccatacctcctcgacccggcccaagagaggtgccctagcttccctcccaatcccaccaggccgccgccaccacatcgcgccctcgcccgcttgccgccgaccctgaccggctgagcccctgaccagctcgtccaggcggacagcggcctgcggcaggccagcgcccagccaacagcgactgcctgactggtgagagctccgccttctccccaacccaaatttgatcccctcgcgccgtcatcttcactgccggcgccggcacgggcacggaattgagacgaggacggtacgataattccggaggggagtattgtgggcccacacctgttccctagcgcccagtaggtgaattgagagactgttctctgggaccaacgcgggtaggtgtggccgtgcgagtgggtgcgtgggtcccgggcaacaacaacagctgacggcacaaagttgccaccaccagcgcttggtctgggtctgggatttccacgagcagcgcaacggcgttcgttccttcgattcttctaatctcctaacccaggtgcgcatggtatggccggcctgatcagcttgcgcgccggtccgaggagttcaccgtcacttgcccggtcgtcgtccgcctgggcatcaccaccggcttcacatgtggcggttcgtttgccaagcccactgtttcgctgtgccaaacttcgtaggagccgtagtctactggcagcagcactggagatctctaaggacggttccgccgcggttctggccaacagcctgccttcccaaggggctatcgagacgttgcggaatgccgatgcagtgtgtttcgacgttgatagcaccgtcatcctggacgagggcattgacgagcttgctgatttctgcggggcggggaaagctgttgctgaatggactgcaaaggccatgacagggactgttccgtttgaggaggcgctggcagccaggctgtctttaatcaagccatctctctcccaggtggaggagtgcctggagaagaggccaccaaggatttctcctggaatggctgatttggttaagaagctaaaatccaataatattgatgtgttccttgtgtcaggaggcttccgacacatgatcaaatggcatttgagcttggcattcctcctgaaaacatcactgcaaaccaattgttatttggcacattgggggagtacgccggatttgatcccacagagcccacttcacgcagtgggggtaaagcaaaagcagtgcagcaaataaaacaggaccatggctacaagacagttgttatgattggtgatggcgcaactgatctggaggctcggcaacctggcggagcagacttgttcatctgttacgccggggttcagatgagagagccagtcgcagcacaagctgactgggtggtttttgattttcaagagctgatcactaagttgccatgaattcattacctaccgcaatttatgaacctttgcattgtcggctaaataattgcggccgcattttaaagctgtagatttcactagcaattcttggagataaactgaattattacccggctgtaaagtattttttttatttgttttcccgcattatttgtatgatcctgaaccatgaatgcggaggttgtgttccgacgttgtcagtgaaattgtcctctaagcaaatgttgagtatgtgagtgattaatgaatcacatcacagtttattaagcgccggattcgaaccgtcgtttatgcaagtattattgttggattgagcc

SEQ ID NO: 44097 - DNA, 209 bp, Zea Mays
cgcctcagagacctaaaaggcaagggagagcagtgttgaccagaatgcgaggcctgaaccatcggtccaatgccatggggtccggctccgccaccacggccgtcggctcaactagcagcgcccggtccttgagcaccttcctgccgccgaagcagacgtcgacgggaaggcccctccatcgtcgtccatggccggagatctactggccg

SEQ ID NO: 44098 - DNA, 3122 bp, Zea Mays
tctagaaggcggggctctccttctgcagaaaaagagagagaattaaaaaatattcctctacaaataggtaagtgtaactaaggaaagtaatcctctgatcctatcgctaccaccttcaacccggtgtccttctccttcactcctacttggcactttgacagagacaaaaaccaaacccgcggcgcctgtcgtcgctccttcgttctcgccgctgccgcactcccgacggccaccttaacaagcctctggcggaggaccaaatactctcgcgatcgccgtagcgccaccgcgtcgcccaatccgttgggagccgtcgcgcgatgcaggcggacgagcaggcggaggcgccgcgccgcgccaaggaggccggcaacgacgcctaccgcaagtccttgctcgaggaggccgtggagcactacaccctcggcgcgctccttgaccccagtgacatcgccttcctcaccaatcgcgccgccgcctacctccgcatgggcaagtacgaggagtgcgtgagggactgcgatgaggccgtgaagcgcggcagggagctcagctccggcagcgagctgatcgcgaaggcgctgtctcggaaggcgtcggcgctgctcgagctcgcgtgctgcgccgcagactacgcaccggctatcggcgccctcaagctgtcgctggccgaaaattacagcgaggagacgctcgagaagctcaacgacgcggagagcgtgaggaaggaggttgaggaacaggagcgattggatcaggaggccgccaaccaatgccgcgaggaaggcaatgaattttttaggcagaagaaatacaatgaagcagcaatacaatacacacgagctataaaaatgaacccaaaggatccaagagtaagcatattggttgttaccctgattttccttctcaagtaaaggtaattccagaacactagtaaagtagtactatcttcagtcaaatatagatgattttcaggcaagaaaacaagaagattataagccaactgtcccatgtctaaacatcaagtaaatatgactggaggtggtacccttttttttttttgaaatttctaagatttctgataaattgaattttttcattggtaaaacatcattaatgataactcttattttccatgcaccttggctgtaaaaacattctctggagttgactttttttttcctttggcactccttgttgtagtaatttgtttagtttatgactgatcttacaggcatttagcaacagagctcaatgccacatccatctgggagcctttcctcaaggtcttgaggatgccgagaaatgcattgaactagatccaacttttctgaagggctatgtgcgtaaagctaaagtccagttcctgatggaaagttatgaaaatgctttggcaacttacctagagggtctgaagtgtgacccaaataatatggaggttctggatggcttaagaagatgtgcagcatgtgttaagaggtctaatgcgggtgatgttgagatcgaggatttgaaatatgttgatattgatgaattgaaatatttctcggtacattttatatgaagtagagcaagagaactacatgatgaagagcaggccgaatggccatcgaaagtcaatcgacctctatcctgcatgccatgccatcatgaacaattggctattcagcttgactgaaggtctcgggtctatatctcctttgtttatcctgtccagtcctaccatccctatccttttctcttccattagctctggcagctttctgcacaagtgacctcggtctcaccgtcagtgcatgatgcagggtggtggtccaaacactgtacaccagcagaggaggagtggggtgatgacttctgagtgtcaatgcaacaccaaggacattgacgagtcatccgccgagaggctgtacgacgcagtgaagtacaccacggacaacatgatgctgatccaggtcccagtgttaggaacaacgaaggaattctggtgattatctgacaaagcgactaggatcagcagaaaacttgcattgatactgaggagccaccactccgtcggcaagtacctagctgctcctctgcaggtgtccaacatctggattgggagcaatgggagtgtcaagctaaggggggtcagtttcactggtcaaggcttcagcactgagcgtgtgagagatgactacaaacgcatgtccaggatcctgatggcgttaattactctctcgggtggggacagaagcaaattgcctccggactacaaagagttcctcctgctcttggaatcggacacccttacaatggaagatgaattcttgattgtaaacaatgctgcactgctgcccataaaaaaccgcactgaggtctttctgatgctacacgatagaattgtcgattatcttgggagtacggacaaaacgaagaagaagaaaaagaagaggatactctctagtcttccctacaaggaagactggctagatactgccaaggcaaatacaaaaatcaaccagtgggttgccaatgttcagaacgagtacagagcgactccacatgatctgctgcggctcaacagaaatgtaagaagccacatgcatcgctacagcgacggtgacgacatcgaggaagttctgtattgcgaatggcccgagctgctcatggtcatgcagaagatgttgcacttggaaggcgagctcgaaggcactgacattcagaacaagtttggctaggcgtcctacttaagctactgttcttcgatcgagttcaggggccgaaagtttatgctggtggagtgatggtcgatgtaagtttgtcgctctcatcatgaaggtaaagctggatcagctttataaaatgtatgctaaaatgtaaagtaaactttaaaccattctatctgagaaggtcttttcttaatacaataccgggagtatgtctcgtcttgcttgtaaatcgtgcctgggtatctggctgtaggtttgtcttgcttgatcttgtgaggatgctgctcgcgttccttggagatcaagcatgcaaacgtctgtaaacaacatccttctcctcttactgaagataaagctggaccagctttataaaagtattatgaaaaatgttgcattaaaactctaaac

SEQ ID NO: 44099 - DNA, 1655 bp, Zea Mays
gcaggctcacctcgctcaccgacacctgggccctaaccccggcaactcgtgctcgccacccgattggccggtataaagccggtagcgcgtcgcgtgagccacacgcgcacggcgcacacatatcccttccttcactggctcactgcggtcccggcaaaagtcagtcaactcagccaacaagcgctgctgctcgggcacgggtggtttgggaggccggacgcaacgtcgggatgcagtcgctgcaggacaaggcgtcggagtggagcggggtggcggccgccgatgcctttgccatcgacgacgtcaacatattcgagtacctcggcggcactccgcagccattcgtcgacctctccaccaatttctacaccaggacaccctgcccttataggacgacaccgaccattcttggttacccaccgagctgcagagcggtggctacaccacatgcaacaagctttggacgcaactgaaagcatagatgtggactcaaaaacgaaaatgatgaacttctttaggcacactgcttacttccttgttgctggcaatgagatgacaaggcaacagggccatggagtagcctgcaaacatgcaacaatgtgcctttatagcattccgtatacaatggagttgaaacaacctccacattcaaagaaacaatggtactgactctttgtaggctttatagccattcttgagcagagagtgtactcaaagtggatagttgtagcttctgccaatatgtttatccttcttcgtctcttgtgctcaagagttattcacagcagtttttcaaatttgacctcaccctagcaaggttaccacaccacatgttaaccatgccacacttatttaaggtcatatttgtttaattttcataagtttgggagccaaagaaagtcattgcctatttaggtcgctgccgagtagagcctagctggctggcagggacatgcggaaaacttatttggttcattgaatcaaaaagatcaggctgagtggagcgtttgtttgtttggttgtactaggatatgttgaatcaaactgaaagaggaaacaatcactaagataatttttattttgcctgaatcgattgtataatacatattttcaccatattgaggcttaatttactttgaaatatatcagtatgccttaaattatgctaatcatatactaatactgttgacactttttcggagcgccaaatactcaagaagaaccggcggcggtgctctctggtcaggcgcggacggtccgcggcctggggccggacggtccgcgacctggcgcaggggctaaggtttcctgcctgacggccggacggtccgcgccctggggccggacggtccgcgcgtgcgcagtggcggcggaagatcgccggcggcgcctggatctcgctcccggggagggaccccgtcggggaggagagatcctaggggttgtctaggctcgggccggccgacctagactcctctaatcgacgtagagtcgaggagaggcggagaatttggggatcgagaggctaaactagaactagactagaactactcctaattgtactggaaataaatgcgaatagaagttgtattgattcgattgatgattacaaatcggccgtagacctctctttttatagaggaggggggctggac

SEQ ID NO: 44100 - DNA, 1441 bp, Zea Mays
ccgcagagccagtcagaacagtaacaccggagcggcagctgcagtggccgaggccggagcacgcaaggcatggatagataccaaagggtagagaagcctcggaatgacacaccaatcagccagaatgagattaggattactactcaggggaggatgaggaactatatcagctatgggatgtcgctgcttgagcgaaacaagcacatgcaagcacgtgaagcccaactctgcatgtccgacacatgcagcttgcatgaaaatggacacgatgagattagtatcaaggccatgggacaggccataaataagacagttatggttgttgaattgattaagagaagggttggaggtcttcatcagaacagtgccactgaatctgttgatatcacagacacatgggaacctttggaagaaggccttctcccactagagacaactcgccatgtgtcgatgatcactgtgacgttatcaaagaagcctctggatacatcatctccaggataccaaccacctatcccagctgaagaagtgaaacctgcttttgactatgaccatgaagattcgtatcctactggccgtggaagaggacgtggtggtgggagaagaggcaggggaagaggtatgagcaatggtccctctccacccgcttatggttacaatgaagagtggggtgaggaaggagattactataatagagggcgtgggagaggaaggtcacgtggacgaggcagagtgcgtggtggctactatggaggcgggaggcgtggtggctacagttatggctatggtgcgagaggcgggtactatgaagagcaagacgaatactatgatgatcctgaagaatatgcccctccaggccgtcgtgggcgtggcagaggaagaagggggatgccttggcgtggccgtggagtctactactagacgatgcgatgcgatgcgatgcgatgcgacatgccaaacgggtgtgctgaagctagcaatggcgtgcttggttggttatctgttctatggagttccgacccagactagaattacccagcagggtccttccaggtgctgtgcctgtgcaactcgtctgggcaagttttgtggctcgctcgtggttttgtagctaggttaagcgagtgaagtttaatcactcggtagcagtgttttcccccttcggacggcatgcatgttgtttattttgctgctaatctacctaccttccaattttgtatggatggtgatggatactggatgcatcagtttcatatttttttttctcctggtaaatctgtagtttttataaagacggttacactgatacctgatgacaagatgaggcaggaagtttgttatgctgcagaataagagcagcatgaaaaaaaatgaatacagctatcgttgttagtgtactagcatttatcttagcgctagattagtttccagtataatcatc

SEQ ID NO: 44101 - DNA, 5718 bp, Zea Mays
ctccgctcaattcctccccacgcacccgtcacctctttccattccaatttcttccacctccctctctcagatctccacccctcccccaatgatgtgacggtcatcacgagggcgaaaaccaacgcacagaacccctcaccatggctacgtccacgatgccactcggcggggcgtctccgtcgggccgcgttctgggtccggcgctggaccggatcataaaaaacgccgcatggcggaagcactcagcgctcgtggccgcggcaaaggcggcactcgacctcctctcttcatcgccggcatacccgtcttcggaccctatctcgccgcaatcctcgctgctgctcggcctgccctccgccgccgccgacgcggccctccacgcgctgctgctcgctctcgagtcagcttcgcccaaggtcgtcgaccccgctctcgattgcgtcaccaaacttctttaccaccgcctcctctttggcgacctcggctgcgccggggacgatgcctcttcccccacctccaggctcttcaccgccgtccttacctgtggcgctctctctgatgatgcaatggagcttgccaccctccgtgttatcatcgccgccgcgcggtgccccactgtcgccatccgcggggagggcctcggccaggtgctcaagacctgctacaacatatacctcagcagcaacagtggggccaatcagctctgcgccaagcttgcgctggcgcaggtcctgctgattgtgtttgcacgcgtggaggtggattcgatggacgtgcgcattcggacggtgtcgatcacggagatgatggacgtgtctgatcgcaacctgaacgactccagcatcgtgcaggtggctcaggggtttataaacgagacaatggaggggagtgttgcaccagagccagggtcacatttggagccaaccgaggtggatggaaaggaggatactgggatgagcaagattagagaggatgggcttgcactcttgaagaacctgtgtaagctgtcaatgaagttctcgacgccagataaccctgaggatcagatgttgctgcgcggcaaggtgttgtcacttgagttgctgaaaatggttatcgacaatgctggccctttctggagaacaaatgaaaagtacattggagcaatcaagcagtatctttgtttgtccttattgaagaacagtgctttgtcagcaatgagtattttccagttgttgtgctccatatttgtgggcttactgtcaaggtttagatctggactgaaagaggaaattggaatattctttccaatgcttgttctaagggttcttgagaatgtccatcaacctagctttctacaaaaaatgacagttctaaacttgttggagaagatctgtaaagaatctcaggttcttattgatatctttgtgaactatgattgtgatgtagatgcaccaaatatttttgaaagggttgtcaatggacttctaaagactgctttaggtgttcctccaggatctacaacaacattaactatagcccaagaccaaacatttcgtattgagtcagtgaagtgccttgcaaccataatcaagtcaatgggttcatggatggaccaacagctgagaattggtgatttttcaccaaaaatatctgaagcttctttaagttctttaagttcaatagataaccccaacatccttattggagaagatggtagtggaattgattatgaactgcaatctgactctggtagcccagatgtatctggtgctccctcccttgagcagcgtcgtgcttttaaaatagaacttcagaaaggaatatccttgtttaaccgaaaaccttccaagggaattaattttctcgttaaaagcaagaagatagggcatacaccagaagatgttgcttgtttcttgagaaatactgctggtttaaatgcaacaatgattggagactatttgggtgaaagagatgaattccctatcaaagttatgcatgcatatgttgatgcactaaactttgaaggtatggacttcggtgaagctattaggtattatttgcgaggcttcaggttgcctggggaagcacagaaaattgatcggatcatggaaaagtttgctgaacgatactgcaaatgcaatccaaactcctttaccagtgcagatactgcatatgttcttgcttattctgtaatcatgctcaacactgatgctcacaatactatggtcaaggataagatgtctaaatctgacttcattcgcaataaccgaggaatagatgatggaaaggatttgccagaaacttatctgggtacactatatgaccaaattgtcaaaaatgagatcaaaatgagtgctggttcatcagttccacaaaacaagcaacctagtagtgtgatgaagctactaggattggacaatattattagctttgttaactggaaacaggctgatgacagggtagttggagcaaacgacctgctcatcaaaaccatacaagagaaatttaaactaaagagtggaaagtcggagtctgtgttttctgttatcactgatacaacaattttaagattcatgatggaggtttgttgggcccctatgatggctgcattcagtgtgacacttgatcagagtgatgataaggcggccacgtcgcagtgtttgcagggattcagatctgctgtgcatgttacctctgttatgtgcatggagacacagagagatgcctttgtgacatctgtagccaaattcacatatctgcattgtgctgctgacatgaaacaaaagaatgtggatgctgtgaaggctattatatccattgcaatcgaagatggtgattatttgcaggaagcttgggagcatgtactaacatgcctttcacggtttgagcatttacaccttcttggagagggggcacctactgatgcttcatttctcacagtaccactggttgactcagaagaaaaaacacagaagtctacctctatgtcatcaaagagaactaatgcacttcagaatccagctgtaatggctgctgttagaggaggttcttatgacagcacaacagcaaaaaataaagcatcaccgttggttactcctgaacagattaataatttcatatcaaacataaacctgctagaccagattggcatttttgagttaaatcacatatttgctcatagcccaagattaaatagtgatgctattgttgcttttgtgaaagctctttgcaaagtttcaatgacagagttgcagtctcctacagatcctcgtattttctgcctaacaaagattgttgagattgcgcattacaatatgaaccgcattcgtttggtttggtcccgtatttggaaagttctgtcagatttttttgtttctgttgggttgtcagagaacctttcagttgcaatatttgttatggactctttaaggcagctagctatgaagtttctggaaagagaagaactggcaaattataatttccaaaatgaattcctgcaaccttttgcggttgttatgcagaagagcaatgcttcagaagttcgtgaacttatagttcgatgtgtctcccaaatggttctgagtcgtgtcaacaatataaaatctggttggaaaagtgtttttacggtttttactgcagctgctgctgatgatcgaaaaaatattgttttgttggcatttgaaaccatggaaaagattgttcgggactatttcccttacataactgaaactgaaacaacaacgtttactgattgtgttaaatgccttatcacattcacaagtagtaaattcagcagtgatgccagtcttaatgccattgcatttcttcggttttgtgctgtcaaactcgctgaggaaggatttattagtcatgagaaggatactgaacagcaaccaagtaaaatagattcatcagatgggaacagcatggtgcataaggacgatcatgtttacttctgggttcctttgcttgctggtctagctagattgacaacggactcaagaccaactatcagaaaaggttctgcagaagtgctctttgacatcttggcagatcatgggcacctcttttctcagtccttctgggctaatatcttcgaatcagttatctatcctctttttagcagtgaaagttttgcaccaaatggccagatctcaagtgtaaatagtactgaggatgattcttggaattttgaaactaaaacggtggctctaaaatgtttagcagatttgtatattatgttttttgaagtgatgcgtccagaactttctagagttacttctgttattacgaatttcatcagaagcccttataaacaatcagctagcacgggtatatcagtttttcagcgtttaacagaaggactcgcgagcaagctctccaatgatgagtggggaacggtcctgttgtgcttcaaagaatcagcatcacatacatttgttgtgtttgacaaaatagttaaaatgatgaaagtcattgaaattccagatagaaatgaatcttactctgaagctgagcaatattcagatcatgacatatacaatgatgaagaagaggaagccaatatggaaacggcgtcttatgctattgtcagaatgaagaatcatatggctttgcaactcttaatcgttgagggcatcatcaaattgtatgaggttcacaggagctttcttggtgctgagcatatagtcataatgttggagattctatctgccattgcatcacatgcaagtgaagtgaactctgaatctaacttgcacaggaaactacataaagcatgctctattttggaggtacctgagccagcggttatccatttcgagagcgagtcctaccagagctacctcaaacttctccaagctcttcttcatgataacccatctttgtcagaaactatgaatgtggagtcacaaattatgctcgtctgtgagaaaatactgcgaatgtatctgacctgcgcagagcatgaactgtctaatggtgtttctggtaggggtccagctttacaacggatgcctctgggtacttctaaaaaggaggagctgggtgctagaactccatttgtccttcatgtgatggggttattgggcagtttagagaagaactgctttaggagaaacttgccccgctttttccccttattagctaatcttattcgctgcgagcataactctggagaagttcaagttgcactgtatgatatcttccaatcatcaataggccccataatatcagcatagcgtatattgtttcctcgccagttgtacaattttgtcagattgtggtataagaaaagggtacagctttacagtactgtaaatgattcatggttgaggcatttctggtgttgaagatgtctaaacaaggtttttgctgcgcacatttgccattcttttttctaacattcactgggtaatcattgacacgttaaagaggatggacattggaataagtccctaattcctgttttggtgtcatttcccccctttcatcttggctctgtatagtgtcgtctcccgaacctcagctaccagtgaagagggacttctgtcatatgttactgttcaacatattcgtctgtcgaataccattttaacagtatctacattgtagttagtatatatatactttcattctaacagcaatggatatcccaatggatgtctattaaagaaaggtgagcaatatagttcaataccttttctcacgtcccattgccatcaggatcacgacttg

SEQ ID NO: 44102 - DNA, 478 bp, Zea Mays
catcaacgacgttcgagttcttcacgtccctattgcttcccagtttgctgatatcttcacaaaggggccagaaatgctccttcgtcagtcttcagatcttcaaggccaagaaattgttaatacgaactttggaggtgatactggagacgcatttgaagcacatgaatggagatatgttcggacatttaacggtatcagaatttttgaagatattagtattacaaacccaaaggttggaaaggttatacttctgaaatctgttggggtggtcagtgcaaaccctgataccgtgtttgaagtggtcctcgatcttgataaacataagcgatatgagtgggatatgttgacagctgatttggagttggtggaaagaattgatggatactacgatgtggtttatggaacctatgaacccaaatatttaaattggtggaaatgccagaaggatttttgttttcttctcgacaatggtttcgtg

SEQ ID NO: 44103 - DNA, 1623 bp, Zea Mays
agatacggaggggcaaggtacgtggtgccttaccttggctaaggcactgaatctggatccctcctccacctccacgcgagcggacgacacgaagcggccatagccgcacgttgggatcccctccgctacgcctctcgatggtctccgccagcgcgccgccgccgcaggcccagtccgacgcggccgggtcgggggaggaagtgagcaagaaggtgcggaagccgtacacaatcaccaagtcccgggagagctggacggagcaggagcacgacaagttcctcgaggccctgcagctctttgatcgtgactggaagaagatagaggcttttgttggctccaagactgtcatccagattaggagccatgcacagaagtaccttttgaaggttcagaaaaatggaaccagcgaacatgtcccacctccacgaccaaagcgaaaagctgcccatccatatcctcagaaggcttccaagaatgattcatcttccatccataggaactctggcatgaacgtgcctgtttcttcatgggctcatagttccatcccacaagctgttgcttcatcaatggtgaaagaagatttaggtgctggaacaccaggttcaaacaatttttgctcaagtagtactgaaggccttccaagaacttggcaacctggtgaaacaaatgatccaataaatcaaattccgtcactccgccttatgccagattttgcgggagtgtacagcttcttaggtagtgttttcgatccaagtacaagtggtcatctgcagaaacttaaggagatgaatccaattgacgttgagacggcactgttgttgatgaggaatctctccatcaatttaaccagtcctgattttgaagatcaaaggaagttgttgtccttatacagcgcttctgatggacctgggctagggagctcaagaagttcagctctagcgacgagcgcgcctttcatgtaaggtctctcggcatataatttcagttcgacagacctcaggaggatagtgcctgccctggcgtagtagcaccgatgagtgatgaaggaggcgtttgcaccttttgtgcttctcgctagctccatgccttcggctgacgattgtgaagcgtgcacccttcctggcctttcctatccccaaaagctcggccatctaggctcgtgaaatgctgcttcagatcaaggctgtccttggaaatgggaagatgaaaggagaatctgggtaatgccggttgctccctttcccattctttgttgagttcagctttctgattggtttctggtggccctcttgatacggaacttgtgcgctccgtctgagaaagcatgtgtgcaaagtttcatttgaggagttgaggcgatcatggcgctgtaaaatgcggcttatcttcccccttcagggctggtttggtggaccaaccctcaaacatttgcaattcctatgtacgtctgtagtgcatcaggtgttgttgcccacgtgtaaaaggaaaataaattcacaatgtaaaggagacttgtgcgttagcactaccatttgaatttatgaaatgtcaaagcagcccagcgagtttgtacttgccacatttttttgtcgctgtatcagcagtctggctactctggcatcg

SEQ ID NO: 44104 - DNA, 7558 bp, Zea Mays
atggacacaccgacgcgagttcttccccctgctgggcaaatccgatccataaatgtaactccgggaaggctcaccgatggcttgttacccttaccaatgatgaacatgggcccagatttgagccgggtctggtcatggttcgtggtcccatgcagacttgatgcgtgtaggcacacaacagcaaaacagctatttgaggagatgccgtcattgtcatccttactctctggctccaatactgcgagtgctgagcttcctctaatcccttgcaagctctgcaatggggtggtgattgagcgggtctccaaacaaccagaaaccacgtcgaggaagttctaccggtgcagagccaagaaaacggatgggtcttaatgtgattttttccactggcaagcgagctatgttgttttgttaatcgaggatgggtttgtcagtggtgatcgacgccttgagttgttaatgatcgcacttaatgatcatggcaaagccgttgaatctctaaccaattccatcagagagatgaagaaaaagctgtccaacctggagttagtgatggaagagctggataacgtgaaaaatttgatgaaggcagccatggttgaaattgaggaaaacaagaaatcgacagctgctgcattgaaactgatggagaatgagctgcaaaagctgaaagggtcaactaaagtgaaacctaggaatatggcacagtgttttctgcttttggcattgattgggtgtgttatgttccatgtcccgtgtcactttctggagtctaccgtggtgctcctgctaagtgttgagtcggatgttgattttgggaggacccacgggcgaagggcgtgtcactttcatgaggacccacgggccgaaccccgtgtcactttcatgaggtatagtgttgggttccttatcagagttgcgttcggatatatagagttgtgttcctccaatctgtgctgggtttcagggttccatgttgatttttgggaggacccgcggtcggaagcccgtgtcactttccggagtctacagcgttgcgttctgaatgctagtgttatgttccatgtcccgtgtcactttctggagtctaccgtggcgctcctgctaagtgttgagtcggatgggcggatgttgattttgggaggacccacgggtgaagggtgtgtccctttcatgcggtatagtgttgggttccttatcagtgttgcgttccttcaaggcgttgagtttcagggtcccatgttgatttttgggaggacccacgtgttggagtctaccatggggctcctgctaagtgttgagtcagatgggcagatgttggttttgggaggacccacgggcgaagggcgtgtcactttcatgcggtatagtgttgcgttcctccaatctgttgggtttcagggtcccatgttgatttttgggaggacccgcgggttccatgttgattttttggaggacccgtggtccgtagtccgtgtcactttccggagtctacagtgttgcgttctgaatgctagtgttatgttccataacccgtgtcactttctggagtctaccgtggggctccttctaagtgttgagtcggatgggcggatgttggttttgggaggacccacgggcgaacgacggtcccatgttgatttttggcaggacccgcagtctgaagcccgtgtcactttccggagtctacagtgttgcgttctgaatactagtgttatgttccatgtcccgtgtcactttctggagtctaccgtggcgctcctgctaagtgttgagtcagatttgcggatgttgattttgggaggacccacgggtgaagggcgtgtcactttcatgaggtatagtgttgggctccttctcagtgttgtgttcggaactatgctgttgcgttccttcaaggtgttgagtttcagggtcccatgttgatttttgggagttatagtgttgagtttcagggtcccttttagactggaaaagtcttctgccataatcgtcagatttacctaaatgatgtaaaaaatggtttggaaaactctaaaacattaaataaagatcacataacattaattaataaaaaatgatataatacacaaacattaagtaagaattatagaaagttgaggcaccagtttgtatgcaggattcttcctcctaagatgtggaaagctaattagttttaaaccataatccacctcaatatatatgaattaaagtgcatagatgtggcaacaacgttgaagataaacatctatttgtacagcaaacgcaggcttcccaaagcggcatggtcagttcgagctcgccctggggatgccgccgctctgcccatcgcagacgccgtggagcatcgacggcgacgtcgcaggacatgaggtcgcctaccagctggtgacccgaaacacccaggcggcccgccgccacgtcgagataacggccctgacggtgccgacattttggggcagcgggcattgcccggagccgctcgtcatcctaagaaagggcagcacggtggcctgctacggctacccccggagccactcgtcgtccatgaaaagggcgacgaactggcctggcaagatctggcggcgcggggatcgaatggacggacgacaagagcgagcgaagaagtcctggcggcttggtgagaaaatggtggcgctgggggcgatgggaacggaggtgcggatggtggcagcagtggagaatgaagcgacggcgacgtcgagactgattgtcgtcgtccgcggccatggggcggagcaccttccggagaagtcgagacttatacgattaaaaaaggtaggcgaagagtcggcgcagcatttcacacgcagtagtgactgacacctggatggttggattagtggcacggacaaacgatcttacggctacggaaatttggacgatgtgtccaccttcgtttgcgagcagcggaccctggtttgatatattaaaaaaaggcagccgaagagtcggcgcagcatttcacacgcagtagtgagtgacacctggatggttggattagtggcacggacaaacgatcttacggctacggaaatttggacgacgtgtccaccctcgtttgcgagtagcggaccctggtttaatatatagaaatagtgttgagttctcaacactgtatactcctgaaagtgacacgggcccatggaatgtgacactatcgttcagaactcatgaaagtgacacgttgttcggtgtgaaagtgttgatttagggtttagtgtaaccgcccgttcggtgtggaagtgttcaaatttctctacgcgcgttcggtagcctcaccgacggcgacggcgacctcacctcaccgacggcgacggcctcggcgacggcgacaacgatccccaattctcttcgcgacctgaccgtctccacttcggtaaacccaccttcccttctctcctcgttccttgtcagggaaccgcctcaccgattctgatgtcgaaggtaacctggtgccgatccgcaggggtgaagaagaaagccaacatgccacaggggaagagtaagaagaacgtggtgaaggagaaagccaaaaagattaagaagaacgcggaatcgaggtattcactaggatcagtaacaaagttaatccaactccttccacctgctgcccgttagaaaattgtagaccttgatttccaaaacttactcaatctgaagttaggaaacaccaatagagtttttacccactttctcatggatagagccaaagttcatgaaaatacagatcaaattgagatcaacattagagaaggtgtttcaatttggataacaaaggctgcagtgcaaaaatgttttgagtttccccctggtacagataagaagctgccaatagatccaactacaaaaacatttgattcactctacagagtattgagtgtttcagaaaaaaaaatcaatgtaaagaagaagaagatgaaggagaatatgaaggagaagcaggttgaggaggagaagattgagatgaacatggaggagaagaagcagaatctggttgaggatgaaggtagtcaacaggaggaaagtgaagaggaggacggtgaagatggggaaattggagaggaggaaggtgaagatggggcaattggagatgctaaagtggggggagatggagacaaggaaagtgctaaaaggggggggataaaggttgctgtcagaagaaatgttttgactcctttgaacatcaatttgatgttacagaacatcaacaacgatgagattctcaaacttcttgttaaaagaaatgaagacactgatggtacagaaccgaatcttgacattgacctgattgtcagatgtttctttgcggtggtgttggacagactgttgttgccacaagccaccttttatctgagctcagctacattgaaagcagtgactgatctagacagactgaaaacagttgactggtcaattttattttcgaaaatttgaagagcagtgttgctgagtttggcaaggataagaagaaactgatatcagggtgtacaactgtgctaatggttgttttcttggaccatctcgtggaaaaccctttggatcctttgaccatccctaggatcaacttgtatacttcagattttatcgcagacctgataatggtacccaaggatagccctggccctgaaaaaaagcgtcgtaagactcaagatgaaaaagaagactagtaatgttataaagaatctcgctactctcaattttaagaattcggaggatacatgctatcatgaagattcagaaatggtgccaagtccagggagagcatcgccggttgttgcttctgtacaatctcataagaactttgttgatcatgcagatttagaaattgtgccatctcatgagaactctgttgatctacatagtgtttacatggcacatgtattggaaagaagcagacaaagcatagtagtggacatattggactacaatatacctgaatctacttttgcagattgtttgctacctacaggtcatatgcacacagatgtattttatttacaatgccaactgttgtcaaaggattggaaggataaagtaattcttagctggaaagctactcaagaactgattcatcaagatattggagttaaggagctggacaaggaacttactgcagaggttatgaacaaagtggatctggtttgtgctttgttttatattacagtagagttttttcagattgacagtagagtttgtgctttttttagatatttattcctatcattcatgccggtcactggtcccttgttattctttccactgccaaacaagagacatatatccttgactcctacccaaggcacagtggggtggccaaggatgttttaactcaactgcagaagtatttggataataaacacaactttgacatgtctaactacactgaccatgtgccacctgttcagcatcaaaaaaacaattacgattgtggctttcatgttttattgtatattgaagaattcatgaaggagaagatgtataaaatcaacaaaaaaatggtgttgaaattcagaaagcagctttgcatgaatctcttgtaccatcctttgaacagaataaatcttgtggaattcagaaagaagctgggtattacattgaaaagaaaacttcctggtatacttgatcttactattgaaggtgagaggagtgaatctgaggctgcagtgataattgaaatagagaacagagatgataagactctagaggatgaacatatttcagttgagaaagagtaaggtaaaaaagaagagcatgtactatcaactgacacaaagaatgacgaagcttcatccccatctgacgaagagcctgagcagagtgagtcatctgagcagactgtgtatgaaagatggatgattccaaaggatcattatcacctgagaaagagcaagctggagaaaaatatcctcaaacgaaaaaagaggttgggcaaagacaacatgtcctctcaggatatgatttctccagtgtttggcaagaggcttgtgcctgcaaacacacattttacctctcttaggaagttgcgaaaacacaagtttacgtctgataagatcaacgatgagatctgcaaacatatcttgaactacaatgaacgggagttgttaagtgtggggcagactaccatgactgggggtcagctggaaaagtacgtaaatgaaggtgacaatggtgataaaatactcagagcattcatcacatgcttcacttgtgatgaaaagttcaatcaagggaacatcacaaccgtcatcccgccacatgaagtatccgaagagggtgaactctccaaagttgatgctgcacaacttgtagaagaaatcaaagctgtactcaaaggcaccaatgttgcacgtgtacgcaaagacaccgaatccaccaaagatcccaaagtgaaagtctttcgaaacatgaggaggacatttatattttttcctttctacaagaatgaagaattgtttgtatttcatgtcgatacgaaaagactacccatcattgatgctctgttttgcaagatgtcatcattgtcgtttgaagatagatcctgactaggaaagtctatcatgggctgtctactcaaagccatgaaggattccggcttcatggtgaaaaaatatggtgattgtaggttcacagttactgtaactgaactcgaattcaaagatagtgcctcagcgctcataagttttattgagaacttcacttctaagttggacgacaatgccaagaaactgaaaaagggtgacaaggactggctggaaccttacaagaagtcgacagtggcataccttgtttgtcacactgaaaataaggtggtgttgcctgacgatattgtgaagtacaagcaaaacaagtgaggtggttgagtcgttaatgggtccagtggctgtgttttaagacttgtatcacactacttgtatggctttattctctgaagctgttccattgttgccgttagtaacaggtgttgcttttgtctctgctcagtgggtgattcatttcatccagagttgctgcaactttaatcagtctatagtgttgggttcctagctcagtgttgagttctaaatgatcgtgttgtgttcctaccaagtgttgagctgcacgacggcgtgcgcagccgcagccgcaccggcgaggagcgtttagaactctgttgatctacatagtgtttacaccggctcaacagagttctcatgttgatttttgaaggacccacgtgttgggttcctgctcagtgttgagttctgaacgatagtgttatgttccatgggcccttgttgatttcgagaggacccacgggccgaacggcgtgtcactttcatgcgtctatagtgttgggttcctgtctagtgttgagttctcaactatggtgttgtgttcctccaagaagttgagtttcaggggcctattatattgtctcagttaatgggtaactcagttaatcctatatattgtgtcagttaatgggaactcagttaatggtatatgttgtctcagttaatgggtaactcagttaatccagcatatcattgatgag

SEQ ID NO: 44105 - DNA, 709 bp, Zea Mays
aggttcttggacatgtatgttatcacatcatagcagctggtttgaacggctacatggcaattgtgaccaaccttaacagtccggttggtactacgtctctagaaccctcaggctgctgtgggaggatttcatcacagttgacggttttgtcatgctacctcaggtcatgtggttaacgtttgttcccttcatccacaatagcttactgcatggcataatttctggttctttggatgttgctgatgttgcgatgataactgaagactttgaggaggtgcaggtgcagagccgatggtttggaatccttgacgtgggctaccgctcataggaggaggcttgggctgcttgtggcagcaacatgttgcacaagaccacaaacaagggaacagctaggtgcacgacaaggttgtcgccgccaacctctactctgtcaagttccttgatggcaacaaagaatttgtgctaggcaaagacggcgtgttgcttcggggtcttggctgaacgatcaaacatcctatgtatatatgtgtacaacaaactacatctgttgctactactaccataaaagactgccgactgtgcttgtgttctctcttctgtaacacaaatgagtgtaaagagacatgtgctacttccttggaacttgaaaaccttgtaaactcatgtcttcatacgtcgtgcttcatgtgcgaaaacacttaggtctctt

SEQ ID NO: 44106 - DNA, 443 bp, Zea Mays
ggagtctccaatcaggcttggaatattggagtggttgggtaagtatgcttctcctcccctcttcgaacaagtaactgttaggcctgtgcggtttatgaggagagcaccacagtaattcaaattttgtttgaggtcagctctgctaaccccttgcacatgcaccaccaagccagcctcaccgagttttgtactccttgatattatcttgtaccatgatcatggattatccaaaaaacaagtctggtgcttaagaaacaaaacctttgttatgaagttgcaatgcttgaaatgaaggaccccctttgtattgtgcactgaactaaggcagatctttgcaggcatgacaagcaccctacagaatggggccattgcacattagcataattccacattgcacacaaattggtgaaattaagaataatagagcccttgttctcatccaa

SEQ ID NO: 44107 - DNA, 1244 bp, Zea Mays
tgcataccttcttttcctttgccatgaggcaggtgtgatgctcattggggaagagggatgatttgttgaaggcagaggcagcaagtccttcgtcgtcggatgaagagcaatccgagtcccactctttgccaagtaactttttgagtaccaatgatgtaaagggacacaagctctagcaatgtttctgcttctcatgtaggccgtgtaagacgtcgcaaacatccaactgaggctaccatagatgggaatagagttaatggacaaccattgcttgtcagtgatcaggacaaatataaatcagtgcttacccatacgtattctacagtatggatgattggaggctttgcctttattatttatatgggtcatctatatatctgggctatggtggttgtgattcaaatatacatggcaagagaacttttcaacttactcagaaaatccagtgaagagaaacaactgccagggttcagggtcctgaattgatctagatgccaaccattaggcatgattcgattctagaagatcctgatggtgacacctcacaaccacaacacatctcggactactaccatgtcagtctcaagaatgtgatgataacatgaccattcaaattggtgaagtacttcagatgcaaattgaggttcaaagatagttaaatgaactacttgagaaatggtcatttgttaaatctgagcagaaaagatcggaaatccaagggcttatggaattggtattgcaaagatcttcatgtgattcggatccttataaggaaagataatttatatacatgagggagccacctattgattcttttgatgtctctacatgtgttgctgcggaggaagccgacagcgcagctatggtcgttgagaagaaggttgtcgcgtctgtgtagcttgtcgccgttgctgcgcacaaggcgggctgcgccatggatgctatctgtttgtattacttttggttggttgcattaagtgttgtactgtgtgtttggtaatgcagttacttttgtattcagtgaactgtttggtaatgcggttccttctgtatttagtgaattgtgtggtactgcgtacacactgtagttccttttgtattaagtgtagtagtgatgaggtaatgcattgcacttgtactactgagctaaatctatgtacttgtgcctgttgtggctaaaaagcatatgttaagaaaatactgctttctgtgaatgaggtactagcaatctgtgtacattatgg

SEQ ID NO: 44108 - DNA, 1567 bp, Zea Mays
gcgctcccggtctcggactctaggctcgctccagtttccgcctggctccaccaacaaaaaccaacgctccccctgcccccctctttcctccccagacccgcgctcccctccgtggcgtgcaacgcgttcctcggctcctgcaggcggcgacctcggaaaggcgggggcgtctcgtcgcgagctgactggtgagggtctggatctagcaatggcggaaaacacccacggtagtggtcgccacgtgcttggggacttgacaaatgttatttgcaagcgagcagccacatcagatctggagaagagtacaggtgggataaagatcagacggattgaaaagactgggactaggaaagagtacgatgcaaatgcaaaagctagcagtattgggaaaggaattgtatttggccatttgtttgatgatgttgccagagagaaatttcaaagccattctatctttcagaatagtagggttcaacacatagctgccgaagcagctggactcttatccaaggaagccaatgactcgaagaaccactatgcatcaatcggtccattagatctcagtgataaggagcaggattcttcacttgaatctgaagacgactatgatgatgaagataatgatgagacgaatggtgaattgctgcaccattttttcagctcagagctagctaataaaatgtcaacaaatgatggtgagtgcttgactcaggaggagatagttgggtcatctggaaatcagaaacctctgtcttcattggatgctacgacaggtggtgacttgccaatttctagtgctcagcatgcttctgtgagaactggtggtttggaagaagctgttgccccaaaatcttgtgcttgttctttctgtctcaaggctgcttttatgtggatggatctccattatcaggatgcaagaagccggctttctgtattgaagaaaagcatcaagtttgccaggtcattggaggaaaaatgtagaggaaatgaatatgcggccaatgtagctggatatgaatcaaagcgagctgtgggagtggagtttgaactatctcaacaacagagatcactctttctttatacagaaaatgcccttgtccgtgagtcaacgcagcttcattctgcttttgtgaaactgaaagaattgagagagaactgcaagacagatcttgagacgctcagcaattcttcaatgagaaaatgagtgctgcatgttgcgttgctgaactgttagtttcctgagacttagtatgatcagctggcttgtcttgaagcaagatgtgctgagattgaaccacaacttaggaattatggtgcttaccatcaatttgggacttcaatttggctgtagtgattattcctatcataaagcgttggtctagtatgcttgtagctgatgtaaaaataaccatggtaaggtaggaactgtatgtttgtctcgttgaggcatcgtcatcttcacttgtaccttgcagtgagcttccttcatatgaacattctttccacgttctccaaacaaaagggaaaaccatatcgtttcgtgcttgttggcgaatttcatagtgcg

SEQ ID NO: 44109 - DNA, 3677 bp, Zea Mays
ccccatcctctctttctccctcgcgcttgactcccctgccaccccttcccgtctccaccccgacgccgaccgcactccgctccccgtccaccatcccagcgtgatggctgggaggaccgcgcctgccccctcccctccttctctctcacgccctactccctcgccgccccttcatcccagatctcgtcatgggcgctaccatgaccaacagttcggtggagcaggcgccgcacgctacgccatgggacggagcccgtccccacccgacaccgaccatctccaccccgagcccgtccgagaagtgagtgatttccatttcttcgattggatggcgtgcggtcgggcctccgcacctccctgtccccctcccctcctgcggcgatagcttcctcgaggagatgagcgtgccgcccccatgatcggtctacctccgccgcccccgcgcgcaccgcaaccaccacgcccctcgtgcaccttctcgcccgagaaggtggtttcctttggtgtccccacgtgtttttgtcgttgcaagttgaactcgccctttcatgcctgatattttgctcagactgcattggagaatggctacacaaagatcatgctgccaacatgtgcttctggaatagcatgccctatgctatctgcaactataaaggctaagctttaccagccgatgtcctgtatgtcgatgcacgatgggaggtacttgtggttcttcaacttcatggttgtctggcctagccgccatccgcccgcgcaaacgcggtacagctccactacagcagcaggaggcggtgacgtcgccaaaggctggcagatacttgatggctcttgataagaagcctattgcaactaaaggccaccacctttgttgtcctcaccctagccgaggacctcatctcccagggaaccagcttccagtgcctcttgtaccgatcatcagcaagggagtgctagaggaggaggttatggtgagttttgtcgcgactaatggtgagcccacgactacggccacatcaaagctggtctggtggaacctcgtggagcagatgacgatgacgccgacatcctgcacctctgctgcgacgctgccgaccaggacgcgggcccctccgtcgcgcgcgctctacaagtctggatccatcatcgtgctcggcaagactgacttccttaggccagacatggatcccataaccagatggacagccacaaagaaaagtggcctgattagctacaagaagctcttgttccatggactcgatctctggaccgcactatcgttgcctcaacccctaggtcgtgctgccctctggcctcctcatcgtacaattcaccaacatctccaacgtaagtgcagcaggttcagtaatgaactcaaaagtggcatcagaatactctaagagttttttgttctttttgcctggatatataccgagggcaatgcattcaaaactcctatagatgacgaatcccatctctccctcttttcccggacatcgatcccagtctcttcttcaagcaagagatggagctttccttggtcgggctccaaaatgctaggaaaacatcacttgcagcagctcgcagcgacacccccgcctcctcatcatggaagctacaagaacactttgagtaggtgaagaggatttgcgacactaccacattgtctttggccatgcatcatctcagtgataagataacaagccaactagatatttcaaaattgactgacaagctacagtaagggaaggtagactcaactgcattgacaccaaaggagaagtatgaaacttggaaggagattaaaattatgagtttcagaaaaatagtttctccaatgtgggcaatgacattgcttagcttgtatgttagagttcatgtcaccatattaggcagaatctgacgcctttaatgtaaatggacacaagaccttcgttgcaatggatgattatcttgtcactgacaaaatcactgcattcatagtgcaaacgcaacatgcagcaactgaagtccttaaagaaaagcaaccaaaagactgtatgaaatggaccaagtattgcagacaatattacaaatattggacacgttcatggctctttctgaagatactcatggagaaattatcttgtacctgagaatcccccttatttttgcacaattgatggttgtgtcctgtagtggctttgataattcatcactcctaaacgattttagaaagctataccaactaatgtgtggaggacctgggcaaggggtggtagtcgcgctggttcgctatccacggcggcaagccgcctactcgaagatcccacctccgaggacgccgctacggggaggacatgggcactaatcttgaactaaaactaggggggtgtctatgtaagttaatactttctctcacatttgcatcaaaatttgttttccgataatcaacagatcttgacatgtttctatgtactttctctcacattgagagttttttagattcagtgcaagccatctttatttgcttaatgagtcatcgatcttgacacatttttcatattcatcatagtttttactcattctttacatgtttttgtccttttcagattcagtacatgtaagctttctttgcttggacaatctatttctctttacttggatattttcttttagattaagataggccacctttatttgcttaacgtgtggttgatcttgacatgtttttcagattaatcatatttttattcattcttgacatgcttttgtctgtttttatattagtttttattcattcttgatatgctttcgtctgttttctcagattagtttttattcattcttgacatgcttttgacttttttgaaatttagatcagtacatgtaagctttctttgctcgtacacctgaccccacatgtgttagcagtctctaggtcatgttcatattattcatccatctctgttatatagatagtcgacacatccatttatatctttttatagggctaatcattgagatatctcttcctcttggtcctcgtgaattttttgttcgttctatgatgagaaatcacaaattcatatctttttttttattttgggggcttcacttttttaaaaataaaatgtaaatatttggaccccgtacgtcgcgatcgcatccaggacggctggttccgcctacaaccacgtggacaacttcttgcccgacatcatctcccagcttgttccacctacaaccgcgtggacaacttttcacccgacatcatctcctagctcctcgcattcgccaacaagttctgctatgagggcttgaagccaacctacgacaatcgggtcacaaccatggtgttggctcttgacgacgcctgatccctcatcgacatcggcctctaggaggcctcccacctcctcgtcacctcgtgcctctagcattcctatgggagcccccaaagtcactcacccacctagacatcgcccgtgttgttatttggtggtcagtatgtcacaatatagtcagttttttttgcttatgttgttggtactgattttattggatgtgaatttatttatcctttcattgtatattggaattcatgacattatctacatatgtacatgcttacatatctattatatttttgtataaatatttttttgatagtttttaatttgtatggcaaagcaagg

SEQ ID NO: 44110 - DNA, 1758 bp, Zea Mays
gacggcttcttctgttctcagtttctcactctcgctacccattttttcccaaacgctagtggcggcgggcggcggtcaccggggagtagtcgagtaggccaaccggaggcgcactctggcgtgtgtcgtaccgagggcgccaggagcctaccagtgcaggctacagcagcgcagcgccggagcggccggtcgctggccggctatcgggaccgcggccgcggccgcgtttggcccgtgctgatgcactgagaggagggtggaggccgcagggtggccgtccggcagcgtcgcgctgcacgtcaactgctctgaacctgtgtgacacaggaagccgctcggggctaggtgccaccatctgctctctaccaattggaggggcagccgtaagttcaaattcttctttcattgaggtcatcatggcttgggagctcattgaggtcccgggcaacctgaatatctctctccaagactctacagttgatgtggtggccgccaagattgatcccaagctagctaatactctcattaggaaaatctgagttatcaataatcctatgtgtttctactgggtctgaaacttgtggcatacagttttctgaagatctaaaaaagatagtggatacttatcagctgagtcctttcactgcaaaagttgccaggtgttgtgctacatcaaaagaggagtgggagaaacagtgcaaactttggccaacatcttaccatcctgcacatgaccttgatattgtacgaggatttcaagaggaggaattaccatcaatatttaattgcatgaagactactattcaattatcaaagacgggcaatgctgcaatcattgttgacccatcaagcatgcaaatagtcgcaaaggccacggaccagacacacaagcatgatacgcctgaagggaacacggtttctgaagcaaatgcagatgttacctgctctttgaatgaatcgatgggtaatggcagcaatttgtcactgccaggatcctttcttcctaaatgcgacagcttgaacatggaaatctcatgtataaatccttggggatggatgaaaaaaaagacttgtgagcggaagccattgccctgtgatggctgttttgcatggcatcctctgagacatgctcccatggttgccattgaaaatgctgctgagagggatagaacgatgttcccttctttggcttcaataaccaagacagattcaaatggcaatctagagaagtattgtgataatgaacaagcaaaaaggctaaagacagatacaaaagataatgagccgtcggcatctgaatcattctgtggtgacttgtctgaaaccagcagaccatatctctgcacaggatttgatatctaccttgtttgggaaccatgcacaatgtgtgcaatggcacttgtacaccatagattcaagcgcgtgttctatgctttccccaatcctgtcaccggagcgctcggtggagtctacatgttgcatggggagagaagtctaaatcatcactacaatgtatttagggtttcagtacctgaggcatactcgaatggtttgaattagttgttcgaaggaatgctgacccaacatcctgttccattttgtttagaaaaaaaggatccatgagctcttgattttcactatgggtgccattttgttgcacaagagcttcagattaggcttaaacttgtccttttgtattattaaaattttacctatgttgtatcactaaaatagtctcttcattctctttaatatagg

SEQ ID NO: 44111 - DNA, 3842 bp, Zea Mays
cgattttggtctgggaaagtattccctggtgccgactaggcgacgggaccaccaaaaaccactctcttgtgcgcgagcatcgttaaaattggccacgccgccgccgccggccggcgaggagccggtactgtctgcttgctcttcttttcaccgaaccaaaacgcccgccggaaagggtcaaaggggaaacagagatctcggtttgcagtgatgaagcttcgctgatgagctggcgcccgtccactcgcaacgacgctggacaaaagactagccgtcccgtcccgtcacggcccggcgacctggcaaggagaactgcagcgacagcgacagcgacctctggacaatcggctgtgacggtctttctcgtttgttttatagataggaaagaaataaagataagggttaaagctttctcgtagcctcctcagaacatacgggcgattgtcttttcgccggtgagccattaattccgtcgagctgatttcttcttgctggttttgccggttttatttttttcttttattggtaattcttggccgtggcgactgacgattccttttggcgcttgtaatagcacaagcatagctaaagtcgtcccgtttcctcctggtttcaatctgtttggaacttttgttagttccggtccatagggggaatcgtactatcctgtggtcaaaattgtcgcttctttcttttgtcgctctctctatacacaccaaaaagaaggaaaaaaaaccacgattttttctcccaactttgagtaattaccgagtgtttcttcaagtcggagctcggctctgtgcttagccgggaccctatacttggggttttggcgggtccatcggaatggtcagcgggaatctgctctaccggaggaagcgctcgtggcgtgccgatgagttcgtgagccggagcacgctgcaattgctcgactttgatgatggctcaccaccagagcatgcatggagaaggaaactaagtagtcatgctaatagattgaaggagttcaatgtcacattcagagaagcaattagaatgatgaaacttggtctccgactttggtcatacattcgggaagaagcttctcacggaaggaaagcaccaatcgatccattcactagagagggcaacaagccctcagcctcgcaaggagtacctcttggtgggatggggagtggtagtatttcaagaggctttaggggagaattcaagcattggcagataactcctggttcttgtgaaatgtcacctgtgatggccaatcaattttcgatctttgtcactcggggaggaaccaagaaatacgcttcagttttgtcgcctggtcaacttgatggtttgaagaaatctactgatgatggtatatcatcctgggactggaaattaaagggtgatcgttcaacgtatcatgctttgtttcctcgagcatggactgtttatgatggcgagccagatcctgaactgaaagtatcctgccgtcaaatatctccatttattccccatgattaccaggagagcagccttcctacctctgtttttgtatacactctagtgaatactggaaaggaaagagcaaaagttagcctattgatgacttgggcggaggactttcacatcattctggggatcatgtaaatgagccattcgtagggaaaaatggagtttctggtgttcttctacatcacaagacagccaataataatcctcctgtaacatttgcaattgcggcatgtgaaaatcaaaatgtaaatgtcacagtattgcctgtttttgggctttctggagaaagttctgttactgctaggggaatgtggggcacaatggttcaggatggttcctttgatcaagataatctcaatactggtcctagcatgccttctttgctgggcgatacagtttgtgcagcagtttctgcttccacctgggttgaaccacatggaagatgtgcagttgtatttgcattggcttggtcttctcctcaggttaaatttaaaaaggggagtacatactacaggagatatacaaagttttatggaacttctccaagatcagcagtaaatttggtagaggacgctttgatgaagtataaacattgggaagaagagattgataagtggcagaccccggttctccaagatgagaggcttccagaatggtacaagattacactctttaatgagctgtacttcctagttgctggtggaaccgtttggattgatagtggatctttggtgtctgatgctgataacaagtcgaatccagaggaaagtaatttgtcacatgagatcgatgacaaagaaaatgttgggaaatttttgtaccttgaaggaatagaatacttcatgtggtgcacctatgatagctgttttgcgggaagataacagaagagtcagatttcttgctgatggtacctggggtattcgtaaagtaatcggtgctgtcgcccatgatcttggagcacatgatccttggcatgaattgaatgcttacaacatacatgacacaagtagatggaaagatcttaatcccaagttcgttcttcagatttacagggattttgctgcaacaggtgacaagtcatttggcaaggatgtctggcctgcagtctgtactgctatggaatacatggaacaattcgatcatgatggtgatggtatgattgaaaatgatggatttcctgatcaaacttacgatgcttggacagttcaaggagtaagtgcatattgtggttgcctctggcttgctgcccttcaagctgcggcagcactggccggaagccttggacatgatgactatgctgagaggtgcatgacaagatttgtgaaagctaaaactgtatttgaagccaggttatggaatggttcacacttcaattatgacagtggtacaagttatagtagccgttccatccaggcagatcagctggctggacaatggtatactgcatcgtcaggtttgcctcctctatttgatgaggataggataaaatgcacgcttcagaaaatatttgactacaatgtgatgagggtgaaaggaggacgtatgggagccgtgaatggtatgcatccaaatgggaaggtagatgaaacctgtatgcagtcaagagaaatctggacaggagtaacatatagtttagcagcaacgatgctgctccatggaatggagcatcaggccttcactactgcagaaggcatttatactgcaggatggtctgaagagggctatgggtactggttccaaactccagaagcatggacaattgatggccattacaggtcactaatttatatgcgcccccttgcaatctgggcaatgcagtgggccttgtcgcctccaaggtcgatactggaggcgccgaaggtaaatacaatggacagagctcacatttctccaggcaccttccaatttctccaggatagcgttagaaagatgacaccaaaaaacggttgttttggaaacactgtaattaacttggattgctgatgtgacggtagcacttgtatctcgcactgtccaatgtatgtttacggagcacctcatttagaaaatgttgagtgtgaaacgggtgctatattctgttcagcctttgcagttatgtggtgtacctctctgatgtaaattgcatctcacagtgggccggactttgtaaattgttgtacagaaaacgtacatatgataatgccgtgttaccctgatattcatgacaccgtttaccacaaaaatctgtacagtttattgttcatatagtattttagaacgagtacttgtcagattggcgtaagacaatgtcctcttagcgctgtactcttgatggtatatatagatgtacatgtgaatgattt

SEQ ID NO: 44112 - DNA, 1466 bp, Zea Mays
gggataaccagataaaccgttgaagagagtctgagcgggtctcgccaaactgcgccccctctttcaattccttatccgcacagtcacacggtttaatcgaatggcttcgccgtcgtgtttcctcttccgcccccgtccgccgctgtgcagccgccgccgccgcagcagcagcaggtccctctacctcctctccaagcagagcctgcaccgacttccctcaccaagaacatgccgccgtccagtggcagagcagctcgtcctgcggtcgctgccgcccggtaacggcaggcggatgggggcgacgggcttcgcctgctactgttcctacgacaccgagaacggactgcccacgccttcaccggacaagggaaaaagctcggatgagtggccaatccttcgccggtgggatgttccatgggagtggccaacgatttctctcaccatggtggcatgtgcagtaagacagctttcttttgacagggatagctgagcaatctattttggagcaactaggttttcgagctggggagacaactctagatgagaaagcagagatactcttcttgggacaacttagcacgacggtagttgtacttggagttatatttggcatgaccaatacctttcgaccattctcagatgatatatttcgctatgaattcaatgaaccacttaagctgcaaaacggatggcttctgtggtctgcaatcggcctgtttgttgcaatagttgctattgctttagcaggtgctgcaatgacatttctgaatggtgaaacaccacagagagagacagactcgctggtccttttgttgccgctgattggctcgtcaaacatcagcactgcctgtttgctgggcatcactgggattttggcacccattctggaggaaactgtgtttcgaggatttcttatggtatccctgactatgtggtttcctactccatatgctgtgcttatgactgctgcagtgtttgcctttgctcactttacaccaggagaatttcctcagcttttcgtgcttggtgtggtcttaggattttcatatgctcaaactcgcaaccttctaactcctattgcaatacacgctgtctggaactctggagtaatattgttgctaacttttcttcagatgcaagggtatgatatcagggagattttgcaggcatcttgaagatttaacgcagttagattaatttcatcctgtgttttcttgtgtcagagtatgttattatcaaacacagtaaatacgcaatgatagaaatacattctttagaaaaccctttgccaaggtgtatttagaattgatgcataacatctaagtaaaaaacttagattttccttgaagtgctttaatatattactgtgctgtgtgaagttgaaatttagagctttagaagaaatcgtgctatgtataatcatttacttcaagacaatcaaataacagaagccagttctgtgataa

SEQ ID NO: 44113 - DNA, 2547 bp, Zea Mays
gcgccggcccacacttcaacggatccactcggcaccggaccatttgctattgggcttccttgttcgccggcccatcacttcatcagttcctgctctcctgtcgtcccccaattccaggtcgcctacaggaatactgacacgctgtcgcccccgtcgtgcgacgccgccggctgggcatcgccccggaactcctcctgaaggcccctcatcacgctcttgcaggttctggacggacgtgggaggccccgcggcgcccgtacgtatatctagcggcgagacggcaagctcccgccccatctccgccgcctccgctccccgtcgtccggctgcgctgttgctgctcatacggatcaagctcggctacacccgtttctgcgagcagatcagaggacgccatcgtcgggtcggtagggatgggacatgttcactccgatcaaaaggcgaagaaattggcgagtgagtctttctctctctctcctatcccgcgcctctgcttcgtcctcagccagccttggaagagtggccaagggtggggatcagcgactcgaagcacttgaagacgagatcaatggagcagaagggccgaaacgctaactgggatcgctggaacccaagagggggcggcaaccttctcctgtttgggggagaaatcgcaatctaagctggcgcctaaggactccacatgcttcgtcggaagcaaaagtggaccagctgggatcttcttctggagacggtagcactccagttatttgcgaacaaagagttataattccaaacgggcatggggagaagcttgttggtttattacatcgaacaagttcaaagaatcttgtgatcctttgtcatggattccaagccacaaaggatgacagcatcttggttgaccttgctgatgccatcacaaaggaaggaattagtgcttttcggtttgatttttctggaaatggggaaagtgatggtgaattccagtatggaagctacagaaaagaggcagctgatttgcgctctgtagtattacatttctcagaacagaaatatgacataattgctcttatcgggcatagcaaaggaggaaatgctgttcttctttatgcttccaagtaccatgatgtccctgccattgtgaacatttctggccgctttgcattagagcgaggtatggagggacgccttgggaagaatttcatgaggagaataaacgaagatggatacattgatgtgaagaataaaaaaggtctagcctttctttacttgattaataatacgtcatttttttcatgttaatcttattatgagtctgattcaatggactatcccttagttttctaatcaattagcacagggtcatcaaacaaatgcatgcgtctgatctggtgtcaatcttgaaactgtcaaaaactaaactataggctcggtgtttctgctcactctttccaagccaggacacatggcaatgcgattgtaaagaggatcatgcatcgcgttgttttggtggttgtgcaggggagttgcagtaccgggtgtcgaaagcgagtctggatgaccggctgagcactgataccctattctccagccgtgccataagcgaaggctgcaggatctgtacaggagcatactgaaagatgctggaacctcatcagacaataagttcacttctattgctcttagcaacttctttgctggtgctgctgccggatgtacaaccctggtcctcatctatccgctcgacattgctcacactcgtcttgcagctgatatcgggcgtacagacacccgccagttcagaggcatccgccacttcatccagaccatctacaagaaaaacggcatcagaggcatatacaggggattaccagcatcgctccacgggatggtcgttcaccggggcctgtactttggcggcttcgacactgccaaggatgtcctggtccctttggagtcccccctgtggcagcgctgggttgcagcccaggcagtgacatccatggcagggctcatctcgtacccactggacaccgtgcgccggaggatgatgatgcagtcagggatggaggtgcagatgtacagcagcacactcgactgctggaggaagatatacaggctggaggggatccggtcattctaccgtggtgcattgtctaacatgtttaggagcactggtgcagccgccatacttgttttgtatgacgaggtcaagaagttcatggacaggggtaggttgtaacagctatagaggggtttctttcacagaattttggattcgatatgggaagtgggattaggccaaaaggtgcaaggagcagcagctcgagcattttgtaactggatgctggtttcctcctgcttactaacctgctcgatgtaaccgagcctgaaggttctgactcgcgaacaatgcagcttgttcagttcacctcatctttacctcttcgaggttccacttatgggttgtttgttgcctgcacggaggggcctgcgccatagttaaacccataatcacgtacttcattcttttttttatttgtcttgttttagtttaaaaataaa

SEQ ID NO: 44114 - DNA, 573 bp, Zea Mays
tgacagacgacgtgctcagtccatgatacgtgggccacgcagttactcacaattactcccgcattactcgtacagtaactgcccatcaatgcagcatggattacggacatcaagactcccactgattactcatgcgttactctatcagcattagttgttcacataatgtaattattttgttatgctactgggcccgcatgtcgggcctcaacatccttgtatgtgcctcccttaaactataaaagggaaggcacacagcgttacagggacatactcaatacagtttacacatagtggaggtagggtattacgctccggcggcctgaaccacactaaatcctcatgtcctcgtgtgttcatccaccttccaacagacaggcaaaccgcttaggcccctcctcatcttaggattagggcgggtgtgttccaccacccggcccgtggatttctcccaactgccatatctgacatacggtttgtgtgccggacctcgagtgcggaaggagcgaaccgtcgcgcacgcctgtagtgcgcctccttggagccgctgcggaagacagaaggtaatatttt

SEQ ID NO: 44115 - DNA, 2484 bp, Zea Mays
gtggcacgtaccctcctggcaaaggaccgcctaaaagtggtggtgtgccgtcgggtggcacggacctgttcatgcagtggatgatccgtttgaatgatagacatatgcaagagttacgagaaacatatgtcgtgtggttagagatcctcagctgagtaaatcgattcggatcgccgttatatccctggagagtggagacttgatctccgacctacaacctaagtcaggatgcaaacattatgaataaaaatgatgttgtattgatgtgatggtgaaattagactagatgcaaccagagtctcttaatatttaatctggcgttaaaatattgaaagtaaggactcactttagtaagctatttctgcaaaactatctaagttgattcttgctaaagccttttccttgattcctatttaaccagcatatccttgagagtcatttttccttagtcgggtaagacttgcgaaagtacactccgtactcagggttttcgaacccatgttgttgtaggtgatgaggagtactctaggtgttcctgtggctggagggcatttccagttctgaaggaagattagttagtcttgtgtataagctttggagggttcctaccttcctgctaatgtaataagttatgcacgttgagtatattaggacttttaataaatgtaactcttcctatgtaataaacttcaattttagaaatgaaaagaatgttttataaagtcttccgctcttatctccgaggtgtgtgtatcgaatgtgattactataatatgcatgtatggtgggagatccttgggatgatgagttcaagttgttgaactcgtgatagccttgttgagttacctggtacatgtgcttagccatttgaggccatcgaggcaaggattggtgcatgtgggcccgataacttgggagggttgccacattgagcactcttagatattacttcgaccacaccaacctcgcccttctctctcggctcttcattcattccatgcctccccactcatgggcaacagtggcgtgtgaaggtgaggatgagggcggcctaggcacatagacacctcctcaacggtcctcggtggctagagtacaaaactgtggccactcactaccagaaacaacttctttgccgagtactttttatcgggcaaagaaaagtcactatcacggcgactggtaacggcgacggagcctgtgccgagtgccctcctagtaatagttggcaaagagttcccctttgccgagtgtccactgtactgacactcggcaaatatgctctctgtaggcccctttaccaggttctttgcggcaaaggctccctctttaccgagtgtccgccggactagcactcggcaaagagatcgctagcgggcccctttgtcagtagctttgccgagtgtactaggaggcactcggcaaaggtcgcttctttaccgagtgttgtggtcttggcactcggcaaagatactttaccggtgcccaggtgtgccttctttgccgagtgctatgacctttacactcggcaaagtaaccagcataccccttttttatttgtttttgctattcaatccaagcaaacaaaagatatcacataatcatcgcagatatcacatatacatcacatatctcacaaagaccataaatctcataaatcaaacaagatcgaacacaaacataagtatccaacacttaagaacataagtctcaagtatctcacaaagcattaccaacatcaacaagttcagatcaagttatctcataaagtattaataacactaacaaagatatatcatgtgcacaaagtatctcatcgaggtggacggctggactggcccgacatcacggagattccacaagacctggtggggcttcccttgtgttggacgtggttcgacaaaggctatcgtaggcagggcaaagccaaatttgagattgggaagaccaataaaattagggggctgctgagaaggtactttgcactatttataaggggattagctaaataatataatggctcctatggaattagcagagcattggggggacattgcctccgtgcccctgtctttgccaatgatcttaggataatgttcaaggggttgttcatcgaagtctaaatccagtctaccggcatgacatcacattgtcttcgcatagatctggccccatgagcgttgggtgccattgtctcgattactcttaaacacttctgtcagtttagttttcatttcagtcttatgtcatcgttttagttttcaatcagagcatggtcatgtctatcagtttggtcatgttggtcattgtaatatctgagatgcagacattcacattgtgagcgagttcataactggtagaaagtttcagatgccctgacgtgtgggatggtgcatgatttggacaagcgatcaaaactgttgtgtttaggtttttatcttgagtaatagagtaaaaatgttgctcagtttatgtagcaccact

SEQ ID NO: 44116 - DNA, 2348 bp, Zea Mays
ttttatccacctcgctttccttcacttggtttctaatacgcaattcgcggggaacccaaaaccctaatcctctctctccacgccgccagagagccgtgtgggagctcggtcctcggacttctgcatcgatctctgctatgagtgctatctaggtttctcagatgggtgacctcaaggaggttttccgctccctccaagaactcttccctgaggttgatcatcgtatactaaaggctatcgcaattgagcatcgtaaagatgttgattccgcggttgttactgttcttgatgaagtcatgccgttcatgacgggttcagctggagtggatggttctgttgggaatttgtcatctatggatggttctgttgggaatttgtttggtaatcacagcacacatgaagtgggaagttcatcatctgtttgtgaggcgtgatatatgtatcaatgagattgatgcaagtgtttactctgtgcaatacacttcttatggggatgtcaaaactggcaagcaagaaaacataaacaacacatatgtgggaagacttgcatcaatcgaaggggtcaatgagcaactaaatctacattcttatcctatcccaaatggtggtcaacatgatttgcttcccaaccttgatgtgctatcttcaaataccgatccagagaaaacgttggccaacacagataatgaagttggatacagtggattatttagtgaatgtttttcccaaccaccgacaggggaagatggtggtaatatcatagccccacaaccctgtgatcaagatcctaatggcatgattccagttggggattactttccacagaacagttcaatggagttcttcagtggctatgaggactacaattttgatgacggccttttgcctattggttctaatgatcaaatatcttttcgaattttgggtactgaaaaagatccttttgcgcctgtgctagatgttcctggtcgagataaagaagaatcatccactgagacttctggatttatagaatcctccaataatgttgcagatatgcttcctgatcttaatctgaaccattttacttctacggcttcaactcactcaaaccattctgttagtattgagtctcttgaggattctgttgctgatgccagaagcaataaggaacgtgctgcccatgccgtcgtcctgatgctgttgctcggatttgaccgcagacgcctccaagtccaagaatgatctgttaccttctatagaattggttacaaaaatgatagaggatgttgagcttctagaagaaaaggctaaagtggccaaacatgaattgtccgttgctgggacaggcattctggcaaaagttgaggagctcagagaaatgataacttatgcgaaggaagcaaatgatatgcatgctggtaaggttttaggcgagaaagctattttaaccacagaggcacgtgagcttctatcacgacatcagaggctttcggatgagaggaataaatatctggtgataattgaagagatacaccaaattcttgctgaaagattggttgctgcacaacaagaaattgcagcagctgagaaagaaaatgctgaaaaggaggctgctgctcaggcagtactcgatgaacaggaaaaaatgatgaattctatcgtagaagaatcaagaaagctgcagaaagaagctgaggagaacctgaagctgaaggaattcttggttgagcgcggtcaaattgttgatatgctgcaaggtgagatggctgtgacatgtgaggacgtttcgttgctcaagcgagtggtagatgagcgcctaccgttgagcaagttgcagcgctcagctatgtcgagcctctcttcttcactgcattcttctcatcacaagagctggacttcctcggataaagccattagatctccagataagcacacccttgctgaacctgcaagcccagtggggaaagatctggatggcaacgagtgcaccgtggaagtgtcagatggcaacgacagtggtgaaggcattttgaagcgcgtggattccaaggaggatgtcgatggatgggagctttgctgaagatgttcaggaatagcggcgttgccagaggatgctgaagcataaactaacaataattgtgtataaacgcatactagcacggtgctaatctaatcgttttcacatgaatcgggaagtctcgctggctcaccacagttgtacgtgagatgagtccaactggcaactgcagcttgatgtggtatatataaaagtgaaggtttcagctcccttactgtccaaattttatgtcgtttctaattttgttctaggttaaatatctgacttttactatgtcttctaaaaatat

SEQ ID NO: 44117 - DNA, 1300 bp, Zea Mays
gtccaggctgcagaccttatccaccaacctccggtccacggtgactggccgcaagctcctcctctcccgcaaacacccacgcccactccattgctcctctcctccaacatcgctcacgcggtctcctctccccgctcagctccgctccgctcccggagacacgcaagcttcccgttcccgggaacgcgcactaaagatgcctccagccttcgccgccgcaccttcctcctcgatatgtggcgttcgcatcccaactgtgcgccgtttcgaagcgcaaagcacggtttccacgcccagatttatgcgtaatcgggtggcagcaaaaacacggtctacatcagcttggtccttgaaggctggcttgtgggattctctcagatctgggtaaaccttttgaagaataatagcagtacagagacagtagagccaccaccagcaccacttgaagtggaagagcctttgcctgtggaaatagtactcctagaaagaacactacctgatggaagcacagaacaaattttattttcttcagccggagatgttgatgtatatgatctccaagccttatgcaataagaagttatttgacagagggagaagagaagaaacagctcattgggatggcacgagcaacctcagaccatgccttcaatgcaacgatttgggatgtccttgttgatccttcataccagggtcagggtcttggtaaagcactcatggagaaagtaattcgtactttgctccagcgagacatcaacaacattacactgtttgcggataacaaagttatagatttctacaagaacctggggttcgaagttgatcctcaaggcatcaagggcatgttctggtaccccagattttagcaccagcagccagatatatcgttcgaggggttgttgtacttgaagcatctccccgttctgaaagggtaattgacaggtcagggctccacgccctgatggatctcgcacttaatatttcatccttggtgagaagctgtaattttcttcaatgctaaaacgaccatgtgatcggctcaactctccgcacccctgttgtaaccataaccccaacaaaacacgctatttgtaatacccgtgtttcatacatgcgctctagactcttgccatctgtatgtaacgtacgctttcaaatttctacattcgaaatggaaaaaaaaactgtatccatcagttatccatatgcgcacaccatcagtttttactgtctcttggaaagaatttgctttccatcaacatccacttgctgttgctggaactgtaacttaagttgagtcg

SEQ ID NO: 44118 - DNA, 1969 bp, Zea Mays
ttgcttgcaagtctgaagctcaagctgaagctgctggagcagatggattgcggaagtctaaatctgattctaaagctgtagcaagtgttcttgctcctccaaaagatgtggtggacctgcaagtagaaggatatggaaatgtgaatattttcacatatgacgaattaagagcagccacaaaaaacttccggccagatcaaattcttggagagggtggatttggagttgtttacaaaggtgtaattgatgaaaatgttagagcaggtttcccatcgagacaggttgctgtgaaagaactaaacccagagggctttcaaggggacaaggagtggcttaagtcaactatcttgggcaacttagtcatccaaatcttgttgaattgattggctattgctgtgagggttcacatagactgcttgtctatgagtacatggcttgtggaagcctcgaaaagcacctttttcgccgggtttgccttaatatgccatggtcaacacgcatgaagattgcattgggtgctgcaagggggctcgagtaccttcacggagctgagagatccatcatttatcgagatttcaagacatcaaacatcttgctagatgcggattacaatgctaagctttcagactttggtctcgcaagaacaggtcctagtggagaccaaacccatgtgtcaactcgggtcatgggaacttatggatacgcagctccagaatatgtcatgactggccatctgacggcacgaagtgatgtttatggcttcggagtggtgcttctagagatgattatcggaagaagggctgtggacaagagccggccaagccgtgagcataacctagttgactgggcacggcccctcctcgtccataacaggaagctgttccgaataatcgatccgagaatggaagggcaatactccaccaaggctgccactgaggtggcaagccttgcataccgctgcctgagccagaaccccaagggacgaccaaccatgagccaagtcgtcgagacctttgaggccgtgcagaacatgcctgaatgccaagacatactcctccagaacagcatcacaggtgccgtgacgctctatgaggtccccaaggagcctgcagacagagttgagctggagaaggccaagcaggaaccggcagtaaagagcgccgcgatgccgcccatgaacggaaagccagtcccccagagcaggcggacgcggcctgggaatggccggagcaagagcgagccatcgttggagtgcaagatgtacatcccgtcaccggactctgatggacaccagctcggcctggaggcagtcgcatccccagatggaagcataagggaccctcctgatgaggatttgtacaagatataacaccagggcagtttttcttcaacaacgaggggcagatctggcgcagtgttgagttgtgggttttcaaaccagcctcttcgcatttagggaggaagatttgcatctgtttatctctttctcatacctcatttacgtgggagcctcgatctgcctttttaacgtgagcccgcgttgctcacctttggcgccgccactcccgttcttaaagatcaatcagctgtaattttttctctgatggccactggccacggtagcgttcatattcttccgattagcaattgtatgtagaggagagttgtgatggaaagcatgtgtgtgtttgccatgacgacgctgtaaaaacctgaaacacttatttctaggggggtttccactccaaaatggaagtggagagatgtgtcctgataattggtgccgttacccgtgtgttgagtttttacccccctccacaatccccttctttcaaacaaggctggtttggatccatgggcaatcaccatgccctgaagaacgttgcaatctggaacagttctgcgggaaatcaacaccaccatggaaattgatactccaaacctgatgtgatgaaacacttatttctgc

SEQ ID NO: 44119 - DNA, 1752 bp, Zea Mays
caggacgtcatcttctccatgcttcttctcaccgtacgcaggttctagatagtctgagctccccacaccatcccctctatcgatgagcaagccaagcttgctggtgcagccgagtagctcgctctctccccctcaagctcatatctcacgcgcgcccctgctccctgatttttcttgctcgtctccatggccatcgcaccccctggtggttgagctcgccaagctccctctcccgtggtgccctggcctcgctggatccgtcgtctccctcatcgtcttcttccccgccggcaggctatgcgaacgtcaccacgcatctctggtgctcgcgcccagcccggtttccagcgctctccctgccgcagctctcgcccgtcgtcctgcctgctgagctcgccccagcctcctgctccctccagccctaccatggcgctcgcccctcgctgcttttccctctcgctggacgcacaaccttggccctcatttcgccgttcgtcgagcccatctccgcccctctctgctcgtcgtcactgcagcgtgctcgcatttgtcgttgaaccccgttatccctgctcgactcccaagcaggctccctgatccgcgcccaactcgttgtgtcgttatgagctttttgcgctcggacatcgacatcgttacccgacaacatgtttgcctgtcaccacattatcttctgcatcacggctctgttggactccgtgtgctcatcgacaccaagttgtcgatctccgccaggtcatgcccctcctcttcagcatcgtcgtcactttttttctgttatgtcacaagcgttcgtggattggtacgttagatgatctcgtgatgcggaatacgacccaagtcgaccccaagatggtgtaacgggcaggttactccatgaggtgatgctggtggatccacctgaagacggataggctgaacaagtgcctattttccatccccttggcggaactgctgctgctgctgaggttgattgttccttgtagcgggagcagggaaatggatgggtgcttgatgctgctgcgatggcctgatggcccatcttcctgcctgctgctggaattccctgctctgattgtgggagacaatccgaaacctctggggtggagcttaagttgttgacattggtgccttcctcttcttttctgcccggttgttgaaggcctggacatactgcaacacagtgcaagttccctgagtcaatgccaagaactcattgagcttgcgatcttgaatccttgctggaatatggtgtcctctaaaagcagtcttgaactcctcccatgtcaccacatggtcagcggttaacatggcacggaaatggtcccaccatgtcctaacaggtccacgaagctgctgtgcagcaaagtgggtctttgcgtcgtcaaggcaatctcctgtgaggagtggaaactttgactccataacccatagccacacatctgcgtccagaaggtcctctgccttggtgaacaagggtggttgcgtgctcaagaactcctggtacgttgccgaggccggaggacgttgttgctggtctccaccatactgttgagggtggggttggcgctgcaccagctgtcgtagaatctcattctgctgagccatgagctcctgcatcgtggaagctggaggaggtggtgggggaatctgctcgttctacccacgacgctgcctagctgccatctgaaaacagaattttttgctattgttaccttgatccatgattccgag

SEQ ID NO: 44120 - DNA, 1539 bp, Zea Mays
ggcttggttccccgtgacgacttgccagccgcgctagatacacactcttcatcacccggagtcccggacggacgcacacgcatcgcttgcttgtcgttctccactcctcttcccccgctgctcgcctctcgattccgcctcatcgcgtccgcgaactccatgtccactgcgaccgcgaccctggccgccgcgcgatccccggctgtcgcgcttctcagcctgcgccgccgcgcacccgcggctgcccccattcgcttccccggtctccgcgtcggctctggttgccgtcacatagctatggcttccgcggcgcactcccgcgcccccaccgacccgcttcccaagggtgctgatttatttttccgggcagtaatctcgaacatggaaaaggtttatttgagcaggaatcctacagccaaaaccattctggagcttgtacgatcttatgatggtgatcacatttgctatgatcactttgctttccggacatttggggtcaatggttatggtataaactcactttctgattttttcactgattttggttatttacctcgcgaagaactcagatttccagctaaaaagcttagggcactatggttttccccgcccactaatgatggctactctggaactggtacatatggacctttgccaaggatattcatttcagaacttcttgtggatgagttgactactcaaagccaggaaattatacataaatacattaaaacttctggcaatggaaataatcatgctgctattgcaagtacatctggggagctaacatgggagaagcccatttattcagatttccagattttgtctagggaaagtgaatatgctgcatggactcttgttaatggctatgcactaaatcatgccacaattgccacccatcgcctagaatcagatatcagaagtattaataagttcaacaaatttgtggaggacaatggcttcaagttaaattcagaaggagggattctgaaagtgagtcctgatggtctccttcaacaaagttcaacagtagctgactcatcattgtttacgtttgctgatggaataactgaatctattcctcgatcatacattgaatttgctgaacgtctcctgttaccacagttcaaagatttacaagatgaagaggtgaaagaataccacaggcgtgatggttttgaggtgggcaatgcggacaagatattcgaaagtacatcgaaggatcagctgacgcggagatctgcatgaacagtgaactctagatctgcatatgaccccgtgaactctctagatctgcaaacaacccagtgtgcctcttggaagtgtgttggtgactgtgaaatgattgtacctacttgggtgaaataaagcatgggagtcaataaaaagtaactgtttctttattctacatctgttgaatccaaagagagaattagttactgtttcccttcctttggccctacaatctatcatcatccatatctgggaactttggcgttcgtgttccagaatagacatggcgtctgcactaaggacttc

SEQ ID NO: 44121 - DNA, 643 bp, Zea Mays
tcagatcttcttggacgcgttttaaagcgctagtcgtggggtacttcgacatccgaagtaaatcatcagatcttactggacgcgtggtgcataacgcaagtcataggcccttcgacctgataagttactgtagggtagacaacaaaataaaatattaaatattggtctcacccatagatgttgtaaacgccatatgattgtaagccgatctggtgacgatctgcgttgttgttgacaagtgtttccctaatgtgcaaatgctgtgatctgtgagaagggctgcttgttttgcggtggctgcaaaatttcttgacctgctggcggctggtcttgatttgctaacggctgatcttgatctgttggtgactgatcttgatctgctttctctcttttttcctggtaacagcggcttcttatttcttcttcttttttctggtcgcgtccctggcagctggcttcgagagatggttgacggtgctgattgcttacgggctgactcctggcggacagcggctgatctgctcctctctagcaacggcttcctgcagctagctttgcttttttttgcgtgtattttcgtctggctaatctctctggcttgatcgctcttcctggcggcgtcagttgcagctacctccttgat

SEQ ID NO: 44122 - DNA, 184 bp, Zea Mays
atccagccattcttgacaatcatttttagttggtggcattttgtactacattctacataacaacaccttgagtcccccgacgtgagtgcatatactatgtggaaactatgacagccacttttttgtgattaaaattatggcttgattccaatgtgttgcctctagcttttgccttacactatcc

SEQ ID NO: 44123 - DNA, 151 bp, Zea Mays
gattatgttagcaatctccatatatttcaatatctgttcggtgagcttttctatgactggatagacgtacctagaatcgaaaagacagttgtgtatcattatagaaaaaagaacaaacccatacaactatttcatacaaaaaaactcgacc

SEQ ID NO: 44124 - DNA, 2909 bp, Zea Mays
gttatcctcggtgtcgttacccccaccatggccatcgtgctgctggcccttctcctcttcccgtccgcctatgcccaaccatggtcagtttgcggcaacacgggcaactacacggcggccagcacctaccaggacaacctcagccagctcgcggcaagccttcccaagaaagcctcttcgaacacgagtcccctcttcgccacgggtaccgcgggtgcagtgccggacctggtgtacgctcttgcactctgccgtggggacatcaacgcctccgcctgcaaggactgcgtcaccataggcttcgaggacgcgcagcagctctgcgcgttcaacaaggaagccaccgtgtactacgatagctgcctcgtcagcttctccaacgaagacttcctgtcgactaccgtcaacggcaacgagaacgaggtcaccgtcctcatggacgcccagaacttcacggagagcgcggactacatcaggctcctcttgttcactctgctgaacgacacgtccgagtccgcgatcaacagcatcaggaggttcacgaccgcgcggatggacattagctccctgccgacgatttactgcgctgtgcagtgcacgcctgacctcaccgccgacgagtgcgccgcctgtttgcaagacttcccgcaggtgacgctccagtacctcgacgggcagcgaggaggtcgacttctcggggtgcggtgtaacatgaggaactgatggtggatatctttgtgcatggtgcgagagtaatgaattgggttgttggcaagttttacgatgcattattatcacccaaaaggggtaacttttcaagaattacaccacaatctagaaggttttgcttcatgtaaagaatttatgcatgacaggtacccatcatgatgtactctatctcatcggtggacatggcaacactatttttcttggggaaattccctgtatgccatcggaaaatatacttattccttgtgtgccactggccccacatgtcatacacacaaaaaaattacgtatataccactcagtggcacacaaggatgagtataagatctgatggtgtacagggattttttccatttttcttctagatgtgagatgcccttgacactagtgatttaacaagcatatgacaccctttggtagtgcttttcctattaatcttgaaacccgtgtaatccaaattgaaatagccaacaagttggaaactagctcctttaggacaccaaaggcaatgtttggtatgggtttaaggcaccaaaagaatttattaactacaactaactgaacctctttaggatttgtttggaatctagcacatatacacacactaaacattatgttaggcatagatacagtcaaatataacaagctactaattataaaatggttgagagtttgatcaattaatttatctcctcatctaggtcgagattagcattgatgtcttgattggcttacattgatccatgcatattgaacctcttggaaagatccttgttatacattttttttagagatagatatttggaatcactgctgacttttcatttattatgcgtaggacgcaaaggtaaactgtggattattggtatagctattccactggtagcaattctgctatgttcaacctttacctttctgtggctgaggaggccaaagaaaggagtgctgagttcgcaggacagagctggtgctaataggattgaagaaaacgccttggtttggacaattgaacagaagagttcagagtttactctttttgacctttctgagttactggaggccacaaaatcctttgcagaagaaaatagacttggacagggaggtttcggccctgtgtacaaggggcaattatcagatggtcaggaaattgcagttaaaaggcttgcttcgcattcaggacagggtttcacggagttcaggaatgaagttgaacttatagctaagctacaacacacaaatttggttaggctcttgggatgctgcattcaagccgaggaaaaaattttggtgtatgaatatttgccgaataaaagcctggacttctttatctttgatgaaagacaaagcagtttgcttaattggtataaacggcgtgccataattgaaggcgtagcgcaaggtctcctgtacctgcacaagcactctcggctgcgcgtggtacatagagaccttaaagctagtaacattctcttggaccaggatatggaccctaaaatttcagattttgggttggcaagaatctgtagctccaatgatgctgaaggaaacacaaagagggtagtcggaacatatggctacatgtctccggagtatgcctctgaaggcatctactcggtcaaatctgatgtgttcagctttggtgttctacttcttgagatccttagcgcgaaaaggaattcaggttttcaccaatatggagactttcttaaccttctcggatatctgtacagatcatggaggcttgatgagctttctgctgttctgcagacatggcacctgtgggagataggaagatggcttgatcttgtagaagcatccatttcgaaagagatgcatgaagcagaggctaggcggtacattaacatcgcactaatgtgcgtccaagaaaatgcggacgatcggcccaccatgtccgacgtagttgctgcgctaaatagtgagagtgtggttctacctgagccaaagcatccggcttacttcaacctcagagtatctaaatctgtggaatcagcagttgttgttgaggcgtgcagtctgaatgagatgaccatcacccaagatccccaaggcagataggtcttccacctgatttcgtttcgctggtcattattgtacatgataatgtggacgtgaatggctatccttgttccagctttgaaactaatcattatggtcttcat

SEQ ID NO: 44125 - DNA, 763 bp, Zea Mays
cttggacttccactataccgcacaagtggagatgattctgtaccgcaaaaggatctgatcatactgtaccaagctgctacttcacttcagtagaacaattgatcacacacaagaagttcagatcagaaaatgcaggctgtcgctactcccgtcaggttctcggattagtcaagggctgaccatggagaagagcacggtggtggtcagtatccctgttgttgtcatggccgagactgctgagatcgactacagctcgagcttctcggtgttcacaatggaggcttacgacctactcggtgatgacgtgtgcagcgcgcagatgtactcggaggccaagctcgcctcagtggcagcaacagtgagtaggagggtggagaaggtggagagggactacctgtcgcacgacaagccaagaacggtgttattgggcgaggcatgcaacaaccttgatggcgagttctgcgatgcgtcgtaccaggccggcatctctagggagctggcacacacctggagcctgatcctaattaccatccatgtttttccagaactgagttggtctcacagtcagatagatgttcacacaatgtacctatgtgtatcattctagcagatgaccaagcaagaccaagggtgtatgtaatgtatataggcatgtcttgggttggctcaactgccaatgtatgtagtagaaactaagatgaaatggtactagtgttattcaccgttttacgatatcagaagatggaacagagagctgtggaag

SEQ ID NO: 44126 - DNA, 1033 bp, Zea Mays
cataccattttgcacgatatctttgcagcaaaggctctccaatacctacaaatccttggggtagtacacagagatataaaacctgcgaatattttgctagacaaagatctccatccatatctagcagattttggcttagccatgtttcaaaaggatattaagcgtgtctcagttgagaactggaaatcatctggcaagcctactggtggtttccataaaaagaatatggttgggacactaatttacatggcaccagaaattttgagaaaggatatacatacagaaaagtctgatgtgtatagctttgcaatatctatcaatgagcttcttactggtgtggtgccctatacagatctgagagcagaagcacagcgttgctgggatcctgatcctgaaaagagaccatcatttgaagatataattgatgagctaaatatagttcaaaagcatatagtttcaaatgcttctgttccatcatctcctgtcagcaagactcaaaatggtaccatagaagtgcaccattatcaagaagcattgaactggttcaaccagggggagctttttgttaaaggatcaagtagatcagaccttaagaatctttggtctgattgttttgatcaatcttcagagtaccatccaacattaagttggggctcttttgcaacgtgtggtcgaagggaaaccatggaagacacccattttgtacttccccatgtgagcgaagaaaatgatgtttttgcctttggcatttttgatggccatagaggttcagcagccgctgaattttctgtccgagcagttcctggatttctcaagcaatttggtcagggtgcaagcccaactgacgctctttcagaagcgtttgtaaggactgacatagcatttcgagagaactaattctcaccggaagtcaaaaaggatattcaaaagattggcatcctggttgccacggcataacgcctgatagtgagaaaacaagcttttgtagcaaatgctgtggattgcgagcatccttgaccgtaagggcaaccat

SEQ ID NO: 44127 - DNA, 1881 bp, Zea Mays
aattgtccttctcgtaattattgccggcaattccgactcctctgacaatccatctaccacgcgcggccaaactcctgttcttccacctgctggctgctcctgcctcccctgcgccccaaacccacccgcctcgccgtccccgcaggccgcagcctgctctcggctcccgccgccgtctaccgcgtcctgcggctgcggtgttgcgtcacctcgggttcgccttaacttccacaatcctcgccgtcctggtgctccgccgcccctccctttgtactcgcgctggagctgcagatccaccgcgacctggcgaccaattcctcctcccgctgaagaattggcgaccttggcctccgcccccgcggcgcggaggagtcaactgtggtagcaaccaccgcggaggctgcaagccttcggtaagggaggaaagttgacttgttggaagccggtccagggccgcgatgacgtcgaccgccgccggcgcgtcgtcgtcggcggcgaagagcgagtcctacctgcgggccgacaagatcgacctcgagagcctggacatccagctggagaagcagctggccaagacctgggagaagcacaaggggtcgtacaaccaggggcccagggaggactgggagatcgacctcgccaagctcgagattcgctacgtcatagcgcagggcacctacggcacggtgtatcgcggcacgtatgatgggcaggacgtcgcagtaaaactattggattggggtgaagatggctttgcgtcagaaactgaaactgccacactgcgagcatcatttaagcaggaggttgctgtctggcatgagctcaaccatccgaatgttacaaagttgttggtgcatcaatgggtactacagaccttaagattccagccaatagttctaacagtggtgggcgcactgagctgccgccaagagcatgttgtgttgtggtcgaatatctcgctggaggatcactgaagcagtatttaataaagaacaggcgaaggaagcttgcatacaaggttgttgttcagatagcactggatcttgccagaggattgaactatctacattcaagaaagatagtacatcgggatgtaaaaactgaaaatatgctgctcgatacacagcgaaaccttaagattgctgattttggtgttgctcgtgttgaggctcagaatccaaaggacatgacaggcgcgactgggacacttggctacatggccccagaggtgcttgaaggcaagccatacaacagaaagtgtgatgtctacagttttggcatatgcttatgggaaatatactgctgtgacatgccatatccagacctcagttttgcagacgtctcgtccgccgtcgttcaccagaacctgcggcctgacatccctcgctgctgcccaagcccaatggcgaacatcatgcggaagtgctgggacgcaaacccggataagcgccctgacatggacgacgtggtgcggttcctggaggccctcgacacgagcaagggcggtggcatgataccagaaggccaggcaggcgggtgcttgtgtttcttcagagcccgtggtccttagaaccaaccaaccctttccagccatcctctacttgtctctgccctactacagtattggagccagatgtaggcctttgttgttcatcggataggggattgcagataacttgatgacaatctttgtgattggttgacacttgttatacgttctatagtgatgtgaataccagtgaggagtccataatacagagttatttcaaccagttcatggttgcatgctcttaatggtttgtttgtggaaatcacatactgggccatcattgattaactgggagaacatatgtgatacacgcattcgccatcgttttctcg

SEQ ID NO: 44128 - DNA, 781 bp, Zea Mays
taacattaaagcatcacatatacactcaaaaggggagaaaacatcaagcgaaattcattttgaaatgccctagggggccacacaattagagttttgcaaaacacgagtctacacgattacctctcatacatgcagggctttggccaaagtgaagaaaaacttcactacccaatgcacgcagaggactaggtataactaacttcagaccaggcagcttctcttctggcaaggctggcgcacaacttcaatctgagatatctcctggatgggtcaagagggagctgatgttgatgacttcttctggtggagattgagatggcaacacggggtcgaactcttcttcaaccgggactggctcttgtagctcctcagagggcgacggtgctggcggggtgcttgcagcttcttccttgacctcaagggacggtgctggaatcttcttcatggtgaggggctcaaacaactctagcgggggatcttgggaggattcagggtgctcttgcttatccatagccttagggaagactggaattccttccaagactatggttccttctggtagttcccaatccttcttctctcctctgatagagaccgggtgaccttcaagaatctgggggatcttcagctcttctggggttgaactgggttggacgaagcgggctcttggatccgcagggctctacgttggttatgggttactatggcagaacctcccaagttattgggcccacatgcacctgtccttgtctcaaagacctcagactgctatgcatgtgca

SEQ ID NO: 44129 - DNA, 144 bp, Zea Mays
ttgagttattttattacagaccagagctaaaagtgagtgcagagtagtaatattatacaaaccaagggaggcacaaactcctcccgataagtttaagcaaaagatcctatgtggaggaccaagtcctcccgctcttcaatcttg

SEQ ID NO: 44130 - DNA, 2135 bp, Zea Mays
gcgcgcgtgtagggtcgcaagccgagccaaaagcagctgcactgcagaccgaccaccacgcgacgctcctgctggctgctgccgcggaacccgggacaagcgacctcctccacctccccagctagctatagcttcctgcttgcagctgcaggtgccagccgagccgcctaccgggtacagccgcacaggcaggcggcggcatgcgctccagcctccagcagtgagggagggagctgtcccgctcccgccccttctacttctacccctccccccccgcgggccgagagggagtccgcccgccggcgccgcgcgactcaccgatgcccagccatgaggcctgctgcggcaccatgttctgggtgtacctcatgtcctgcgtcggcctcgtcgtcttcgccggcctcatgtcgggcctcaccctcggcctcatgtccctcagcctcgtcgacctcgaggtgctcgccaaggccggcacgcccaaggacaagctcaacgccgccaggatcctccccgtcatgaagaaccagcacctgctcctctgcacgctcctcatcggaaactcgctcgccatggaggcgctgcccatattcctcgacacgctcgtgccgccctacgtcgccatcctcatctccgtcacgctcatcctcgcgttcggggagatcatgccgcaagccatctgcacgcgctacgggcttagcgtgggggccaaggcggcgcccgtcgtccgcctactgctcatcctcttcttccccgtcgcctacccgatcattgttggaccgcctactgggaaagggacattttgcactaatgagaagagctgagctgaagacgttagttgatatgcacggcaatgaggctggaaaaggtggagagctcactcgtgatgaaacaactatcattacaggagctttggagctgactcaaaagattgcaaaagatgccatgactcctatatctgaaaccttctcacttgacataaatgctaagctggacttacacacaatgggtatgataatgactagagggcatagtcgtgttcctatatactctgggattccaagcaatattattggccttatattggtaaaaaacttgattacttgccgagctgaggatgaagtgcccattcgtaatgttactatcagaaaaattccaaggctcatccccttcttatgctaacaacactgctggaagtcgtagatttaacatagagaagcatggagacgggcgctcatgtaataagaaatcagaaaagaagcgggaaaatattcttgattttaacacagatccacttccaagctattcaatggatgaggcggcagtcggaataatcacgatggaagatgaagaaatctatgatgaaacagatgagtatgttgatgtacataacaagatcaggataaacatgttacctccaggcaaagcactgtcacctaccatatctcctggtggtggacccttacctcaggggctccgaaagactcctatgacatctccgttctcaccatactaccattgtaattcagtgttacgttccccagcttccaaccattgtcagtcacctgggactctaccgacaatactttcccctggaagatcacctactgcacaaacacctgggcaaagttcaccaaatggaagtcaggtttcaataaattccaacggtcaacataaaaaggacggtgagaactaacataccagaagattgttttccagacggtctcgtctcaagacgggatgcatgattaaaaatcatgaaattgctagcgtaggattaagctgcgaatataagtagcacagctctcttgaatggttagtggcccatgtatttattgattgtttgcttgtacatatatgcttcggcatccggaccttagtatggcctaatcctcactatgtatcatacataggaagtgaatggaagccaatataattttgctctagacaattttagcttgctttctggacccttatgtaagccttcaagatagtgaaaatgttaagtgagtagctcacgagctaaataatggctagatattctcggtaatgaccaaaatcgatcaagtacaacaccaaaagcaaataaaataaaaaacaacgctctcaattccaatcaagatgaaataagagcgaaa

SEQ ID NO: 44131 - DNA, 1370 bp, Zea Mays
cccacccatcatccacatcctccagagaaaccggcgagcggggcttcctggaagctgccgttgacccccgacccggaggcataactagggtgtagggggggcggcctgtagtgtagcgcccctcgactcccgagcagcaaccaaccagcaaccgagccagccatgtcgcccacccctgcaccggccgcccgcgccggcgaggagctgccgtccactgaggtggtggtggtccggcacggcgagaccgcgtggaacgcctcccgcgtcgtccagggccaaatggacccggagctgaacgaggccggcaggcggcaagccgtcgtggtggcccgccggctgtcgagagaagccaagcccgccgccgtgtactcgtctgatctgcggcgagccgccgagaccgccgagaccatcgcgagggcctgtggcgtatcaaagtggtgctgacggaggcgctccgcgagaggcacatggggtacctgcagggcctcaggtgggacgccgcggtggacaagagcccggactccttgcacatcgtcaaggtcatcgagggctctgaccccgacagcagaaaccaggagctgcccggcggtggagagagcctgaaccagctgaacgagcgttgcgtctgcttcctgaacaagatcgcgcaagaacacgccggggagcgggtggtggtggtctcccacggcgcagcgatactggagctctgccggcacaccgacccgccgggcagctgcgtccgcaggcacgtccccaacacctcgctcagcgtcttccgcgtctccgccgccaccgggcagtgggcgctcgagaggtgcggggacgtcggccatctcaagggagacggagacggagacagcttcctggagggctcgttcgggggcgacggggcctcggcgtaaacgtacgtacaggccgatcagccgagagctcgcaccagtcttcctttggatcgaaccattctttggttccgatgctgtttggagcttgtattccattgtttttcaaaaagagaaccaaccattggagtttgaaacgttgatcaatttgtggtttacagccttttgctgtagcgccatgcatggcgtttgacaaaactgcggtatctctgagaaaactgtcttcaaacagcgtgatgcatagctctatcaatctgtcattgcctactgtttgcccctatgttcttaagtcaagactccagagcaaccgctgctcccttgctcgcacgattgaagaatgaaaattaaacattgagggcaagtggattttatctctcctgccccctttagcattcttgctcccaaacaagccataaaattggatgggtcacactagtgatgacaacggtaccattccatatccgtacccat

SEQ ID NO: 44132 - DNA, 3050 bp, Zea Mays
tttcaggaatcctttttaatttgtagctttattgggtttcgatcttgcaacctactccctccgttcttttttatttgttgcggtttagttaaaaatgaactagccggcgacaaataatcgagaacgaaggtagtataacattattctcacaaggatttgatgttgcaacctctagcattgatgctttgaactgatatactagaaaataaaaactctacactcattctcacaaggaacaagactactcaataattgacaatctgctgttacagctgcaattactaattttcatattgttcaactgagttgttcggtttggcagtcaaaatgcagcttaaaactctaatgactcttttccttgtctaatgaagctgatccatggaccaagatcaagacacacatgtttgaaaccacagcataggatggtgagcccaattgaagggctgctggataggcagaatccaagatgcaaaagcactcatggcctggtgtcccttgcacgcagcttcagcgaagctgcctatctgacatagatgaaattgttattgtctgctaaccatgttcaaagtgttattaccaattaagaatcagtggcagctagatgtcttgagacaactactttataccatacgcaacaatcaggagtccatcccaaaactgagaagatattcagtagcactggattttttttattatatgcgctcatggtagatgacacatgagaggtgtccgtctgtctgtcagttcttgattgtgataattttgaaaggcaatctcagggattttttttgttcaatcatggccagtgtgaattaaaataatgtactcattttactaatagagaggcgtccaatcaacgttaggttgctccacgcaagttggaatctttcttgtctgtacatgtgaagtgacttaactaatttatacaatcaacgttaggttgccaaattgtcactaaaccaaacggtacggtataattgtttttctgacttgttgccttgtctgtgcccccacacgcctctccacacacacacacacacacacacacacacactgctgcataactcttcttgtggcctggtctctgcccctttggctataaaagtagacttggcctcccgcccctctttgcacgagcacaactctgttttcctaatccgccttctggcgttataaggggtcgggctatgctgtaaaaaaagtgatcttagtgctatggcatggaattgaagatctgatctagctagccaggtaactaactaaacttgtttaacataagtttcatcttcaaccttttttctcatttagttatgcatgagcatatatagctagtactatgatcttgtcaccttcacttgtgaatctttcagcttttttttttgaagcatgtgtagttgtgttgatgatctcatagatcccatgtcacagcaaggacagtatggataaagccctcttagtttttttatcattttatcttttctgtttggtttcaattttttaatccttgtggaacataaaatacaagtcattataggtcttttttctgtcctgattgctgtgtgcttgatgagctattctagcttgatgaatatctgtatgtctttagtcttcttgcttccaaatgcacccaacctgtgtctgttgaagatcccaacataatttttttacaagatgccactagaacatgaacacttcgccagtgataacgtagcaagcagtaattatttctgatgagcaattgttggtacttcattcaactgatatttatgtgttactttttgtaggttttgcatttgggcgggggcagcaagctagaggcggcaactgcataacttgcgataaacttgttggaccatggtgtgctgatgattttaccgcaagttatgcagttgctgcctcaagcttgctgcctccctttgccaaacctgtaggaataagatgaagttcatccgtataggtatagaaaccttccatagccatgtatcctatatttaccatgagatgaaacagaagcaatgatgcaagaatgcaattttctccctctattctaaattgtagaccattttagcttttttataacatagcttttactatacaactagatataagatatgtctagatatataataaatgttatgtatttaaaaaagccaaaacgacctataaattaaaacagaaggaatataatctatcagattgttactcacctagctagctgctaatgtatggttgagttttcccccattgctgaaaaataatgaaatactaatgttgctgaggtttctatacgtaatattagttttgtgctctatacaagcagaaggtagtggaggatattgttttttattctttatgatttagtgattaccagatttacccaaagcatatattactatgttcagtaaaatatatacagtggtgtattattcaaacaatctgagctacgaaaaagagattagtagttaaaattattgtgtttcaaacctgtttatgtaatttcaaaatttaaaaggtgaaacataaaagtagattgtttttttaagtaaagattgtgtcagtgatgagaataggtaacttgaattaatgggccaatgcaaacaagaataagctcaatttactctagtgctttgaattgatgtataaggacatgtttgggatctctcaagtctcaacaagtccaaaccctaaacttcatatataccagctgtcaaaagcaaatcaactgcagcggctgtatggtcatatggacagctgccgacatgcaccatcaattatattcttcactggtcaaattatatactccctccgtttctttttagttgtcgttttttagttgtcgcgggatagttcaattttgcactatccagcgacaactaaaacgaaacggagggagtatgcccctgtttggttgggattctgggcggattctggccgccagaagctgaagccgcggccaaacgtctagcttctggaccagcttttgacggtcgcgcttcccacagaagccgcccgcgtacaggaaacgaaaagccgcccgacccacgcatcct

SEQ ID NO: 44133 - DNA, 1876 bp, Zea Mays
ctagccgagctcgcccaaccatttctctgctgatggttgatgcccctccagctactgctcgatgctgccctctcgatcccggagtctagcgctgtcccccctggtttcagccctcaaaccccagcgtcgatctccctcgtattgctgccggtttaccgtggaagaggaaagtccattcggcgcgctctaggtgtttggcaaaaagcttaaaccaaaaatcgtcatcgcccttacatatatcgatttggtttatgacatggttgtggaaactaagatcattgtaactcaaatgagagcttggcacttagcatatagacgccactagaaccaatctggaattactgtgaggagaaacagatatagagtgataaaggtattaatgtaagtactacataaatgtactactggaattactcgtggatacattggcttatctcaaggtagaatctttatacccagtggtttagtctgtggcagcatcgtcctatctagctccacatagtactgctagaagcacctagctaggtgagcaactagaattgtttttcacctatgtctaagtagctaggatgtaattagatggcgaggtctatcttaccgcgccgctgctgtcatcatcgtcatttagatctgaatatgtcaaccattcttggcccctaccgtttatggcaccacttcctttgattgtgattctggttagctttgtgaactccatgcattagagcaaaccaaaactccacgctcttgcactggtttcagccaaaatagttctgtatgtagggatagtgtaaaaattttggtacatgatgaatcattgaaagttattgagaattaattgtgaattgttatgctctattgaataaacataattgttggttagatgctgaaggagaagtataaaaattatctagtatactaatgctacgctgcaaaaggtaagcgctaaatttaaaatatattttcttttgttcctccattttgcataagtaacaggtttctgtcgctagttggtggtgttgatgtgaatcagcaagttcaatgtgtttgctgtttattacagaagtggataaggccgttagatgggctagaaaccactatctgtcatcaacagctcttccttctatcaagggagacaagttaatcattccccatgagagtctggatatatcaattgagaggctgaaggaacatggtataacaactaagaaatcctctcaaaatctgaagaaaattggggcttgccacatgagcatcagtcaaaggtgtttcatgttaagcatctagaagtattggctttatttgctctcccagcatgtgctatctgcttcttttgttctgatgttgtcctgcgctgaatattgttctaatattgcccagatttgcatattctaactttgctcatgtattttgagcacatgaacaaaaagagcagaacatgcgtattcatcctgttgaccctactgatcttcgcaggcttgccttaagttaatatgtcatcctgctgtctaatctgagcaaattctcagcagggagggcaggttgcaattcgttccactatcgggtacccaaacggccacagggtaaaggagccccgccgggcagcaccacacaggtgatagacactgcagtggccagcaagaatggagtcatggaacatcggcaggagggatgcagcagcggcaaccgatgtatcccttggacaatctggttttgacatgatgcaaatcaatctgttgtacattgtattttgcacttgcatagattgtttggctaattacaagattatctcagtgttttggtttggatttagagtacacttatgtatgaaatattgattggtattcatctatattatattaattatattattattaaa
